United States Patent Application Publication US 2026/0193644 A1 - sequence listing, part 2

SEQ ID NO: 2360 - protein, 2240 aa, Homo sapiens
MLPCKKRRTTVTESLQHKGNQEENNVDLESAVKPESDQVKDLSSVSLSWDPSHGRVAGFEVQSLQDAGNQLGMEDTSLSSGMLTQNTNVPILEGVDVAISQGITLPSLESFHPLNIHIGKGKLHATGSKRGKKMTLRPGPVTQEDRCDHLTLKEPFSGEPSEEVKEEGGKPQMNSEGEIPSLPSGSQSAKPVSQPRKSTQPDVCASPQEKPLRTLFHQPEEEIEDGGLFIPMEEQDNEESEKRRKKKKGTKRKRDGRGQEGTLAYDLKLDDMLDRTLEDGAKQHNLTAVNVRNILHEVITNEHVVAMMKAAISETEDMPMFEPKMTRSKLKEVVEKGVVIPTWNISPIKKANEIKPPQFVDIHLEEDDSSDEEYQPDDEEEDETAEESLLESDVESTASSPRGAKKSRLRQSSEMTETDEESGILSEAEKVTTPAIRHISAEVVPMGPPPPPKPKQTRDSTFMEKLHAVDEELASSPVCMDSFQPMDDSLIAFRTRSKMPLKDVPLGQLEAELQAPDITPDMYDPNTADDEDWKMWLGGLMNDDVGNEDEADDDDDPEYNFLEDLDEPDTEDFRTDRAVRITKKEVNELMEELFETFQDEMGFSNMEDDGPEEEECVAEPRPNFNTPQALRFEEPLANLLNEQHRTVKELFEQLKMKKSSAKQLQEVEKVKPQSEKVHQTLILDPAQRKRLQQQMQQHVQLLTQIHLLATCNPNLNPEATTTRIFLKELGTFAQSSIALHHQYNPKFQTLFQPCNLMGAMQLIEDFSTHVSIDCSPHKTVKKTANEFPCLPKQVAWILATSKVFMYPELLPVCSLKAKNPQDKIVFTKAEDNLLALGLKHFEGTEFPNPLISKYLLTCKTAHQLTVRIKNLNMNRAPDNIIKFYKKTKQLPVLGKCCEEIQPHQWKPPIEREEHRLPFWLKASLPSIQEELRHMADGAREVGNMTGTTEINSDRSLEKDNLELGSESRYPLLLPKGVVLKLKPVATRFPRKAWRQKRSSVLKPLLIQPSPSLQPSFNPGKTPARSTHSEAPPSKMVLRIPHPIQPATVLQTVPGVPPLGVSGGESFESPAALPAVPPEARTSFPLSESQTLLSSAPVPKVMLPSLAPSKFRKPYVRRRPSKRRGVKASPCMKPAPVIHHPASVIFTVPATTVKIVSLGGGCNMIQPVNAAVAQSPQTIPITTLLVNPTSFPCPLNQSLVASSVSPLIVSGNSVNLPIPSTPEDKAHVNVDIACAVADGENAFQGLEPKLEPQELSPLSATVFPKVEHSPGPPLADAECQEGLSENSACRWTVVKTEEGRQALEPLPQGIQESLNNPTPGDLEEIVKMEPEEAREEISGSPERDICDDIKVEHAVELDTGAPSEELSSAGEVTKQTVLQKEEERSQPTKTPSSSQEPPDEGTSGTDVNKGSSKNALSSMDPEVRLSSPPGKPEDSSSVDGQSVGTPVGPETGGEKNGPEEEEEEDFDDLTQDEEDEMSSASEESVLSVPELQETMEKLTWLASERRMSQEGESEEENSQEENSEPEEEEEEEAEGMESLQKEDEMTDEAVGDSAEKPPTFASPETAPEVETSRTPPGESIKAAGKGRNNHRARNKRGSRARASKDTSKLLLLYDEDILERDPLREQKDLAFAQAYLTRVREALQHIPGKYEDFLQVIYEFESSTQRRTAVDLYKSLQILLQDWPQLLKDFAAFLLPEQALACGLFEEQQAFEKSRKFLRQLEICFAENPSHHQKIIKVLQGCADCLPQEITELKTQMWQLLKGHDHLQDEFSIFFDHLRPAASRMGDFEEINWTEEKEYEFDGFEEVALPDVEEEEEPPKIPTASKNKRKKEIGVQNHDKETEWPDGAKDCACSCHEGGPDSKLKKSKRRSCSHCSSKVCDSKSYKSKEPHELVGSSPHREASPMPGAKEAGQGKDMMEEEAPEERESTEATQSRTVRTTRKGEMPVSGLAVGSTLPSPREVTVTERLLLDGPPPHSPETPQFPPTTGAVLYTVKRNQVGPEVRSCPKASPRLQKEREGQKAVSESEALMLVWDASETEKLPGTVEPPASFLSPVSSKTRDAGRRHVSGKPDTQERWLPSSRARVKTRDRTCPVHESPSGIDTSETSPKAPRGGLAKDSGTQAKGPEGEQQPKAAEATVCANNSKVSSTGEKVVLWTREADRVILTMCQEQGAQPQTFNIISQQLGNKTPAEVSHRFRELMQLFHTACEASSEDEDDATSTSNADQLSDHGDLLSEEELDE

SEQ ID NO: 2361 - protein, 731 aa, Homo sapiens
MDTSGHFHDSGVGDLDEDPKCPCPSSGDEQQQQQQQQQQQQPPPPAPPAAPQQPLGPSLQPQPPQLQQQQQQQQQQQQQQPPHPLSQLAQLQSQPVHPGLLHSSPTAFRAPPSSNSTAILHPSSRQGSQLNLNDHLLGHSPSSTATSGPGGGSRHRQASPLVHRRDSNPFTEIAMSSCKYSGGVMKPLSRLSASRRNLIEAETEGQPLQLFSPSNPPEIVISSREDNHAHQTLLHHPNATHNHQHAGTTASSTTFPKANKRKNQNIGYKLGHRRALFEKRKRLSDYALIFGMFGIVVMVIETELSWGLYSKDSMFSLALKCLISLSTIILLGLIIAYHTREVQLFVIDNGADDWRIAMTYERILYISLEMLVCAIHPIPGEYKFFWTARLAFSYTPSRAEADVDIILSIPMFLRLYLIARVMLLHSKLFTDASSRSIGALNKINFNTRFVMKTLMTICPGTVLLVFSISLWIIAAWTVRVCERYHDQQDVTSNFLGAMWLISITFLSIGYGDMVPHTYCGKGVCLLTGIMGAGCTALVVAVVARKLELTKAEKHVHNFMMDTQLTKRIKNAAANVLRETWLIYKHTKLLKKIDHAKVRKHQRKFLQAIHQLRSVKMEQRKLSDQANTLVDLSKMQNVMYDLITELNDRSEDLEKQIGSLESKLEHLTASFNSLPLLIADTLRQQQQQLLSAIIEARGVSVAVGTTHTPISDSPIGVSSTSFPTPYTSSSSC

SEQ ID NO: 2362 - protein, 690 aa, Homo sapiens
MPYLYRAPGPQAHPVPKDARITHSSGQSFEQMRQECLQRGTLFEDADFPASNSSLFYSERPQIPFVWKRPGEIVKNPEFILGGATRTDICQGELGDCWLLAAIASLTLNQKALARVIPQDQSFGPGYAGIFHFQFWQHSEWLDVVIDDRLPTFRDRLVFLHSADHNEFWSALLEKAYAKLNGSYEALKGGSAIEAMEDFTGGVAETFQTKEAPENFYEILEKALKRGSLLGCFIDTRSAAESEARTPFGLIKGHAYSVTGIDQVSFRGQRIELIRIRNPWGQVEWNGSWSDSSPEWRSVGPAEQKRLCHTALDDGEFWMAFKDFKAHFDKVEICNLTPDALEEDAIHKWEVTVHQGSWVRGSTAGGCRNFLDTFWTNPQIKLSLTEKDEGQEECSFLVALMQKDRRKLKRFGANVLTIGYAIYECPDKDEHLNKDFFRYHASRARSKTFINLREVSDRFKLPPGEYILIPSTFEPHQEADFCLRIFSEKKAITRDMDGNVDIDLPEPPKPTPPDQETEEEQRFRALFEQVAGEDMEVTAEELEYVLNAVLQKKKDIKFKKLSLISCKNIISLMDTSGNGKLEFDEFKVFWDKLKQWINLFLRFDADKSGTMSTYELRTALKAAGFQLSSHLLQLIVLRYADEELQLDFDDFLNCLVRLENASRVFQALSTKNKEFIHLNINEFIHLTMNI

SEQ ID NO: 2363 - protein, 946 aa, Homo sapiens
MAVYCYALNSLVIMNSANEMKSGGGPGPSGSETPPPPRRAVLSPGSVFSPGRGASFLFPPAESLSPEEPRSPGGWRSGRRRLNSSSGSGSGSSGSSVSSPSWAGRLRGDRQQVVAAGTLSPPGPEEAKRKLRILQRELQNVQVNQKVGMFEAHIQAQSSAIQAPRSPRLGRARSPSPCPFRSSSQPPGRVLVQGARSEERRTKSWGEQCPETSGTDSGRKGGPSLCSSQVKKGMPPLPGRAAPTGSEAQGPSAFVRMEKGIPASPRCGSPTAMEIDKRGSPTPGTRSCLAPSLGLFGASLTMATEVAARVTSTGPHRPQDLALTEPSGRARELEDLQPPEALVERQGQFLGSETSPAPERGGPRDGEPPGKMGKGYLPCGMPGSGEPEVGKRPEETTVSVQSAESSDSLSWSRLPRALASVGPEEARSGAPVGGGRWQLSDRVEGGSPTLGLLGGSPSAQPGTGNVEAGIPSGRMLEPLPCWDAAKDLKEPQCPPGDRVGVQPGNSRVWQGTMEKAGLAWTRGTGVQSEGTWESQRQDSDALPSPELLPQDPDKPFLRKACSPSNIPAVIITDMGTQEDGALEETQGSPRGNLPLRKLSSSSASSTGFSSSYEDSEEDISSDPERTLDPNSAFLHTLDQQKPRVSKSWRKIKNMVHWSPFVMSFKKKYPWIQLAGHAGSFKAAANGRILKKHCESEQRCLDRLMVDVLRPFVPAYHGDVVKDGERYNQMDDLLADFDSPCVMDCKMGIRTYLEEELTKARKKPSLRKDMYQKMIEVDPEAPTEEEKAQRAVTKPRYMQWRETISSTATLGFRIEGIKKEDGTVNRDFKKTKTREQVTEAFREFTKGNHNILIAYRDRLKAIRTTLEVSPFFKCHEVIGSSLLFIHDKKEQAKVWMIDFGKTTPLPEGQTLQHDVPWQEGNREDGYLSGLNNLVDILTEMSQDAPLA

SEQ ID NO: 2364 - protein, 160 aa, Homo sapiens
MAFTFAAFCYMLSLVLCAALIFFAIWHIIAFDELRTDFKSPIDQCNPVHARERLRNIERICFLLRKLVLPEYSIHSLFCIMFLCAQEWLTLGLNVPLLFYHFWRYFHCPADSSELAYDPPVVMNADTLSYCQKEAWCKLAFYLLSFFYYLYCMIYTLVSS

SEQ ID NO: 2365 - protein, 615 aa, Homo sapiens
MPSRKFADGEVVRGRWPGSSLYYEVEILSHDSTSQLYTVKYKDGTELELKENDIKPLTSFRQRKGGSTSSSPSRRRGSRSRSRSRSPGRPPKSARRSASASHQADIKEARREVEVKLTPLILKPFGNSISRYNGEPEHIERNDAPHKNTQEKFSLSQESSYIATQYSLRPRREEVKLKEIDSKEEKYVAKELAVRTFEVTPIRAKDLEFGGVPGVFLIMFGLPVFLFLLLLMCKQKDPSLLNFPPPLPALYELWETRVFGVYLLWFLIQVLFYLLPIGKVVEGTPLIDGRRLKYRLNGFYAFILTSAVIGTSLFQGVEFHYVYSHFLQFALAATVFCVVLSVYLYMRSLKAPRNDLSPASSGNAVYDFFIGRELNPRIGTFDLKYFCELRPGLIGWVVINLVMLLAEMKIQDRAVPSLAMILVNSFQLLYVVDALWNEEALLTTMDIIHDGFGFMLAFGDLVWVPFIYSFQAFYLVSHPNEVSWPMASLIIVLKLCGYVIFRGANSQKNAFRKNPSDPKLAHLKTIHTSTGKNLLVSGWWGFVRHPNYLGDLIMALAWSLPCGFNHILPYFYIIYFTMLLVHREARDEYHCKKKYGVAWEKYCQRVPYRIFPYIY

SEQ ID NO: 2366 - protein, 365 aa, Homo sapiens
MLDGSPLARWLAAAFGLTLLLAALRPSAAYFGLTGSEPLTILPLTLEPEAAAQAHYKACDRLKLERKQRRMCRRDPGVAETLVEAVSMSALECQFQFRFERWNCTLEGRYRASLLKRGFKETAFLYAISSAGLTHALAKACSAGRMERCTCDEAPDLENREAWQWGGCGDNLKYSSKFVKEFLGRRSSKDLRARVDFHNNLVGVKVIKAGVETTCKCHGVSGSCTVRTCWRQLAPFHEVGKHLKHKYETALKVGSTTNEAAGEAGAISPPRGRASGAGGSDPLPRTPELVHLDDSPSFCLAGRFSPGTAGRRCHREKNCESICCGRGHNTQSRVVTRPCQCQVRWCCYVECRQCTQREEVYTCKG

SEQ ID NO: 2367 - protein, 455 aa, Homo sapiens
MWLEILLTSVLGFAIYWFISRDKEETLPLEDGWWGPGTRSAAREDDSIRPFKVETSDEEIHDLHQRIDKFRFTPPLEDSCFHYGFNSNYLKKVISYWRNEFDWKKQVEILNRYPHFKTKIEGLDIHFIHVKPPQLPAGHTPKPLLMVHGWPGSFYEFYKIIPLLTDPKNHGLSDEHVFEVICPSIPGYGFSEASSKKGFNSVATARIFYKLMLRLGFQEFYIQGGDWGSLICTNMAQLVPSHVKGLHLNMALVLSNFSTLTLLLGQRFGRFLGLTERDVELLYPVKEKVFYSLMRESGYMHIQCTKPDTVGSALNDSPVGLAAYILEKFSTWTNTEFRYLEDGGLERKFSLDDLLTNVMLYWTTGTIISSQRFYKENLGQGWMTQKHERMKVYVPTGFSAFPFELLHTPEKWVRFKYPKLISYSYMVRGGHFAAFEEPELLAQDIRKFLSVLERQ

SEQ ID NO: 2368 - protein, 701 aa, Homo sapiens
MGSAADVRFSLGTTTHAPPGVHRRYSALREESAKDWETSPLPGMLAPAAGPAFDSDPEISDVDEDEPGGLVGSADVVSPSGHSDAQTLAMMLQEQLDAINEEIRMIQEEKESTELRAEEIETRVTSGSMEALNLKQLRKRGSIPTSLTALSLASASPPLSGRSTPKLTSRSAAQDLDRMGVMTLPSDLRKHRRKLLSPVSREENREDKATIKCETSPPSSPRTLRLEKLGHPALSQEEGKSALEDQGSNPSSSNSSQDSLHKGAKRKGIKSSIGRLFGKKEKGRLIQLSRDGATGHVLLTDSEFSMQEPMVPAKLGTQAEKDRRLKKKHQLLEDARRKGMPFAQWDGPTVVSWLELWVGMPAWYVAACRANVKSGAIMSALSDTEIQREIGISNALHRLKLRLAIQEMVSLTSPSAPPTSRTSSGNVWVTHEEMETLETSTKTDSEEGSWAQTLAYGDMNHEWIGNEWLPSLGLPQYRSYFMECLVDARMLDHLTKKDLRVHLKMVDSFHRTSLQYGIMCLKRLNYDRKELEKRREESQHEIKDVLVWTNDQVVHWVQSIGLRDYAGNLHESGVHGALLALDENFDHNTLALILQIPTQNTQARQVMEREFNNLLALGTDRKLDDGDDKVFRRAPSWRKRFRPREHHGRGGMLSASAETLPAGFRVSTLGTLQPPPAPPKKIMPEAHSHYLYGHMLSAFRD

SEQ ID NO: 2369 - protein, 1048 aa, Homo sapiens
MSNKTGGKRPATTNSDIPNHNMVSEVPPERPSVRATRTARKAVAFGKRSHSMKRNPNAPVTKAGWLFKQASSGVKQWNKRWFVLVDRCLFYYKDEKEESILGSIPLLSFRVAAVQPSDNISRKHTFKAEHAGVRTYFFSAESPEEQEAWIQAMGEAARVQIPPAQKSVPQAVRHSHEKPDSENVPPSKHHQQPPHNSLPKPEPEAKTRGEGDGRGCEKAERRPERPEVKKEPPVKANGLPAGPEPASEPGSPYPEGPRVPGGGEQPAQPNGWQYHSPSRPGSTAFPSQDGETGGHRRSFPPRTNPDKIAQRKSSMNQLQQWVNLRRGVPPPEDLRSPSRFYPVSRRVPEYYGPYSSQYPDDYQYYPPGVRPESICSMPAYDRISPPWALEDKRHAFRNGGGPAYQLREWKEPASYGRQDATVWIPSPSRQPVYYDELDAASSSLRRLSLQPRSHSVPRSPSQGSYSRARIYSPVRSPSARFERLPPRSEDIYADPAAYVMRRSISSPKVPPYPEVFRDSLHTYKLNEQDTDKLLGKLCEQNKVVREQDRLVQQLRAEKESLESALMGTHQELEMFGSQPAYPEKLRHKKDSLQNQLINIRVELSQATTALTNSTIEYEHLESEVSALHDDLWEQLNLDTQNEVLNRQIQKEIWRIQDVMEGLRKNNPSRGTDTAKHRGGLGPSATYSSNSPASPLSSASLTSPLSPFSLVSGSQGSPTKPGSNEPKANYEQSKKDPHQTLPLDTPRDISLVPTRQEVEAEKQAALNKVGVVPPRTKSPTDDEVTPSAVVRRNASGLTNGLSSQERPKSAVFPGEGKVKMSVEEQIDRMRRHQSGSMREKRRSLQLPASPAPDPSPRPAYKVVRRHRSIHEVDISNLEAALRAEEPGGHAYETPREEIARLRKMELEPQHYDVDINKELSTPDKVLIPERYIDLEPDTPLSPEELKEKQKKVERIKTLIAKSSMQNVVPIGEGDSVDVPQDSESQLQEQEKRIEISCALATEASRRGRMLSVQCATPSPPTSPASPAPPANPLSSESPRGADSSYTMRV

SEQ ID NO: 2370 - protein, 266 aa, Homo sapiens
MGSKTLPAPVPIHPSLQLTNYSFLQAVNGLPTVPSDHLPNLYGFSALHAVHLHQWTLGYPAMHLPRSSFSKVPGTVSSLVDARFQLPAFPWFPHVIQPKPEITAGGSVPALKTKPRFDFANLALAATQEDPAKLGRGEGPGSPAGGLGALLDVTKLSPEKKPTRGRLPSKTKKEFVCKFCGRHFTKSYNLLIHERTHTDERPYTCDICHKAFRRQDHLRDHRYIHSKEKPFKCQECGKGFCQSRTLAVHKTLHSQVKELKTSKIKC

SEQ ID NO: 2371 - protein, 450 aa, Homo sapiens
MDLSAAAALCLWLLSACRPRDGLEAAAVLRAAGAGPVRSPGGGGGGGGGGRTLAQAAGAAAVPAAAVPRARAARRAAGSGFRNGSVVPHHFMMSLYRSLAGRAPAGAAAVSASGHGRADTITGFTDQATQDESAAETGQSFLFDVSSLNDADEVVGAELRVLRRGSPESGPGSWTSPPLLLLSTCPGAARAPRLLYSRAAEPLVGQRWEAFDVADAMRRHRREPRPPRAFCLLLRAVAGPVPSPLALRRLGFGWPGGGGSAAEERAVLVVSSRTQRKESLFREIRAQARALGAALASEPLPDPGTGTASPRAVIGGRRRRRTALAGTRTAQGSGGGAGRGHGRRGRSRCSRKPLHVDFKELGWDDWIIAPLDYEAYHCEGLCDFPLRSHLEPTNHAIIQTLLNSMAPDAAPASCCVPARLSPISILYIDAANNVVYKQYEDMVVEACGCR

SEQ ID NO: 2372 - protein, 196 aa, Homo sapiens
MAAIRKKLVVVGDGACGKTCLLIVFSKDEFPEVYVPTVFENYVADIEVDGKQVELALWDTAGQEDYDRLRPLSYPDTDVILMCFSVDSPDSLENIPEKWVPEVKHFCPNVPIILVANKKDLRSDEHVRTELARMKQEPVRTDDGRAMAVRIQAYDYLECSAKTKEGVREVFETATRAALQKRYGSQNGCINCCKVL

SEQ ID NO: 2373 - protein, 342 aa, Homo sapiens
MASVTRAVFGELPSGGGTVEKFQLQSDLLRVDIISWGCTITALEVKDRQGRASDVVLGFAELEGYLQKQPYFGAVIGRVANRIAKGTFKVDGKEYHLAINKEPNSLHGGVRGFDKVLWTPRVLSNGVQFSRISPDGEEGYPGELKVWVTYTLDGGELIVNYRAQASQATPVNLTNHSYFNLAGQASPNINDHEVTIEADTYLPVDETLIPTGEVAPVQGTAFDLRKPVELGKHLQDFHLNGFDHNFCLKGSKEKHFCARVHHAASGRVLEVYTTQPGVQFYTGNFLDGTLKGKNGAVYPKHSGFCLETQNWPDAVNQPRFPPVLLRPGEEYDHTTWFKFSVA

SEQ ID NO: 2374 - protein, 673 aa, Homo sapiens
MAGKAAEERGLPKGATPQDTSGLQDRLFSSESDNSLYFTYSGQPNTLEVRDLNYQVDLASQVPWFEQLAQFKMPWTSPSCQNSCELGIQNLSFKVRSGQMLAIIGSSGCGRASLLDVITGRGHGGKIKSGQIWINGQPSSPQLVRKCVAHVRQHNQLLPNLTVRETLAFIAQMRLPRTFSQAQRDKRVEDVIAELRLRQCADTRVGNMYVRGLSGGERRRVSIGVQLLWNPGILILDEPTSGLDSFTAHNLVKTLSRLAKGNRLVLISLHQPRSDIFRLFDLVLLMTSGTPIYLGAAQHMVQYFTAIGYPCPRYSNPADFYVDLTSIDRRSREQELATREKAQSLAALFLEKVRDLDDFLWKAETKDLDEDTCVESSVTPLDTNCLPSPTKMPGAVQQFTTLIRRQISNDFRDLPTLLIHGAEACLMSMTIGFLYFGHGSIQLSFMDTAALLFMIGALIPFNVILDVISKCYSERAMLYYELEDGLYTTGPYFFAKILGELPEHCAYIIIYGMPTYWLANLRPGLQPFLLHFLLVWLVVFCCRIMALAAAALLPTFHMASFFSNALYNSFYLAGGFMINLSSLWTVPAWISKVSFLRWCFEGLMKIQFSRRTYKMPLGNLTIAVSGDKILSVMELDSYPLYAIYLIVIGLSGGFMVLYYVSLRFIKQKPSQDW

SEQ ID NO: 2375 - protein, 149 aa, Homo sapiens [sequence omitted]

SEQ ID NO: 2376 - protein, 156 aa, Homo sapiens
MQIFVKTLTGKTITLEVEPSDTIENVKAKIQDKEGIPPDQQRLIFAGKQLEDGRTLSDYNIQKESTLHLVLRLRGGAKKRKKKSYTTPKKNKHKRKKVKLAVLKYYKVDENGKISRLRRECPSDECGAGVFMASHFDRHYCGKCCLTYCFNKPEDK

SEQ ID NO: 2377 - protein, 746 aa, Homo sapiens
MRREFCWDAYSKAAGSRASSPLPRQDRDSFCHQMSFCLTELHLWSLKNTLHIADRDIGIYQYYDKKDPPATEHGNLEKKQKLAESRDYPWTLKNRRPEKLRDSLKELEELMQNSRCVLSKWKNKYVCQLLFGSGVLVSLSLSGPQLEKVVIDRSLVGKLISDTISDALLTDSFIILSFLAQNKLCFIQFTKKMESSDVNKRLEKLSALDYKIFYYEIPGPINKTTERHLAINCVHDRVVCWWPLVNDDAWPWAPISSEKDRANLLLLGYAQGRLEVLSSVRTEWDPLDVRFGTKQPYQVFTVEHSVSVDKEPMADSCIYECIRNKIQCVSVTRIPLKSKAISCCRNVTEDKLILGCEDSSLILYETHRRVTLLAQTELLPSLISCHPSGAILLVGSNQGELQIFDMALSPINIQLLAEDRLPRETLQFSKLFDASSSLVQMQWIAPQVVSQKGEGSDIYDLLFLRFERGPLGVLLFKLGVFTRGQLGLIDIIFQYIHCDEIYEAINILSSMNWDTLGHQCFISMSAIVNHLLRQKLTPEREAQLETSLGTFYAPTRPLLDSTILEYRDQISKYARRFFHHLLRYQRFEKAFLLAVDVGARDLFMDIHYLALDKGELALAEVARKRASDIDAESITSGVELLGPLDRGDMLNEAFIGLSLAPQGEDSFPDNLPPSCPTHRHILQQRILNGSSNRQIIDRRNELEKDICSGFLMTNTCNAEDGELREDGREQEIRDGGSLKMIHFGLV

SEQ ID NO: 2378 - protein, 977 aa, Homo sapiens
MASSHSSSPVPQGSSSDVFFKIEVDPSKHIRPVPSLPDVCPKEPTGDSHSLYVAPSLVTDQHRWTVYHSKVNLPAALNDPRLAKRESDFFTKTWGLDFVDTEVIPSFYLPQISKEHFTVYQQEISQREKIHERCKNICPPKDTFERTLLHTHDKSRTDLEQVPKIFMKPDFALDDSLTFNSVLPWSHFNTAGGKGNRDAASSKLLQEKLSHYLDIVEVNIAHQISLRSEAFFHAMTSQHELQDYLRKTSQAVKMLRDKIAQIDKVMCEGSLHILRLALTRNNCVKVYNKLKLMATVHQTQPTVQVLLSTSEFVGALDLIATTQEVLQQELQGIHSFRHLGSQLCELEKLIDKMMIAEFSTYSHSDLNRPLEDDCQVLEEERLISLVFGLLKQRKLNFLEIYGEKMVITAKNIIKQCVINKVSQTEEIDTDVVVKLADQMRMLNFPQWFDLLKDIFSKFTIFLQRVKATLNIIHSVVLSVLDKNQRTRELEEISQQKNAAKDNSLDTEVAYLIHEGMFISDAFGEGELTPIAVDTTSQRNASPNSEPCSSDSVSEPECTTDSSSSKEHTSSSAIPGGVDIMVSEDMKLTDSELGKLANNIQELLYSASDICHDRAVKFLMSRAKDGFLEKLNSMEFITLSRLMETFILDTEQICGRKSTSLLGALQSQAIKFVNRFHEERKTKLSLLLDNERWKQADVPAEFQDLVDSLSDGKIALPEKKSGATEERKPAEVLIVEGQQYAVVGTVLLLIRIILEYCQCVDNIPSVTTDMLTRLSDLLKYFNSRSCQLVLGAGALQVVGLKTITTKNLALSSRCLQLIVHYIPVIRAHFEARLPPKQYSMLRHFDHITKDYHDHIAEISAKLVAIMDSLFDKLLSKYEVKAPVPSACFRNICKQMTKMHEAIFDLLPEEQTQMLFLRINASYKLHLKKQLSHLNVINDGGPQNGLVTADVAFYTGNLQALKGLKDLDLNMAEIWEQKR

SEQ ID NO: 2379 - protein, 926 aa, Homo sapiens
MSRRRKHDDSPSPKKTPHKTVAAEECGSVVEPGRRRLRSARGSWPCGAREGPPGPVRQREQPPTAALCSKSNPEERYETPKRALKMDSLSSSFSSPNDPDGQNDIFWDQNSPLTKQLGKGRKKQIYTTDSDEISHIVNRIAPQDEKPTTNSMLDMWIGETAIPCTPSVAKGKSRAKISCTKLKTQSQEEELMKLAKQFDKNMEELDVIQEQNKRNYDFTQMISETEILSNYKDNIQMWSLHNIVPEIDNATKKPIKGNTKISVANNQNSSQKPFDQIAEAAFNAIFDGSTQKCSGQLSQELPEAFWSTSNTTFVKTNALKEEKIITNETLVIEKLSNKTPRSLSSQVDTPIMTKSCVTSCTKEPETSNKYIDAFTTSDFEDDWENLLGSEPFAMQNIDMPELFPSKTAHVTDQKEICTFNSKTVKNTSRANTSPDARLGDSKVLQDLSSKTYDRELIDAEYRFSPNSNKSNKLSTGNKMKFENSSNKIVIQDEIQNCIVTSNLTKIKEDILTNSTEASERKSALNTRYSNEQKNKCILNQSIKAPVNTDLFGSANLGSKTSVSNPNQTSASKVGSFFDDWNDPSFANEIIKACHQLDNTWEADDVDDDLLYQACDDIERLTQQQDIRKDSKTSESICEINNNSEHGAKLTQQQDIRKDSKTSESICEINNNSEHGAKNMFAISKQGSNLVQSKHLNPGSISVQTSLTNSSQIDKPMKMEKGEMYGNSPRFLGATNLTMYSKISNCQINNLHVSYTNTDVPIQVNSSKLVLPGSSSLNVTSDHMNTEITTYKKKLSTNQPCHKTVTDEAQSNLNTTVGFSKFTFTRMKNSQILSQFNQNCITGSMSDTKITQGVEKKKGVNPLLEEAVGQQSLVKLSESLKQSSKEEEEKNRKCSPEEIQRKRQEALVRRMAKARASSVNAAPTSFL

SEQ ID NO: 2380 - protein, 589 aa, Homo sapiens
MDGEAVRFCTDNQCVSLHPQEVDSVAMAPAAPKIPRLVQATPAFMAVTLVFSLVTLFVVVQQQTRPVPKPVQAVILGDNITGHLPFEPNNHHHFGREAEMRELIQTFKGHMENSSAWVVEIQMLKCRVDNVNSQLQVLGDHLGNTNADIQMVKGVLKDATTLSLQTQMLRSSLEGTNAEIQRLKEDLEKADALTFQTLNFLKSSLENTSIELHVLSRGLENANSEIQMLNASLETANTQAQLANSSLKNANAEIYVLRGHLDSVNDLRTQNQVLRNSLEGANAEIQGLKENLQNTNALNSQTQAFIKSSFDNTSAEIQFLRGHLERAGDEIHVLKRDLKMVTAQTQKANGRLDQTDTQIQVFKSEMENVNTLNAQIQVLNGHMKNASREIQTLKQGMKNASALTSQTQMLDSNLQKASAEIQRLRGDLENTKALTMEIQQEQSRLKTLHVVITSQEQLQRTQSQLLQMVLQGWKFNGGSLYYFSSVKKSWHEAEQFCVSQGAHLASVASKEEQAFLVEFTSKVYYWIGLTDRGTEGSWRWTDGTPFNAAQNKAPGSKGSCPLRKYIIVNSGMGACSFIDTPPCPWILSN

SEQ ID NO: 2381 - protein, 390 aa, Homo sapiens
MAQRYDDLPHYGGMDGVGIPSTMYGDPHAARSMQPVHHLNHGPPLHSHQYPHTAHTNAMAPSMGSSVNDALKRDKDAIYGHPLFPLLALIFEKCELATCTPREPGVAGGDVCSSESFNEDIAVFAKQIRAEKPLFSSNPELDNLMIQAIQVLRFHLLELEKVHELCDNFCHRYISCLKGKMPIDLVIDDREGGSKSDSEDITRSANLTDQPSWNRDHDDTASTRSGGTPGPSSGGHTSHSGDNSSEQGDGLDNSVASPSTGDDDDPDKDKKRHKKRGIFPKVATNIMRAWLFQHLTHPYPSEEQKKQLAQDTGLTILQVNNWFINARRRIVQPMIDQSNRAVSQGTPYNPDGQPMGGFVMDGQQHMGIRAPGPMSGMGMNMGMEGQWHYM

SEQ ID NO: 2382 - protein, 1997 aa, Homo sapiens
MALLIHLKTVSELRGRGDRIAKVTFRGQSFYSRVLENCEDVADFDETFRWPVASSIDRNEMLEIQVFNYSKVFSNKLIGTFRMVLQKVVEESHVEVTDTLIDDNNAIIKTSLCVEVRYQATDGTVGSWDDGDFLGDESLQEEEKDSQETDGLLPGSRPSSRPPGEKSFRRAGRSVFSAMKLGKNRSHKEEPQRPDEPAVLEMEDLDHLAIRLGDGLDPDSVSLASVTALTTNVSNKRSKPDIKMEPSAGRPMDYQVSITVIEARQLVGLNMDPVVCVEVGDDKKYTSMKESTNCPYYNEYFVFDFHVSPDVMFDKIIKISVIHSKNLLRSGTLVGSFKMDVGTVYSQPEHQFHHKWAILSDPDDISSGLKGYVKCDVAVVGKGDNIKTPHKANETDEDDIEGNLLLPEGVPPERQWARFYVKIYRAEGLPRMNTSLMANVKKAFIGENKDLVDPYVQVFFAGQKGKTSVQKSSYEPLWNEQVVFTDLFPPLCKRMKVQIRDSDKVNDVAIGTHFIDLRKISNDGDKGFLPTLGPAWVNMYGSTRNYTLLDEHQDLNEGLGEGVSFRARLLLGLAVEIVDTSNPELTSSTEVQVEQATPISESCAGKMEEFFLFGAFLEASMIDRRNGDKPITFEVTIGNYGNEVDGLSRPQRPRPRKEPGDEEEVDLIQNASDDEAGDAGDLASVSSTPPMRPQVTDRNYFHLPYLERKPCIYIKSWWPDQRRRLYNANIMDHIADKLEEGLNDIQEMIKTEKSYPERRLRGVLEELSCGCCRFLSLADKDQGHSSRTRLDRERLKSCMRELENMGQQARMLRAQVKRHTVRDKLRLCQNFLQKLRFLADEPQHSIPDIFIWMMSNNKRVAYARVPSKDLLFSIVEEETGKDCAKVKTLFLKLPGKRGFGSAGWTVQAKVELYLWLGLSKQRKEFLCGLPCGFQEVKAAQGLGLHAFPPVSLVYTKKQAFQLRAHMYQARSLFAADSSGLSDPFARVFFINQSQCTEVLNETLCPTWDQMLVFDNLELYGEAHELRDDPPIIVIEIYDQDSMGKADFMGRTFAKPLVKMADEAYCPPRFPPQLEYYQIYRGNATAGDLLAAFELLQIGPAGKADLPPINGPVDVDRGPIMPVPMGIRPVLSKYRVEVLFWGLRDLKRVNLAQVDRPRVDIECAGKGVQSSLIHNYKKNPNFNTLVKWFEVDLPENELLHPPLNIRVVDCRAFGRYTLVGSHAVSSLRRFIYRPPDRSAPSWNTTVRLLRRCRVLCNGGSSSHSTGEVVVTMEPEVPIKKLETMVKLDATSEAVVKVDVAEEEKEKKKKKKGTAEEPEEEEPDESMLDWWSKYFASIDTMKEQLRQQEPSGIDLEEKEEVDNTEGLKGSMKGKEKARAAKEEKKKKTQSSGSGQGSEAPEKKKPKIDELKVYPKELESEFDNFEDWLHTFNLLRGKTGDDEDGSTEEERIVGRFKGSLCVYKVPLPEDVSREAGYDSTYGMFQGIPSNDPINVLVRVYVVRATDLHPADINGKADPYIAIRLGKTDIRDKENYISKQLNPVFGKSFDIEASFPMESMLTVAVYDWDLVGTDDLIGETKIDLENRFYSKHRATCGIAQTYSTHGYNIWRDPMKPSQILTRLCKDGKVDGPHFGPPGRVKVANRVFTGPSEIEDENGQRKPTDEHVALLALRHWEDIPRAGCRLVPEHVETRPLLNPDKPGIEQGRLELWVDMFPMDMPAPGTPLDISPRKPKKYELRVIIWNTDEVVLEDDDFFTGEKSSDIFVRGWLKGQQEDKQDTDVHYHSLTGEGNFNWRYLFPFDYLAAEEKIVISKKESMFSWDETEYKIPARLTLQIWDADHFSADDFLGAIELDLNRFPRGAKTAKQCTMEMATGEVDVPLVSIFKQKRVKGWWPLLARNENDEFELTGKVEAELHLLTAEEAEKNPVGLARNEPDPLEKPNRPDTSFIWFLNPLKSARYFLWHTYRWLLLKLLLLLLLLLLLALFLYSVPGYLVKKILGA

SEQ ID NO: 2383 - protein, 430 aa, Homo sapiens
MATAVRAVGCLPVLCSGTAGHLLGRQCSLNTLPAASILAWKSVLGNGHLSSLGTRDTHPYASLSRALQTQCCISSPSHLMSQQYRPYSFFTKLTADELWKGALAETGAGAKKGRGKRTKKKKRKDLNRGQIIGEGRYGFLWPGLNVPLMKNGAVQTIAQRSKEEQEKVEADMIQQREEWDRKKKMKVKRERGWSGNSWGGISLGPPDPGPCGETYEDFDTRILEVRNVFTMTAKEGRKKSIRVLVAVGNGKGAAGFSIGKATDRMDAFRKAKNRAVHHLHYIERYEDHTIFHDISLRFKRTHIKMKKQPKGYGLRCHRAIITICRLIGIKDMYAKVSGSINMLSLTQGLFRGLSRQETHQQLADKKGLHVVEIREECGPLPIVVASPRGPLRKDPEPEDEVPDVKLDWEDVKTAQGMKRSVWSNLKRAAT

SEQ ID NO: 2384 - protein, 227 aa, Homo sapiens
MAPCHIRKYQESDRQWVVGLLSRGMAEHAPATFRQLLKLPRTLILLLGGPLALLLVSGSWLLALVFSISLFPALWFLAKKPWTEYVDMTLCTDMSDITKSYLSERGSCFWVAESEEKVVGMVGALPVDDPTLREKRLQLFHLFVDSEHRRQGIAKALVRTVLQFARDQGYSEVILDTGTIQLSAMALYQSMGFKKTGQSFFCVWARLVALHTVHFIYHLPSSKVGSL

SEQ ID NO: 2385 - protein, 811 aa, Homo sapiens
MERGKMAEAESLETAAEHERILREIESTDTACIGPTLRSVYDGEEHGRFMEKLETRIRNHDREIEKMCNFHYQGFVDSITELLKVRGEAQKLKNQVTDTNRKLQHEGKELVIAMEELKQCRLQQRNISATVDKLMLCLPVLEMYSKLRDQMKTKRHYPALKTLEHLEHTYLPQVSHYRFCKVMVDNIPKLREEIKDVSMSDLKDFLESIRKHSDKIGETAMKQAQQQRNLDNIVLQQPRIGSKRKSKKDAYIIFDTEIESTSPKSEQDSGILDVEDEEDDEEVPGAQDLVDFSPVYRCLHIYSVLGARETFENYYRKQRRKQARLVLQPPSNMHETLDGYRKYFNQIVGFFVVEDHILHTTQGLVNRAYIDELWEMALSKTIAALRTHSSYCSDPNLVLDLKNLIVLFADTLQVYGFPVNQLFDMLLEIRDQYSETLLKKWAGIFRNILDSDNYSPIPVTSEEMYKKVVGQFPFQDIELEKQPFPKKFPFSEFVPKVYNQIKEFIYACLKFSEDLHLSSTEVDDMIRKSTNLLLTRTLSNSLQNVIKRKNIGLTELVQIIINTTHLEKSCKYLEEFITNITNVLPETVHTTKLYGTTTFKDARHAAEEEIYTNLNQKIDQFLQLADYDWMTGDLGNKASDYLVDLIAFLRSTFAVFTHLPGKVAQTACMSACKHLATSLMQLLLEAEVRQLTLGALQQFNLDVRECEQFARSGPVPGFQEDTLQLAFIDLRQLLDLFIQWDWSTYLADYGQPNCKYLRVNPVTALTLLEKMKDTSRKNNMFAQFRKNERDKQKLIDTVAKQLRGLISSHHS

SEQ ID NO: 2386 - protein, 563 aa, Homo sapiens
MFSRNHRSRVTVARGSALEMEFKRGRFRLSLFSDLPEDTELQRKLDHEIRMREGACKLLAACSQREQALEATKSLLVCNSRILSYMGELQRRKEAQVLGKTSRRPSDSGPPAERSPCRGRVCISDLRIPLMWKDTEYFKNKGDLHRWAVFLLLQLGEHIQDTEMILVDRTLTDISFQSNVLFAEAGPDFELRLELYGACVEEEGALTGGPKRLATKLSSSLGRSSGRRVRASLDSAGGSGSSPILLPTPVVGGPRYHLLAHTTLTLAAVQDGFRTHDLTLASHEENPAWLPLYGSVCCRLAAQPLCMTQPTASGTLRVQQAGEMQNWAQVHGVLKGTNLFCYRQPEDADTGEEPLLTIAVNKETRVRAGELDQALGRPFTLSISNQYGDDEVTHTLQTESREALQSWMEALWQLFFDMSQWKQCCDEIMKIETPAPRKPPQALAKQGSLYHEMAIEPLDDIAAVTDILTQREGARLETPPPWLAMFTDQPALPNPCSPASVAPAPDWTHPLPWGRPRTFSLDAVPPDHSPRARSVAPLPPQRSPRTRGLCSKGQPRTWLQSPV

SEQ ID NO: 2387 - protein, 302 aa, Homo sapiens
MALHDMEDFTFDGTKRLSVNYVKGILQPTDTCDIWDKIWNFQAKPDDLLISTYPKAGTTWTQEIVELIQNEGDVEKSKRAPTHQRFPFLEMKIPSLGSGLEQAHAMPSPRILKTHLPFHLLPPSLLEKNCKIIYVARNPKDNMVSYYHFQRMNKALPAPGTWEEYFETFLAGKVCWGSWHEHVKGWWEAKDKHRILYLFYEDMKKNPKHEIQKLAEFIGKKLDDKVLDKIVHYTSFDVMKQNPMANYSSIPAEIMDHSISPFMRKGAVGDWKKHFTVAQNERFDEDYKKKMTDTRLTFHFQF

SEQ ID NO: 2388 - protein, 206 aa, Homo sapiens
MAANKSKGQSSLALHKVIMVGSGGVGKSALTLQFMYDEFVEDYEPTKADSYRKKVVLDGEEVQIDILDTAGQEDYAAIRDNYFRSGEGFLLVFSITEHESFTATAEFREQILRVKAEEDKIPLLVVGNKSDLEERRQVPVEEARSKAEEWGVQYVETSAKTRANVDKVFFDLMREIRTKKMSENKDKNGKKSSKNKKSFKERCCLL

SEQ ID NO: 2389 - protein, 311 aa, Homo sapiens
MAGPLWRTAAFVQRHRTGLLVGSCAGLFGVPISYHLFPDPVVQWLYQYWPQGQPAPLPPQLQSLFQEVLQDIGVPSGHCYKPFTTFTFQPVSAGFPRLPAGAVVGIPASFLGDLVINTNHPVVIHGHTVDWRSPAGARLRASLTLSREAQKFALAREVVYLESSTTAVHALLAPACLAGTWALGVGAKYTLGLHAGPMNLRAAFSLVAAVAGFVAYAFSQDSLTHAVESWLDRRTASLSAAYACGGVEFYEKLLSGNLALRSLLGKDGEKLYTPSGNIVPRHLFRIKHLPYTTRRDSVLQMWRGMLNPGRS

SEQ ID NO: 2390 - protein, 679 aa, Homo sapiens
MATLITSTTAATAASGPLVDYLWMLILGFIIAFVLAFSVGANDVANSFGTAVGSGVVTLKQACILASIFETVGSVLLGAKVSETIRKGLIDVEMYNSTQGLLMAGSVSAMFGSAVWQLVASFLKLPISGTHCIVGATIGFSLVAKGQEGVKWSELIKIVMSWFVSPLLSGIMSGILFFLVRAFILHKADPVPNGLRALPVFYACTVGINLFSIMYTGAPLLGFDKLPLWGTILISVGCAVFCALIVWFFVCPRMKRKIEREIKCSPSESPLMEKKNSLKEDHEETKLSVGDIENKHPVSEVGPATVPLQAVVEERTVSFKLGDLEEAPERERLPSVDLKEETSIDSTVNGAVQLPNGNLVQFSQAVSNQINSSGHYQYHTVHKDSGLYKELLHKLHLAKVGDCMGDSGDKPLRRNNSYTSYTMAICGMPLDSFRAKEGEQKGEEMEKLTWPNADSKKRIRMDSYTSYCNAVSDLHSASEIDMSVKAEMGLGDRKGSNGSLEEWYDQDKPEVSLLFQFLQILTACFGSFAHGGNDVSNAIGPLVALYLVYDTGDVSSKVATPIWLLLYGGVGICVGLWVWGRRVIQTMGKDLTPITPSSGFSIELASALTVVIASNIGLPISTTHCKVGSVVSVGWLRSKKAVDWRLFRNIFMAWFVTVPISGVISAAIMAIFRYVILRM

SEQ ID NO: 2391 - protein, 694 aa, Homo sapiens
MAKINTQYSHPSRTHLKVKTSDRDLNRAENGLSRAHSSSEETSSVLQPGIAMETRGLADSGQGSFTGQGIARLSRLIFLLRRWAARHVHHQDQGPDSFPDRFRGAELKEVSSQESNAQANVGSQEPADRGRSAWPLAKCNTNTSNNTEEEKKTKKKDAIVVDPSSNLYYRWLTAIALPVFYNWYLLICRACFDELQSEYLMLWLVLDYSADVLYVLDVLVRARTGFLEQGLMVSDTNRLWQHYKTTTQFKLDVLSLVPTDLAYLKVGTNYPEVRFNRLLKFSRLFEFFDRTETRTNYPNMFRIGNLVLYILIIIHWNACIYFAISKFIGFGTDSWVYPNISIPEHGRLSRKYIYSLYWSTLTLTTIGETPPPVKDEEYLFVVVDFLVGVLIFATIVGNVGSMISNMNASRAEFQAKIDSIKQYMQFRKVTKDLETRVIRWFDYLWANKKTVDEKEVLKSLPDKLKAEIAINVHLDTLKKVRIFQDCEAGLLVELVLKLRPTVFSPGDYICKKGDIGKEMYIINEGKLAVVADDGVTQFVVLSDGSYFGEISILNIKGSKSGNRRTANIRSIGYSDLFCLSKDDLMEALTEYPEAKKALEEKGRQILMKDNLIDEELARAGADPKDLEEKVEQLGSSLDTLQTRFARLLAEYNATQMKMKQRLSQLESQVKGGGDKPLADGEVPGDATKTEDKQQ

SEQ ID NO: 2392 - protein, 508 aa, Homo sapiens
MLWFQGAIPAAIATAKRSGAVFVVFVAGDDEQSTQMAASWEDDKVTEASSNSFVAIKIDTKSEACLQFSQIYPVVCVPSSFFIGDSGIPLEVIAGSVSADELVTRIHKVRQMHLLKSETSVANGSQSESSVSTPSASFEPNNTCENSQSRNAELCEIPPTSDTKSDTATGGESAGHATSSQEPSGCSDQRPAEDLNIRVERLTKKLEERREEKRKEEEQREIKKEIERRKTGKEMLDYKRKQEEELTKRMLEERNREKAEDRAARERIKQQIALDRAERAARFAKTKEEVEAAKAAALLAKQAEMEVKRESYARERSTVARIQFRLPDGSSFTNQFPSDAPLEEARQFAAQTVGNTYGNFSLATMFPRREFTKEDYKKKLLDLELAPSASVVLLPAGRPTASIVHSSSGDIWTLLGTVLYPFLAIWRLISNFLFSNPPPTQTSVRVTSSEPPNPASSSKSEKREPVRKRVLEKRGDDFKKEGKIYRLRTQDDGEDENNTWNGNSTQQM

SEQ ID NO: 2393 - protein, 264 aa, Homo sapiens
MRLRPLPLVVVPGLLQLLFCDSKEVVHATEGLDWEDKDAPGTLVGNVVHSRIISPLRLFVKQSPVPKPGPMAYADSMENFWDWLANITEIQEPLARTKRRPIVKTGKFKKMFGWGDFHSNIKTVKLNLLITGKIVDHGNGTFSVYFRHNSTGLGNVSVSLVPPSKVVEFEVSPQSTLETKESKSFNCRIEYEKTDRAKKTALCNFDPSKICYQEQTQSHVSWLCSKPFKVICIYIAFYSVDYKLVQKVCPDYNYHSETPYLSSG

SEQ ID NO: 2394 - protein, 1608 aa, Homo sapiens
MFPKSNLTVTCWVWRSMRKLFLLLSLLLSHAAHLEGKKDNQFIWKPGPWGRCTGDCGPGGVQSRAVWCFHVDGWTSHLSNCGESNRPPKERSCFRVCDWHSDLFQWEVSDWHHCVLVPYARGEVKPRTAECVTAQHGLQHRMVRCIQKLNRTVVANEICEHFALQPPTEQACLIPCPRDCVVSEFLPWSNCSKGCGKKLQHRTRAVIAPPLFGGLQCPNLTESRACDAPISCPLGEEEYTFSLKVGPWSKCRLPHLKEINPSGRTVLDFNSDSNERVTFKHQSYKAHHHSKSWAIEIGYQTRQVSCTRSDGQNAMLSLCLQDSFPLTVQSCIMPKDCETSQWSSWSPCSKTCRSGSLLPGFRSRSRNVKHMAIGGGKECPELLEKEACIVEGELLQQCPRYSWRTSEWKECQVSLLLEQQDPHWHVTGPVCGGGIQTREVYCAQSVPAAAALRAKEVSRPVEKALCVGPAPLPSQLCNIPCSTDCIVSSWSAWGLCIHENCHDPQGKKGFRTRQRHVLMESTGPAGHCPHLVESVPCEDPMCYRWLASEGICFPDHGKCGLGHRILKAVCQNDRGEDVSGSLCPVPPPPERKSCEIPCRMDCVLSEWTEWSSCSQSCSNKNSDGKQTRSRTILALAGEGGKPCPPSQALQEHRLCNDHSCMQLHWETSPWGPCSEDTLVTALNATIGWNGEATCGVGIQTRRVFCVKSHVGQVMTKRCPDSTRPETVRPCFLPCKKDCIVTAFSEWTPCPRMCQAGNATVKQSRYRIIIQEAANGGQECPDTLYEERECEDVSLCPVYRWKPQKWSPCILVPESVWQGITGSSEACGKGLQTRAVSCISDDNRSAEMMECLKQTNGMPLLVQECTVPCREDCTFTAWSKFTPCSTNCEATKSRRRQLTGKSRKKEKCQDSDLYPLVETELCPCDEFISQPYGNWSDCILPEGRREPHRGLRVQADSKECGEGLRFRAVACSDKNGRPVDPSFCSSSGYIQEKCVIPCPFDCKLSDWSSWGSCSSSCGIGVRIRSKWLKEKPYNGGRPCPKLDLKNQGQVHEAVPCYSECNQYSWVVEHWSSCKINNELRSLRCGGGTQSRKIRCVNTADGEGGAVDSNLCNQDEIPPETQSCSLMCPNECVMSEWGLWSKCPQSCDPHTMQRRTRHLLRPSLNSRTCAEDSQVQPCLLNENCFQFQYNLTEWSTCQLSENAPCGQGVRTRLLSCVCSDGKPVSMDQCEQHNLEKPQRMSIPCLVECVVNCQLSGWTAWTECSQTCGHGGRMSRTRFIIMPTQGEGRPCPTELTQEKTCPVTPCYSWVLGNWSACKLEGGDCGEGVQIRSLSCMVHSGSISHAAGRVEDALCGEMPFQDSILKQLCSVPCPGDCHLTEWSEWSTCELTCIDGRSFETVGRQSRSRTFIIQSFENQDSCPQQVLETRPCTGGKCYHYTWKASLWNNNERTVWCQRSDGVNVTGGCSPQARPAAIRQCIPACRKPFSYCTQGGVCGCEKGYTEIMKSNGFLDYCMKVPGSEDKKADVKNLSGKNRPVNSKIHDIFKGWSLQPLDPDGRVKIWVYGVSGGAFLIMIFLIFTSYLVCKKPKPHQSTPPQQKPLTLAYDGDLDM

SEQ ID NO: 2395 - protein, 310 aa, Homo sapiens
MGKRRCVPPLEPKLAAGCCGVKKPKLSGSGTHSHGNQSTTVPGSSSGPLQNHQHVDSSSGRENVSDLTLGPGNSPITRMNPASGALSPLPRPNGTANTTKNLVVTAEMCCYCFDVLYCHLYGFPQPRLPRFTNDPYPLFVTWKTGRDKRLRGCIGTFSAMNLHSGLREYTLTSALKDSRFPPLTREELPKLFCSVSLLTNFEDASDYLDWEVGVHGIRIEFINEKGVKRTATYLPEVAKEQDWDQIQTIDSLLRKGGFKAPITSEFRKTIKLTRYRSEKVTISYAEYIASRQHCFQNGTLHAPPLYNHYS

SEQ ID NO: 2396 - protein, 1106 aa, Homo sapiens
MEIKDQGAQMEPLLPTRNDEEAVVDRGGTRSILKTHFEKEDLEGHRTLFIGVHVPLGGRKSHRRHRHRGHKHRKRDRERDSGLEDGRESPSFDTPSQRVQFILGTEDDDEEHIPHDLFTELDEICWREGEDAEWRETARWLKFEEDVEDGGERWSKPYVATLSLHSLFELRSCILNGTVLLDMHANTLEEIADMVLDQQVSSGQLNEDVRHRVHEALMKQHHHQNQKKLTNRIPIVRSFADIGKKQSEPNSMDKNAGQVVSPQSAPACVENKNDVSRENSTVDFSKVDLHFMKKIPPGAEASNILVGELEFLDRTVVAFVRLSPAVLLQGLAEVPIPTRFLFILLGPLGKGQQYHEIGRSIATLMTDEVFHDVAYKAKDRNDLVSGIDEFLDQVTVLPPGEWDPSIRIEPPKNVPSQEKRKIPAVPNGTAAHGEAEPHGGHSGPELQRTGRIFGGLILDIKRKAPYFWSDFRDAFSLQCLASFLFLYCACMSPVITFGGLLGEATEGRISAIESLFGASMTGIAYSLFGGQPLTILGSTGPVLVFEKILFKFCKEYGLSYLSLRASIGLWTATLCIILVATDASSLVCYITRFTEEAFASLICIIFIYEALEKLFELSEAYPINMHNDLELLTQYSCNCVEPHNPSNGTLKEWRESNISASDIIWENLTVSECKSLHGEYVGRACGHDHPYVPDVLFWSVILFFSTVTLSATLKQFKTSRYFPTKVRSIVSDFAVFLTILCMVLIDYAIGIPSPKLQVPSVFKPTRDDRGWFVTPLGPNPWWTVIAAIIPALLCTILIFMDQQITAVIINRKEHKLKKGCGYHLDLLMVAVMLGVCSIMGLPWFVAATVLSITHVNSLKLESECSAPGEQPKFLGIREQRVTGLMIFILMGSSVFMTSILKFIPMPVLYGVFLYMGASSLKGIQFFDRIKLFWMPAKHQPDFIYLRHVPLRKVHLFTIIQMSCLGLLWIIKVSRAAIVFPMMVLALVFVRKLMDLLFTKRELSWLDDLMPESKKKKLEDAEKEEEQSMLAMEDEGTVQLPLEGHYRDDPSVINISDEMSKTALWRNLLITADNSKDKESSFPSKSIESRKEKKADSGKGVDRETCL

SEQ ID NO: 2397 - protein, 510 aa, Homo sapiens
MPVPPPPAPPPPPTFALANTEKPTLNKTEQAGRNALLSDISKGKKLKKTVTNDRSAPILDKPKGAGAGGGGGGFGGGGGFGGGGGGGGGGSFGGGGPPGLGGLFQAGMPKLRSTANRDNDSGGSRPPLLPPGGRSTSAKPFSPPSGPGRFPVPSPGHRSGPPEPQRNRMPPPRPDVGSKPDSIPPPVPSTPRPIQSSPHNRGSPPVPGGPRQPSPGPTPPPFPGNRGTALGGGSIRQSPLSSSSPFSNRPPLPPTPSRALDDKPPPPPPPVGNRPSIHREAVPPPPPQNNKPPVPSTPRPSASSQAPPPPPPPSRPGPPPLPPSSSGNDETPRLPQRNLSLSSSTPPLPSPGRSGPLPPPPSERPPPPVRDPPGRSGPLPPPPPVSRNGSTSRALPATPQLPSRSGVDSPRSGPRPPLPPDRPSAGAPPPPPPSTSIRNGFQDSPCEDEWESRFYFHPISDLPPPEPYVQTTKSYPSKLARNESRSGSNRRERGAPPLPPIPRPPKQAAE

SEQ ID NO: 2398 - protein, 374 aa, Homo sapiens
MVLWESPRQCSSWTLCEGFCWLLLLPVMLLIVARPVKLAAFPTSLSDCQTPTGWNCSGYDDRENDLFLCDTNTCKFDGECLRIGDTVTCVCQFKCNNDYVPVCGSNGESYQNECYLRQAACKQQSEILVVSEGSCATDAGSGSGDGVHEGSGETSQKETSTCDICQFGAECDEDAEDVWCVCNIDCSQTNFNPLCASDGKSYDNACQIKEASCQKQEKIEVMSLGRCQDNTTTTTKSEDGHYARTDYAENANKLEESAREHHIPCPEHYNGFCMHGKCEHSINMQEPSCRCDAGYTGQHCEKKDYSVLYVVPGPVRFQYVLIAAVIGTIQIAVICVVVLCITRKCPRSNRIHRQKQNTGHYSSDNTTRASTRLI

SEQ ID NO: 2399 - protein, 1888 aa, Homo sapiens
MAAAAAAAVGGQQPSQPELPAPGLALDKAATAAHLKAALSRPDNRAGAEELQALLERVLSAERPLAAAAGGEDAAAAGGGGGPGAAEEEALEWCKCLLAGGGGYDEFCAAVRAYDPAALCGLVWTANFVAYRCRTCGISPCMSLCAECFHQGDHTGHDFNMFRSQAGGACDCGDSNVMRESGFCKRHQIKSSSNIPCVPKDLLMMSEFVLPRFIFCLIQYLREGYNEPAADGPSEKDLNKVLQLLEPQISFLEDLTKMGGAMRSVLTQVLTNQQNYKDLTSGLGENACVKKSHEKYLIALKSSGLTYPEDKLVYGVQEPSAGTSSLAVQGFIGATGTLGQVDSSDEDDQDGSQGLGKRKRVKLSSGTKDQSIMDVLKHKSFLEELLFWTIKYEFPQKMVTFLLNMLPDQEYKVAFTKTFVQHYAFIMKTLKKSHESDTMSNRIVHISVQLFSNEELARQVTEECQLLDIMVTVLLYMMESCLIKSELQDEENSLHVVVNCGEALLKNNTYWPLVSDFINILSHQSVAKRFLEDHGLLVTWMNFVSFFQGMNLNKRELNEHVEFESQTYYAAFAAELEACAQPMWGLLSHCKVRETQEYTRNVVRYCLEALQDWFDAINFVDEPAPNQVTFHLPLHRYYAMFLSKAVKCQELDLDSVLPDQEMLMKLMIHPLQIQASLAEIHSNMWVRNGLQIKGQAMTYVQSHFCNSMIDPDIYLLQVCASRLDPDYFISSVFERFKVVDLLTMASQHQNTVLDAEHERSMLEGALTFLVILLSLRLHLGMSDDEILRAEMVAQLCMNDRTHSSLLDLIPENPNPKSGIIPGSYSFESVLSAVADFKAPVFEPGGSMQQGMYTPKAEVWDQEFDPVMVILRTVYRRDVQSAMDRYTAFLKQSGKFPGNPWPPYKKRTSLHPSYKGLMRLLHCKTLHIVLFTLLYKILMDHQNLSEHVLCMVLYLIELGLENSAEEESDEEASVGGPERCHDSWFPGSNLVSNMRHFINYVRVRVPETAPEVKRDSPASTSSDNLGSLQNSGTAQVFSLVAERRKKFQEIINRSSSEANQVVRPKTSSKWSAPGSAPQLTTAILEIKESILSLLIKLHHKLSGKQNSYYPPWLDDIEILIQPEIPKYSHGDGITAVERILLKAASQSRMNKRIIEEICRKVTPPVPPKKVTAAEKKTLDKEERRQKARERQQKLLAEFASRQKSFMETAMDVDSPENDIPMEITTAEPQVSEAVYDCVICGQSGPSSEDRPTGLVVLLQASSVLGQCRDNVEPKKLPISEEEQIYPWDTCAAVHDVRLSLLQRYFKDSSCLLAVSIGWEGGVYVQTCGHTLHIDCHKSYMESLRNDQVLQGFSVDKGEFTCPLCRQFANSVLPCYPGSNVENNPWQRPSNKSIQDLIKEVEELQGRPGAFPSETNLSKEMESVMKDIKNTTQKKYRDYSKTPGSPDNDFLFMYSVARTNLELELIHRGGNLCSGGASTAGKRSCLNQLFHVLALHMRLYSIDSEYNPWRKLTQLEEMNPQLGYEEQQPEVPILYHDVTSLLLIQILMMPQPLRKDHFTCIVKVLFTLLYTQALAALSVKCSEEDRSAWKHAGALKKSTCDAEKSYEVLLSFVISELFKGKLYHEEGTQECAMVNPIAWSPESMEKCLQDFCLPFLRITSLLQHHLFGEDLPSCQEEEEFSVLASCLGLLPTFYQTEHPFISASCLDWPVPAFDIITQWCFEIKSFTERHAEQGKALLIQESKWKLPHLLQLPENYNTIFQYYHRKTCSVCTKVPKDPAVCLVCGTFVCLKGLCCKQQSYCECVLHSQNCGAGTGIFLLINASVIIIIRGHRFCLWGSVYLDAHGEEDRDLRRGKPLYICKERYKVLEQQWISHTFDHINKRWGPHYNGL

SEQ ID NO: 2400 - protein, 558 aa, Homo sapiens
MALKGQEDYIYLFKDSTHPVDFLDAFRTFYLDGLFTDITLQCPSGIIFHCHRAVLAACSNYFKAMFTADMKEKFKNKIKLSGIHHDILEGLVNYAYTSQIEITKRNVQSLLEAADLLQFLSVKKACERFLVRHLDIDNCIGMHSFAEFHVCPELEKESRRILCSKFKEVWQQEEFLEISLEKFLFILSRKNLSVWKEEAIIEPVIKWTAHDVENRIECLYNLLSYINIDIDPVYLKTALGLQRSCLLTENKIRSLIYNALNPMHKEISQRSTATMYIIGGYYWHPLSEVHIWDPLTNVWIQGAEIPDYTRESYGVTCLGPNIYVTGGYRTDNIEALDTVWIYNSESDEWTEGLPMLNARYYHCAVTLGGCVYALGGYRKGAPAEEAEFYDPLKEKWIPIANMIKGVGNATACVLHDVIYVIGGHCGYRGSCTYDKVQSYNSDINEWSLITSSPHPEYGLCSVPFENKLYLVGGQTTITECYDPEQNEWREIAPMMERRMECGAVIMNGCIYVTGGYSYSKGTYLQSIEKYDPDLNKWEIVGNLPSAMRSHGCVCVYNV

SEQ ID NO: 2401 - protein, 236 aa, Homo sapiens
MALVPYEETTEFGLQKFHKPLATFSFANHTIQIRQDWRHLGVAAVVWDAAIVLSTYLEMGAVELRGRSAVELGAGTGLVGIVAALLALKSSMKPLLVHCLLFFSGAHVTITDRKVALEFLKSNVQANLPPHIQTKTVVKELTWGQNLGSFSPGEFDLILGADIIYLEETFTDLLQTLEHLCSNHSVILLACRIRYERDNNFLAMLERQFTVRKVHYDPEKDVHIYEAQKRNQKEDL

SEQ ID NO: 2402 - protein, 3234 aa, Homo sapiens
MVKRKSSEGQEQDGGRGIPLPIQTFLWRQTSAFLRPKLGKQYEASCVSFERVLVENKLHGLSPALSEAIQSISRWELVQAALPHVLHCTATLLSNRNKLGHQDKLGVAETKLLHTLHWMLLEAPQDCNNERFGGTDRGSSWGGSSSAFIHQVENQGSPGQPCQSSSNDEEENNRRKIFQNSMATVELFVFLFAPLVHRIKESDLTFRLASGLVIWQPMWEHRQPGVSGFTALVKPIRNIITAKRSSPINSQSRTCESPNQDARHLEGLQVVCETFQSDSISPKATISGCHRGNSFDGSLSSQTSQERGPSHSRASLVIPPCQRSRYATYFDVAVLRCLLQPHWSEEGTQWSLMYYLQRLRHMLEEKPEKPPEPDIPLLPRPRSSSMVAAAPSLVNTHKTQDLTMKCNEEEKSLSSEAFSKVSLTNLRRSAVPDLSSDLGMNIFKKFKSRKEDRERKGSIPFHHTGKRRPRRMGVPFLLHEDHLDVSPTRSTFSFGSFSGLGEDRRGIEKGGWQTTILGKLTRRGSSDAATEMESLSARHSHSHHTLVSDLPDPSNSHGENTVKEVRSQISTITVATFNTTLASFNVGYADFFNEHMRKLCNQVPIPEMPHEPLACANLPRSLTDSCINYSYLEDTEHIDGTNNFVHKNGMLDLSVVLKAVYLVLNHDISSRICDVALNIVECLLQLGVVPCVEKNRKKSENKENETLEKRPSEGAFQFKGVSGSSTCGFGGPAVSGAGDGGGEEGGGGDGGGGGGDGGGGGGGGGGPYEKNDKNQEKDESTPVSNHRLALTMLIKIVKSLGCAYGCGEGHRGLSGDRLRHQAQNCLTKLYKLDKMQFRQTMRDYVNKDSLNNVVDFLHALLGFCMEPVTDNKAGFGNNFTTVDNKSTAQNVEGIIVSAMFKSLITRCASTTHELHSPENLGLYCDIRQLVQFIKEAHGNVFRRVALSALLDSAEKLAPGKKVEENEQESKPAGSKRSEAGSIVDKGQVSSAPEECRSFMSGRPSQTPEHDEQMQGANLGRKDFWRKMFKSQSAASDTSSQSEQDTSECTTAHSGTTSDRRARSRSRRISLRKKLKLPIGKRNWLKRSSLSGLADGVEDLLDISSVDRLSFIRQSSKVKFTSAVKLSEGGPGSGMENGRDEEENFFKRLGCHSFDDHLSPNQDGGKSKNVVNLGAIRQGMKRFQFLLNCCEPGTIPDASILAAALDLEAPVVARAALFLECARFVHRCNRGNWPEWMKGHHVNITKKGLSRGRSPIVGNKRNQKLQWNAAKLFYQWGDAIGVRLNELCHGESESPANLLGLIYDEETKRRLRKEDEEEDFLDDSTVNPSKCGCPFALKMAACQLLLEITTFLRETFSCLPRPRTEPLVDLESCRLRLDPELDRHRYERKISFAGVLDENEDSKDSLHSSSHTLKSDAGVEEKKEGSPWSASEPSIEPEGMSNAGAEENYHRNMSWLHVMILLCNQQSFICTHVDYCHPHCYLHHSRSCARLVRAIKLLYGDSVDSLRESSNISSVALRGKKQKECSDKSCLRTPSLKKRVSDANLEGKKDSGMLKYIRLQVMSLSPAPLSLLIKAAPILTEEMYGDIQPAAWELLLSMDEHMAGAAAAMFLLCAVKVPEAVSDMLMSEFHHPETVQRLNAVLKFHTLWRFRYQVWPRMEEGAQQIFKIPPPSINFTLPSPVLGMPSVPMFDPPWVPQCSGSVQDPINEDQSKSFSARAVSRSHQRAEHILKNLQQEEEKKRLGREASLITAIPITQEACYEPTCTPNSEPEEEVEEVTNLASRRLSVSPSCTSSTSHRNYSFRRGSVWSVRSAVSAEDEEHTTEHTPNHHVPQPPQAVFPACICAAVLPIVHLMEDGEVREDGVAVSAVAQQVLWNCLIEDPSTVLRHFLEKLTISNRQDELMYMLRKLLLNIGDFPAQTSHILFNYLVGLIMYFVRTPCEWGMDAISATLTFLWEVVGYVEGLFFKDLKQTMKKEQCEVKLLVTASMPGTKTLVVHGQNECDIPTQLPVHEDTQFEALLKECLEFFNIPESQSTHYFLMDKRWNLIHYNKTYVRDIYPFRRSVSPQLNLVHMHPEKGQELIQKQVFTRKLEEVGRVLFLISLTQKIPTAHKQSHVSMLQEDLLRLPSFPRSAIDAEFSLFSDPQAGKELFGLDTLQKSLWIQLLEEMFLGMPSEFPWGDEIMLFLNVFNGALILHPEDSALLRQYAATVINTAVHFNHLFSLSGYQWILPTMLQVYSDYESNPQLRQAIEFACHQFYILHRKPFVLQLFASVAPLLEFPDAANNGPSKGVSAQCLFDLLQSLEGETTDILDILELVKAEKPLKSLDFCYGNEDLTFSISEAIKLCVTVVAYAPESFRSLQMLMVLEALVPCYLQKLKRQTSQVETVPAAREEIAATAALATSLQALLYSVEVLTRPMTAPQMSRCDQGHKGTTTANHTMSSGVNTRYQEQGAKLHFIRENLHLLEEGQGIPREELDERIAREEFRRPRESLLNICTEFYKHCGPRLKILQNLAGEPRVIALELLDVKSHMRLAEIAHSLLKLAPYDTQTMESRGLRRYIMEMLPITDWTAEAVRPALILILKRLDRMFNKIHKMPTLRRQVEWEPASNLIEGVCLTLQRQPIISFLPHLRSLINVCVNLVMGVVGPSSVADGLPLLHLSPYLSPPLPFSTAVVRLVALQIQALKEDFPLSHVISPFTNQERREGMLLNLLIPFVLTVGSGSKDSPWLEQPEVQLLLQTVINVLLPPRIISTSRSKNFMLESSPAHCSTPGDAGKDLRREGLAESTSQAAYLALKVILVCFERQLGSQWYWLSLQVKEMALRKVGGLALWDFLDFIVRTRIPIFVLLRPFIQCKLLAQPAENHEELSARQHIADQLERRFIPRPLCKSSLIAEFNSELKILKEAVHSGSAYQGKTSISTVGTSTSAYRLSLATMSRSNTGTGTVWEQDSEPSQQASQDTLSRTDEEDEENDSISMPSVVSEQEAYLLSAIGRRRFSSHVSSMSVPQAEVGMLPSQRVASIQSEPGQQNLLVQQPLGRKRGLRQLRRPLLSRQKTQTEPRNRQGARLSTTRRSIQPKTKPSADQKRSVTFIEAQPEPAAAPTDALPATGQLQGCSPAPSRKPEAMDEPVLTSSPAIVVADLHSVSPKQSENFPTEEGEKEEDTEAQGATAHSPLSAQLSDPDDFTGLETSSLLQHGDTVLHISEENGMENPLLSSQFTFTPTELGKTDAVLDESHV

SEQ ID NO: 2403 - protein, 550 aa, Homo sapiens
MAGLGASLHVWGWLMLGSCLLARAQLDSDGTITIEEQIVLVLKAKVQCELNITAQLQEGEGNCFPEWDGLICWPRGTVGKISAVPCPPYIYDFNHKGVAFRHCNPNGTWDFMHSLNKTWANYSDCLRFLQPDISIGKQEFFERLYVMYTVGYSISFGSLAVAILIIGYFRRLHCTRNYIHMHLFVSFMLRATSIFVKDRVVHAHIGVKELESLIMQDDPQNSIEATSVDKSQYIGCKIAVVMFIYFLATNYYWILVEGLYLHNLIFVAFFSDTKYLWGFILIGWGFPAAFVAAWAVARATLADARCWELSAGDIKWIYQAPILAAIGLNFILFLNTVRVLATKIWETNAVGHDTRKQYRKLAKSTLVLVLVFGVHYIVFVCLPHSFTGLGWEIRMHCELFFNSFQGFFVSIIYCYCNGEVQAEVKKMWSRWNLSVDWKRTPPCGSRRCGSVLTTVTHSTSSQSQVAASTRMVLISGKAAKIASRQPDSHITLPGYVWSNSEQDCLPHSFHEETKEDSGRQGDDILMEKPSRPMESNPDTEGCQGETEDVL

SEQ ID NO: 2404 - protein, 906 aa, Homo sapiens
MDMFPLTWVFLALYFSRHQVRGQPDPPCGGRLNSKDAGYITSPGYPQDYPSHQNCEWIVYAPEPNQKIVLNFNPHFEIEKHDCKYDFIEIRDGDSESADLLGKHCGNIAPPTIISSGSMLYIKFTSDYARQGAGFSLRYEIFKTGSEDCSKNFTSPNGTIESPGFPEKYPHNLDCTFTILAKPKMEIILQFLIFDLEHDPLQVGEGDCKYDWLDIWDGIPHVGPLIGKYCGTKTPSELRSSTGILSLTFHTDMAVAKDGFSARYYLVHQEPLENFQCNVPLGMESGRIANEQISASSTYSDGRWTPQQSRLHGDDNGWTPNLDSNKEYLQVDLRFLTMLTAIATQGAISRETQNGYYVKSYKLEVSTNGEDWMVYRHGKNHKVFQANNDATEVVLNKLHAPLLTRFVRIRPQTWHSGIALRLELFGCRVTDAPCSNMLGMLSGLIADSQISASSTQEYLWSPSAARLVSSRSGWFPRIPQAQPGEEWLQVDLGTPKTVKGVIIQGARGGDSITAVEARAFVRKFKVSYSLNGKDWEYIQDPRTQQPKLFEGNMHYDTPDIRRFDPIPAQYVRVYPERWSPAGIGMRLEVLGCDWTDSKPTVETLGPTVKSEETTTPYPTEEEATECGENCSFEDDKDLQLPSGFNCNFDFLEEPCGWMYDHAKWLRTTWASSSSPNDRTFPDDRNFLRLQSDSQREGQYARLISPPVHLPRSPVCMEFQYQATGGRGVALQVVREASQESKLLWVIREDQGGEWKHGRIILPSYDMEYQIVFEGVIGKGRSGEIAIDDIRISTDVPLENCMEPISAFAGENFKGGTLLPGTEPTVDTVPMQPIPAYWYYVMAAGGAVLVLVSVALALVLHYHRFRYAAKKTDHSITYKTSHYTNGAPLAVEPTLTIKLEQDRGSHC

SEQ ID NO: 2405 - protein, 521 aa, Homo sapiens
MKSQGQHWYSSSDKNCKVSFREKLLIIDSNLGVQDVENLKFLCIGLVPNKKLEKSSSASDVFEHLLAEDLLSEEDPFFLAELLYIIRQKKLLQHLNCTKEEVERLLPTRQRVSLFRNLLYELSEGIDSENLKDMIFLLKDSLPKTEMTSLSFLAFLEKQGKIDEDNLTCLEDLCKTVVPKLLRNIEKYKREKAIQIVTPPVDKEAESYQGEEELVSQTDVKTFLEALPQESWQNKHAGSNGNRATNGAPSLVSRGMQGASANTLNSETSTKRAAVYRMNRNHRGLCVIVNNHSFTSLKDRQGTHKDAEILSHVFQWLGFTVHIHNNVTKVEMEMVLQKQKCNPAHADGDCFVFCILTHGRFGAVYSSDEALIPIREIMSHFTALQCPRLAEKPKLFFIQACQGEEIQPSVSIEADALNPEQAPTSLQDSIPAEADFLLGLATVPGYVSFRHVEEGSWYIQSLCNHLKKLVPRMLKFLEKTMEIRGRKRTVWGAKQISATSLPTAISAQTPRPPMRRWSSVS

SEQ ID NO: 2406 - protein, 2595 aa, Homo sapiens
MASLFHQLQILVWKNWLGVKRQPLWTLVLILWPVIIFIILAITRTKFPPTAKPTCYLAPRNLPSTGFFPFLQTLLCDTDSKCKDTPYGPQDLLRRKGIDDALFKDSEILRKSSNLDKDSSLSFQSTQVPERRHASLATVFPSPSSDLEIPGTYTFNGSQVLARILGLEKLLKQNSTSEDIRRELCDSYSGYIVDDAFSWTFLGRNVFNKFCLSNMTLLESSLQELNKQFSQLSSDPNNQKIVFQEIVRMLSFFSQVQEQKAVWQLLSSFPNVFQNDTSLSNLFDVLRKANSVLLVVQKVYPRFATNEGFRTLQKSVKHLLYTLDSPAQGDSDNITHVWNEDDGQTLSPSSLAAQLLILENFEDALLNISANSPYIPYLACVRNVTDSLARGSPENLRLLQSTIRFKKSFLRNGSYEDYFPPVPEVLKSKLSQLRNLTELLCESETFSLIEKSCQLSDMSFGSLCEESEFDLQLLEAAELGTEIAASLLYHDNVISKKVRDLLTGDPSKINLNMDQFLEQALQMNYLENITQLIPIIEAMLHVNNSADASEKPGQLLEMFKNVEELKEDLRRTTGMSNRTIDKLLAIPIPDNRAEIISQVFWLHSCDTNITTPKLEDAMKEFCNLSLSERSRQSYLIGLTLLHYLNIYNFTYKVFFPRKDQKPVEKMMELFIRLKEILNQMASGTHPLLDKMRSLKQMHLPRSVPLTQAMYRSNRMNTPQGSFSTISQALCSQGITTEYLTAMLPSSQRPKGNHTKDFLTYKLTKEQIASKYGIPINSTPFCFSLYKDIINMPAGPVIWAFLKPMLLGRILYAPYNPVTKAIMEKSNVTLRQLAELREKSQEWMDKSPLFMNSFHLLNQAIPMLQNTLRNPFVQVFVKFSVGLDAVELLKQIDELDILRLKLENNIDIIDQLNTLSSLTVNISSCVLYDRIQAAKTIDEMEREAKRLYKSNELFGSVIFKLPSNRSWHRGYDSGNVFLPPVIKYTIRMSLKTAQTTRSLRTKIWAPGPHNSPSHNQIYGRAFIYLQDSIERAIIELQTGRNSQEIAVQVQAIPYPCFMKDNFLTSVSYSLPIVLMVAWVVFIAAFVKKLVYEKDLRLHEYMKMMGVNSCSHFFAWLIESVGFLLVTIVILIIILKFGNILPKTNGFILFLYFSDYSFSVIAMSYLISVFFNNTNIAALIGSLIYIIAFFPFIVLVTVENELSYVLKVFMSLLSPTAFSYASQYIARYEEQGIGLQWENMYTSPVQDDTTSFGWLCCLILADSFIYFLIAWYVRNVFPGTYGMAAPWYFPILPSYWKERFGCAEVKPEKSNGLMFTNIMMQNTNPSASPEYMFSSNIEPEPKDLTVGVALHGVTKIYGSKVAVDNLNLNFYEGHITSLLGPNGAGKTTTISMLTGLFGASAGTIFVYGKDIKTDLHTVRKNMGVCMQHDVLFSYLTTKEHLLLYGSIKVPHWTKKQLHEEVKRTLKDTGLYSHRHKRVGTLSGGMKRKLSISIALIGGSRVVILDEPSTGVDPCSRRSIWDVISKNKTARTIILSTHHLDEAEVLSDRIAFLEQGGLRCCGSPFYLKEAFGDGYHLTLTKKKSPNLNANAVCDTMAVTAMIQSHLPEAYLKEDIGGELVYVLPPFSTKVSGAYLSLLRALDNGMGDLNIGCYGISDTTVEEVFLNLTKESQKNSAMSLEHLTQKKIGNSNANGISTPDDLSVSSSNFTDRDDKILTRGERLDGFGLLLKKIMAILIKRFHHTRRNWKGLIAQVILPIVFVTTAMGLGTLRNSSNSYPEIQISPSLYGTSEQTAFYANYHPSTEALVSAMWDFPGIDNMCLNTSDLQCLNKDSLEKWNTSGEPITNFGVCSCSENVQECPKFNYSPPHRRTYSSQVIYNLTGQRVENYLISTANEFVQKRYGGWSFGLPLTKDLRFDITGVPANRTLAKVWYDPEGYHSLPAYLNSLNNFLLRVNMSKYDAARHGIIMYSHPYPGVQDQEQATISSLIDILVALSILMGYSVTTASFVTYVVREHQTKAKQLQHISGIGVTCYWVTNFIYDMVFYLVPVAFSIGIIAIFKLPAFYSENNLGAVSLLLLLFGYATFSWMYLLAGLFHETGMAFITYVCVNLFFGINSIVSLSVVYFLSKEKPNDPTLELISETLKRIFLIFPQFCFGYGLIELSQQQSVLDFLKAYGVEYPNETFEMNKLGAMFVALVSQGTMFFSLRLLINESLIKKLRLFFRKFNSSHVRETIDEDEDVRAERLRVESGAAEFDLVQLYCLTKTYQLIHKKIIAVNNISIGIPAGECFGLLGVNGAGKTTIFKMLTGDIIPSSGNILIRNKTGSLGHVDSHSSLVGYCPQEDALDDLVTVEEHLYFYARVHGIPEKDIKETVHKLLRRLHLMPFKDRATSMCSYGTKRKLSTALALIGKPSILLLDEPSSGMDPKSKRHLWKIISEEVQNKCSVILTSHSMEECEALCTRLAIMVNGKFQCIGSLQHIKSRFGRGFTVKVHLKNNKVTMETLTKFMQLHFPKTYLKDQHLSMLEYHVPVTAGGVANIFDLLETNKTALNITNFLVSQTTLEEVFINFAKDQKSYETADTSSQGSTISVDSQDDQMES

SEQ ID NO: 2407 - protein, 653 aa, Homo sapiens
MISSKMMSSNPEEDPLDTFLQYIEDMGMKAYDGLVIQNASDIARENDRLRNETNLAYLKEKNEKRRRQEEAIKRIGGEVGRGHEGSYVGKHFRMGFMTMPAPQDRLPHPCSSGFSVRSQSLHSVGGTDDDSSCGSRRQPPPKPKRDPSTKLSTSSETVSSTAASKSGKTPERTEASAKPRPHSDEYSKKIPPPKPKRNPNTQLSTSFDETYIKKHGPRRTSLPRDSSLSQMGSPAGDPEEEEPVYIEMVGNILRDFRKEDDDQSEAVYEEMKYPIFDDLGQDAKCDFDHHSCSSQCATPTVPDLDFAKASVPCPPKGLLCDIPPPFPNLLSHRPPLLVFPPAPVHCSPNSDESPLTPLEVTKLPVLENVSYMKQPAGASPSTLPSHVPGHAKLEKEQAAALGPASATPALSSSPPPPSTLYRTQSPHGYPKSHSTSPSPVSMGRSLTPLSLKRPPPYDAVHSGSLSRSSPSVPHSTPRPVSQDGAKMVNAAVNTYGAAPGGSRSRTPTSPLEELTSLFSSGRSLLRKSSSGRRSKEPAEKSTEELKVRSHSTEPLPKLDNKERGHHGASSSREPVKAQEWDGTPGTPVVTSRLGRCSVSPTLLAGNHSSEPKVSCKLGRSASTSGVPPPSVTPLRQSSDLQQSQVPSSLANRD

SEQ ID NO: 2408 - protein, 941 aa, Homo sapiens
MYQGEFGLNMKLGYGKFSWPTGESYHGQFYRDHCHGLGTYMWPDGSSFTGTFYLSHREGYGTMYMKTRLFQGLYKADQRFGPGVETYPDGSQDVGLWFREQLIKLCTQIPSGFSLLRYPEFSSFITHSPARISLSEEEKTEWGLQEGQDPFFYDYKRFLLNDNLTLPPEMYVYSTNSDHLPMTSSFRKELDARIFLNEIPPFVEDGEPWFIINETPLLVKIQKQTYKFRNKPAHTSWNMGAILEGKRSGFAPCGPKEQLSMEMILKAEEGNHEWICRILKDNFASADVADAKGYTVLAAAATHCHNDIVNLLLDCGADVNKCSDEGLTALSMCFLLHYPAQSFKPNVAERTIPEPQEPPKFPVVPILSSSFMDTNLESLYYEVNVPSQGSYELRPPPAPLLLPRVSGSHEGGHFQDTGQCGGSIDHRSSSLKGDSPLVKGSLGHVESGLEDVLGNTDRGSLCSAETKFESNVCVCDFSIELSQAMLERSAQSHSLLKMASPSPCTSSFDKGTMRRMALSMIERRKRWRTIKLLLRRGADPNLCCVPMQVLFLAVKAGDVDGVRLLLEHGARTDICFPPQLSTLTPLHIAAALPGEEGVQIVELLLHAITDVDAKASDEDDTYKPGKLDLLPSSLKLSNEPGPPQAYYSTDTALPEEGGRTALHMACEREDDNKCARDIVRLLLSHGANPNLLWSGHSPLSLSIASGNELVVKELLTQGADPNLPLTKGLGSALCVACDLTYEHQRNMDSKLALIDRLISHGADILKPVMLRQGEKEAVGTAVDYGYFRFFQDRRIARCPFHTLMPAERETFLARKRLLEYMGLQLRQAVFAKESQWDPTWLYLCKRAELIPSHRMKKKGPSLPRGLDVKEQGQIPFFKFCYQCGRSIGVRLLPCPRCYGILTCSKYCKTKAWTEFHKKDCGDLVAIVTQLEQVSRRREEFQ

SEQ ID NO: 2409 - protein, 603 aa, Homo sapiens
MSHPDYRMNLRPLGTPRGVSAVAGPHDIGASPGDKKSKNRSTRGKKKSIFETYMSKEDVSEGLKRGTLIQGVLRINPKKFHEAFIPSPDGDRDIFIDGVVARNRALNGDLVVVKLLPEEHWKVVKPESNDKETEAAYESDIPEELCGHHLPQQSLKSYNDSPDVIVEAQFDGSDSEDGHGITQNVLVDGVKKLSVCVSEKGREDGDAPVTKDETTCISQDTRALSEKSLQRSAKVVYILEKKHSRAATGFLKLLADKNSELFRKYALFSPSDHRVPRIYVPLKDCPQDFVARPKDYANTLFICRIVDWKEDCNFALGQLAKSLGQAGEIEPETEGILTEYGVDFSDFSSEVLECLPQGLPWTIPPEEFSKRRDLRKDCIFTIDPSTARDLDDALSCKPLADGNFKVGVHIADVSYFVPEGSDLDKVAAERATSVYLVQKVVPMLPRLLCEELCSLNPMSDKLTFSVIWTLTPEGKILDEWFGRTIIRSCTKLSYEHAQSMIESPTEKIPAKELPPISPEHSSEEVHQQNADKDGAAHLQASHSPSAEDAEAQPSTEERLPETRGICDRDPDTRLFFLQQQSRVLEAKPQNTIRVEEQTTQLQI

SEQ ID NO: 2410 - protein, 290 aa, Homo sapiens
METPLDVLSRAASLVHADDEKREAALRGEPRIQTLPVASALSSHRTGPPPISPSKRKFSMEPGDEDLDCDNDHVSKMSRIFNPHLNKTANGDCRRDPRERSRSPIERAVAPTMSLHGSHLYTSLPSLGLEQPLALTKNSLDASRPAGLSPTLTPGERQQNRPSVITCASAGARNCNLSHCPIAHSGCAAPGPASYRRPPSAATTCDPVVEEHFRRSLGKNYKEPEPAPNSVSITGSVDDHFAKALGDTWLQIKAAKDGASSSPESASRRGQPASPSAHMVSHSHSPSVVS

SEQ ID NO: 2411 - protein, 1259 aa, Homo sapiens
MANGVIPPPGGASPLPQVRVPLEEPPLSPDVEEEDDDLGKTLAVSRFGDLISKPPAWDPEKPSRSYSERDFEFHRHTSHHTHHPLSARLPPPHKLRRLPPTSARHTRRKRKKEKTSAPPSEGTPPIQEEGGAGVDEEEEEEEEEEGESEAEPVEPPHSGTPQKAKFSIGSDEDDSPGLPGRAAVTKPLPSVGPHTDKSPQHSSRPCSELRDGDGTTDLALSSPRLLCCLPSSPSPRARASRLAGEKSRPWSPSASYDLRERLCPGSALGNPGGPEQQVPTDEAEAQMLGSADLDDMKSHRLEDNPGVRRHLVKKPSRTQGGRGSPSGLAPILRRKKKKKKLDRRPHEVFVELNELMLDRSQEPHWRETARWIKFEEDVEEETERWGKPHVASLSFRSLLELRRTIAHGAALLDLEQTTLPGIAHLVVETMIVSDQIRPEDRASVLRTLLLKHSHPNDDKDSGFFPRNPSSSSMNSVLGNHHPTPSHGPDGAVPTMADDLGEPAPLWPHDPDAKEKPLHMPGGDGHRGKSLKLLEKIPEDAEATVVLVGCVPFLEQPAAAFVRLNEAVLLESVLEVPVPVRFLFVMLGPSHTSTDYHELGRSIATLMSDKLFHEAAYQADDRQDLLSAISEFLDGSIVIPPSEVEGRDLLRSVAAFQRELLRKRREREQTKVEMTTRGGYTAPGKELSLELGGSEATPEDDPLLRTGSVFGGLVRDVRRRYPHYPSDLRDALHSQCVAAVLFIYFAALSPAITFGGLLGEKTEGLMGVSELIVSTAVLGVLFSLLGAQPLLVVGFSGPLLVFEEAFFKFCRAQDLEYLTGRVWVGLWLVVFVLALVAAEGSFLVRYISPFTQEIFAFLISLIFIYETFYKLYKVFTEHPLLPFYPPEGALEGSLDAGLEPNGSALPPTEGPPSPRNQPNTALLSLILMLGTFFIAFFLRKFRNSRFLGGKARRIIGDFGIPISILVMVLVDYSITDTYTQKLTVPTGLSVTSPDKRSWFIPPLGSARPFPPWMMVAAAVPALLVLILIFMETQITALIVSQKARRLLKGSGFHLDLLLIGSLGGLCGLFGLPWLTAATVRSVTHVNALTVMRTAIAPGDKPQIQEVREQRVTGVLIASLVGLSIVMGAVLRRIPLAVLFGIFLYMGVTSLSGIQLSQRLLLILMPAKHHPEQPYVTKVKTWRMHLFTCIQLGCIALLWVVKSTAASLAFPFLLLLTVPLRHCLLPRLFQDRELQALDSEDAEPNFDEDGQDEYNELHMPV

SEQ ID NO: 2412 - protein, 410 aa, Homo sapiens
MLMPLCGLLWWWWCCCSGWYCYGLCAPAPQMLRHQGLLKCRCRMLFNDLKVFLLRRPPQAPLPMHGDPQPPGLAANNTLPALGAGGWAGWRGPREVVGREPPPVPPPPPLPPSSVEDDWGGPATEPPASLLSSASSDDFCKEKTEDRYSLGSSLDSGMRTPLCRICFQGPEQGELLSPCRCDGSVKCTHQPCLIKWISERGCWSCELCYYKYHVIAISTKNPLQWQAISLTVIEKVQVAAAILGSLFLIASISWLIWSTFSPSARWQRQDLLFQICYGMYGFMDVVCIGLIIHEGPSVYRIFKRWQAVNQQWKVLNYDKTKDLEDQKAGGRTNPRTSSSTQANIPSSEEETAGTPAPEQGPAQAAGHPSGPLSHHHCAYTILHILSHLRPHEQRSPPGSSRELVMRVTTV

SEQ ID NO: 2413 - protein, 523 aa, Homo sapiens
MAAVGRVGSFGSSPPGLSSTYTGGPLGNEIASGNGGAAAGDDEDGQNLWSCILSEVSTRSRSKLPAGKNVLLLGEDGAGKTSLIRKIQGIEEYKKGRGLEYLYLNVHDEDRDDQTRCNVWILDGDLYHKGLLKFSLDAVSLKDTLVMLVVDMSKPWTALDSLQKWASVVREHVDKLKIPPEEMKQMEQKLIRDFQEYVEPGEDFPASPQRRNTASQEDKDDSVVLPLGADTLTHNLGIPVLVVCTKCDAISVLEKEHDYRDEHFDFIQSHIRKFCLQYGAALIYTSVKENKNIDLVYKYIVQKLYGFPYKIPAVVVEKDAVFIPAGWDNDKKIGILHENFQTLKAEDNFEDIITKPPVRKFVHEKEIMAEDDQVFLMKLQSLLAKQPPTAAGRPVDASPRVPGGSPRTPNRSVSSNVASVSPIPAGSKKIDPNMKAGATSEGVLANFFNSLLSKKTGSPGGPGVSGGSPAGGAGGGSSGLPPSTKKSGQKPVLDVHAELDRITRKPVTVSPTTPTSPTEGEAS

SEQ ID NO: 2414 - protein, 420 aa, Homo sapiens
MGKRLDQPQMYPQYTYYYPHYLQTKQSYAPAPHPMAPPSPSTNSSSNNSSNNSSGEQLSKTNLYIRGLPPGTTDQDLIKLCQPYGKIVSTKAILDKNTNQCKGYGFVDFDSPAAAQKAVASLKANGVQAQMAKQQEQDPTNLYISNLPISMDEQELENMLKPFGHVISTRILRDANGVSRGVGFARMESTEKCEVVIQHFNGKYLKTPPGIPAPSEPLLCKFADGGQKKRQNQSKYTQNGRPWPREGEAGMALTYDPTAAIQNGFYSSPYSIATNRMIPQTSITPFIAASPVSTYQVQSTSWMPHPPYVMQPTGAVITPTMDHPMSMQPANMMGPLTQQMNHLSLGTTGTYMTAAAPMQGTYIPQYTPVPPTAVSIEGVVADTSPQTVAPSSQDTSGQQQQIAVDTSNEHAPAYSYQQSK

SEQ ID NO: 2415 - protein, 575 aa, Homo sapiens
MASWLRRKLRGKRRPVIAFCLLMILSAMAVTRFPPQRPSAGPDPGPMEPQGVTGAPATHIRQALSSSRRQRARNMGFWRSRALPRNSILVCAEEQGHRARVDRSRESPGGDLRHPGRVRRDITLSGHPRLSTQHVVLLREDEVGDPGTKDLGHPQHGSPIQETQSEVVTLVSPLPGSDMAALPAWRATSGLTLWPHTAEGRDLLGAENRALTGGQQAEDPTLASGAHQWPGSVEKLQGSVWCDAETLLSSSRTGGQAPPWLTDHDVQMLRLLAQGEVVDKARVPAHGQVLQVGFSTEAALQDLSSPRLSQLCSQGLCGLIKRPGDLPEVLSFHVDRVLGLRRSLPAVARRFHSPLLPYRYTDGGARPVIWWAPDVQHLSDPDEDQNSLALGWLQYQALLAHSCNWPGQAPCPGIHHTEWARLALFDFLLQVHDRLDRYCCGFEPEPSDPCVEERLREKCQNPAELRLVHILVRSSDPSHLVYIDNAGNLQHPEDKLNFRLLEGIDGFPESAVKVLASGCLQNMLLKSLQMDPVFWESQGGAQGLKQVLQTLEQRGQVLLGHIQKHNLTLFRDEDP

SEQ ID NO: 2416 - protein, 594 aa, Homo sapiens
MAGEENFKEELRSQDASRNLNQHEVAGHPHSWSLEMLLRRLRAVHTKQDDKFANLLDAVGEFGTFQQRLVALTFIPSIMSAFFMFADHFVFTAQKPYCNTSWILAVGPHLSKAEQLNLTIPQAPNGSFLTCFMYLPVPWNLDSIIQFGLNDTDTCQDGWIYPDAKKRSLINEFDLVCGMETKKDTAQIMFMAGLPIGSLIFRLITDKMGRYPAILLSLLGLIIFGFGTAFMNSFHLYLFFRFGISQSVVGYAISSISLATEWLVGEHRAHAIILGHCFFAVGAVLLTGIAYSLPHWQLLFLVGGILVIPFISYIWILPESPRWLMMKGKVKEAKQVLCYAASVNKKTIPSNLLDELQLPRKKVTRASVLDFCKNRQLCKVTLVMSCVWFTVSYTYFTLSLRMRELGVSVHFRHVVPSIMEVPARLCCIFLLQQIGRKWSLAVTLLQAIIWCLLLLFLPEGEDGLRLKWPRCPATELKSMTILVLMLREFSLAATVTVFFLYTAELLPTVLRATGLGLVSLASVAGAILSLTIISQTPSLLPIFLCCVLAIVAFSLSSLLPETRDQPLSESLNHSSQIRNKVKDMKTKETSSDDV

SEQ ID NO: 2417 - protein, 276 aa, Homo sapiens
MDGPAIITQVTNPKEDEGRLPGAGEKASQCNVSLKKQRSRSILSSFFCCFRDYNVEAPPPSSPSVLPPLVEENGGLQKGDQRQVIPIPSPPAKYLLPEVTVLDYGKKCVVIDLDETLVHSSFKPISNADFIVPVEIDGTIHQVYVLKRPHVDEFLQRMGQLFECVLFTASLAKYADPVADLLDRWGVFRARLFRESCVFHRGNYVKDLSRLGRELSKVIIVDNSPASYIFHPENAVPVQSWFDDMTDTELLDLIPFFEGLSREDDVYSMLHRLCNR

SEQ ID NO: 2418 - protein, 402 aa, Homo sapiens
MIPPSSPREDGVDGLPKEAVGAEQPPSPASTSSQESKLQKLKRSLSFKTKSLRSKSADNFFQRTNSEDMKLQAHMVAEISPSSSPLPAPGSLTSTPARAGLHPGGKAHAFQEYIFKKPTFCDVCNHMIVGTNAKHGLRCKACKMSIHHKCTDGLAPQRCMGKLPKGFRRYYSSPLLIHEQFGCIKEVMPIACGNKVDPVYETLRFGTSLAQRTKKGSSGSGSDSPHRTSTSDLVEVPEEANGPGGGYDLRKRSNSVFTYPENGTDDFRDPAKNINHQGSLSKDPLQMNTYVALYKFVPQENEDLEMRPGDIITLLEDSNEDWWKGKIQDRIGFFPANFVQRLQQNEKIFRCVRTFIGCKEQGQITLKENQICVSSEEEQDGFIRVLSGKKKGLIPLDVLENI

SEQ ID NO: 2419 - protein, 963 aa, Homo sapiens
MWCLHCNSERTQSLLELELDSGVEGEAPSSETGTSLDSPSAYPQGPLVPGSSLSPDHYEHTSVGAYGLYSGPPGQQQRTRRPKLQHSTSILRKQAEEEAIKRSRSLSESYELSSDLQDKQVEMLERKYGGRLVTRHAARTIQTAFRQYQMNKNFERLRSSMSENRMSRRIVLSNMRMQFSFEGPEKVHSSYFEGKQVSVTNDGSQLGALVSPECGDLSEPTTLKSPAPSSDFADAITELEDAFSRQVKSLAESIDDALNCRSLHTEEAPALDAARARDTEPQTALHGMDHRKLDEMTASYSDVTLYIDEEELSPPLPLSQAGDRPSSTESDLRLRAGGAAPDYWALAHKEDKADTDTSCRSTPSLERQEQRLRVEHLPLLTIEPPSDSSVDLSDRSERGSLKRQSAYERSLGGQQGSPKHGPHSGAPKSLPREEPELRPRPPRPLDSHLAINGSANRQSKSESDYSDGDNDSINSTSNSNDTINCSSESSSRDSLREQTLSKQTYHKEARNSWDSPAFSNDVIRKRHYRIGLNLFNKKPEKGVQYLIERGFVPDTPVGVAHFLLQRKGLSRQMIGEFLGNRQKQFNRDVLDCVVDEMDFSTMELDEALRKFQAHIRVQGEAQKVERLIEAFSQRYCICNPGVVRQFRNPDTIFILAFAIILLNTDMYSPNVKPERKMKLEDFIKNLRGVDDGEDIPREMLMGIYERIRKRELKTNEDHVSQVQKVEKLIVGKKPIGSLHPGLGCVLSLPHRRLVCYCRLFEVPDPNKPQKLGLHQREIFLFNDLLVVTKIFQKKKNSVTYSFRQSFSLYGMQVLLFENQYYPNGIRLTSSVPGADIKVLINFNAPNPQDRKKFTDDLRESIAEVQEMEKHRIESELEKQKGVVRPSMSQCSSLKKESGNGTLSRACLDDSYASGEGLKRSALSSSLRDLSEAGKRGRRSSAGSLESNVEFQPFEPLQPSVLCS

SEQ ID NO: 2420 - protein, 1093 aa, Homo sapiens
MARPVRGGLGAPRRSPCLLLLWLLLLRLEPVTAAAGPRAPCAAACTCAGDSLDCGGRGLAALPGDLPSWTRSLNLSYNKLSEIDPAGFEDLPNLQEVYLNNNELTAVPSLGAASSHVVSLFLQHNKIRSVEGSQLKAYLSLEVLDLSLNNITEVRNTCFPHGPPIKELNLAGNRIGTLELGAFDGLSRSLLTLRLSKNRITQLPVRAFKLPRLTQLDLNRNRIRLIEGLTFQGLNSLEVLKLQRNNISKLTDGAFWGLSKMHVLHLEYNSLVEVNSGSLYGLTALHQLHLSNNSIARIHRKGWSFCQKLHELVLSFNNLTRLDEESLAELSSLSVLRLSHNSISHIAEGAFKGLRSLRVLDLDHNEISGTIEDTSGAFSGLDSLSKLTLFGNKIKSVAKRAFSGLEGLEHLNLGGNAIRSVQFDAFVKMKNLKELHISSDSFLCDCQLKWLPPWLIGRMLQAFVTATCAHPESLKGQSIFSVPPESFVCDDFLKPQIITQPETTMAMVGKDIRFTCSAASSSSSPMTFAWKKDNEVLTNADMENFVHVHAQDGEVMEYTTILHLRQVTFGHEGRYQCVITNHFGSTYSHKARLTVNVLPSFTKTPHDITIRTTTMARLECAATGHPNPQIAWQKDGGTDFPAARERRMHVMPDDDVFFITDVKIDDAGVYSCTAQNSAGSISANATLTVLETPSLVVPLEDRVVSVGETVALQCKATGNPPPRITWFKGDRPLSLTERHHLTPDNQLLVVQNVVAEDAGRYTCEMSNTLGTERAHSQLSVLPAAGCRKDGTTVGIFTIAVVSSIVLTSLVWVCIIYQTRKKSEEYSVTNTDETVVPPDVPSYLSSQGTLSDRQETVVRTEGGPQANGHIESNGVCPRDASHFPEPDTHSVACRQPKLCAGSAYHKEPWKAMEKAEGTPGPHKMEHGGRVVCSDCNTEVDCYSRGQAFHPQPVSRDSAQPSAPNGPEPGGSDQEHSPHHQCSRTAAGSCPECQGSLYPSNHDRMLTAVKKKPMASLDGKGDSSWTLARLYHPDSTELQPASSLTSGSPERAEAQYLLVSNGHLPKACDASPESTPLTGQLPGKQRVPLLLAPKS

SEQ ID NO: 2421 - protein, 911 aa, Homo sapiens
MDGAMGPRGLLLCMYLVSLLILQAMPALGSATGRSKSSEKRQAVDTAVDGVFIRSLKVNCKVTSRFAHYVVTSQVVNTANEAREVAFDLEIPKTAFISDFAVTADGNAFIGDIKDKVTAWKQYRKAAISGENAGLVRASGRTMEQFTIHLTVNPQSKVTFQLTYEEVLKRNHMQYEIVIKVKPKQLVHHFEIDVDIFEPQGISKLDAQASFLPKELAAQTIKKSFSGKKGHVLFRPTVSQQQSCPTCSTSLLNGHFKVTYDVSRDKICDLLVANNHFAHFFAPQNLTNMNKNVVFVIDISGSMRGQKVKQTKEALLKILGDMQPGDYFDLVLFGTRVQSWKGSLVQASEANLQAAQDFVRGFSLDEATNLNGGLLRGIEILNQVQESLPELSNHASILIMLTDGDPTEGVTDRSQILKNVRNAIRGRFPLYNLGFGHNVDFNFLEVMSMENNGRAQRIYEDHDATQQLQGFYSQVAKPLLVDVDLQYPQDAVLALTQNHHKQYYEGSEIVVAGRIADNKQSSFKADVQAHGEGQEFSITCLVDEEEMKKLLRERGHMLENHVERLWAYLTIQELLAKRMKVDREERANLSSQALQMSLDYGFVTPLTSMSIRGMADQDGLKPTIDKPSEDSPPLEMLGPRRTFVLSALQPSPTHSSSNTQRLPDRVTGVDTDPHFIIHVPQKEDTLCFNINEEPGVILSLVQDPNTGFSVNGQLIGNKARSPGQHDGTYFGRLGIANPATDFQLEVTPQNITLNPGFGGPVFSWRDQAVLRQDGVVVTINKKRNLVVSVDDGGTFEVVLHRVWKGSSVHQDFLGFYVLDSHRMSARTHGLLGQFFHPIGFEVSDIHPGSDPTKPDATMVVRNRRLTVTRGLQKDYSKDPWHGAEVSCWFIHNNGAGLIDGAYTDYIVPDIF

SEQ ID NO: 2422 - protein, 345 aa, Homo sapiens
MKGELLLFSSVIVLLQVVCSCPDKCYCQSSTNFVDCSQQGLAEIPSHLPPQTRTLHLQDNQIHHLPAFAFRSVPWLMTLNLSNNSLSNLAPGAFHGLQHLQVLNLTQNSLLSLESRLFHSLPQLRELDLSSNNISHLPTSLGETWENLTILAVQQNQLQQLDRALLESMPSVRLLLLKDNLWKCNCHLLGLKLWLEKFVYKGGLTDGIICESPDTWKGKDLLRIPHELYQPCPLPAPDPVSSQAQWPGSAHGVVLRPPENHNAGERELLECELKPKPRPANLRHAIATVIITGVVCGIVCLMMLAAAIYGCTYAAITAQYHGGPLAQTNDPGKVEEKERFDSSPA

SEQ ID NO: 2423 - protein, 754 aa, Homo sapiens
MTTAGRGNLGLIPRSTAFQKQEGRLTVKQEPANQTWGQGSSLQKNYPPVCEIFRLHFRQLCYHEMSGPQEALSRLRELCRWWLMPEVHTKEQILELLVLEQFLSILPGELRTWVQLHHPESGEEAVAVVEDFQRHLSGSEEVSAPAQKQEMHFEETTALGTTKESPPTSPLSGGSAPGAHLEPPYDPGTHHLPSGDFAQCTSPVPTLPQVGNSGDQAGATVLRMVRPQDTVAYEDLSVDYTQKKWKSLTLSQRALQWNMMPENHHSMASLAGENMMKGSELTPKQEFFKGSESSNRTSGGLFGVVPGAAETGDVCEDTFKELEGQTSDEEGSRLENDFLEITDEDKKKSTKDRYDKYKEVGEHPPLSSSPVEHEGVLKGQKSYRCDECGKAFNRSSHLIGHQRIHTGEKPYECNECGKTFRQTSQLIVHLRTHTGEKPYECSECGKAYRHSSHLIQHQRLHNGEKPYKCNECAKAFTQSSRLTDHQRTHTGEKPYECNECGEAFIRSKSLARHQVLHTGKKPYKCNECGRAFCSNRNLIDHQRIHTGEKPYECSECGKAFSRSKCLIRHQSLHTGEKPYKCSECGKAFNQNSQLIEHERIHTGEKPFECSECGKAFGLSKCLIRHQRLHTGEKPYKCNECGKSFNQNSHLIIHQRIHTGEKPYECNECGKVFSYSSSLMVHQRTHTGEKPYKCNDCGKAFSDSSQLIVHQRVHTGEKPYECSECGKAFSQRSTFNHHQRTHTGEKSSGLAWSVS

SEQ ID NO: 2424 - protein, 559 aa, Homo sapiens
MWTNFFKLRLFCCLLAVLMVVVLVINVTQVEYLDHETVSATFIDSSGQFVSSQVTGISRNPYCGYDQQTLSSQERMEEDSLLAALHRQVPDVGPVPFVKSTDPSSSYFVILNSAAFFKVGSQLEVLVHVQDFQRKPKKYGGDYLQARIHSLKLQAGAVGRVVDYQNGFYKVFFTLLWPGKVKVSVSLVHPSEGIRVLQRLQEDKPDRVYFKSLFRSGRISETTECNVCLPGNLPLCNFTDLYTGEPWFCFKPKKLPCSSRITHFKGGYLKGLLTAAESAFFQSGVNIKMPVNSSGPDWVTVIPRRIKETNSLELSQGSGTFPSGYYYKDQWRPRKFKMRQFNDPDNITECLQRKVVHLFGDSTIRQWFEYLTTFVPDLVEFNLGSPKNVGPFLAVDQKHNILLKYRCHGPPIRFTTVFSNELHYVANELNGIVGGKNTVVAIAVWSHFSTFPLEVYIRRLRNIRRAVVRLLDRSPKTVVVIRTANAQELGPEVSLFNSDWYNFQLDTILRRMFSGVGVYLVDAWEMTLAHYLPHKLHPDEVIVKNQLDMFLSFVCPLET

SEQ ID NO: 2425 - protein, 797 aa, Homo sapiens
MASCRAWNLRVLVAVVCGLLTGIILGLGIWRIVIRIQRGKSTSSSSTPTEFCRNGGTWENGRCICTEEWKGLRCTIANFCENSTYMGFTFARIPVGRYGPSLQTCGKDTPNAGNPMAVRLCSLSLYGEIELQKVTIGNCNENLETLEKQVKDVTAPLNNISSEVQILTSDANKLTAENITSATRVVGQIFNTSRNASPEAKKVAIVTVSQLLDASEDAFQRVAATANDDALTTLIEQMETYSLSLGNQSVVEPNIAIQSANFSSENAVGPSNVRFSVQKGASSSLVSSSTFIHTNVDGLNPDAQTELQVLLNMTKNYTKTCGFVVYQNDKLFQSKTFTAKSDFSQKIISSKTDENEQDQSASVDMVFSPKYNQKEFQLYSYACVYWNLSAKDWDTYGCQKDKGTDGFLRCRCNHTTNFAVLMTFKKDYQYPKSLDILSNVGCALSVTGLALTVIFQIVTRKVRKTSVTWVLVNLCISMLIFNLLFVFGIENSNKNLQTSDGDINNIDFDNNDIPRTDTINIPNPMCTAIAALLHYFLLVTFTWNALSAAQLYYLLIRTMKPLPRHFILFISLIGWGVPAIVVAITVGVIYSQNGNNPQWELDYRQEKICWLAIPEPNGVIKSPLLWSFIVPVTIILISNVVMFITISIKVLWKNNQNLTSTKKVSSMKKIVSTLSVAVVFGITWILAYLMLVNDDSIRIVFSYIFCLFNTTQGLQIFILYTVRTKVFQSEASKVLMLLSSIGRRKSLPSVTRPRLRVKMYNFLRSLPTLHERFRLLETSPSTEEITLSESDNAKESI

SEQ ID NO: 2426 - protein, 1946 aa, Homo sapiens
MVESCLLTFRAFFWWIALIKMDLSDLGEAAAFLRRSEAELLLLQATALDGKKKCWIPDGENAYIEAEVKGSEDDGTVIVETADGESLSIKEDKIQQMNPPEFEMIEDMAMLTHLNEASVLHTLKRRYGQWMIYTYSGLFCVTINPYKWLPVYQKEVMAAYKGKRRSEAPPHIFAVANNAFQDMLHNRENQSILFTGESGAGKTVNSKHIIQYFATIAAMIESRKKQGALEDQIMQANTILEAFGNAKTLRNDNSSRFGKFIRMHFGARGMLSSVDIDIYLLEKSRVIFQQAGERNYHIFYQILSGQKELHDLLLVSANPSDFHFCSCGAVTVESLDDAEELLATEQAMDILGFLPDEKYGCYKLTGAIMHFGNMKFKQKPREEQLEADGTENADKAAFLMGINSSELVKCLIHPRIKVGNEYVTRGQTIEQVTCAVGALSKSMYERMFKWLVARINRALDAKLSRQFFIGILDITGFEILEYNSLEQLCINFTNEKLQQFFNWHMFVLEQEEYKKESIEWVSIGFGLDLQACIDLIEKPMGILSILEEECMFPKATDLTFKTKLFDNHFGKSVHLQKPKPDKKKFEAHFELVHYAGVVPYNISGWLEKNKDLLNETVVAVFQKSSNRLLASLFENYMSTDSAIPFGEKKRKKGASFQTVASLHKENLNKLMTNLKSTAPHFVRCINPNVNKIPGILDPYLVLQQLRCNGVLEGTRICREGFPNRLQYADFKQRYCILNPRTFPKSKFVSSRKAAEELLGSLEIDHTQYRFGITKVFFKAGFLGQLEAIRDERLSKVFTLFQARAQGKLMRIKFQKILEERDALILIQWNIRAFMAVKNWPWMRLFFKIKPLVKSSEVGEEVAGLKEECAQLQKALEKSEFQREELKAKQVSLTQEKNDLILQLQAEQETLANVEEQCEWLIKSKIQLEARVKELSERVEEEEEINSELTARGRKLEDECFELKKEIDDLETMLVKSEKEKRTTEHKVKNLTEEVEFLNEDISKLNRAAKVVQEAHQQTLDDLHMEEEKLSSLSKANLKLEQQVDELEGALEQERKARMNCERELHKLEGNLKLNRESMENLESSQRHLAEELRKKELELSQMNSKVENEKGLVAQLQKTVKELQTQIKDLKEKLEAERTTRAKMERERADLTQDLADLNERLEEVGGSSLAQLEITKKQETKFQKLHRDMEEATLHFETTSASLKKRHADSLAELEGQVENLQQVKQKLEKDKSDLQLEVDDLLTRVEQMTRAKANAEKLCTLYEERLHEATAKLDKVTQLANDLAAQKTKLWSESGEFLRRLEEKEALINQLSREKSNFTRQIEDLRGQLEKETKSQSALAHALQKAQRDCDLLREQYEEEQEVKAELHRTLSKVNAEMVQWRMKYENNVIQRTEDLEDAKKELAIRLQEAAEAMGVANARNASLERARHQLQLELGDALSDLGKVRSAAARLDQKQLQSGKALADWKQKHEESQALLDASQKEVQALSTELLKLKNTYEESIVGQETLRRENKNLQEEISNLTNQVREGTKNLTEMEKVKKLIEEEKTEVQVTLEETEGALERNESKILHFQLELLEAKAELERKLSEKDEEIENFRRKQQCTIDSLQSSLDSEAKSRIEVTRLKKKMEEDLNEMELQLSCANRQVSEATKSLGQLQIQIKDLQMQLDDSTQLNSDLKEQVAVAERRNSLLQSELEDLRSLQEQTERGRRLSEEELLEATERINLFYTQNTSLLSQKKKLEADVARMQKEAEEVVQECQNAEEKAKKAAIEAANLSEELKKKQDTIAHLERTRENMEQTITDLQKRLAEAEQMALMGSRKQIQKLESRVRELEGELEGEIRRSAEAQRGARRLERCIKELTYQAEEDKKNLSRMQTQMDKLQLKVQNYKQQVEVAETQANQYLSKYKKQQHELNEVKERAEVAESQVNKLKIKAREFGKKVQEE

SEQ ID NO: 2427 - protein, 456 aa, Homo sapiens
MPPGPWESCFWVGGLILWLSVGSSGDAPPTPQPKCADFQSANLFEGTDLKVQFLLFVPSNPSCGQLVEGSSDLQNSGFNATLGTKLIIHGFRVLGTKPSWIDTFIRTLLRATNANVIAVDWIYGSTGVYFSAVKNVIKLSLEISLFLNKLLVLGVSESSIHIIGVSLGAHVGGMVGQLFGGQLGQITGLDPAGPEYTRASVEERLDAGDALFVEAIHTDTDNLGIRIPVGHVDYFVNGGQDQPGCPTFFYAGYSYLICDHMRAVHLYISALENSCPLMAFPCASYKAFLAGRCLDCFNPFLLSCPRIGLVEQGGVKIEPLPKEVKVYLLTTSSAPYCMHHSLVEFHLKELRNKDTNIEVTFLSSNITSSSKITIPKQQRYGKGIIAHATPQCQINQVKFKFQSSNRVWKKDRTTIIGKFCTALLPVNDREKMVCLPEPVNLQASVTVSCDLKIACV

SEQ ID NO: 2428 - protein, 767 aa, Homo sapiens
MSHAVTIEEPQAQPQVSQTRYRERSRAGSHISSNRAYDFLYDPLFIVSSEKDHTQANIQATLIRSRLRKVPRFKTMFSNLIHYPRYSLYWSKSDPVPPFISREWKGHKEKHREALRQLTTTDASFQMPKEVYEDPEVTGKNRYKYFERPFLPFFQQMPFNVVYAVSKAEPYTFPPTSTKHLSIPSKSTVGTQTDYRDADVQTDPYSAEYVVCQDSIPELLTLATLTWGRGLPAGQAEVEMIERAREKRAWEASLPALSDTSQFEKRRKMMNEMERKEWAFREQEIEKLQEIRLEVLKELLRKREENQNEVNMKHLNARWSKLQEGKEAKMAKIQRTHVSTIRKLVGKRKNIEGKLERRNIIKDYSDYASQVYGPLSRLGCFPDNNSEDFVVKNYYLNTYEGLVELESCLPDFVTQPQIRAPKPKVITTKAGFLKRAARLDYELAEVHKALLDKKNKVLEVKKPPRFLQRNPIPQPRLPTPTLEMTSNEEEEMEMAVIYLQKLLRGRVVQNMMFEGKEKRLELIQELRTCHALQEDEKLVKKAEKQVTLALQRQRNLHEHKVSLVENHLAGLEGRALADMFDFLSKELVRLQEERRIHAFVMLAERQRRVREAEESGRRQVEKQRLREEDEIFKEVVKVHHSTISSYLEDIILNTEANTAEEQARAEIEKMAEKINDIAYEMESRRTYLQSEEIVAELVYSFLIPEVQKYFVKEKVRNAQRKHILAAHQIIHSYTESMVQKKLTEGEQDEASNAAMLLEKETQNENNS

SEQ ID NO: 2429 - protein, 1115 aa, Homo sapiens
MLRGTMTAWRGMRPEVTLACLLLATAGCFADLNEVPQVTVQPASTVQKPGGTVILGCVVEPPRMNVTWRLNGKELNGSDDALGVLITHGTLVITALNNHTVGRYQCVARMPAGAVASVPATVTLANLQDFKLDVQHVIEVDEGNTAVIACHLPESHPKAQVRYSVKQEWLEASRGNYLIMPSGNLQIVNASQEDEGMYKCAAYNPVTQEVKTSGSSDRLRVRRSTAEAARIIYPPEAQTIIVTKGQSLILECVASGIPPPRVTWAKDGSSVTGYNKTRFLLSNLLIDTTSEEDSGTYRCMADNGVGQPGAAVILYNVQVFEPPEVTMELSQLVIPWGQSAKLTCEVRGNPPPSVLWLRNAVPLISSQRLRLSRRALRVLSMGPEDEGVYQCMAENEVGSAHAVVQLRTSRPSITPRLWQDAELATGTPPVSPSKLGNPEQMLRGQPALPRPPTSVGPASPQCPGEKGQGAPAEAPIILSSPRTSKTDSYELVWRPRHEGSGRAPILYYVVKHRKQVTNSSDDWTISGIPANQHRLTLTRLDPGSLYEVEMAAYNCAGEGQTAMVTFRTGRRPKPEIMASKEQQIQRDDPGASPQSSSQPDHGRLSPPEAPDRPTISTASETSVYVTWIPRGNGGFPIQSFRVEYKKLKKVGDWILATSAIPPSRLSVEITGLEKGTSYKFRVRALNMLGESEPSAPSRPYVVSGYSGRVYERPVAGPYITFTDAVNETTIMLKWMYIPASNNNTPIHGFYIYYRPTDSDNDSDYKKDMVEGDKYWHSISHLQPETSYDIKMQCFNEGGESEFSNVMICETKARKSSGQPGRLPPPTLAPPQPPLPETIERPVGTGAMVARSSDLPYLIVGVVLGSIVLIIVTFIPFCLWRAWSKQKHTTDLGFPRSALPPSCPYTMVPLGGLPGHQASGQPYLSGISGRACANGIHMNRGCPSAAVGYPGMKPQQHCPGELQQQSDTSSLLRQTHLGNGYDPQSHQITRGPKSSPDEGSFLYTLPDDSTHQLLQPHHDCCQRQEQPAAVGQSGVRRAPDSPVLEAVWDPPFHSGPPCCLGLVPVEEVDSPDSCQVSGGDWCPQHPVGAYVGQEPGMQLSPGPLVRVSFETPPLTI

SEQ ID NO: 2430 - protein, 617 aa, Homo sapiens
MDFSKLPKILDEDKESTFGYVHGVSGPVVTACDMAGAAMYELVRVGHSELVGEIIRLEGDMATIQVYEETSGVSVGDPVLRTGKPLSVELGPGIMGAIFDGIQRPLSDISSQTQSIYIPRGVNVSALSRDIKWDFTPCKNLRVGSHITGGDIYGIVSENSLIKHKIMLPPRNRGTVTYIAPPGNYDTSDVVLELEFEGVKEKFTMVQVWPVRQVRPVTEKLPANHPLLTGQRVLDALFPCVQGGTTAIPGAFGCGKTVISQSLSKYSNSDVIIYVGCGERGNEMSEVLRDFPELTMEVDGKVESIMKRTALVANTSNMPVAAREASIYTGITLSEYFRDMGYHVSMMADSTSRWAEALREISGRLAEMPADSGYPAYLGARLASFYERAGRVKCLGNPEREGSVSIVGAVSPPGGDFSDPVTSATLGIVQVFWGLDKKLAQRKHFPSVNWLISYSKYMRALDEYYDKHFTEFVPLRTKAKEILQEEEDLAEIVQLVGKASLAETDKITLEVAKLIKDDFLQQNGYTPYDRFCPFYKTVGMLSNMIAFYDMARRAVETTAQSDNKITWSIIREHMGDILYKLSSMKFKDPLKDGEAKIKSDYAQLLEDMQNAFRSLED

SEQ ID NO: 2431 - protein, 359 aa, Homo sapiens [sequence omitted]

SEQ ID NO: 2432 - protein, 1809 aa, Homo sapiens
MAAFGLLSYEQRPLKRPRLGPPDVYPQDPKQKEDELTAVNVKQGFNNQPAFTGDEHGSARNIVINPSKIGAYFSSILAEKLKLNTFQDTGKKKPQVNAKDNYWLVTARSQSAIHSWFSDLAGNKPLSILAKKVPILSKKEDVFAYLAKYSVPMVRATWLIKMTCAYYSAISEAKIKKRQAPDPNLEWTQISTRYLREQLAKISDFYHMASSTGDGPVPVPPEVEQAMKQWEYNEKLAFHMFQEGMLEKHEYLTWILDVLEKIRPMDDDLLKLLLPLMLQVRARIYEVEQQIKQRGRAVEVRWSFDKCQESTAGVTISRVLHTLEVLDRHCFDRTDSSNSMETLYHKIFWANQNKDNQEVAPNDEAVVTLLCEWAVSCKRSGKHRAMAVAKLLEKRQAEIEAERCGESEVLDEKESISSSSLAGSSLPVFQNVLLRFLDTQAPSLSDPNSECEKVEFVNLVLLFCEFIRHDVFSHDAYMCTLISRGDLSVTASTRPRSPVGENADEHYSKDHDVKMEIFSPMPGESCENANTSLGRRMSVNCEKLVKREKPRELIFPSNYDLLRHLQYATHFPIPLDESSSHECNQRTILLYGVGKERDEARHQLKKITKDILKILNKKSTTETGVGDEGQKARKNKQETFPTLETVFTKLQLLSYFDQHQVTSQISNNVLEQITSFASGTSYHLPLAHHIQLIFDLMEPALNINGLIDFAIQLLNELSVVEAELLLKSSSLAGSYTTGLCVCIVAVLRRYHSCLILNPDQTAQVFEGLCGVVKHVVNPSECSSPERCILAYLYDLYVSCSHLRSKFGDLFSSACSKVKQTIYNNVMPANSNLRWDPDFMMDFIENPSARSINYSMLGKILSDNAANRYSFVCNTLMNVCMGHQDAGRINDIANFSSELTACCTVLSSEWLGVLKALCCSSNHVWGFNDVLCTVDVSDLSFHDSLATFIAILIARQCFSLEDVVQHVALPSLLAAACGDADAEPGARMTCRLLLHLFRAPQACFLPQATGKPFPGIRSSCDRHLLAAAHNSIEVGAVFAVLKAIMMLGDAKIGNNSVSSLKNDDFTMRGLRCDGNADDIWTASQNPKSCGKSISIETANLREYARYVLRTICQQEWVGEHCLKEPERLCTDKELILDPVLSNMQAQKLLQLICYPHGIKECTEGDNLQRQHIKRILQNLEQWTLRQSWLELQLMIKQCLKDPGSGSVAEMNNLLDNIAKATIEVFQQSADLNNSSNSGMSLFNPNSIGSADTSSTRQNGIKTFLSSSERRGVWLVAPLIARLPTSVQGRVLKAAGEELEKGQHLGSSSKKERDRQKQKSMSLLSQQPFLSLVLTCLKGQDEQREGLLTSLQNQVNQILSNWREERYQDDIKARQMMHEALQLRLNLVGGMFDTVQRSTQWTTDWALLLLQIITSGTVDMHTNNELFTTVLDMLGVLINGTLASDLSNASPGGSEENKRAYMNLVKKLKKELGDKRSESIDKVRQLLPLPKQTCDVITCEPMGSLIDTKGNKIAGFDSIDKKQGLQVSTKQKVSPWDLFEGQKNPAPLSWAWFGTVRVDRRVIKYEEQHHLLLYHTHPMPKPRSYYLQPLPLPPEEEEEEPTSPVSQEPERKSAELSDQGKTTTDEEKKTKGRKRKTKSSSRVDEYPQSNIYRVPPNYSPISSQMMHHPQSTLWGYNLVGQPQQPGFFLQNQSLTPGGSRLDPAGSFVPTNTKQALSNMLQRRSGAMMQPPSLHAITSQQQLIQMKLLQQQQQQRLLRQAQTRPFQQFPRQGLQQTQQQQQTAALVRQLQKQLSSNQPQQGVTPYGHPSHF

SEQ ID NO: 2433 - protein, 912 aa, Homo sapiens
MAGPSNPPATMKIAVIGQSLFGQEVYCHLRKEGHEVVGVFTVPDKDGKADPLGLEAEKDGVPVFKYSRWRAKGQALPDVVAKYQALGAELNVLPFCSQFIPMEIISAPRHGSIIYHPSLLPRHRGASAINWTLIHGDKKGGFSIFWADDGLDTGDLLLQKECEVLPDDTVSTLYNRFLFPEGIKGMVQAVRLIAEGKAPRLPQPEEGATYEGIQKKETAKINWDQPAEAIHNWIRGNDKVPGAWTEACEQKLTFFNSTLNTSGLVPEGDALPIPGAHRPGVVTKAGLILFGNDDKMLLVKNIQLEDGKMILASNFFKGAASSVLELTEAELVTAEAVRSVWQRILPKVLEVEDSTDFFKSGAASVDVVRLVEEVKELCDGLELENEDVYMASTFGDFIQLLVRKLRGDDEEGECSIDYVEMAVNKRTVRMPHQLFIGGEFVDAEGAKTSETINPTDGSVICQVSLAQVTDVDKAVAAAKDAFENGRWGKISARDRGRLMYRLADLMEQHQEELATIEALDAGAVYTLALKTHVGMSIQTFRYFAGWCDKIQGSTIPINQARPNRNLTLTRKEPVGVCGIIIPWNYPLMMLSWKTAACLAAGNTVVIKPAQVTPLTALKFAELTLKAGIPKGVVNVLPGSGSLVGQRLSDHPDVRKIGFTGSTEVGKHIMKSCAISNVKKVSLELGGKSPLIIFADCDLNKAVQMGMSSVFFNKGENCIAAGRLFVEDSIHDEFVRRVVEEVRKMKVGNPLDRDTDHGPQNHHAHLVKLMEYCQHGVKEGATLVCGGNQVPRPGFFFEPTVFTDVEDHMFIAKEESFGPVMIISRFADGDLDAVLSRANATEFGLASGVFTRDINKALYVSDKLQAGTVFVNTYNKTDVAAPFGGFKQSGFGKDLGEAALNEYLRVKTVTFEY

SEQ ID NO: 2434 - protein, 759 aa, Homo sapiens
MMAALYPSTDLSGASSSSLPSSPSSSSPNEVMALKDVREVKEENTLNEKLFLLACDKGDYYMVKKILEENSSGDLNINCVDVLGRNAVTITIENENLDILQLLLDYGCQKLMERIQNPEYSTTMDVAPVILAAHRNNYEILTMLLKQDVSLPKPHAVGCECTLCSAKNKKDSLRHSRFRLDIYRCLASPALIMLTEEDPILRAFELSADLKELSLVEVEFRNDYEELARQCKMFAKDLLAQARNSRELEVILNHTSSDEPLDKRGLLEERMNLSRLKLAIKYNQKEFVSQSNCQQFLNTVWFGQMSGYRRKPTCKKIMTVLTVGIFWPVLSLCYLIAPKSQFGRIIHTPFMKFIIHGASYFTFLLLLNLYSLVYNEDKKNTMGPALERIDYLLILWIIGMIWSDIKRLWYEGLEDFLEESRNQLSFVMNSLYLATFALKVVAHNKFHDFADRKDWDAFHPTLVAEGLFAFANVLSYLRLFFMYTTSSILGPLQISMGQMLQDFGKFLGMFLLVLFSFTIGLTQLYDKGYTSKEQKDCVGIFCEQQSNDTFHSFIGTCFALFWYIFSLAHVAIFVTRFSYGEELQSFVGAVIVGTYNVVVVIVLTKLLVAMLHKSFQLIANHEDKEWKFARAKLWLSYFDDKCTLPPPFNIIPSPKTICYMISSLSKWICSHTSKGKVKRQNSLKEWRNLKQKRDENYQKVMCCLVHRYLTSMRQKMQSTDQATVENLNELRQDLSKFRNEIRDLLGFRTSKYAMFYPRN

SEQ ID NO: 2435 - protein, 927 aa, Homo sapiens
MQSILYHGLIRDQACRRQTDYWQFVKDIRWLSPHSALHVEKFISVHENDQSSADGASERAVAELWLQHSLQYHCLSAQLRPLLGDRQYIRKFYTDAAFLLSDAHVTAMLQCLEAVEQNNPRLLAQIDASMFARKHESPLLVTKSQSLTALPSSTYTPPNSYAQHSYFGSFSSLHQSVPNNGSERRSTSFPLSGPPRKPQESRGHVSPAEDQTIQAPPVSVSALARDSPLTPNEMSSSTLTSPIEASWVSSQNDSPGDASEGPEYLAIGNLDPRGRTASCQSHSSNAESSSSNLFSSSSSQKPDSAASSLGDQEGGGESQLSSVLRRSSFSEGQTLTVTSGAKKSHIRSHSDTSIASRGAPGGPRNITIIVEDPIAESCNDKAKLRGPLPYSGQSSEVSTPSSLYMEYEGGRYLCSGEGMFRRPSEGQSLISYLSEQDFGSCADLEKENAHFSISESLIAAIELMKCNMMSQCLEEEEVEEEDSDREIQELKQKIRLRRQQIRTKNLLPMYQEAEHGSFRVTSSSSQFSSRDSAQLSDSGSADEVDEFEIQDADIRRNTASSSKSFVSSQSFSHCFLHSTSAEAVAMGLLKQFEGMQLPAASELEWLVPEHDAPQKLLPIPDSLPISPDDGQHADIYKLRIRVRGNLEWAPPRPQIIFNVHPAPTRKIAVAKQNYRCAGCGIRTDPDYIKRLRYCEYLGKYFCQCCHENAQMAIPSRVLRKWDFSKYYVSNFSKDLLIKIWNDPLFNVQDINSALYRKVKLLNQVRLLRVQLCHMKNMFKTCRLAKELLDSFDTVPGHLTEDLHLYSLNDLTATRKGELGPRLAELTRAGATHVERCMLCQAKGFICEFCQNEDDIIFPFELHKCRTCEECKACYHKACFKSGSCPRCERLQARREALARQSLESYLSDYEEEPAEALALEAAVLEAT

SEQ ID NO: 2436 - protein, 403 aa, Homo sapiens
MQRAVSVVARLGFRLQAFPPALCRPLSCAQEVLRRTPLYDFHLAHGGKMVAFAGWSLPVQYRDSHTDSHLHTRQHCSLFDVSHMLQTKILGSDRVKLMESLVVGDIAELRPNQGTLSLFTNEAGGILDDLIVTNTSEGHLYVVSNAGCWEKDLALMQDKVRELQNQGRDVGLEVLDNALLALQGPTAAQVLQAGVADDLRKLPFMTSAVMEVFGVSGCRVTRCGYTGEDGVEISVPVAGAVHLATAILKNPEVKLAGLAARDSLRLEAGLCLYGNDIDEHTTPVEGSLSWTLGKRRRAAMDFPGAKVIVPQLKGRVQRRRVGLMCEGAPMRAHSPILNMEGTKIGTVTSGCPSPSLKKNVAMGYVPCEYSRPGTMLLVEVRRKQQMAVVSKMPFVPTNYYTLK

SEQ ID NO: 2437 - protein, 1186 aa, Homo sapiens
MKKFNFRKVLDGLTASSPGSGSSSGSNSGGGAGSGSVHPAGTAGVLREEIQETLTSEYFQICKTVRHGFPHQPTALAFDPVQKILAIGTRTGAIRILGRPGVDCYCQHESGAAVLQLQFLINEGALVSASSDDTLHLWNLRQKRPAILHSLKFNRERITYCHLPFQSKWLYVGTERGNTHIVNIESFILSGYVIMWNKAIELSTKTHPGPVVHLSDSPRDEGKLLIGYENGTVVFWDLKSKRAELRVYYDEAIHSIDWHHEGKQFMCSHSDGSLTLWNLKSPSRPFQTTIPHGKSQREGRKSESCKPILKVEYKTCKNSEPFIIFSGGLSYDKACRRPSLTIMHGKAITVLEMDHPIVEFLTLCETPYPNEFQEPYAVVVLLEKDLIVVDLTQSNFPIFENPYPMDIHESPVTCTAYFADCPPDLILVLYSIGVKHKKQGYSNKEWPISGGAWNLGAQTYPEIIITGHADGSIKFWDASAITLQMLYKLKTSKVFEKQKVGEGKQTCEIVEEDPFAIQMIYWCPESRIFCVSGVSAYVIIYKFSRHEITTEIVSLEVRLQYDVEDIITPEPETSPPFPDLSAQLPSSRSLSGSTNTVASEGVTKDSIPCLNVKTRPVRMPPGYQAELVIQLVWVDGEPPQQITSLAVSSAYGIVAFGNCNGLAVVDFIQKTVLLSMGTIDLYRSSDLYQRQPRSPRKNKQFIADNFCMRGLSNFYPDLTKRIRTSYQSLTELNDSPVPLELERCKSPTSDHVNGHCTSPTSQSCSSGKRLSSADVSKVNRWGPGRPPFRKAQSAACMEISLPVTTEENRENSYNRSRSSSISSIDKDSKEAITALYFMDSFARKNDSTISPCLFVGTSLGMVLIISLNLPLADEQRFTEPVMVLPSGTFLSLKGAVLTFSCMDRMGGLMQPPYEVWRDPNNIDENEKSWRRKVVMNSSSASQEIGDHQYTIICSEKQAKVFSLPSQTCLYVHNITETSFILQANVVVMCSSACLACFCANGHIMIMSLPSLRPMLDVNYLPLTDMRIARTFCFTNEGQALYLVSPTEIQRLTYSQEMCDNLQDMLGDLFTPIETPEAQNRGFLKGLFGGSGQTFDREELFGEASAGKASRSLAQHIPGPGSIEGMKGAAGGVMGELTRARIALDERGQRLGELEEKTAGMMTSAEAFSKHAHELMLKYKDKKWYQF

SEQ ID NO: 2438 - protein, 260 aa, Homo sapiens
MNSAAGFSHLDRRERVLKLGESFEKQPRCAFHTVRYDFKPASIDTSSEGYLEVGEGEQVTITLPNIEGSTPPVTVFKGSKKPYLKECILIINHDTGECRLEKLSSNITVKKTRVEGSSKIQYRKEQQQQQMWNSARTPNLVKHSPSEDKMSPASPIDDIERELKAEASLMDQMSSCDSSSDSKSSSSSSSEDSSSDSEDEDCKSSTSDTGNCVSGHPTMTQYRIPDIDASHNRFRDNSGLLMNTLRNDLQLSESGSDSDD

SEQ ID NO: 2439 - protein, 502 aa, Homo sapiens
MAWPKLPAPWLLLCTWLPAGCLSLLVTVQHTERYVTLFASIILKCDYTTSAQLQDVVVTWRFKSFCKDPIFDYYSASYQAALSLGQDPSNDCNDNQREVRIVAQRRGQNEPVLGVDYRQRKITIQNRADLVINEVMWWDHGVYYCTIEAPGDTSGDPDKEVKLIVLHWLTVIFIILGALLLLLLIGVCWCQCCPQYCCCYIRCPCCPAHCCCPEEDLSLPSSLPQMPMTQTTNQPPIANGVLEYLEKELRNLNLAQPLPPDLKGRFGHPCSMLSSLGSEVVERRIIHLPPLIRDLSSSRRTSDSLHQQWLTPIPSRPWDLREGRSHHHYPDFHQELQDRGPKSWALERRELDPSWSGRHRSSRLNGSPIHWSDRDSLSDVPSSSEARWRPSHPPFRSRCQERPRRPSPRESTQRHGRRRRHRSYSPPLPSGLSSWSSEEDKERQPQSWRAHRRGSHSPHWPEEKPPSYRSLDITPGKNSRKKGSVERRSEKDSSHSGRSVVI

SEQ ID NO: 2440 - protein, 1542 aa, Homo sapiens
MRGVGWQMLSLSLGLVLAILNKVAPQACPAQCSCSGSTVDCHGLALRSVPRNIPRNTERLDLNGNNITRITKTDFAGLRHLRVLQLMENKISTIERGAFQDLKELERLRLNRNHLQLFPELLFLGTAKLYRLDLSENQIQAIPRKAFRGAVDIKNLQLDYNQISCIEDGAFRALRDLEVLTLNNNNITRLSVASFNHMPKLRTFRLHSNNLYCDCHLAWLSDWLRQRPRVGLYTQCMGPSHLRGHNVAEVQKREFVCSDEEEGHQSFMAPSCSVLHCPAACTCSNNIVDCRGKGLTEIPTNLPETITEIRLEQNTIKVIPPGAFSPYKKLRRIDLSNNQISELAPDAFQGLRSLNSLVLYGNKITELPKSLFEGLFSLQLLLLNANKINCLRVDAFQDLHNLNLLSLYDNKLQTIAKGTFSPLRAIQTMHLAQNPFICDCHLKWLADYLHTNPIETSGARCTSPRRLANKRIGQIKSKKFRCSAKEQYFIPGTEDYRSKLSGDCFADLACPEKCRCEGTTVDCSNQKLNKIPEHIPQYTAELRLNNNEFTVLEATGIFKKLPQLRKINFSNNKITDIEEGAFEGASGVNEILLTSNRLENVQHKMFKGLESLKTLMLRSNRITCVGNDSFIGLSSVRLLSLYDNQITTVAPGAFDTLHSLSTLNLLANPFNCNCYLAWLGEWLRKKRIVTGNPRCQKPYFLKEIPIQDVAIQDFTCDDGNDDNSCSPLSRCPTECTCLDTVVRCSNKGLKVLPKGIPRDVTELYLDGNQFTLVPKELSNYKHLTLIDLSNNRISTLSNQSFSNMTQLLTLILSYNRLRCIPPRTFDGLKSLRLLSLHGNDISVVPEGAFNDLSALSHLAIGANPLYCDCNMQWLSDWVKSEYKEPGIARCAGPGEMADKLLLTTPSKKFTCQGPVDVNILAKCNPCLSNPCKNDGTCNSDPVDFYRCTCPYGFKGQDCDVPIHACISNPCKHGGTCHLKEGEEDGFWCICADGFEGENCEVNVDDCEDNDCENNSTCVDGINNYTCLCPPEYTAANLNEVEKGELCEEKLDFCAQDLNPCQHDSKCILTPKGFKCDCTPGYVGEHCDIDFDDCQDNKCKNGAHCTDAVNGYTCICPEGYSGLFCEFSPPMVLPRTSPCDNFDCQNGAQCIVRINEPICQCLPGYQGEKCEKLVSVNFINKESYLQIPSAKVRPQTNITLQIATDEDSGILLYKGDKDHIAVELYRGRVRASYDTGSHPASAIYSVETINDGNFHIVELLALDQSLSLSVDGGNPKIITNLSKQSTLNFDSPLYVGGMPGKSNVASLRQAPGQNGTSFHGCIRNLYINSELQDFQKVPMQTGILPGCEPCHKKVCAHGTCQPSSQAGFTCECQEGWMGPLCDQRTNDPCLGNKCVHGTCLPINAFSYSCKCLEGHGGVLCDEEEDLFNPCQAIKCKHGKCRLSGLGQPYCECSSGYTGDSCDREISCRGERIRDYYQKQQGYAACQTTKKVSRLECRGGCAGGQCCGPLRSKRRKYSFECTDGSSFVDEVEKVVKCGCTRCVS

SEQ ID NO: 2441 - protein, 1024 aa, Homo sapiens
MLVTGPCLLAGLESPSHALRADAPPHASSAATICVTLAEGHHCDRALEILLHPSEPHQPHLMLEGGSLSSAEYEARVRARRDFQRLQRRDSDGDRQVWFLQRRFHKDILLNPVLALSFCPDLSSKPGHLGTATRELLFLLDSSSVAHKDAIVLAVKSLPPQTLINLAVFGTLVQPLFPESRPCSDDAVQLICESIETLQVPSGPPDVLAALDWAVGQPQHRAYPRQLFLLTAASPMAATTHRTLELMRWHRGTARCFSFGLGPTCHQLLQGLSALSRGQAYFLRPGQRLQPMLVQALRKALEPALSDISVDWFVPDTVEALLTPREIPALYPGDQLLGYCSLFRVDGFRSRPPGGQEPGWQSSGGSVFPSPEEAPSAASPGTEPTGTSEPLGTGTVSAELSSPWAARDSEQTGTDALTDPVTDPGPNPSDTAIWRRIFQSSYIREQYVLTHCSASPEPGPGSTGSSESPGSQGPGSPEGSAPLEPPSQQGCRSLAWGEPAGSRSCPLPAPTPAPFKVGALSTEVLGRQHRAALAGRSLSSPPGRANQVPGRPRKPSLGAILDGPSPEPGQQLGQGLDDSGNLLSPAPMDWDMLMEPPFLFTAVPPSGELAPPAVPPQAPRCHVVIRGLCGEQPMCWEVGVGLETLWGPGDGSQPPSPPVREAAWDQALHRLTAASVVRDNEQLALRGGAETTADRGHARRCWLRALQTSKVSSAPSCFTCPVAVDATTREVLPGALQVCSSEPAEPPGTPPASHSHLDAAPLPTVVYSKGLQRGSPAGAWDSDQNGNSKRALGDPATPTEGPRRPPPRPPCRLSMGRRHKLCSPDPGQANNSEGSDHDYLPLVRLQEAPGSFRLDAPFCAAVRISQERLCRASPFAVHRASLSPTSASLPWALLGPGVGQGDSATASCSPSPSSGSEGPGQVDSGRGSDTEASEGAEGLGGTDLRGRTWATAVALAWLEHRCAAAFDEWELTAAKADCWLRAQHLPDGLDLAALKAAARGLFLLLRHWDQNLQLHLLCYSPANV

SEQ ID NO: 2442 - protein, 942 aa, Homo sapiens
MAAAAEPGARAWLGGGSPRPGSPACSPVLGSGGRARPGPGPGPGPERAGVRAPGPAAAPGHSFRKVTLTKPTFCHLCSDFIWGLAGFLCDVCNFMSHEKCLKHVRIPCTSVAPSLVRVPVAHCFGPRGLHKRKFCAVCRKVLEAPALHCEVCELHLHPDCVPFACSDCRQCHQDGHQDHDTHHHHWREGNLPSGARCEVCRKTCGSSDVLAGVRCEWCGVQAHSLCSAALAPECGFGRLRSLVLPPACVRLLPGGFSKTQSFRIVEAAEPGEGGDGADGSAAVGPGRETQATPESGKQTLKIFDGDDAVRRSQFRLVTVSRLAGAEEVLEAALRAHHIPEDPGHLELCRLPPSSQACDAWAGGKAGSAVISEEGRSPGSGEATPEAWVIRALPRAQEVLKIYPGWLKVGVAYVSVRVTPKSTARSVVLEVLPLLGRQAESPESFQLVEVAMGCRHVQRTMLMDEQPLLDRLQDIRQMSVRQVSQTRFYVAESRDVAPHVSLFVGGLPPGLSPEEYSSLLHEAGATKATVVSVSHIYSSQGAVVLDVACFAEAERLYMLLKDMAVRGRLLTALVLPDLLHAKLPPDSCPLLVFVNPKSGGLKGRDLLCSFRKLLNPHQVFDLTNGGPLPGLHLFSQVPCFRVLVCGGDGTVGWVLGALEETRYRLACPEPSVAILPLGTGNDLGRVLRWGAGYSGEDPFSVLLSVDEADAVLMDRWTILLDAHEAGSAENDTADAEPPKIVQMSNYCGIGIDAELSLDFHQAREEEPGKFTSRLHNKGVYVRVGLQKISHSRSLHKQIRLQVERQEVELPSIEGLIFINIPSWGSGADLWGSDSDTRFEKPRMDDGLLEVVGVTGVVHMGQVQGGLRSGIRIAQGSYFRVTLLKATPVQVDGEPWVQAPGHMIISAAGPKVHMLRKAKQKPRRAGTTRDARADAAPAPESDPR

SEQ ID NO: 2443 - protein, 943 aa, Homo sapiens
MAASGLDHLKNGYRRRFCRPSRARDINTEQGQNVLEILQDCFEEKSLANDFSTNSTKSVPNSTRKIKDTCIQSPSKECQKSHPKSVPVSSKKKEASLQFVVEPSEATNRSVQAHEVHQKILATDVSSKNTPDSKKISSRNINDHHSEADEEFYLSVGSPSVLLDAKTSVSQNVIPSSAQKRETYTFENSVNMLPSSTEVSVKTKKRLNFDDKVMLKKIEIDNKVSDEEDKTSEGQERKPSGSSQNRIRDSEYEIQRQAKKSFSTLFLETVKRKSESSPIVRHAATAPPHSCPPDDTKLIEDEFIIDESDQSFASRSWITIPRKAGSLKQRTISPAESTALLQGRKSREKHHNILPKTLANDKHSHKPHPVETSQPSDKTVLDTSYALIGETVNNYRSTKYEMYSKNAEKPSRSKRTIKQKQRRKFMAKPAEEQLDVGQSKDENIHTSHITQDEFQRNSDRNMEEHEEMGNDCVSKKQMPPVGSKKSSTRKDKEESKKKRFSSESKNKLVPEEVTSTVTKSRRISRRPSDWWVVKSEESPVYSNSSVRNELPMHHNSSRKSTKKTNQSSKNIRKKTIPLKRQKTATKGNQRVQKFLNAEGSGGIVGHDEISRCSLSEPLESDEADLAKKKNLDCSRSTRSSKNEDNIMTAQNVPLKPQTSGYTCNIPTESNLDSGEHKTSVLEESGPSRLNNNYLMSGKNDVDDEEVHGSSDDSKQSKVIPKNRIHHKLVLPSNTPNVRRTKRTRLKPLEYWRGERIDYQGRPSGGFVISGVLSPDTISSKRKAKENIGKVNKKSNKKRICLDNDERKTNLMVNLGIPLGDPLQPTRVKDPETREIILMDLVRPQDTYQFFVKHGELKVYKTLDTPFFSTGKLILGPQEEKGKQHVGQDILVFYVNFGDLLCTLHETPYILSTGDSFYVPSGNYYNIKNLRNEESVLLFTQIKR

SEQ ID NO: 2444 - protein, 1037 aa, Homo sapiens
MRGSGPRGAGRRRPPSGGGDTPITPASLAGCYSAPRRAPLWTCLLLCAALRTLLASPSNEVNLLDSRTVMGDLGWIAFPKNGWEEIGEVDENYAPIHTYQVCKVMEQNQNNWLLTSWISNEGASRIFIELKFTLRDCNSLPGGLGTCKETFNMYYFESDDQNGRNIKENQYIKIDTIAADESFTELDLGDRVMKLNTEVRDVGPLSKKGFYLAFQDVGACIALVSVRVYYKKCPSVVRHLAVFPDTITGADSSQLLEVSGSCVNHSVTDEPPKMHCSAEGEWLVPIGKCMCKAGYEEKNGTCQVCRPGFFKASPHIQSCGKCPPHSYTHEEASTSCVCEKDYFRRESDPPTMACTRPPSAPRNAISNVNETSVFLEWIPPADTGGRKDVSYYIACKKCNSHAGVCEECGGHVRYLPRQSGLKNTSVMMVDLLAHTNYTFEIEAVNGVSDLSPGARQYVSVNVTTNQAAPSPVTNVKKGKIAKNSISLSWQEPDRPNGIILEYEIKYFEKDQETSYTIIKSKETTITAEGLKPASVYVFQIRARTAAGYGVFSRRFEFETTPVFAASSDQSQIPVIAVSVTVGVILLAVVIGVLLSGSCCECGCGRASSLCAVAHPSLIWRCGYSKAKQDPEEEKMHFHNGHIKLPGVRTYIDPHTYEDPNQAVHEFAKEIEASCITIERVIGAGEFGEVCSGRLKLPGKRELPVAIKTLKVGYTEKQRRDFLGEASIMGQFDHPNIIHLEGVVTKSKPVMIVTEYMENGSLDTFLKKNDGQFTVIQLVGMLRGISAGMKYLSDMGYVHRDLAARNILINSNLVCKVSDFGLSRVLEDDPEAAYTTRGGKIPIRWTAPEAIAFRKFTSASDVWSYGIVMWEVVSYGERPYWEMTNQDVIKAVEEGYRLPSPMDCPAALYQLMLDCWQKERNSRPKFDEIVNMLDKLIRNPSSLKTLVNASCRVSNLLAEHSPLGSGAYRSVGEWLEAIKMGRYTEIFMENGYSSMDAVAQVTLEDLRRLGVTLVGHQKKIMNSLQEMKVQLVNGMVPL

SEQ ID NO: 2445 - protein, 1042 aa, Homo sapiens
MKQSPALAPEERCRRAGSPKPVLRADDNNMGNGCSQKLATANLLRFLLLVLIPCICALVLLLVILLSYVGTLQKVYFKSNGSEPLVTDGEIQGSDVILTNTIYNQSTVVSTAHPDQHVPAWTTDASLPGDQSHRNTSACMNITHSQCQMLPYHATLTPLLSVVRNMEMEKFLKFFTYLHRLSCYQHIMLFGCTLAFPECIIDGDDSHGLLPCRSFCEAAKEGCESVLGMVNYSWPDFLRCSQFRNQTESSNVSRICFSPQQENGKQLLCGRGENFLCASGICIPGKLQCNGYNDCDDWSDEAHCNCSENLFHCHTGKCLNYSLVCDGYDDCGDLSDEQNCDCNPTTEHRCGDGRCIAMEWVCDGDHDCVDKSDEVNCSCHSQGLVECRNGQCIPSTFQCDGDEDCKDGSDEENCSVIQTSCQEGDQRCLYNPCLDSCGGSSLCDPNNSLNNCSQCEPITLELCMNLPYNSTSYPNYFGHRTQKEASISWESSLFPALVQTNCYKYLMFFSCTILVPKCDVNTGEHIPPCRALCEHSKERCESVLGIVGLQWPEDTDCSQFPEENSDNQTCLMPDEYVEECSPSHFKCRSGQCVLASRRCDGQADCDDDSDEENCGCKERDLWECPSNKQCLKHTVICDGFPDCPDYMDEKNCSFCQDDELECANHACVSRDLWCDGEADCSDSSDEWDCVTLSINVNSSSFLMVHRAATEHHVCADGWQEILSQLACKQMGLGEPSVTKLIQEQEKEPRWLTLHSNWESLNGTTLHELLVNGQSCESRSKISLLCTKQDCGRRPAARMNKRILGGRTSRPGRWPWQCSLQSEPSGHICGCVLIAKKWVLTVAHCFEGRENAAVWKVVLGINNLDHPSVFMQTRFVKTIILHPRYSRAVVDYDISIVELSEDISETGYVRPVCLPNPEQWLEPDTYCYITGWGHMGNKMPFKLQEGEVRIISLEHCQSYFDMKTITTRMICAGYESGTVDSCMGDSGGPLVCEKPGGRWTLFGLTSWGSVCFSKVLGPGVYSNVSYFVEWIKRQIYIQTFLLN

SEQ ID NO: 2446 - protein, 1426 aa, Homo sapiens
MTEALQWARYHWRRLIRGATRDDDSGPYNYSSLLACGRKSSQTPKLSGRHRIVVPHIQPFKDEYEKFSGAYVNNRIRTTKYTLLNFVPRNLFEQFHRAANLYFLFLVVLNWVPLVEAFQKEITMLPLVVVLTIIAIKDGLEDYRKYKIDKQINNLITKVYSRKEKKYIDRCWKDVTVGDFIRLSCNEVIPADMVLLFSTDPDGICHIETSGLDGESNLKQRQVVRGYAEQDSEVDPEKFSSRIECESPNNDLSRFRGFLEHSNKERVGLSKENLLLRGCTIRNTEAVVGIVVYAGHETKAMLNNSGPRYKRSKLERRANTDVLWCVMLLVIMCLTGAVGHGIWLSRYEKMHFFNVPEPDGHIISPLLAGFYMFWTMIILLQVLIPISLYVSIEIVKLGQIYFIQSDVDFYNEKMDSIVQCRALNIAEDLGQIQYLFSDKTGTLTENKMVFRRCSVAGFDYCHEENARRLESYQEAVSEDEDFIDTVSGSLSNMAKPRAPSCRTVHNGPLGNKPSNHLAGSSFTLGSGEGASEVPHSRQAAFSSPIETDVVPDTRLLDKFSQITPRLFMPLDETIQNPPMETLYIIDFFIALAICNTVVVSAPNQPRQKIRHPSLGGLPIKSLEEIKSLFQRWSVRRSSSPSLNSGKEPSSGVPNAFVSRLPLFSRMKPASPVEEEVSQVCESPQCSSSSACCTETEKQHGDAGLLNGKAESLPGQPLACNLCYEAESPDEAALVYAARAYQCTLRSRTPEQVMVDFAALGPLTFQLLHILPFDSVRKRMSVVVRHPLSNQVVVYTKGADSVIMELLSVASPDGASLEKQQMIVREKTQKHLDDYAKQGLRTLCIAKKVMSDTEYAEWLRNHFLAETSIDNREELLLESAMRLENKLTLLGATGIEDRLQEGVPESIEALHKAGIKIWMLTGDKQETAVNIAYACKLLEPDDKLFILNTQSKDACGMLMSTILKELQKKTQALPEQVSLSEDLLQPPVPRDSGLRAGLIITGKTLEFALQESLQKQFLELTSWCQAVVCCRATPLQKSEVVKLVRSHLQVMTLAIGDGANDVSMIQVADIGIGVSGQEGMQAVMASDFAVSQFKHLSKLLLVHGHWCYTRLSNMILYFFYKNVAYVNLLFWYQFFCGFSGTSMTDYWVLIFFNLLFTSAPPVIYGVLEKDVSAETLMQLPELYRSGQKSEAYLPHTFWITLLDAFYQSLVCFFVPYFTYQGSDTDIFAFGNPLNTAALFIVLLHLVIESKSLTWIHLLVIIGSILSYFLFAIVFGAMCVTCNPPSNPYWIMQEHMLDPVFYLVCILTTSIALLPRFVYRVLQGSLFPSPILRAKHFDRLTPEERTKALKKWRGAGKMNQVTSKYANQSAGKSGRRPMPGPSAVFAMKSASSCAIEQGNLSLCETALDQGYSETKAFEMAGPSKGKES

SEQ ID NO: 2447 - protein, 395 aa, Homo sapiens
MAEDGLPKIYSHPPTESSKTPTAATIFFGADNAIPKSETTITSEGDHVTSVNEYMLESDFSTTTDNKLTAKKEKLKSEDDMGTDFIKSTTHLQKEITSLTGTTNSITRDSITEHFMPVKIGNISSPVTTVSLIDFSTDIAKEDILLATIDTGDAEISITSEVSGTLKDSSAGVADAPAFPRKKDEADMSNYNSSIKSNVPADEAVQVTDSTIPEAEIPPAPEESFTTIPDITALEEEKITEIDLSVLEDDTSAVATLTDSDEKFITVFELTTSAEKDKDKREDTLLTDEETTEGASIWMERDTANEAETHSVLLTAVESRYDFVVPASIATNLVEESSTEEDLSETDNTETVPKITEPFSGTTSVLDTPDYKEDTSTTETDIFELLKEEPDEFMI

SEQ ID NO: 2448 - protein, 620 aa, Homo sapiens
MASDSMSSKQARNHITKGKRQQQHQQIKNRSSISDGDGEDSFIFEANEAWKDFHGSLLRFYENGELCDVTLKVGSKLISCHKLVLACVIPYFRAMFLSEMAEAKQTLIEIRDFDGDAIEDLVKFVYSSRLTLTVDNVQPLLYAACILQVELVARACCEYMKLHFHPSNCLAVRAFAESHNRIDLMDMADQYACDHFTEVVECEDFVSVSPQHLHKLLSSSDLNIENEKQVYNAAIKWLLANPQHHSKWLDETLAQVRLPLLPVDFLMGVVAKEQIVKQNLKCRDLLDEARNYHLHLSSRAVPDFEYSIRTTPRKHTAGVLFCVGGRGGSGDPFRSIECYSINKNSWFFGPEMNSRRRHVGVISVEGKVYAVGGHDGNEHLGSMEMFDPLTNKWMMKASMNTKRRGIALASLGGPIYAIGGLDDNTCFNDVERYDIESDQWSTVAPMNTPRGGVGSVALVNHVYAVGGNDGMASLSSVERYDPHLDKWIEVKEMGQRRAGNGVSKLHGCLYVVGGFDDNSPLSSVERYDPRSNKWDYVAALTTPRGGVGIATVMGKIFAVGGHNGNAYLNTVEAFDPVLNRWELVGSVSHCRAGAGVAVCSCLTSQIRDVGHGSNNVVDCM

SEQ ID NO: 2449 - protein, 893 aa, Homo sapiens
MSSKKNRKRLNQSAENGSSLPSAASSCAEARAPSAGSDFAATSGTLTVTNLLEKVDDKIPKTFQNSLIHLGLNTMKSANICIGRPVLLTSLNGKQEVYTAWPMAGFPGGKVGLSEMAQKNVGVRPGDAIQVQPLVGAVLQAEEMDVALSDKDMEINEEELTGCILRKLDGKIVLPGNFLYCTFYGRPYKLQVLRVKGADGMILGGPQSDSDTDAQRMAFEQSSMETSSLELSLQLSQLDLEDTQIPTSRSTPYKPIDDRITNKASDVLLDVTQSPGDGSGLMLEEVTGLKCNFESAREGNEQLTEEERLLKFSIGAKCNTDTFYFISSTTRVNFTEIDKNSKEQDNQFKVTYDMIGGLSSQLKAIREIIELPLKQPELFKSYGIPAPRGVLLYGPPGTGKTMIARAVANEVGAYVSVINGPEIISKFYGETEAKLRQIFAEATLRHPSIIFIDELDALCPKREGAQNEVEKRVVASLLTLMDGIGSEVSEGQVLVLGATNRPHALDAALRRPGRFDKEIEIGVPNAQDRLDILQKLLRRVPHLLTEAELLQLANSAHGYVGADLKVLCNEAGLCALRRILKKQPNLPDVKVAGLVKITLKDFLQAMNDIRPSAMREIAIDVPNVSWSDIGGLESIKLKLEQAVEWPLKHPESFIRMGIQPPKGVLLYGPPGCSKTMIAKALANESGLNFLAIKGPELMNKYVGESERAVRETFRKARAVAPSIIFFDELDALAVERGSSLGAGNVADRVLAQLLTEMDGIEQLKDVTILAATNRPDRIDKALMRPGRIDRIIYVPLPDAATRREIFKLQFHSMPVSNEVDLDELILQTDAYSGAEIVAVCREAALLALEEDIQANLIMKRHFTQALSTVTPRIPESLRRFYEDYQEKSGLHTL

SEQ ID NO: 2450 - protein, 1073 aa, Homo sapiens
MAWVKFLRKPGGNLGKVYQPGSMLSLAPTKGLLNEPGQNSCFLNSAVQVLWQLDIFRRSLRVLTGHVCQGDACIFCALKTIFAQFQHSREKALPSDNIRHALAESFKDEQRFQLGLMDDAAECFENMLERIHFHIVPSRDADMCTSKSCITHQKFAMTLYEQCVCRSCGASSDPLPFTEFVRYISTTALCNEVERMLERHERFKPEMFAELLQAANTTDDYRKCPSNCGQKIKIRRVLMNCPEIVTIGLVWDSEHSDLTEAVVRNLATHLYLPGLFYRVTDENAKNSELNLVGMICYTSQHYCAFAFHTKSSKWVFFDDANVKEIGTRWKDVVSKCIRCHFQPLLLFYANPDGTAVSTEDALRQVISWSHYKSVAENMGCEKPVIHKSDNLKENGFGDQAKQRENQKFPTDNISSSNRSHSHTGVGKGPAKLSHIDQREKIKDISRECALKAIEQKNLLSSQRKDLEKGQRKDLGRHRDLVDEDLSHFQSGSPPAPNGFKQHGNPHLYHSQGKGSYKHDRVVPQSRASAQIISSSKSQILAPGEKITGKVKSDNGTGYDTDSSQDSRDRGNSCDSSSKSRNRGWKPMRETLNVDSIFSESEKRQHSPRHKPNISNKPKSSKDPSFSNWPKENPKQKGLMTIYEDEMKQEIGSRSSLESNGKGAEKNKGLVEGKVHGDNWQMQRTESGYESSDHISNGSTNLDSPVIDGNGTVMDISGVKETVCFSDQITTSNLNKERGDCTSLQSQHHLEGFRKELRNLEAGYKSHEFHPESHLQIKNHLIKRSHVHEDNGKLFPSSSLQIPKDHNAREHIHQSDEQKLEKPNECKFSEWLNIENSERTGLPFHVDNSASGKRVNSNEPSSLWSSHLRTVGLKPETAPLIQQQNIMDQCYFENSLSTECIIRSASRSDGCQMPKLFCQNLPPPLPPKKYAITSVPQSEKSESTPDVKLTEVFKATSHLPKHSLSTASEPSLEVSTHMNDERHKETFQVRECFGNTPNCPSSSSTNDFQANSGAIDAFCQPELDSISTCPNETVSLTTYFSVDSCMTDTYRLKYHQRPKLSFPESSGFCNNSLS

SEQ ID NO: 2451 - protein, 366 aa, Homo sapiens
MDSDDEMVEEAVEGHLDDDGLPHGFCTVTYSSTDRFEGNFVHGEKNGRGKFFFFDGSTLEGYYVDDALQGQGVYTYEDGGVLQGTYVDGELNGPAQEYDTDGRLIFKGQYKDNIRHGVCWIYYPDGGSLVGEVNEDGEMTGEKIAYVYPDERTALYGKFIDGEMIEGKLATLMSTEEGRPHFELMPGNSVYHFDKSTSSCISTNALLPDPYESERVYVAESLISSAGEGLFSKVAVGPNTVMSFYNGVRITHQEVDSRDWALNGNTLSLDEETVIDVPEPYNHVSKYCASLGHKANHSFTPNCIYDMFVHPRFGPIKCIRTLRAVEADEELTVAYGYDHSPPGKSGPEAPEWYQVELKAFQATQQK

SEQ ID NO: 2452 - protein, 494 aa, Homo sapiens
MEVVEAAAAQLETLKFNGTDFGVGEGPAAPSPGSAPVPGTQPPLQSFEGSPDAGQTVEVKPAGEQPLQPVLNAVAAGTPAPQPQPPAESPACGDCVTSPGAAEPARAPDSLETSDSDSDSDSETDSDSSSSSSSSSSSSSSSSSSCISLPPVLSDGDDDLQIEKENKNFPLKTKDELLLNELPSVEELTIILPEDIELKPLGMVSSIIEQLVIIESMTNLPPVNEETVIFKSDRQAAGKIFEIFGPVAHPFYVLRFNSSDHIESKGIKIKETMYFAPSMKDFTQYIFTEKLKQDKGSDASWKNDQEPPPEALDFSDDEKEKEAKQRKKSQIQGRKKLKSEFNEPGEDFTEVHQNWNAHSSASEHAKGYRNREFTRGFSRARYPRSCHGRPPPQHFYNSEHMVSQETSGFPSQRQNNPIMPQYPFPLPVFDMHNFPLRPPPPPPPPPVNMGWATPNMAAHPLLNLPYSLPPPPPPPPLPPPPSSGDSNSHFGPYY

SEQ ID NO: 2453 - protein, 295 aa, Homo sapiens
MLQGPGSLLLLFLASHCCLGSARGLFLFGQPDFSYKRSNCKPIPANLQLCHGIEYQNMRLPNLLGHETMKEVLEQAGAWIPLVMKQCHPDTKKFLCSLFAPVCLDDLDETIQPCHSLCVQVKDRCAPVMSAFGFPWPDMLECDRFPQDNDLCIPLASSDHLLPATEEAPKVCEACKNKNDDDNDIMETLCKNDFALKIKVKEITYINRDTKIILETKSKTIYKLNGVSERDLKKSVLWLKDSLQCTCEEMNDINAPYLVMGQKQGGELVITSVKRWQKGQREFKRISRSIRKLQC

SEQ ID NO: 2454 - protein, 464 aa, Homo sapiens
MAHVRHFRTLVSGFYFWEAALLLSLVATKETDSARSRSAPMSPSDFLDKLMGRTSGYDARIRPNFKGPPVNVTCNIFINSFGSIAETTMDYRVNIFLRQKWNDPRLAYSEYPDDSLDLDPSMLDSIWKPDLFFANEKGANFHEVTTDNKLLRIFKNGNVLYSIRLTLTLSCPMDLKNFPMDVQTCIMQLESFGYTMNDLIFEWQDEAPVQVAEGLTLPQFLLKEEKDLRYCTKHYNTGKFTCIEVRFHLERQMGYYLIQMYIPSLLIVILSWVSFWINMDAAPARVALGITTVLTMTTQSSGSRASLPKVSYVKAIDIWMAVCLLFVFSALLEYAAVNFVSRQHKELLRFRRKRKNKTEAFALEKFYRFSDMDDEVRESRFSFTAYGMGPCLQAKDGMTPKGPNHPVQVMPKSPDEMRKVFIDRAKKIDTISRACFPLAFLIFNIFYWVIYKILRHEDIHQQQD

SEQ ID NO: 2455 - protein, 124 aa, Homo sapiens
MAAAMTFCRLLNRCGEAARSLPLGARCFGVRVSPTGEKVTHTGQVYDDKDYRRIRFVGRQKEVNENFAIDLIAEQPVSEVETRVIACDGGGGALGHPKVYINLDKETKTGTCGYCGLQFRQHHH

SEQ ID NO: 2456 - protein, 910 aa, Homo sapiens
MDTAEEDICRVCRSEGTPEKPLYHPCVCTGSIKFIHQECLVQWLKHSRKEYCELCKHRFAFTPIYSPDMPSRLPIQDIFAGLVTSIGTAIRYWFHYTLVAFAWLGVVPLTACRIYKCLFTGSVSSLLTLPLDMLSTENLLADCLQGCFVVTCTLCAFISLVWLREQIVHGGAPIWLEHAAPPFNAAGHHQNEAPAGGNGAENVAADQPANPPAENAVVGENPDAQDDQAEEEEEDNEEEDDAGVEDAADANNGAQDDMNWNALEWDRAAEELTWERMLGLDGSLVFLEHVFWVVSLNTLFILVFAFCPYHIGHFSLVGLGFEEHVQASHFEGLITTIVGYILLAITLIICHGLATLVKFHRSRRLLGVCYIVVKVSLLVVVEIGVFPLICGWWLDICSLEMFDATLKDRELSFQSAPGTTMFLHWLVGMVYVFYFASFILLLREVLRPGVLWFLRNLNDPDFNPVQEMIHLPIYRHLRRFILSVIVFGSIVLLMLWLPIRIIKSVLPNFLPYNVMLYSDAPVSELSLELLLLQVVLPALLEQGHTRQWLKGLVRAWTVTAGYLLDLHSYLLGDQEENENSANQQVNNNQHARNNNAIPVVGEGLHAAHQAILQQGGPVGFQPYRRPLNFPLRIFLLIVFMCITLLIASLICLTLPVFAGRWLMSFWTGTAKIHELYTAACGLYVCWLTIRAVTVMVAWMPQGRRVIFQKVKEWSLMIMKTLIVAVLLAGVVPLLLGLLFELVIVAPLRVPLDQTPLFYPWQDWALGVLHAKIIAAITLMGPQWWLKTVIEQVYANGIRNIDLHYIVRKLAAPVISVLLLSLCVPYVIASGVVPLLGVTAEMQNLVHRRIYPFLLMVVVLMAILSFQVRQFKRLYEHIKNDKYLVGQRLVNYERKSGKQGSSPPPPQSSQE

SEQ ID NO: 2457 - protein, 790 aa, Homo sapiens
MKITSTSCICPVLVCLCFVQRCYGTAHHSSIKVMRNQTKHIEGETEVHHRPKRGWVWNQFFVLEEHMGPDPQYVGKLHSNSDKGDGSVKYILTGEGAGTIFIIDDTTGDIHSTKSLDREQKTHYVLHAQAIDRRTNKPLEPESEFIIKVQDINDNAPKFTDGPYIVTVPEMSDMGTSVLQVTATDADDPTYGNSARVVYSILQGQPYFSVDPKTGVIRTALHNMDREAREHYSVVIQAKDMAGQVGGLSGSTTVNITLTDVNDNPPRFPQKHYQLYVPESAQVGSAVGKIKANDADTGSNADMTYSIINGDGMGIFSISTDKETREGILSLKKPLNYEKKKSYTLNIEGANTHLDFRFSHLGPFKDATMLKIIVGDVDEPPLFSMPSYLMEVYENAKIGTVVGTVLAQDPDSTNSLVRYFINYNVEDDRFFNIDANTGTIRTTKVLDREETPWYNITVTASEIDNPDLLSHVTVGIRVLDVNDNPPELAREYDIIVCENSKPGQVIHTISATDKDDFANGPRFNFFLDERLPVNPNFTLKDNEDNTASILTRRRRFSRTVQDVYYLPIMISDGGIPSLSSSSTLTIRVCACERDGRVRTCHAEAFLSSAGLSTGALIAILLCVLILLAIVVLFITLRRSKKEPLIISEEDVRENVVTYDDEGGGEEDTEAFDITALRNPSAAEELKYRRDIRPEVKLTPRHQTSSTLESIDVQEFIKQRLAEADLDPSVPPYDSLQTYAYEGQRSEAGSISSLDSATTQSDQDYHYLGDWGPEFKKLAELYGEIESERTT

SEQ ID NO: 2458 - protein, 1224 aa, Homo sapiens
MKPRARGWRGLAALWMLLAQVAEQAPACAMGPAAAAPGSPSVPRPPPPAERPGWMEKGEYDLVSAYEVDHRGDYVSHEIMHHQRRRRAVPVSEVESLHLRLKGSRHDFHMDLRTSSSLVAPGFIVQTLGKTGTKSVQTLPPEDFCFYQGSLRSHRNSSVALSTCQGLSGMIRTEEADYFLRPLPSHLSWKLGRAAQGSSPSHVLYKRSTEPHAPGASEVLVTSRTWELAHQPLHSSDLRLGLPQKQHFCGRRKKYMPQPPKEDLFILPDEYKSCLRHKRSLLRSHRNEELNVETLVVVDKKMMQNHGHENITTYVLTILNMVSALFKDGTIGGNINIAIVGLILLEDEQPGLVISHHADHTLSSFCQWQSGLMGKDGTRHDHAILLTGLDICSWKNEPCDTLGFAPISGMCSKYRSCTINEDTGLGLAFTIAHESGHNFGMIHDGEGNMCKKSEGNIMSPTLAGRNGVFSWSPCSRQYLHKFLSTAQAICLADQPKPVKEYKYPEKLPGELYDANTQCKWQFGEKAKLCMLDFKKDICKALWCHRIGRKCETKFMPAAEGTICGHDMWCRGGQCVKYGDEGPKPTHGHWSDWSSWSPCSRTCGGGVSHRSRLCTNPKPSHGGKFCEGSTRTLKLCNSQKCPRDSVDFRAAQCAEHNSRRFRGRHYKWKPYTQVEDQDLCKLYCIAEGFDFFFSLSNKVKDGTPCSEDSRNVCIDGICERVGCDNVLGSDAVEDVCGVCNGNNSACTIHRGLYTKHHHTNQYYHMVTIPSGARSIRIYEMNVSTSYISVRNALRRYYLNGHWTVDWPGRYKFSGTTFDYRRSYNEPENLIATGPTNETLIVELLFQGRNPGVAWEYSMPRLGTEKQPPAQPSYTWAIVRSECSVSCGGGQMTVREGCYRDLKFQVNMSFCNPKTRPVTGLVPCKVSACPPSWSVGNWSACSRTCGGGAQSRPVQCTRRVHYDSEPVPASLCPQPAPSSRQACNSQSCPPAWSAGPWAECSHTCGKGWRKRAVACKSTNPSARAQLLPDAVCTSEPKPRMHEACLLQRCHKPKKLQWLVSAWSQCSVTCERGTQKRFLKCAEKYVSGKYRELASKKCSHLPKPSLELERACAPLPCPRHPPFAAAGPSRGSWFASPWSQCTASCGGGVQTRSVQCLAGGRPASGCLLHQKPSASLACNTHFCPIAEKKDAFCKDYFHWCYLVPQHGMCSHKFYGKQCCKTCSKSNL

SEQ ID NO: 2459 - protein, 2069 aa, Homo sapiens
MDNFFTEGTRVWLRENGQHFPSTVNSCAEGIVVFRTDYGQVFTYKQSTITHQKVTAMHPTNEEGVDDMASLTELHGGSIMYNLFQRYKRNQIYTYIGSILASVNPYQPIAGLYEPATMEQYSRRHLGELPPHIFAIANECYRCLWKRHDNQCILISGESGAGKTESTKLILKFLSVISQQSLELSLKEKTSCVERAILESSPIMEAFGNAKTVYNNNSSRFGKFVQLNICQKGNIQGGRIVDYLLEKNRVVRQNPGERNYHIFYALLAGLEHEEREEFYLSTPENYHYLNQSGCVEDKTISDQESFREVITAMDVMQFSKEEVREVSRLLAGILHLGNIEFITAGGAQVSFKTALGRSAELLGLDPTQLTDALTQRSMFLRGEEILTPLNVQQAVDSRDSLAMALYACCFEWVIKKINSRIKGNEDFKSIGILDIFGFENFEVNHFEQFNINYANEKLQEYFNKHIFSLEQLEYSREGLVWEDIDWIDNGECLDLIEKKLGLLALINEESHFPQATDSTLLEKLHSQHANNHFYVKPRVAVNNFGVKHYAGEVQYDVRGILEKNRDTFRDDLLNLLRESRFDFIYDLFEHVSSRNNQDTLKCGSKHRRPTVSSQFKDSLHSLMATLSSSNPFFVRCIKPNMQKMPDQFDQAVVLNQLRYSGMLETVRIRKAGYAVRRPFQDFYKRQEGAELDSLSFQRVLMRNLALPEDVRGKCTSLLQLYDASNSEWQLGKTKVFLRESLEQKLEKRREEEVSHAAMVIRAHVLGFLARKQYRKVLYCVVIIQKNYRAFLLRRRFLHLKKAAIVFQKQLRGQIARRVYRQLLAEKREQEEKKKQEEEEKKKREEEERERERERREAELRAQQEEETRKQQELEALQKSQKEAELTRELEKQKENKQVEEILRLEKEIEDLQRMKEQQELSLTEASLQKLQERRDQELRRLEEEACRAAQEFLESLNFDEIDECVRNIERSLSVGSEFSSELAESACEEKPNFNFSQPYPEEEVDEGFEADDDAFKDSPNPSEHGHSDQRTSGIRTSDDSSEEDPYMNDTVVPTSPSADSTVLLAPSVQDSGSLHNSSSGESTYCMPQNAGDLPSPDGDYDYDQDDYEDGAITSGSSVTFSNSYGSQWSPDYRCSVGTYNSSGAYRFSSEGAQSSFEDSEEDFDSRFDTDDELSYRRDSVYSCVTLPYFHSFLYMKGGLMNSWKRRWCVLKDETFLWFRSKQEALKQGWLHKKGGGSSTLSRRNWKKRWFVLRQSKLMYFENDSEEKLKGTVEVRTAKEIIDNTTKENGIDIIMADRTFHLIAESPEDASQWFSVLSQVHASTDQEIQEMHDEQANPQNAVGTLDVGLIDSVCASDSPDRPNSFVIITANRVLHCNADTPEEMHHWITLLQRSKGDTRVEGQEFIVRGWLHKEVKNSPKMSSLKLKKRWFVLTHNSLDYYKSSEKNALKLGTLVLNSLCSVVPPDEKIFKETGYWNVTVYGRKHCYRLYTKLLNEATRWSSAIQNVTDTKAPIDTPTQQLIQDIKENCLNSDVVEQIYKRNPILRYTHHPLHSPLLPLPYGDINLNLLKDKGYTTLQDEAIKIFNSLQQLESMSDPIPIIQGILQTGHDLRPLRDELYCQLIKQTNKVPHPGSVGNLYSWQILTCLSCTFLPSRGILKYLKFHLKRIREQFPGSEMEKYALFTYESLKKTKCREFVPSRDEIEALIHRQEMTSTVYCHGGGSCKITINSHTTAGEVVEKLIRGLAMEDSRNMFALFEYNGHVDKAIESRTVVADVLAKFEKLAATSEVGDLPWKFYFKLYCFLDTDNVPKDSVEFAFMFEQAHEAVIHGHHPAPEENLQVLAALRLQYLQGDYTLHAAIPPLEEVYSLQRLKARISQSTKTFTPCERLEKRRTSFLEGTLRRSFRTGSVVRQKVEEEQMLDMWIKEEVSSARASIIDKWRKFQGMNQEQAMAKYMALIKEWPGYGSTLFDVECKEGGFPQELWLGVSADAVSVYKRGEGRPLEVFQYEHILSFGAPLANTYKIVVDERELLFETSEVVDVAKLMKAYISMIVKKRYSTTRSASSQGSSR

SEQ ID NO: 2460 - protein, 356 aa, Homo sapiens
MAATRSPTRARERERSGAPAAGSDQVHSWMLATSQALDTVWRMAKGFVMLAVSFLVAAICYFRRLHLYSGHKLKWWIGYLQRKFKRNLSVEAEVDLLSYCAREWKGETPRNKLMRKAYEELFWRHHIKCVRQVRRDNYDALRSVLFQIFSQGISFPSWMKEKDIVKLPEKLLFSQGCNWIQQYSFGPEKYTGSNVFGKLRKYVELLKTQWTEFNGIRDYHKRGSMCNTLFSDAILEYKLYEALKFIMLYQVTEVYEQMKTKKVIPSLFRLLFSRETSSDPLSFMMNHLNSVGDTCGLEQIDMFILGYSLEVKIKVFRLFKFNSRDFEVCYPEEPLRDWPEISLLTENDRHYHIPVF

SEQ ID NO: 2461 - protein, 979 aa, Homo sapiens
MALFAVFQTTFFLTLLSLRTYQSEVLAERLPLTPVSLKVSTNSTRQSLHLQWTVHNLPYHQELKMVFQIQISRIETSNVIWVGNYSTTVKWNQVLHWSWESELPLECATHFVRIKSLVDDAKFPEPNFWSNWSSWEEVSVQDSTGQDILFVFPKDKLVEEGTNVTICYVSRNIQNNVSCYLEGKQIHGEQLDPHVTAFNLNSVPFIRNKGTNIYCEASQGNVSEGMKGIVLFVSKVLEEPKDFSCETEDFKTLHCTWDPGTDTALGWSKQPSQSYTLFESFSGEKKLCTHKNWCNWQITQDSQETYNFTLIAENYLRKRSVNILFNLTHRVYLMNPFSVNFENVNATNAIMTWKVHSIRNNFTYLCQIELHGEGKMMQYNVSIKVNGEYFLSELEPATEYMARVRCADASHFWKWSEWSGQNFTTLEAAPSEAPDVWRIVSLEPGNHTVTLFWKPLSKLHANGKILFYNVVVENLDKPSSSELHSIPAPANSTKLILDRCSYQICVIANNSVGASPASVIVISADPENKEVEEERIAGTEGGFSLSWKPQPGDVIGYVVDWCDHTQDVLGDFQWKNVGPNTTSTVISTDAFRPGVRYDFRIYGLSTKRIACLLEKKTGYSQELAPSDNPHVLVDTLTSHSFTLSWKDYSTESQPGFIQGYHVYLKSKARQCHPRFEKAVLSDGSECCKYKIDNPEEKALIVDNLKPESFYEFFITPFTSAGEGPSATFTKVTTPDEHSSMLIHILLPMVFCVLLIMVMCYLKSQWIKETCYPDIPDPYKSSILSLIKFKENPHLIIMNVSDCIPDAIEVVSKPEGTKIQFLGTRKSLTETELTKPNYLYLLPTEKNHSGPGPCICFENLTYNQAASDSGSCGHVPVSPKAPSMLGLMTSPENVLKALEKNYMNSLGEIPAGETSLNYVSQLASPMFGDKDSLPTNPVEAPHCSEYKMQMAVSLRLALPPPTENSSLSSITLLDPGEHYC

SEQ ID NO: 2462 - protein, 523 aa, Homo sapiens
MVGQRVLLLVAFLLSGVLLSEAAKILTISTLGGSHYLLLDRVSQILQEHGHNVTMLHQSGKFLIPDIKEEEKSYQVIRWFSPEDHQKRIKKHFDSYIETALDGRKESEALVKLMEIFGTQCSYLLSRKDIMDSLKNENYDLVFVEAFDFCSFLIAEKLVKPFVAILPTTFGSLDFGLPSPLSYVPVFPSLLTDHMDFWGRVKNFLMFFSFSRSQWDMQSTFDNTIKEHFPEGSRPVLSHLLLKAELWFVNSDFAFDFARPLLPNTVYIGGLMEKPIKPVPQDLDNFIANFGDAGFVLVAFGSMLNTHQSQEVLKKMHNAFAHLPQGVIWTCQSSHWPRDVHLATNVKIVDWLPQSDLLAHPSIRLFVTHGGQNSVMEAIRHGVPMVGLPVNGDQHGNMVRVVAKNYGVSIRLNQVTADTLTLTMKQVIEDKRYKSAVVAASVILHSQPLSPAQRLVGWIDHILQTGGATHLKPYAFQQPWHEQYLIDVFVFLLGLTLGTMWLCGKLLGVVARWLRGARKVKKT

SEQ ID NO: 2463 - protein, 262 aa, Homo sapiens
MRNSYRFLASSLSVVVSLLLIPEDVCEKIIGGNEVTPHSRPYMVLLSLDRKTICAGALIAKDWVLTAAHCNLNKRSQVILGAHSITREEPTKQIMLVKKEFPYPCYDPATREGDLKLLQLMEKAKINKYVTILHLPKKGDDVKPGTMCQVAGWGRTHNSASWSDTLREVNITIIDRKVCNDRNHYNFNPVIGMNMVCAGSLRGGRDSCNGDSGSPLLCEGVFRGVTSFGLENKCGDPRGPGVYILLSKKHLNWIIMTIKGAV

SEQ ID NO: 2464 - protein, 354 aa, Homo sapiens
MKSLLLLVLISICWADHLSDNYTLDHDRAIHIQAENGPHLLVEAEQAKVFSHRGGNVTLPCKFYRDPTAFGSGIHKIRIKWTKLTSDYLKEVDVFVSMGYHKKTYGGYQGRVFLKGGSDSDASLVITDLTLEDYGRYKCEVIEGLEDDTVVVALDLQGVVFPYFPRLGRYNLNFHEAQQACLDQDAVIASFDQLYDAWRGGLDWCNAGWLSDGSVQYPITKPREPCGGQNTVPGVRNYGFWDKDKSRYDVFCFTSNFNGRFYYLIHPTKLTYDEAVQACLNDGAQIAKVGQIFAAWKILGYDRCDAGWLADGSVRYPISRPRRRCSPTEAAVRFVGFPDKKHKLYGVYCFRAYN

SEQ ID NO: 2465 - protein, 406 aa, Homo sapiens
MPPVGGKKAKKGILERLNAGEIVIGDGGFVFALEKRGYVKAGPWTPEAAVEHPEAVRQLHREFLRAGSNVMQTFTFYASEDKLENRGNYVLEKISGQEVNEAACDIARQVADEGDALVAGGVSQTPSYLSCKSETEVKKVFLQQLEVFMKKNVDFLIAEYFEHVEEAVWAVETLIASGKPVAATMCIGPEGDLHGVPPGECAVRLVKAGASIIGVNCHFDPTISLKTVKLMKEGLEAARLKAHLMSQPLAYHTPDCNKQGFIDLPEFPFGLEPRVATRWDIQKYAREAYNLGVRYIGGCCGFEPYHIRAIAEELAPERGFLPPASEKHGSWGSGLDMHTKPWVRARARKEYWENLRIASGRPYNPSMSKPDGWGVTKGTAELMQQKEATTEQQLKELFEKQKFKSQ

SEQ ID NO: 2466 - protein, 1873 aa, Homo sapiens
MEEGVQAPDWDSDETVIEGSVTESDLEEKELPWRRLLFDQDASLKSEFSLHPDTRGMCKGMPSPEIQLGFKLREDLQEQMNKNKMMPVLSEDTILQSQDETERNQALLQTRKNCSMFIGSFRQSGLSLNHQNIEGPEAESPEVLPHIEKELSEGRDSPEVSLLSGTAITVSDTVAVKETSLVEPEKILAAPNTFFEPRKEVTMTMTSEETKDEESSLETFVSALESLLTSPESTQEERLFELVSDFDRKELMNPLSDSLSSISIPLNSWSACHRDLLEDAKDDALPAELLEALNTLSEAKVETICHRKEGGSSLIARNECLEVEFNTSQTNEDCTQIAETLQDPNPSGLQTLAHQNITSCEPLSNKRNSNSVTNSSDQETACVLRRSSRLEKLKVSRDAKYSDHMYKMPEKILPKILGCEDLTNNNSSAQNFRMQDPALMIDGKEKNMHSARFKNGKQIRKNEQFSGKKEKMKVNKISLHSINRRNIFGENLVYKAALHDDADLVHHCIKKGGNVNQPSYAGWTALHEASVGGFYRTASELLKGGADVNIKGLYQITPLHDAVMNGHYKVAELLLLNGADPLFRNDDGKCALDEAKDLCMKRLLERYIPKHQKCLTSAQRSSIDPLDIEDVYQHKKPKFSSKSHIWHVYNENSNRQKLEHVKVNKGSKASLFINKEDVYEYYQKDPKNTKFGKSKHKQSTLDQIYSTGLRKGNLHNVKDPNTNVPKGIGRRKTQHKRTQVDDVDCNPRKILAVSPSRRINRLVTYQQHIPETHNDLPEELCEPSSLTLSSLRNGLDSSTEACSVSKEKHIQNLDLSDSQEVQCLELESVDQTEAVSFPGLLLHKEIKLPVVTTDKQPHTLQEQHHVLYKSHENSNLVPKDERFNKWENSFLSFVKENSDNDDDDDCSTSEKAITSKKVLCSTGGKKHYNFKENLTNKKEMGFQQFLLSEDHLSQENELKAVSLTTLPEQEAVNFSYSDNAVISEHVANYEQCIFGPSFDHSNGNPEQNSLACMRTLLTHEASKLTNHVELFKKPQDYIPRAPTFLMNQTDTHIVEKMAKNCDTERNYIDRDQKIIYSNEPLSIVAHSQVIETTKVEKRRQNHLESETIHNIDSHSTDNMSKELANISKLSQREKKEISHKPGMKAGRINKRNARGESQLHLAVRRGNLPLVKALIESGADVNLNDNAGWTPLHEASNEGSIDIIVELLKAGAKVNCENIDGILPLHDAVANNHLKAAEILLQNGANPNQKDQKQKSALDEADDEKMKELLRSYGAIETVNRDESDAIVNEKIPAVRSKRHKQCFCDDGKTIDSSSLSHQERSRESLSVHQTLSAILQDIEEKQEYLLEFEIRNPEDAEQYIEKMLKIKKIMDNVLAKQKAERDDLAKKYRVSIESFKHGALREQLANLAARQKSLLVVAKKQKKISLKIQNCRNVTSLPCLSLRKLPPRSEISSEKDSQELTSLENLEHPQSGSLSPVSGSMQETQLSLETWNYSQNTNICLNSEAVRRGEFSGNDMNSKQNGSDCTLDGFPKSRHSDGTEKNKLPSQPVAFIGQTEYSQKENDLTEATDKDHEFYVSSPVIGKLNISETASVLAENAAHPSNIICDQDLSNYDPKRGNRKTSSQQSPTGASESLAHQGIAVLGSDTVHQMKPYLKKSVSVVPCADDSQISSSSGSGQQDTIKKALNYSTAPKKKCIQIKDLILLGRINPGNNILEFKTQETTHKASILLNGKLKVESGQIYKNPVTWLKDLLGGNSYVTWNYAWSKVTYLGKELLRYVSEDAPILPEPNSVPQQYQPCLPEVACLDDPVQEPNKSMFEKTKFGQGTSRESMQSSPRYLQINEILLISDQEFLPCHIMDQHWKFCVECEELTP

SEQ ID NO: 2467 - protein, 1575 aa, Homo sapiens
MPHEELPSLQRPRYGSIVDDERLSAEEMDERRRQNIAYEYLCHLEEAKRWMEVCLVEELPPTTELEEGLRNGVYLAKLAKFFAPKMVSEKKIYDVEQTRYKKSGLHFRHTDNTVQWLRAMESIGLPKIFYPETTDVYDRKNIPRMIYCIHALSLYLFKLGIAPQIQDLLGKVDFTEEEISNMRKELEKYGIQMPSFSKIGGILANELSVDEAALHAAVIAINEAVEKGIAEQTVVTLRNPNAVLTLVDDNLAPEYQKELWDAKKKKEENARLKNSCISEEERDAYEELLTQAEIQGNINKVNRQAAVDHINAVIPEGDPENTLLALKKPEAQLPAVYPFAAAMYQNELFNLQKQNTMNYLAHEELLIAVEMLSAVALLNQALESNDLVSVQNQLRSPAIGLNNLDKAYVERYANTLLSVKLEVLSQGQDNLSWNEIQNCIDMVNAQIQEENDRVVAVGYINEAIDEGNPLRTLETLLLPTANISDVDPAHAQHYQDVLYHAKSQKLGDSESVSKVLWLDEIQQAVDDANVDKDRAKQWVTLVVDVNQCLEGKKSSDILSVLKSSTSNANDIIPECADKYYDALVKAKELKSERVSSDGSWLKLNLHKKYDYYYNTDSKESSWVTPESCLYKESWLTGKEIEDIIEEVTVGYIRENIWSASEELLLRFQATSSGPILREEFEARKSFLHEQEENVVKIQAFWKGYKQRKEYMHRRQTFIDNTDSIVKIQSWFRMATARKSYLSRLQYFRDHNNEIVKIQSLLRANKARDDYKTLVGSENPPLTVIRKFVYLLDQSDLDFQEELEVARLREEVVTKIRANQQLEKDLNLMDIKIGLLVKNRITLEDVISHSKKLNKKKGGEMEILNNTDNQGIKSLSKERRKTLETYQQLFYLLQTNPLYLAKLIFQMPQNKSTKFMDTVIFTLYNYASNQREEYLLLKLFKTALEEEIKSKVDQVQDIVTGNPTVIKMVVSFNRGARGQNTLRQLLAPVVKEIIDDKSLIINTNPVEVYKAWVNQLETQTGEASKLPYDVTTEQALTYPEVKNKLEASIENLRRVTDKVLNSIISSLDLLPYGLRYIAKVLKNSIHEKFPDATEDELLKIVGNLLYYRYMNPAIVAPDGFDIIDMTAGGQINSDQRRNLGSVAKVLQHAASNKLFEGENEHLSSMNNYLSETYQEFRKYFKEACNVPEPEEKFNMDKYTDLVTVSKPVIYISIEEIISTHSLLLEHQDAIAPEKNDLLSELLGSLGEVPTVESFLGEGAVDPNDPNKANTLSQLSKTEISLVLTSKYDIEDGEAIDSRSLMIKTKKLIIDVIRNQPGNTLTEILETPATAQQEVDHATDMVSRAMIDSRTPEEMKHSQSMIEDAQLPLEQKKRKIQRNLRTLEQTGHVSSENKYQDILNEIAKDIRNQRIYRKLRKAELAKLQQTLNALNKKAAFYEEQINYYDTYIKTCLDNLKRKNTRRSIKLDGKGEPKGAKRAKPVKYTAAKLHEKGVLLDIDDLQTNQFKNVTFDIIATEDVGIFDVRSKFLGVEMEKVQLNIQDLLQMQYEGVAVMKMFDKVKVNVNLLIYLLNKKFYGK

SEQ ID NO: 2468 - protein, 1047 aa, Homo sapiens
MMAAEAGSEEGGPVTAGAGGGGAAAGSSAYPAVCRVKIPAALPVAAAPYPGLVETGVAGTLGGGAALGSEFLGAGSVAGALGGAGLTGGGTAAGVAGAAAGVAGAAVAGPSGDMALTKLPTSLLAETLGPGGGFPPLPPPPYLPPLGAGLGTVDEGDSLDGPEYEEEEVAIPLTAPPTNQWYHGKLDRTIAEERLRQAGKSGSYLIRESDRRPGSFVLSFLSQMNVVNHFRIIAMCGDYYIGGRRFSSLSDLIGYYSHVSCLLKGEKLLYPVAPPEPVEDRRRVRAILPYTKVPDTDEISFLKGDMFIVHNELEDGWMWVTNLRTDEQGLIVEDLVEEVGREEDPHEGKIWFHGKISKQEAYNLLMTVGQVCSFLVRPSDNTPGDYSLYFRTNENIQRFKICPTPNNQFMMGGRYYNSIGDIIDHYRKEQIVEGYYLKEPVPMQDQEQVLNDTVDGKEIYNTIRRKTKDAFYKNIVKKGYLLKKGKGKRWKNLYFILEGSDAQLIYFESEKRATKPKGLIDLSVCSVYVVHDSLFGRPNCFQIVVQHFSEEHYIFYFAGETPEQAEDWMKGLQAFCNLRKSSPGTSNKRLRQVSSLVLHIEEAHKLPVKHFTNPYCNIYLNSVQVAKTHAREGQNPVWSEEFVFDDLPPDINRFEITLSNKTKKSKDPDILFMRCQLSRLQKGHATDEWFLLSSHIPLKGIEPGSLRVRARYSMEKIMPEEEYSEFKELILQKELHVVYALSHVCGQDRTLLASILLRIFLHEKLESLLLCTLNDREISMEDEATTLFRATTLASTLMEQYMKATATQFVHHALKDSILKIMESKQSCELSPSKLEKNEDVNTNLTHLLNILSELVEKIFMASEILPPTLRYIYGCLQKSVQHKWPTNTTMRTRVVSGFVFLRLICPAILNPRMFNIISDSPSPIAARTLILVAKSVQNLANLVEFGAKEPYMEGVNPFIKSNKHRMIMFLDELGNVPELPDTTEHSRTDLSRDLAALHEICVAHSDELRTLSNERGAQQHVLKKLLAITELLQQKQNQYTKTNDVR

SEQ ID NO: 2469 - protein, 282 aa, Homo sapiens
MDRTLESLRHIIAQVLPHRDPALVFKDLNVVSMLQEFWESKQQQKAAFPSEGVVVYESLPAPGPPFVSYVTLPGGSCFGNFQCCLSRAEARRDAAKVALINSLFNELPSRRITKEFIMESVQEAVASTSGTLDDADDPSTSVGAYHYMLESNMGKTMLEFQELMTIFQLLHWNGSLKALRETKCSRQEVISYYSQYSLDEKMRSHMALDWIMKERDSPGIVSQELRMALRQLEEARKAGQELRFYKEKKEILSLALTQICSDPDTSSPSDDQLSLTALCGYH

SEQ ID NO: 2470 - protein, 1140 aa, Homo sapiens
MVISLNSCLSFICLLLCHWIGTASPLNLEDPNVCSHWESYSVTVQESYPHPFDQIYYTSCTDILNWFKCTRHRVSYRTAYRHGEKTMYRRKSQCCPGFYESGEMCVPHCADKCVHGRCIAPNTCQCEPGWGGTNCSSACDGDHWGPHCTSRCQCKNGALCNPITGACHCAAGFRGWRCEDRCEQGTYGNDCHQRCQCQNGATCDHVTGECRCPPGYTGAFCEDLCPPGKHGPQCEQRCPCQNGGVCHHVTGECSCPSGWMGTVCGQPCPEGRFGKNCSQECQCHNGGTCDAATGQCHCSPGYTGERCQDECPVGTYGVLCAETCQCVNGGKCYHVSGACLCEAGFAGERCEARLCPEGLYGIKCDKRCPCHLENTHSCHPMSGECACKPGWSGLYCNETCSPGFYGEACQQICSCQNGADCDSVTGKCTCAPGFKGIDCSTPCPLGTYGINCSSRCGCKNDAVCSPVDGSCTCKAGWHGVDCSIRCPSGTWGFGCNLTCQCLNGGACNTLDGTCTCAPGWRGEKCELPCQDGTYGLNCAERCDCSHADGCHPTTGHCRCLPGWSGVHCDSVCAEGRWGPNCSLPCYCKNGASCSPDDGICECAPGFRGTTCQRICSPGFYGHRCSQTCPQCVHSSGPCHHITGLCDCLPGFTGALCNEVCPSGRFGKNCAGICTCTNNGTCNPIDRSCQCYPGWIGSDCSQPCPPAHWGPNCIHTCNCHNGAFCSAYDGECKCTPGWTGLYCTQRCPLGFYGKDCALICQCQNGADCDHISGQCTCRTGFMGRHCEQKCPSGTYGYGCRQICDCLNNSTCDHITGTCYCSPGWKGARCDQAGVIIVGNLNSLSRTSTALPADSYQIGAIAGIIILVLVVLFLLALFIIYRHKQKGKESSMPAVTYTPAMRVVNADYTISGTLPHSNGGNANSHYFTNPSYHTLTQCATSPHVNNRDRMTVTKSKNNQLFVNLKNVNPGKRGPVGDCTGTLPADWKHGGYLNELGAFGLDRSYMGKSLKDLGKNSEYNSSNCSLSSSENPYATIKDPPVLIPKSSECGYVEMKSPARRDSPYAEINNSTSANRNVYEVEPTVSVVQGVFSNNGRLSQDPYDLPKNSHIPCHYDLLPVRDSSSSPKQEDSGGSSSNSSSSSE

SEQ ID NO: 2471 - protein, 1213 aa, Homo sapiens
MGKNREMRLTHICCCCLLYQLGFLSNGIVSELQFAPDREEWEVVFPALWRREPVDPAGGSGGSADPGWVRGVGGGGSARAQAAGSSREVRSVAPVPLEEPVEGRSESRLRPPPPSEGEEDEELESQELPRGSSGAAALSPGAPASWQPPPPPQPPPSPPPAQHAEPDGDEVLLRIPAFSRDLYLLLRRDGRFLAPRFAVEQRPNPGPGPTGAASAPQPPAPPDAGCFYTGAVLRHPGSLASFSTCGGGLMGFIQLNEDFIFIEPLNDTMAITGHPHRVYRQKRSMEEKVTEKSALHSHYCGIISDKGRPRSRKIAESGRGKRYSYKLPQEYNIETVVVADPAMVSYHGADAARRFILTILNMVFNLFQHKSLSVQVNLRVIKLILLHETPPELYIGHHGEKMLESFCKWQHEEFGKKNDIHLEMSTNWGEDMTSVDAAILITRKDFCVHKDEPCDTVGIAYLSGMCSEKRKCIIAEDNGLNLAFTIAHEMGHNMGINHDNDHPSCADGLHIMSGEWIKGQNLGDVSWSRCSKEDLERFLRSKASNCLLQTNPQSVNSVMVPSKLPGMTYTADEQCQILFGPLASFCQEMQHVICTGLWCKVEGEKECRTKLDPPMDGTDCDLGKWCKAGECTSRTSAPEHLAGEWSLWSPCSRTCSAGISSRERKCPGLDSEARDCNGPRKQYRICENPPCPAGLPGFRDWQCQAYSVRTSSPKHILQWQAVLDEEKPCALFCSPVGKEQPILLSEKVMDGTSCGYQGLDICANGRCQKVGCDGLLGSLAREDHCGVCNGNGKSCKIIKGDFNHTRGAGYVEVLVIPAGARRIKVVEEKPAHSYLALRDAGKQSINSDWKIEHSGAFNLAGTTVHYVRRGLWEKISAKGPTTAPLHLLVLLFQDQNYGLHYEYTIPSDPLPENQSSKAPEPLFMWTHTSWEDCDATCGGGERKTTVSCTKIMSKNISIVDNEKCKYLTKPEPQIRKCNEQPCQTRWMMTEWTPCSRTCGKGMQSRQVACTQQLSNGTLIRARERDCIGPKPASAQRCEGQDCMTVWEAGVWSECSVKCGKGIRHRTVRCTNPRKKCVLSTRPREAEDCEDYSKCYVWRMGDWSKCSITCGKGMQSRVIQCMHKITGRHGNECFSSEKPAAYRPCHLQPCNEKINVNTITSPRLAALTFKCLGDQWPVYCRVIREKNLCQDMRWYQRCCETCRDFYAQKLQQKS

SEQ ID NO: 2472 - protein, 814 aa, Homo sapiens
MGLPALEFSDCCLDSPHFRETLKSHEAELDKTNKFIKELIKDGKSLISALKNLSSAKRKFADSLNEFKFQCIGDAETDDEMCIARSLQEFATVLRNLEDERIRMIENASEVLITPLEKFRKEQIGAAKEAKKKYDKETEKYCGILEKHLNLSSKKKESQLQEADSQVDLVRQHFYEVSLEYVFKVQEVQERKMFEFVEPLLAFLQGLFTFYHHGYELAKDFGDFKTQLTISIQNTRNRFEGTRSEVESLMKKMKENPLEHKTISPYTMEGYLYVQEKRHFGTSWVKHYCTYQRDSKQITMVPFDQKSGGKGGEDESVILKSCTRRKTDSIEKRFCFDVEAVDRPGVITMQALSEEDRRLWMEAMDGREPVYNSNKDSQSEGTAQLDSIGFSIIRKCIHAVETRGINEQGLYRIVGVNSRVQKLLSVLMDPKTASETETDICAEWEIKTITSALKTYLRMLPGPLMMYQFQRSFIKAAKLENQESRVSEIHSLVHRLPEKNRQMLQLLMNHLANVANNHKQNLMTVANLGVVFGPTLLRPQEETVAAIMDIKFQNIVIEILIENHEKIFNTVPDMPLTNAQLHLSRKKSSDSKPPSCSERPLTLFHTVQSTEKQEQRNSIINSSLESVSSNPNSILNSSSSLQPNMNSSDPDLAVVKPTRPNSLPPNPSPTSPLSPSWPMFSAPSSPMPTSSTSSDSSPVRSVAGFVWFSVAAVVLSLARSSLHAVFSLLVNFVPCHPNLHLLFDRPEEAVHEDSSTPFRKAKALYACKAEHDSELSFTAGTVFDNVHPSQEPGWLEGTLNGKTGLIPENYVEFL

SEQ ID NO: 2473 - protein, 378 aa, Homo sapiens
MSKEPLILWLMIEFWWLYLTPVTSETVVTEVLGHRVTLPCLYSSWSHNSNSMCWGKDQCPYSGCKEALIRTDGMRVTSRKSAKYRLQGTIPRGDVSLTILNPSESDSGVYCCRIEVPGWFNDVKINVRLNLQRASTTTHRTATTTTRRTTTTSPTTTRQMTTTPAALPTTVVTTPDLTTGTPLQMTTIAVFTTANTCLSLTPSTLPEEATGLLTPEPSKEGPILTAESETVLPSDSWSSVESTSADTVLLTSKESKVWDLPSTSHVSMWKTSDSVSSPQPGASDTAVPEQNKTTKTGQMDGIPMSMKNEMPISQLLMIIAPSLGFVLFALFVAFLLRGKLMETYCSQKHTRLDYIGDSKNVLNDVQHGREDEDGLFTL

SEQ ID NO: 2474 - protein, 691 aa, Homo sapiens
MMRNHRIASSLCGDQVFSKKKKKKKKNNMAAKEKLEAVLNVALRVPSIMLLDVLYRWDVSSFFQQIQRSSLSNNPLFQYKYLALNMHYVGYILSVVLLTLPRQHLVQLYLYFLTALLLYAGHQISRDYVRSELEFAYEGPMYLEPLSMNRFTTALIGQLVVCTLCSCVMKTKQIWLFSAHMLPLLARLCLVPLETIVIINKFAMIFTGLEVLYFLGSNLLVPYNLAKSAYRELVQVVEVYGLLALGMSLWNQLVVPVLFMVFWLVLFALQIYSYFSTRDQPASRERLLFLFLTSIAECCSTPYSLLGLVFTVSFVALGVLTLCKFYLQGYRAFMNDPAMNRGMTEGVTLLILAVQTGLIELQVVHRAFLLSIILFIVVASILQSMLEIADPIVLALGASRDKSLWKHFRAVSLCLFLLVFPAYMAYMICQFFHMDFWLLIIISSSILTSLQVLGTLFIYVLFMVEEFRKEPVENMDDVIYYVNGTYRLLEFLVALCVVAYGVSETIFGEWTVMGSMIIFIHSYYNVWLRAQLGWKSFLLRRDAVNKIKSLPIATKEQLEKHNDICAICYQDMKSAVITPCSHFFHAGCLKKWLYVQETCPLCHCHLKNSSQLPGLGTEPVLQPHAGAEQNVMFQEGTEPPGQEHTPGTRIQEGSRDNNEYIARRPDNQEGAFDPKEYPHSAKDEAHPVESA

SEQ ID NO: 2475 - protein, 453 aa, Homo sapiens
MASSLPWLCIILWLENALGKLEVEGNFYSENVSRILDNLLEGYDNRLRPGFGGAVTEVKTDIYVTSFGPVSDVEMEYTMDVFFRQTWTDERLKFGGPTEILSLNNLMVSKIWTPDTFFRNGKKSIAHNMTTPNKLFRIMQNGTILYTMRLTINADCPMRLVNFPMDGHACPLKFGSYAYPKSEIIYTWKKGPLYSVEVPEESSSLLQYDLIGQTVSSETIKSNTGEYVIMTVYFHLQRKMGYFMIQIYTPCIMTVILSQVSFWINKESVPARTVFGITTVLTMTTLSISARHSLPKVSYATAMDWFIAVCFAFVFSALIEFAAVNYFTNLQTQKAKRKAQFAAPPTVTISKATEPLEAEIVLHPDSKYHLKKRITSLSLPIVSSSEANKVLTRAPILQSTPVTPPPLSPAFGGTSKIDQYSRILFPVAFAGFNLVYWVVYLSKDTMEVSSSVE

SEQ ID NO: 2476 - protein, 474 aa, Homo sapiens
MWRVRKRGYFGIWSFPLIIAAVCAQSVNDPSNMSLVKETVDRLLKGYDIRLRPDFGGPPVAVGMNIDIASIDMVSEVNMDYTLTMYFQQAWRDKRLSYNVIPLNLTLDNRVADQLWVPDTYFLNDKKSFVHGVTVKNRMIRLHPDGTVLYGLRITTTAACMMDLRRYPLDEQNCTLEIESYGYTTDDIEFYWRGDDNAVTGVTKIELPQFSIVDYKLITKKVVFSTGSYPRLSLSFKLKRNIGYFILQTYMPSILITILSWVSFWINYDASAARVALGITTVLTMTTINTHLRETLPKIPYVKAIDMYLMGCFVFVFMALLEYALVNYIFFGRGPQRQKKAAEKAASANNEKMRLDVNKMDPHENILLSTLEIKNEMATSEAVMGLGDPRSTMLAYDASSIQYRKAGLPRHSFGRNALERHVAQKKSRLRRRASQLKITIPDLTDVNAIDRWSRIFFPVVFSFFNIVYWLYYVN

SEQ ID NO: 2477 - protein, 512 aa, Homo sapiens
MWRVRKRGYFGIWSFPLIIAAVCAQSVNDPSNMSLVKETVDRLLKGYDIRLRPDFGGPPVAVGMNIDIASIDMVSEVNMDYTLTMYFQQAWRDKRLSYNVIPLNLTLDNRVADQLWVPDTYFLNDKKSFVHGVTVKNRMIRLHPDGTVLYGLRITTTAACMMDLRRYPLDEQNCTLEIESYGYTTDDIEFYWRGDDNAVTGVTKIELPQFSIVDYKLITKKVVFSTGSYPRLSLSFKLKRNIGYFILQTYMPSILITILSWVSFWINYDASAARVALGITTVLTMTTINTHLRETLPKIPYVKAIDMYLMGCFVFVFMALLEYALVNYIFFGRGPQRQKKAAEKAASANNEKMRLDVNKIFYKDIKQNGTQYRSLWDPTGNLSPTRRTTNYDFSLYTMDPHENILLSTLEIKNEMATSEAVMGLGDPRSTMLAYDASSIQYRKAGLPRHSFGRNALERHVAQKKSRLRRRASQLKITIPDLTDVNAIDRWSRIFFPVVFSFFNIVYWLYYVN

SEQ ID NO: 2478 - protein, 604 aa, Homo sapiens
MMKSQGLVSFKDVAVDFTQEEWQQLDPSQRTLYRDVMLENYSHLVSMGYPVSKPDVISKLEQGEEPWIIKGDISNWIYPDEYQADGRQDRKSNLHNSQSCILGTVSFHHKILKGVTRDGSLCSILKVCQGDGQLQRFLENQDKLFRQVTFVNSKTVTEASGHKYNPLGKIFQECIETDISIQRFHKYDAFKKNLKPNIDLPSCYKSNSRKKPDQSFGGGKSSSQSEPNSNLEKIHNGVIPFDDNQCGNVFRNTQSLIQYQNVETKEKSCVCVTCGKAFAKKSQLIVHQRIHTGKKPYDCGACGKAFSEKFHLVVHQRTHTGEKPYDCSECGKAFSQKSSLIIHQRVHTGEKPYECSECGKAFSQKSPLIIHQRIHTGEKPYECRECGKAFSQKSQLIIHHRAHTGEKPYECTECGKAFCEKSHLIIHKRIHTGEKPYKCAQCEEAFSRKTELITHQLVHTGEKPYECTECGKTFSRKSQLIIHQRTHTGEKPYKCSECGKAFCQKSHLIGHQRIHTGEKPYICTECGKAFSQKSHLPGHQRIHTGEKPYICAECGKAFSQKSDLVLHQRIHTGERPYQCAICGKAFIQKSQLTVHQRIHTVVKS

SEQ ID NO: 2479 - protein, 388 aa, Homo sapiens
MLKVKRLEEFNTCYNSNQLEKMAFFQCREEVEKVKCFLEKNSGDQDSRSGHNEAKEVWSNADLTERMPVKSKRTSALAVDIPAPPAPFDHRIVTAKQGAVNSFYTVSKTEILGGGRFGQVHKCEETATGLKLAAKIIKTRGMKDKEEVKNEISVMNQLDHANLIQLYDAFESKNDIVLVMEYVDGGELFDRIIDESYNLTELDTILFMKQICEGIRHMHQMYILHLDLKPENILCVNRDAKQIKIIDFGLARRYKPREKLKVNFGTPEFLAPEVVNYDFVSFPTDMWSVGVIAYMLLSGLSPFLGDNDAETLNNILACRWDLEDEEFQDISEEAKEFISKLLIKEKSWRISASEALKHPWLSDHKLHSRLNAQKKKNRGSDAQDFVTK

SEQ ID NO: 2480 - protein, 508 aa, Homo sapiens
MGRRNENCANSLRVSNISQENLSHWNLDSEVPVSENKNLPAGRDGAAGGKINKNYLEIPVEQLMLEPNLSVHSQKSTQNSKQGIFQLWNCPLNEGSTIEKREFKKSSVETGFNVINHPIRVFTLNHPLTIASVDKQVGPYPGLPMPLGLCWPYADGDFFKNRNEIHVSSCSTIENNDGETLPAPNWNLKHGNSSVEENFTDESDLSENEKTNDTLLSYFKKVDLNLKPETIKNVEEPFTEEPNEVFPYPDFLPPPFSALDLHNLALSKSDNWKVTVDPAETSVEHLITRLLELERLQHMTIQKERPRLQTTFCTPAVTERPSSSKATPKVRQPKLCDSLSLQIPCVDKSQEKSKNNSGSCKLEQNALKRNWSNAGKYRWNSRPLSLKSSSTPKQLIETYDKNPKSSILSPCQELSFKPTIGHTNQSMVKMVSTRCLPWRSPMPVSPIPLTFPENQKEEIKAPKRNFGTKKKLYRQNIVLNRPFSIQKLNCLSPSLIAKDKCCSPIEQK

SEQ ID NO: 2481 - protein, 771 aa, Homo sapiens
MEEDKLLSAVPEEGDATRDPGPEPEEEPGVRNGMASEGLNSSLCSPGHERRGTPADTEEPTKDPDVAFHGLSLGLSLTNGLALGPDLNILEDSAESRPWRAGVLAEGDNASRSLYPDAEDPQLGLDGPGEPDVRDGFSATFEKILESELLRGTQYSSLDSLDGLSLTDESDSCVSFEAPLTPLIQQRARDSPEPGAGLGIGDMAFEGDMGAAGGDGELGSPLRRSISSSRSENVLSRLSLMAMPNGFHEDGPQGPGGDEDDDEEDTDKLLNSASDPSLKDGLSDSDSELSSSEGLEPGSADPLANGCQGVSEAAHRLARRLYHLEGFQRCDVARQLGKNNEFSRLVAGEYLSFFDFSGLTLDGALRTFLKAFPLMGETQERERVLTHFSRRYCQCNPDDSTSEDGIHTLTCALMLLNTDLHGHNIGKKMSCQQFIANLDQLNDGQDFAKDLLKTLYNSIKNEKLEWAIDEDELRKSLSELVDDKFGTGTKKVTRILDGGNPFLDVPQALSATTYKHGVLTRKTHADMDGKRTPRGRRGWKKFYAVLKGTILYLQKDEYRPDKALSEGDLKNAIRVHHALATRASDYSKKSNVLKLKTADWRVFLFQAPSKEEMLSWILRINLVAAIFSAPAFPAAVSSMKKFCRPLLPSCTTRLCQEEQLRSHENKLRQLTAELAEHRCHPVERGIKSKEAEEYRLKEHYLTFEKSRYETYIHLLAMKIKVGSDDLERIEARLATLEGDDPSLRKTHSSPALSQGHVTGSKTTKDATGPDT

SEQ ID NO: 2482 - protein, 511 aa, Homo sapiens
MAAVGPRTGPGTGAEALALAAELQGEATCSICLELFREPVSVECGHSFCRACIGRCWERPGAGSVGAATRAPPFPLPCPQCREPARPSQLRPNRQLAAVATLLRRFSLPAAAPGEHGSQAAAARAAAARCGQHGEPFKLYCQDDGRAICVVCDRAREHREHAVLPLDEAVQEAKELLESRLRVLKKELEDCEVFRSTEKKESKELLKQMAAEQEKVGAEFQALRAFLVEQEGRLLGRLEELSREVAQKQNENLAQLGVEITQLSKLSSQIQETAQKPDLDFLQEFKSTLSRCSNVPGPKPTTVSSEMKNKVWNVSLKTFVLKGMLKKFKEDLRGELEKEEKVELTLDPDTANPRLILSLDLKGVRLGERAQDLPNHPCRFDTNTRVLASCGFSSGRHHWEVEVGSKDGWAFGVARESVRRKGLTPFTPEEGVWALQLNGGQYWAVTSPERSPLSCGHLSRVRVALDLEVGAVSFYAVEDMRHLYTFRVNFQERVFPLFSVCSTGTYLRIWP

SEQ ID NO: 2483 - protein, 441 aa, Homo sapiens
MVPPKLHVLFCLCGCLAVVYPFDWQYINPVAHMKSSAWVNKIQVLMAAASFGQTKIPRGNGPYSVGCTDLMFDHTNKGTFLRLYYPSQDNDRLDTLWIPNKEYFWGLSKFLGTHWLMGNILRLLFGSMTTPANWNSPLRPGEKYPLVVFSHGLGAFRTLYSAIGIDLASHGFIVAAVEHRDRSASATYYFKDQSAAEIGDKSWLYLRTLKQEEETHIRNEQVRQRAKECSQALSLILDIDHGKPVKNALDLKFDMEQLKDSIDREKIAVIGHSFGGATVIQTLSEDQRFRCGIALDAWMFPLGDEVYSRIPQPLFFINSEYFQYPANIIKMKKCYSPDKERKMITIRGSVHQNFADFTFATGKIIGHMLKLKGDIDSNVAIDLSNKASLAFLQKHLGLHKDFDQWDCLIEGDDENLIPGTNINTTNQHIMLQNSSGIEKYN

SEQ ID NO: 2484 - protein, 432 aa, Homo sapiens
MRPWALAVTRWPPSAPVGQRRFSAGPGSTPGQLWGSPGLEGPLASPPARDERLPSQQPPSRPPHLPVEERRASAPAGGSPRMLHPATQQSPFMVDLHEQVHQGPVPLSYTVTTVTTQGFPLPTGQHIPGCSAQQLPACSVMFSGQHYPLCCLPPPLIQACTMQQLPVPYQAYPHLISSDHYILHPPPPAPPPQPTHMAPLGQFVSLQTQHPRMPLQRLDNDVDLRGDQPSLGSFTYSTSAPGPALSPSVPLHYLPHDPLHQELSFGVPYSHMMPRRLSTQRYRLQQPLPPPPPPPPPPPYYPSFLPYFLSMLPMSPTAMGPTISLDLDVDDVEMENYEALLNLAERLGDAKPRGLTKADIEQLPSYRFNPDSHQSEQTLCVVCFSDFEARQLLRVLPCNHEFHTKCVDKWLKANRTCPICRADASEVPREAE

SEQ ID NO: 2485 - protein, 750 aa, Homo sapiens
MLRAKNQLFLLSPHYLRQVKESSGSRLIQQRLLHQQQPLHPEWAALAKKQLKGKNPEDLIWHTPEGISIKPLYSKRDTMDLPEELPGVKPFTRGPYPTMYTFRPWTIRQYAGFSTVEESNKFYKDNIKAGQQGLSVAFDLATHRGYDSDNPRVRGDVGMAGVAIDTVEDTKILFDGIPLEKMSVSMTMNGAVIPVLANFIVTGEEQGVPKEKLTGTIQNDILKEFMVRNTYIFPPEPSMKIIADIFEYTAKHMPKFNSISISGYHMQEAGADAILELAYTLADGLEYSRTGLQAGLTIDEFAPRLSFFWGIGMNFYMEIAKMRAGRRLWAHLIEKMFQPKNSKSLLLRAHCQTSGWSLTEQDPYNNIVRTAIEAMAAVFGGTQSLHTNSFDEALGLPTVKSARIARNTQIIIQEESGIPKVADPWGGSYMMECLTNDVYDAALKLINEIEEMGGMAKAVAEGIPKLRIEECAARRQARIDSGSEVIVGVNKYQLEKEDAVEVLAIDNTSVRNRQIEKLKKIKSSRDQALAERCLAALTECAASGDGNILALAVDASRARCTVGEITDALKKVFGEHKANDRMVSGAYRQEFGESKEITSAIKRVHKFMEREGRRPRLLVAKMGQDGHDRGAKVIATGFADLGFDVDIGPLFQTPREVAQQAVDADVHAVGISTLAAGHKTLVPELIKELNSLGRPDILVMCGGVIPPQDYEFLFEVGVSNVFGPGTRIPKAAVQVLDDIEKCLEKKQQSV

SEQ ID NO: 2486 - protein, 272 aa, Homo sapiens
MEAEESEKAATEQEPLEGTEQTLDAEEEQEESEEAACGSKKRVVPGIVYLGHIPPRFRPLHVRNLLSAYGEVGRVFFQAEDRFVRRKKKAAAAAGGKKRSYTKDYTEGWVEFRDKRIAKRVAASLHNTPMGARRRSPFRYDLWNLKYLHRFTWSHLSEHLAFERQVRRQRLRAEVAQAKRETDFYLQSVERGQRFLAADGDPARPDGSWTFAQRPTEQELRARKAARPGGRERARLATAQDKARSNKGLLARIFGAPPPSESMEGPSLVRDS

SEQ ID NO: 2487 - protein, 613 aa, Homo sapiens
MATIPDWKLQLLARRRQEEASVRGREKAERERLSQMPAWKRGLLERRRAKLGLSPGEPSPVLGTVEAGPPDPDESAVLLEAIGPVHQNRFIRQERQQQQQQQQRSEELLAERKPGPLEARERRPSPGEMRDQSPKGRESREERLSPRETRERRLGIGGAQELSLRPLEARDWRQSPGEVGDRSSRLSEAWKWRLSPGETPERSLRLAESREQSPRRKEVESRLSPGESAYQKLGLTEAHKWRPDSRESQEQSLVQLEATEWRLRSGEERQDYSEECGRKEEWPVPGVAPKETAELSETLTREAQGNSSAGVEAAEQRPVEDGERGMKPTEGWKWTLNSGKAREWTPRDIEAQTQKPEPPESAEKLLESPGVEAGEGEAEKEEAGAQGRPLRALQNCCSVPSPLPPEDAGTGGLRQQEEEAVELQPPPPAPLSPPPPAPTAPQPPGDPLMSRLFYGVKAGPGVGAPRRSGHTFTVNPRRSVPPATPATPTSPATVDAAVPGAGKKRYPTAEEILVLGGYLRLSRSCLAKGSPERHHKQLKISFSETALETTYQYPSESSVLEELGPEPEVPSAPNPPAAQPDDEEDEEELLLLQPELQGGLRTKALIVDESCRR

SEQ ID NO: 2488 - protein, 1068 aa, Homo sapiens
MAPRKRSHHGLGFLCCFGGSDIPEINLRDNHPLQFMEFSSPIPNAEELNIRFAELVDELDLTDKNREAMFALPPEKKWQIYCSKKKEQEDPNKLATSWPDYYIDRINSMAAMQSLYAFDEEETEMRNQVVEDLKTALRTQPMRFVTRFIELEGLTCLLNFLRSMDHATCESRIHTSLIGCIKALMNNSQGRAHVLAQPEAISTIAQSLRTENSKTKVAVLEILGAVCLVPGGHKKVLQAMLHYQVYAAERTRFQTLLNELDRSLGRYRDEVNLKTAIMSFINAVLNAGAGEDNLEFRLHLRYEFLMLGIQPVIDKLRQHENAILDKHLDFFEMVRNEDDLELARRFDMVHIDTKSASQMFELIHKKLKYTEAYPCLLSVLHHCLQMPYKRNGGYFQQWQLLDRILQQIVLQDERGVDPDLAPLENFNVKNIVNMLINENEVKQWRDQAEKFRKEHMELVSRLERKERECETKTLEKEEMMRTLNKMKDKLARESQELRQARGQVAELVAQLSELSTGPVSSPPPPGGPLTLSSSMTTNDLPPPPPPLPFACCPPPPPPPLPPGGPPTPPGAPPCLGMGLPLPQDPYPSSDVPLRKKRVPQPSHPLKSFNWVKLNEERVPGTVWNEIDDMQVFRILDLEDFEKMFSAYQRHQKELGSTEDIYLASRKVKELSVIDGRRAQNCIILLSKLKLSNEEIRQAILKMDEQEDLAKDMLEQLLKFIPEKSDIDLLEEHKHEIERMARADRFLYEMSRIDHYQQRLQALFFKKKFQERLAEAKPKVEAILLASRELVRSKRLRQMLEVILAIGNFMNKGQRGGAYGFRVASLNKIADTKSSIDRNISLLHYLIMILEKHFPDILNMPSELQHLPEAAKVNLAELEKEVGNLRRGLRAVEVELEYQRRQVREPSDKFVPVMSDFITVSSFSFSELEDQLNEARDKFAKALMHFGEHDSKMQPDEFFGIFDTFLQAFSEARQDLEAMRRRKEEEERRARMEAMLKEQRERERWQRQRKVLAAGSSLEEGGEFDDLVSALRSGEVFDKDLCKLKRSRKRSGSQALEVTRERAINRLNY

SEQ ID NO: 2489 - protein, 458 aa, Homo sapiens
MELEKREKRSLLNKNLEEKLTVSAGGSEAKPLIFTFVPTVRRLPTHTQLADTSKFLVKIPEESSDKSPETVNRSKSNDYLTLNAGSQQERDQAKLTCPSEVSGTILQEREFEANKLQGMQQSDLFKAEYVLIVDSEGEDEAASRKVEQGPPGGIGTAAVRPKSLAISSSLVSDVVRPKTQGTDLKTSSHPEMLHGMAPQQKHGQQYKTKSSYKAFAAIPTNTLLLEQKALDEPAKTESVSKDNTLEPPVELYFPAQLRQQTEELCATIDKVLQDSLSMHSSDSPSRSPKTLLGSDTVKTPTTLPRAAGRETKYANLSSPSSTVSESQLTKPGVIRPVPVKSRILLKKEEEVYEPNPFSKYLEDNSDLFSEQDVTVPPKPVSLHPLYQTKLYPPAKSLLHPQTLSHADCLAPGPFSHLSFSLSDEQENSHTLLSHNACNKLSHPMVAIPEHEALDSKEQ

SEQ ID NO: 2490 - protein, 340 aa, Homo sapiens
MGNVPSAVKHCLSYQQLLREHLWIGDSVAGALDPAQETSQLSGLPEFVKIVEVGPRDGLQNEKVIVPTDIKIEFINRLSQTGLSVIEVTSFVSSRWVPQMADHTEVMKGIHQYPGVRYPVLTPNLQGFHHAVAAGATEISVFGAASESFSKKNINCSIEESMGKFEEVVKSARHMNIPARGYVSCALGCPYEGSITPQKVTEVSKRLYGMGCYEISLGDTIGVGTPGSMKRMLESVMKEIPPGALAVHCHDTYGQALANILTALQMGINVVDSAVSGLGGCPYAKGASGNVATEDLIYMLNGLGLNTGVNLYKVMEAGDFICKAVNKTTNSKVAQASFNA

SEQ ID NO: 2491 - protein, 993 aa, Homo sapiens
MGSGRVPGLCLLVLLVHARAAQYSKAAQDVDECVEGTDNCHIDAICQNTPRSYKCICKSGYTGDGKHCKDVDECEREDNAGCVHDCVNIPGNYRCTCYDGFHLAHDGHNCLDVDECAEGNGGCQQSCVNMMGSYECHCREGFFLSDNQHTCIQRPEEGMNCMNKNHGCAHICRETPKGGIACECRPGFELTKNQRDCKLTCNYGNGGCQHTCDDTEQGPRCGCHIKFVLHTDGKTCIETCAVNNGGCDSKCHDAATGVHCTCPVGFMLQPDRKTCKDIDECRLNNGGCDHICRNTVGSFECSCKKGYKLLINERNCQDIDECSFDRTCDHICVNTPGSFQCLCHRGYLLYGITHCGDVDECSINRGGCRFGCINTPGSYQCTCPAGQGRLHWNGKDCTEPLKCQGSPGASKAMLSCNRSGKKDTCALTCPSRARFLPESENGFTVSCGTPSPRAAPARAGHNGNSTNSNHCHEAAVLSIKQRASFKIKDAKCRLHLRNKGKTEEAGRITGPGGAPCSECQVTFIHLKCDSSRKGKGRRARTPPGKEVTRLTLELEAEVRAEETTASCGLPCLRQRMERRLKGSLKMLRKSINQDRFLLRLAGLDYELAHKPGLVAGERAEPMESCRPGQHRAGTKCVSCPQGTYYHGQTEQCVPCPAGTFQEREGQLSCDLCPGSDAHGPLGATNVTTCAGQCPPGQHSVDGFKPCQPCPRGTYQPEAGRTLCFPCGGGLTTKHEGAISFQDCDTKVQCSPGHYYNTSIHRCIRCAMGSYQPDFRQNFCSRCPGNTSTDFDGSTSVAQCKNRQCGGELGEFTGYIESPNYPGNYPAGVECIWNINPPPKRKILIVVPEIFLPSEDECGDVLVMRKNSSPSSITTYETCQTYERPIAFTARSRKLWINFKTSEANSARGFQIPYVTYDEDYEQLVEDIVRDGRLYASENHQEILKDKKLIKAFFEVLAHPQNYFKYTEKHKEMLPKSFIKLLRSKVSSFLRPYK

SEQ ID NO: 2492 - protein, 933 aa, Homo sapiens
MRMAATAWAGLQGPPLPTLCPAVRTGLYCRDQAHAERWAMTSETSSGSHCARSRMLRRRAQEEDSTVLIDVSPPEAEKRGSYGSTAHASEPGGQQAAACRAGSPAKPRIADFVLVWEEDLKLDRQQDSAARDRTDMHRTWRETFLDNLRAAGLCVDQQDVQDGNTTVHYALLSASWAVLCYYAEDLRLKLPLQELPNQASNWSAGLLAWLGIPNVLLEVVPDVPPEYYSCRFRVNKLPRFLGSDNQDTFFTSTKRHQILFEILAKTPYGHEKKNLLGIHQLLAEGVLSAAFPLHDGPFKTPPEGPQAPRLNQRQVLFQHWARWGKWNKYQPLDHVRRYFGEKVALYFAWLGFYTGWLLPAAVVGTLVFLVGCFLVFSDIPTQELCGSKDSFEMCPLCLDCPFWLLSSACALAQAGRLFDHGGTVFFSLFMALWAVLLLEYWKRKSATLAYRWDCSDYEDTEERPRPQFAASAPMTAPNPITGEDEPYFPERSRARRMLAGSVVIVVMVAVVVMCLVSIILYRAIMAIVVSRSGNTLLAAWASRIASLTGSVVNLVFILILSKIYVSLAHVLTRWEMHRTQTKFEDAFTLKVFIFQFVNFYSSPVYIAFFKGRFVGYPGNYHTLFGVRNEECAAGGCLIELAQELLVIMVGKQVINNMQEVLIPKLKGWWQKFRLRSKKRKAGASAGASQGPWEDDYELVPCEGLFDEYLEMVLQFGFVTIFVAACPLAPLFALLNNWVEIRLDARKFVCEYRRPVAERAQDIGIWFHILAGLTHLAVISNAFLLAFSSDFLPRAYYRWTRAHDLRGFLNFTLARAPSSFAAAHNRTCRYRAFRDDDGHYSQTYWNLLAIRLAFVIVFEHVVFSVGRLLDLLVPDIPESVEIKVKREYYLAKQALAENEVLFGTNGTKDEQPEGSELSSHWTPFTVPKASQLQQ

SEQ ID NO: 2493 - protein, 500 aa, Homo sapiens
MNQRRSESRPGNHRLQAYAEPGKGDSGGAGPLSGSARRGRGGGGAIRVRRPCWSGGAGRGGGPAWAVRLPTVTAGWTWPALRTLSSLRAGPSEPHSPGRRPPRAGRPLCQADPQPGKAARRSLEPDPAQTGPRPARAAGMSEARKGPDEAEESQYDSGIESLRSLRSLPESTSAPASGPSDGSPQPCTHPPGPVKEPQEKEDADGERADSTYGSSSLTYTLSLLGGPEAEDPAPRLPLPHVGALSPQQLEALTYISEDGDTLVHLAVIHEAPAVLLCCLALLPQEVLDIQNNLYQTALHLAVHLDQPGAVRALVLKGASRALQDRHGDTALHVACQRQHLACARCLLEGRPEPGRGTSHSLDLQLQNWQGLACLHIATLQKNQPLMELLLRNGADIDVQEGTSGKTALHLAVETQERGLVQFLLQAGAQVDARMLNGCTPLHLAAGRGLMGISSTLCKAGADSLLRNVEDETPQDLTEESLVLLPFDDLKISGKLLLCTD

SEQ ID NO: 2494 - protein, 1821 aa, Homo sapiens
MSCERKGLSELRSELYFLIARFLEDGPCQQAAQVLIREVAEKELLPRRTDWTGKEHPRTYQNLVKYYRHLAPDHLLQICHRLGPLLEQEIPQSVPGVQTLLGAGRQSLLRTNKSCKHVVWKGSALAALHCGRPPESPVNYGSPPSIADTLFSRKLNGKYRLERLVPTAVYQHMKMHKRILGHLSSVYCVTFDRTGRRIFTGSDDCLVKIWATDDGRLLATLRGHAAEISDMAVNYENTMIAAGSCDKMIRVWCLRTCAPLAVLQGHSASITSLQFSPLCSGSKRYLSSTGADGTICFWLWDAGTLKINPRPAKFTERPRPGVQMICSSFSAGGMFLATGSTDHIIRVYFFGSGQPEKISELEFHTDKVDSIQFSNTSNRFVSGSRDGTARIWQFKRREWKSILLDMATRPAGQNLQGIEDKITKMKVTMVAWDRHDNTVITAVNNMTLKVWNSYTGQLIHVLMGHEDEVFVLEPHPFDPRVLFSAGHDGNVIVWDLARGVKIRSYFNMIEGQGHGAVFDCKCSPDGQHFACTDSHGHLLIFGFGSSSKYDKIADQMFFHSDYRPLIRDANNFVLDEQTQQAPHLMPPPFLVDVDGNPHPSRYQRLVPGRENCREEQLIPQMGVTSSGLNQVLSQQANQEISPLDSMIQRLQQEQDLRRSGEAVISNTSRLSRGSISSTSEVHSPPNVGLRRSGQIEGVRQMHSNAPRSEIATERDLVAWSRRVVVPELSAGVASRQEEWRTAKGEEEIKTYRSEEKRKHLTVPKENKIPTVSKNHAHEHFLDLGESKKQQTNQHNYRTRSALEETPRPSEEIENGSSSSDEGEVVAVSGGTSEEEERAWHSDGSSSDYSSDYSDWTADAGINLQPPKKVPKNKTKKAESSSDEEEESEKQKQKQIKKEKKKVNEEKDGPISPKKKKPKERKQKRLAVGELTENGLTLEEWLPSTWITDTIPRRCPFVPQMGDEVYYFRQGHEAYVEMARKNKIYSINPKKQPWHKMELREQELMKIVGIKYEVGLPTLCCLKLAFLDPDTGKLTGGSFTMKYHDMPDVIDFLVLRQQFDDAKYRRWNIGDRFRSVIDDAWWFGTIESQEPLQLEYPDSLFQCYNVCWDNGDTEKMSPWDMELIPNNAVFPEELGTSVPLTDGECRSLIYKPLDGEWGTNPRDEECERIVAGINQLMTLDIASAFVAPVDLQAYPMYCTVVAYPTDLSTIKQRLENRFYRRVSSLMWEVRYIEHNTRTFNEPGSPIVKSAKFVTDLLLHFIKDQTCYNIIPLYNSMKKKVLSDSEDEEKDADVPGTSTRKRKDHQPRRRLRNRAQSYDIQAWKKQCEELLNLIFQCEDSEPFRQPVDLLEYPDYRDIIDTPMDFATVRETLEAGNYESPMELCKDVRLIFSNSKAYTPSKRSRIYSMSLRLSAFFEEHISSVLSDYKSALRFHKRNTITKRRKKRNRSSSVSSSAASSPERKKRILKPQLKSESSTSAFSTPTRSIPPRHNAAQINGKTESSSVVRTRSNRVVVDPVVTEQPSTSSAAKTFITKANASAIPGKTILENSVKHSKALNTLSSPGQSSFSHGTRNNSAKENMEKEKPVKRKMKSSVLPKASTLSKSSAVIEQGDCKNNALVPGTIQVNGHGGQPSKLVKRGPGRKPKVEVNTNSGEIIHKKRGRKPKKLQYAKPEDLEQNNVHPIRDEVLPSSTCNFLSETNNVKEDLLQKKNRGGRKPKRKMKTQKLDADLLVPASVKVLRRSNRKKIDDPIDEEEEFEELKGSEPHMRTRNQGRRTAFYNEDDSEEEQRQLLFEDTSLTFGTSSRGRVRKLTEKAKANLIGW

SEQ ID NO: 2495 - protein, 1243 aa, Homo sapiens
MENCSAASTFLTDSLELELGTEWCKPPYFSCAVDNRGGGKHFSGESYLCSGALKRLILNLDPLPTNFEEDTLEIFGIQWVTETALVNSSRELFHLFRQQLYNLETLLQSSCDFGKVSTLHCKADNIRQQCVLFLHYVKVFIFRYLKVQNAESHVPVHPYEALEAQLPSVLIDELHGLLLYIGHLSELPSVNIGAFVNQNQIKLFPPSWHLLHLHLDIHWLVLEILYMLGEKLKQVVYGHQFMNLASDNLTNISLFEEHCETLLCDLISLSLNRYDKVRSSESLMSDQCPCLCIKELWVLLIHLLDHRSKWFVSESFWNWLNKLLKTLLEKSSDRRRSSMPVIQSRDPLGFSWWIITHVASFYKFDRHGVPDEMRKVESNWNFVEELLKKSISVQGVILEEQLRMYLHCCLTLCDFWEPNIAIVTILWEYYSKNLNSSFSISWLPFKGLANTMKSPLSMLEMVKTCCCDKQDQELYKSSSSYTIFLCILAKVVKKAMKSNGPHPWKQVKGRIYSKFHQKRMEELTEVGLQNFFSLFLLLAAVAEVEDVASHVLDLLNFLKPAFVTSQRALIWKGHMAFLLMYAQKNLDIGVLAEKFSCAFREKAKEFLVSKNEEMVQRQTIWTLLSIYIDGVQEVFETSYCLYPSHEKLLNDGFSMLLRACRESELRTVLSFLQAVLARIRSMHQQLCQELQRDNVDLFVQSSLSAKERHLAAVASALWRHFFSFLKSQRMSQVVPFSQLADAAADFTLLAMDMPSTAPSDFQPQPVISIIQLFGWDDIICPQVVARYLSHVLQNSTLCEALSHSGYVSFQALTVRSWIRCVLQMYIKNLSGPDDLLIDKNLEEAVEKEYMKQLVKLTRLLFNLSEVKSIFSKAQVEYLSISEDPKKALVRFFEAVGVTYGNVQTLSDKSAMVTKSLEYLGEVLKYIKPYLGKKVFSAGLQLTYGMMGILVKSWAQIFATSKAQKLLFRIIDCLLLPHAVLQQEKELPAPMLSAIQKSLPLYLQGMCIVCCQSQNPNAYLNQLLGNVIEQYIGRFLPASPYVSDLGQHPVLLALRNTATIPPISSLKKCIVQVIRKSYLEYKGSSPPPRLASILAFILQLFKETNTDIYEVELLLPGILKCLVLVSEPQVKRLATENLQYMVKACQVGSEEEPSSQLTSVFRQFIQDYGMRYYYQVYSILETVATLDQQVVIHLISTLTQSLKDSEQKWGLGRNIAQREAYSKLLSHLGQMGQDEMQRLENDNT

SEQ ID NO: 2496 - protein, 1298 aa, Homo sapiens
MAHFSSEDQAMLQAMLRRLFQSVKEKITGAPSLECAEEILLHLEETDENFHNYEFVKYLRQHIGNTLGSMIEEEMEKCTSDRNQGEECGYDTVVQQVTKRTQESKEYKEMMHYLKNIMIAVVESMINKFEEDETRNQERQKKIQKEKSHSYRTDNCSDSDSSLNQSYKFCQGKLQLILDQLDPGQPKEVRYEALQTLCSAPPSDVLNCENWTTLCEKLTVSLSDPDPVFSDRILKFCAQTFLLSPLHMTKEIYTSLAKYLESYFLSRENHIPTLSAGVDITNPNMTRLLKKVRLLNEYQKEAPSFWIRHPEKYMEEIVESTLSLLTVKHNQSHVVSQKILDPIYFFALVDTKAVWFKKWMHAHYSRTTVLRLLETKYKSLVTTAIQQCVQYFEMCKTRKADETLGHSKHCRNKQKTFYYLGQELQYIYFIHSLCLLGRLLIYKQGRKLFPIKLKNKKGLVSLIDLLVLFTQLIYYSPSCPKMTSAAHSENYSPASMVTEVLWILSDQKECAVECLYNNIVIETLLQPIHNLMKGNEASPNCSETALIHIAGILARIASVEEGLILLLYGANMNSSEESPTGAHIIAQFSKKLLDEDISIFSGSEMLPVVKGAFISVCRHIYSTCEGLQVLITYNLHESIAKAWKKTSLLSERIPTPVEGSDSVSSVSQESQNIMAWEDNLLDDLLHFAATPKGLLLLQRTGAINECVTFIFNRYAKKLQVSRHKKFGYGVLVTRVASTAAGGIALKKSGFINELITELWSNLEYGRDDVRVTHPRTTPVDPIDRSCQKSFLALVNLLSYPAIYELVRNQDLPNKTEYSLREVPTCVIDIIDRLIILNSEAKIRSLFNYEQSHIFGLRLLSVICCDLDTLLLLEAQYQVSEMLLNAQEENILEISESHRDFIIDGLSVERNHVLVRINLVGGPLERILPPRLLEKSDNPYPWPMFSSYPLPNCYLSDITRNAGIKQDNDLDKLLLCLKISDKQTEWIENCQRQFCKMMKAKPDIISGEALIELLEKFVLHLTESPSECYFPSVEYTATDANVKNESLSSVQQLGIKMTVRYGKFLSLLKDGAENDLTWVLKHCERFLKQQQTSIKSSLLCLQGNYAGHDWFVSSLFMIMLGDKEKTFQFLHQFSRLLTSAFLWLPRLHISSYLPNDTVESGIHPVYFCSTHYIEMLLKAELPLVFSAFHMSGFAPSQICLQWITQCFWNYLDWIEICHYIATCVFLGPDYQVYICIAVFKHLQQDILQHTQTQDLQVFLKEEALHGFRVSDYFEYMEILEQNYRTVLLRDMRNIRLQST

SEQ ID NO: 2497 - protein, 327 aa, Homo sapiens
MTHLQAGLSPETLEKARLELNENPDTLHQDIQEVRDMVITRPDIGFLRTDDAFILRFLRARKFHHFEAFRLLAQYFEYRQQNLDMFKSFKATDPGIKQALKDGFPGGLANLDHYGRKILVLFAANWDQSRYTLVDILRAILLSLEAMIEDPELQVNGFVLIIDWSNFTFKQASKLTPSMLRLAIEGLQDSFPARFGGIHFVNQPWYIHALYTVIRPFLKEKTRKRIFLHGNNLNSLHQLIHPEILPSEFGGMLPPYDMGTWARTLLDHEYDDDSEYNVDSYSMPVKEVEKELSPKSMKRSQSVVDPTVLKRMDKNEEENMQPLLSLD

SEQ ID NO: 2498 - protein, 362 aa, Homo sapiens
MNASAASLNDSQVVVVAAEGAAAAATAAGGPDTGEWGPPAAAALGAGGGANGSLELSSQLSAGPPGLLLPAVNPWDVLLCVSGTVIAGENALVVALIASTPALRTPMFVLVGSLATADLLAGCGLILHFVFQYLVPSETVSLLTVGFLVASFAASVSSLLAITVDRYLSLYNALTYYSRRTLLGVHLLLAATWTVSLGLGLLPVLGWNCLAERAACSVVRPLARSHVALLSAAFFMVFGIMLHLYVRICQVVWRHAHQIALQQHCLAPPHLAATRKGVGTLAVVLGTFGASWLPFAIYCVVGSHEDPAVYTYATLLPATYNSMINPIIYAFRNQEIQRALWLLLCGCFQSKVPFRSRSPSEV

SEQ ID NO: 2499 - protein, 306 aa, Homo sapiens
MYSFMAGSIFITIFGNLAMIISISYFKQLHTPTNFLILSMAITDFLLGFTIMPYSMIRSVENCWYFGLTFCKIYYSFDLMLSITSIFHLCSVAIDRFYAICYPLLYSTKITIPVIKRLLLLCWSVPGAFAFGVVFSEAYADGIEGYDILVACSSSCPVMFNKLWGTTLFMAGFFTPGSMMVGIYGKIFAVSRKHAHAINNLRENQNNQVKKDKKAAKTLGIVIGVFLLCWFPCFFTILLDPFLNFSTPVVLFDALTWFGYFNSTCNPLIYGFFYPWFRRALKYILLGKIFSSCFHNTILCMQKESE

SEQ ID NO: 2500 - protein, 345 aa, Homo sapiens
MSSNSSLLVAVQLCYANVNGSCVKIPFSPGSRVILYIVFGFGAVLAVFGNLLVMISILHFKQLHSPTNFLVASLACADFLVGVTVMPFSMVRTVESCWYFGRSFCTFHTCCDVAFCYSSLFHLCFISIDRYIAVTDPLVYPTKFTVSVSGICISVSWILPLMYSGAVFYTGVYDDGLEELSDALNCIGGCQTVVNQNWVLTDFLSFFIPTFIMIILYGNIFLVARRQAKKIENTGSKTESSSESYKARVARRERKAAKTLGVTVVAFMISWLPYSIDSLIDAFMGFITPACIYEICCWCAYYNSAMNPLIYALFYPWFRKAIKVIVTGQVLKNSSATMNLFSEHI

SEQ ID NO: 2501 - protein, 1683 aa, Homo sapiens
MSSRRKRAPPVRVDEEKRQQLHWNMHEDRRNEPIIISDDDEQPCPGSDTSSAHYIILSDSLKEEVAHRDKKRCSKVVSFSKPIEKEETVGIFSPLSVKLNIVISPYHFDNSWKAFLGELTLQLLPAQSLIENFSERSITLMSSESSNQFLIYVHSKGEDVEKQKKEPMSICDKGILVESSFSGEMLEDLGWLQKKRRIKLYQKPEGNHIIKVGIYLLEAGLAKLDFLSDANSRMKKFNQLMKKVMEKLHNSIIPDVLEEDEDDPESEPEGQDIDELYHFVKQTHQQETQSIQVDVQHPALIPVLRPYQREAVNWMLQQECFRSSPATESALHFLWREIVTSEGLKLYYNPYTGCIIREYPNSGPQLLGGILADEMGLGKTVEVLALILTHTRQDVKQDALTLPEGKVVNYFIPSHYFGGKLKKTEIQNIEFEPKEKVQCPPTRVMILTAVKEMNGKKGVSILSIYKYVSSIYRYDVQRNRSLLKRMLKCLIFEGLVKQIKGHGFSGTFTLGKNYKEEDICDKTKKQAVGSPRKIQKETRKSGNKDTDSEYLPSDTSDDDDDPYYYYYKSRRNRSKLRKKLVPSTKKGKSQPFINPDSQGHCPATSDSGITDVAMSKSTCISEFNQEHETEDCAESLNHADSDVPPSNTMSPFNTSDYRFECICGELDQIDRKPRVQCLKCHLWQHAKCVNYDEKNLKIKPFYCPHCLVAMEPVSTRATLIISPSSICHQWVDEINRHVRSSSLRVLVYQGVKKDGFLQPHFLAEQDIVIITYDVLRSELNYVDIPHSNSEDGRRLRNQKRYMAIPSPLVAVEWWRICLDEAQMVECPTVKAAEMAQRLSGINRWCISGTPVQRGLEDLFGLVVFLGIEPYCVKHWWVRLLYRPYCKKNPQHLYSFIAKILWRSAKKDVIDQIQIPPQTEEIHWLHFSPVERHFYHRQHEVCCQDVVVKLRKISDWALKLSSLDRRTVTSILYPLLRLRQACCHPQAVRGEFLPLQKSTMTMEELLTSLQKKCGTECEEAHRQLVCALNGLAGIHIIKGEYALAAELYREVLRSSEEHKGKLKTDSLQRLHATHNLMELLIARHPGIPPTLRDGRLEEEAKQLREHYMSKCNTEVAEAQQALYPVQQTIHELQRKIHSNSPWWLNVIHRAIEFTIDEELVQRVRNEITSNYKQQTGKLSMSEKFRDCRGLQFLLTTQMEELNKCQKLVREAVKNLEGPPSRNVIESATVCHLRPARLPLNCCVFCKADELFTEYESKLFSNTVKGQTAIFEEMIEDEEGLVDDRAPTTTRGLWAISETERSMKAILSFAKSHRFDVEFVDEGSTSMDLFEAWKKEYKLLHEYWMALRNRVSAVDELAMATERLRVRDPREPKPNPPVLHIIEPHEVEQNRIKLLNDKAVATSQLQKKLGQLLYLTNLEKSQDKTSGGVNPEPCPICARQLGKQWAVLTCGHCFCNECISIIIEQYSVGSHRSSIKCAICRQTTSHKEISYVFTSEKANQEEDIPVKGSHSTKVEAVVRTLMKIQLRDPGAKALVFSTWQDVLDIISKALTDNNMEFAQISRVKTFQENLSAFKRDPQINILLLPLHTGSNGLTIIEATHVLLVEPILNPAHELQAIGRVHRIGQTKPTIVHRFLIKATIEERMQAMLKTAERSHTNSSAKHSEASVLTVADLADLFTKETEELE

SEQ ID NO: 2502 - protein, 626 aa, Homo sapiens
MEGPRENQDPPPRSLARHLSDADRLRKVIQELVDTEKSYVKDLSCLFELYLEPLQNETFLTQDEMESLFGSLPEMLEFQKVFLETLEDGISASSDFNTLETPSQFRKLLFSLGGSFLYYADHFKLYSGFCANHIKVQKVLERAKTDKAFKAFLDARNPTKQHSSTLESYLIKPVQRVLKYPLLLKELVSLTDQESEEHYHLTEALKAMEKVASHINEMQKIYEDYGTVFDQLVAEQSGTEKEVTELSMGELLMHSTVSWLNPFLSLGKARKDLELTVFVFKRAVILVYKENCKLKKKLPSNSRPAHNSTDLDPFKFRWLIPISALQVRLGNPAGTENNSIWELIHTKSEIEGRPETIFQLCCSDSESKTNIVKVIRSILRENFRRHIKCELPLEKTCKDRLVPLKNRVPVSAKLASSRSLKVLKNSSSNEWTGETGKGTLLDSDEGSLSSGTQSSGCPTAEGRQDSKSTSPGKYPHPGLADFADNLIKESDILSDEDDDHRQTVKQGSPTKDIEIQFQRLRISEDPDVHPEAEQQPGPESGEGQKGGEQPKLVRGHFCPIKRKANSTKRDRGTLLKAQIRHQSLDSQSENATIDLNSVLEREFSVQSLTSVVSEECFYETESHGKS

SEQ ID NO: 2503 - protein, 325 aa, Homo sapiens
MVGEMETKEKPKPTPDYLMQLMNDKKLMSSLPNFCGIFNHLERLLDEEISRVRKDMYNDTLNGSTEKRSAELPDAVGPIVQLQEKLYVPVKEYPDFNFVGRILGPRGLTAKQLEAETGCKIMVRGKGSMRDKKKEEQNRGKPNWEHLNEDLHVLITVEDAQNRAEIKLKRAVEEVKKLLVPAAEGEDSLKKMQLMELAILNGTYRDANIKSPALAFSLAATAQAAPRIITGPAPVLPPAALRTPTPAGPTIMPLIRQIQTAVMPNGTPHPTAAIVPPGPEAGLIYTPYEYPYTLAPATSILEYPIEPSGVLEWIEMPVMPDISAH

SEQ ID NO: 2504 - protein, 556 aa, Homo sapiens
MPSFDEALQRVGEFGRFQRRVFLLLCLTGVTFAFLFVGVVFLGTQPDHYWCRGPSAAALAERCGWSPEEEWNRTAPASRGPEPPERRGRCQRYLLEAANDSASATSALSCADPLAAFPNRSAPLVPCRGGWRYAQAHSTIVSEFDLVCVNAWMLDLTQAILNLGFLTGAFTLGYAADRYGRIVIYLLSCLGVGVTGVVVAFAPNFPVFVIFRFLQGVFGKGTWMTCYVIVTEIVGSKQRRIVGIVIQMFFTLGIIILPGIAYFIPNWQGIQLAITLPSFLFLLYYWVVPESPRWLITRKKGDKALQILRRIAKCNGKYLSSNYSEITVTDEEVSNPSFLDLVRTPQMRKCTLILMFAWFTSAVVYQGLVMRLGIIGGNLYIDFFISGVVELPGALLILLTIERLGRRLPFAASNIVAGVACLVTAFLPEGIAWLRTTVATLGRLGITMAFEIVYLVNSELYPTTLRNFGVSLCSGLCDFGGIIAPFLLFRLAAVWLELPLIIFGILASICGGLVMLLPETKGIALPETVDDVEKLGSPHSCKCGRNKKTPVSRSHL

SEQ ID NO: 2505 - protein, 1590 aa, Homo sapiens
MPGGACVLVIALMFLAWGEAQECSPGGHQFLRSPYRSVRFDSWHLQQSAVQDLICDHSLSPGWYRFLILDRPAEMPTKCVEMNHCGTQAPIWLSLRDSETLPSPGEIKQLTACATWQFLFSTTKDCCLFQIPVSVRNCGNFSVYLLQPTQGCMGYCAEAISDARLHPCGSDETETGGDCVRQLAASLPPPPAGRPEVLVELIESRLFCRCSFDVPATKNSVGFHIAWSRLSSQEVKEELTQETTVQAFSLLELDGINLRLGDRIFCSASVFFLENPHVQSVAIESQEFFAGFKLQPELSTISEDGKEYYLRIESTVPIICSEFSELDQECKISLKLKTIGQGREHLGLNLALSSCHVDLLQTSSCANGTCSHTFVYYTAVTDFSRDGDRVSNIVVQPIVNEDFLWNNYIPDSIQIKVKDVPTAYCYTFTDPHIITFDGRVYDNFKTGTFVLYKSMSRDFEVHVRQWDCRSLHYPVSCNCGFVAQEGGDIVTFDMCNGQLRESQPYLFIKSQDVTRNIKISESYLGRKVTIWFSSGAFIRADLGEWGMSLTIRAPSVDYRNTLGLCGTFDENPENDFHDKNGMQIDQNFNNYVAFINEWRILPGKSMSDTLPVSMTSPGKPSYCSCSLDTAAYPSSEDLDSVSRSEIALGCKDLNHVSLSSLIPELDVTSEYINSDTLVREINKHTSPEEYNLNLFLQEKKHINLTKLGLNVQKHPGNEKEDSLQYLANKKYTQGRGSHSQEMRYNRQNRWKRQNFHEFPPLFAFPSLSQTDLEELTYFFPEDHAEDVQQEFFPSWPTPSGLTEYSTLTLCQETLANSSIGRLCLAFLGKRLDSVIEMCVKDVLLKDDLSWAEAGVALLENECEKRIVEEGKYNTEEYGTSIEDILSVLKCPNLCSGNGQCMEWGCACSPSFSSYDCSDSYDKAPEITELGNAGFCDVQKYNCMMVRVFGKGFKELPSIKCEVTKLQYNSSEWMPGEPIYTQTVFHNSRAVDCQLPTDVQQFDTMDLVGGKPTGKWQLKVSNDGYKFSNPKITVIYDGACQVCGLYKNDSCTIKENVCIIDGLCYVEGDKNPTSPCLICRPKISRFTWSFLENNQPPVIQALQDKLQTFYGENFEYQFVAFDPEGSDIHFTLDSGPEGASVSSAGLFMWKTDLLTTQQITVRLNDDCDAETRVTIEVTVKSCDCLNGGSCVSDRNFSPGSGVYLCVCLPGFHGSLCEVDISGCQSNPCGLGSYISGFHSYSCDCPPELKVETQFVNQFTTQTVVLTRSDKSVNKEEDDKNAQGRKRHVKPTSGNAFTICKYPCGKSRECVAPNICKCKPGYIGSNCQTALCDPDCKNHGKCIKPNICQCLPGHGGATCDEEHCNPPCQHGGTCLAGNLCTCPYGFVGPRCETMVCNRHCENGGQCLTPDICQCKPGWYGPTCSTALCDPVCLNGGSCNKPNTCLCPNGFFGEHCQNAFCHPPCKNGGHCMRNNVCVCREGYTGRRFQKSICDPTCMNGGKCVGPSTCSCPSGWSGKRCNTPICLQKCKNGGECIAPSICHCPSSWEGVRCQIPICNPKCLYGGRCIFPNVCSCRTEYSGVKCEKKIQIRRH

SEQ ID NO: 2506 - protein, 1210 aa, Homo sapiens [sequence omitted]

SEQ ID NO: 2507 - protein, 291 aa, Homo sapiens
MQRARPTLWAAALTLLVLLRGPPVARAGASSAGLGPVVRCEPCDARALAQCAPPPAVCAELVREPGCGCCLTCALSEGQPCGIYTERCGSGLRCQPSPDEARPLQALLDGRGLCVNASAVSRLRAYLLPAPPAPGNASESEEDRSAGSVESPSVSSTHRVSDPKFHPLHSKIIIIKKGHAKDSQRYKVDYESQSTDTQNFSSESKRETEYGPCRREMEDTLNHLKFLNVLSPRGVHIPNCDKKGFYKKKQCRPSKGRKRGFCWCVDKYGQPLPGYTTKGKEDVHCYSMQSK

SEQ ID NO: 2508 - protein, 259 aa, Homo sapiens
MSEVPVARVWLVLLLLTVQVGVTAGAPWQCAPCSAEKLALCPPVSASCSEVTRSAGCGCCPMCALPLGAACGVATARCARGLSCRALPGEQQPLHALTRGQGACVQESDASAPHAAEAGSPESPESTEITEEELLDNFHLMAPSEEDHSILWDAISTYDGSKALHVTNIKKWKEPCRIELYRVVESLAKAQETSGEEISKFYLPNCNKNGFYHSRQCETSMDGEAGLCWCVYPWNGKRIPGSPEIRGDPNCQIYFNVQN

SEQ ID NO: 2509 - protein, 695 aa, Homo sapiens
MASKVTDAIVWYQKKIGAYDQQIWEKSVEQREIKGLRNKPKKTAHVKPDLIDVDLVRGSAFAKAKPESPWTSLTRKGIVRVVFFPFFFRWWLQVTSKVIFFWLLVLYLLQVAAIVLFCSTSSPHSIPLTEVIGPIWLMLLLGTVHCQIVSTRTPKPPLSTGGKRRRKLRKAAHLEVHREGDGSSTTDNTQEGAVQNHGTSTSHSVGTVFRDLWHAAFFLSGSKKAKNSIDKSTETDNGYVSLDGKKTVKSGEDGIQNHEPQCETIRPEETAWNTGTLRNGPSKDTQRTITNVSDEVSSEEGPETGYSLRRHVDRTSEGVLRNRKSHHYKKHYPNEDAPKSGTSCSSRCSSSRQDSESARPESETEDVLWEDLLHCAECHSSCTSETDVENHQINPCVKKEYRDDPFHQSHLPWLHSSHPGLEKISAIVWEGNDCKKADMSVLEISGMIMNRVNSHIPGIGYQIFGNAVSLILGLTPFVFRLSQATDLEQLTAHSASELYVIAFGSNEDVIVLSMVIISFVVRVSLVWIFFFLLCVAERTYKQRLLFAKLFGHLTSARRARKSEVPHFRLKKVQNIKMWLSLRSYLKRRGPQRSVDVIVSSAFLLTISVVFICCAQINLYLKMEKKPNKKEELTLVNNVLKLATKLLKELDSPFRLYGLTMNPLLYNITQVVILSAVSGVISDLLGFNLKLWKIKS

SEQ ID NO: 2510 - protein, 531 aa, Homo sapiens
MAAVKTLNPKAEVARAQAALAVNISAARGLQDVLRTNLGPKGTMKMLVSGAGDIKLTKDGNVLLHEMQIQHPTASLIAKVATAQDDITGDGTTSNVLIIGELLKQADLYISEGLHPRIITEGFEAAKEKALQFLEEVKVSREMDRETLIDVARTSLRTKVHAELADVLTEAVVDSILAIKKQDEPIDLFMIEIMEMKHKSETDTSLIRGLVLDHGARHPDMKKRVEDAYILTCNVSLEYEKTEVNSGFFYKSAEEREKLVKAERKFIEDRVKKIIELKRKVCGDSDKGFVVINQKGIDPFSLDALSKEGIVALRRAKRRNMERLTLACGGVALNSFDDLSPDCLGHAGLVYEYTLGEEKFTFIEKCNNPRSVTLLIKGPNKHTLTQIKDAVRDGLRAVKNAIDDGCVVPGAGAVEVAMAEALIKHKPSVKGRAQLGVQAFADALLIIPKVLAQNSGFDLQETLVKIQAEHSESGQLVGVDLNTGEPMVAAEVGVWDNYCVKKQLLHSCTVIATNILLVDEIMRAGMSSLKG

SEQ ID NO: 2511 - protein, 213 aa, Homo sapiens
MFGWSFVFEDFVSDELRNKATQPMKSVLWWLPVEKAFWRQPAGPGSGIRERLEHPVLHVSWNDARAYCAWRGKRLPTEEEWEFAARGGLKGQVYPWGNWFQPNRTNLWQGKFPKGDKAEDGFHGVSPVNAFPAQNNYGLYDLLGNVWEWTASPYQAAEQDMRVLRGASWIDTADGSANHRARVTTRMGNTPDSASDNLGFRCAADAGRPPGEL

SEQ ID NO: 2512 - protein, 588 aa, Homo sapiens
MDTNDDPDEDHLTSYDIQLSIQESIEASKTALCPERFVPLSAQNRKLVEAIKQGHIPELQEYVKYKYAMDEADEKGWFPLHEAVVQPIQQILEIVLDASYKTLWEFKTCDGETPLTLAVKAGLVENVRTLLEKGVWPNTKNDKGETPLLIAVKKGSYDMVSTLIKHNTSLDQPCVKRWSAMHEAAKQGRKDIVALLLKHGGNVHLRDGFGVTPLGVAAEYGHCDVLEHLIHKGGDVLALADDGASVLFEAAGGGNPDCISLLLEYGGSGNVPNRAGHLPIHRAAYEGHYLALKYLIPVTSKNAIRKSGLTPIHSAADGQNAQCLELLIENGFDVNTLLADHISQSYDDERKTALYFGVSNNDVHCTEVLLAAGADPNLDPLNCLLVAVRANNYEIVRLLLSHGANVNCYFMHVNDTRFPSVIQYALNDEVMLRLLLNNGYQVEMCFDCMHGDIFGNSFVWSEIQEEVLPGWTSCVIKDNPFCEFITVPWMKHLVGRVTRVLIDYMDYVPLCAKLKSALEVQREWPEIRQILENPCSLKHLCRLKIRRLMGLQKLCQPASVEKLPLPPAIQRYILFKEYDLYGQELKLT

SEQ ID NO: 2513 - protein, 1035 aa, Homo sapiens
MAAETLNFGPEWLRALSGGGSVASPPPSPAMPKYKLADYRYGREEMLALYVKENKVPEELQDKEFAAVLQDEPLQPLALEPLTEEEQRNFSLSVNSVAVLRLMGKGAGPPLAGTSRGRGSTRSRGRGRGDSCFYQRSIEEGDGAFGRSPREIQRSQSWDDRGERRFEKSARRDGARCGFEEGGAGPRKEHARSDSENWRSLREEQEEEEEGSWRLGAGPRRDGDRWRSASPDGGPRSAGWREHGERRRKFEFDLRGDRGGCGEEEGRGGGGSSHLRRCRAPEGFEEDKDGLPEWCLDDEDEEMGTFDASGAFLPLKKGPKEPIPEEQELDFQGLEEEEEPSEGLEEEGPEAGGKELTPLPPQEEKSSSPSPLPTLGPLWGTNGDGDETAEKEPPAAEDDIRGIQLSPGVGSSAGPPGDLEDDEGLKHLQQEAEKLVASLQDSSLEEEQFTAAMQTQGLRHSAAATALPLSHGAARKWFYKDPQGEIQGPFTTQEMAEWFQAGYFSMSLLVKRGCDEGFQPLGEVIKMWGRVPFAPGPSPPPLLGNMDQERLKKQQELAAAALYQQLQHQQFLQLVSSRQLPQCALREKAALGDLTPPPPPPPQQQQQQLTAFLQQLQALKPPRGGDQNLLPTMSRSLSVPDSGRLWDVHTSASSQSGGEASLWDIPINSSTQGPILEQLQLQHKFQERREVELRAKREEEERKRREEKRRQQQQEEQKRRQEEEELFRRKHVRQQELLLKLLQQQQAVPVPPAPSSPPPLWAGLAKQGLSMKTLLELQLEGERQLHKQPPPREPARAQAPNHRVQLGGLGTAPLNQWVSEAGPLWGGPDKSGGGSSGLGLWEDTPKSGGSLVRGLGLKNSRSSPSLSDSYSHLSGRPIRKKTEEEEKLLKLLQGIPRPQDGFTQWCEQMLHTLSATGSLDVPMAVAILKEVESPYDVHDYIRSCLGDTLEAKEFAKQFLERRAKQKASQQRQQQQEAWLSSASLQTAFQANHSTKLGPGEGSKAKRRALMLHSDPSILGYSLHGSSGEIESVDDY

SEQ ID NO: 2514 - protein, 621 aa, Homo sapiens
MSEDSEKEDYSDRTISDEDESDEDMFMKFVSEDLHRCALLTADSFGDPFFPRTTQILLEYQLGRWVPRLREPRDLYGVSSSGPLSPTRWPYHCEVIDEKVQHIDWTPSCPEPVYIPTGLETEPLYPDSKEATVVYLAEDAYKEPCFVYSRVGGNRTPLKQPVDYRDNTLMFEARFESGNLQKVVKVAEYEYQLTVRPDLFTNKHTQWYYFQVTNMRAGIVYRFTIVNFTKPASLYSRGMRPLFYSEKEAKAHHIGWQRIGDQIKYYRNNPGQDGRHYFSLTWTFQFPHNKDTCYFAHCYPYTYTNLQEYLSGINNDPVRSKFCKIRVLCHTLARNMVYILTITTPLKNSDSRKRKAVILTARVHPGETNSSWIMKGFLDYILGNSSDAQLLRDTFVFKVVPMLNPDGVIVGNYRCSLAGRDLNRNYTSLLKESFPSVWYTRNMVHRLMEKREVILYCDLHGHSRKENIFMYGCDGSDRSKTLYLQQRIFPLMLSKNCPDKFSFSACKFNVQKSKEGTGRVVMWKMGIRNSFTMEATFCGSTLGNKRGTHFSTKDLESMGYHFCDSLLDYCDPDRTKYYRCLKELEEMERHITLEKVFEDSDTPVIDITLDVESRELTFLLR

SEQ ID NO: 2515 - protein, 330 aa, Homo sapiens
MGKIDVDKILFFNQEIRLWQLIMATPEENSNPHDRATPQLPAQLQELEHRVARRRLSQARHRATLAALFNNLRKTVYSQSDLIASKWQVLNKAKSHIPELEQTLDNLLKLKASFNLEDGHASSLEEVKKEYASMYSGNDSFPQNGSSPWYLNFYKQTMDLLTGSGIITPQEAALPIVSAAISHLWQNLSEERKASLRQAWAQKHRGPATLAEACREPACAEGSVKDSGVDSQGASCSLVSTPEEILFEDAFDVASFLDKSEVPSTSSSSSVLASCNPENPEEKFQLYMQIINFFKGLSCANTQVKQEASFPVDEEMIMLQCTETFDDEDL

SEQ ID NO: 2516 - protein, 750 aa, Homo sapiens
MMEELHSLDPRRQELLEARFTGVGVSKGPLNSESSNQSLCSVGSLSDKEVETPEKKQNDQRNRKRKAEPYETSQGKGTPRGHKISDYFEFAGGSAPGTSPGRSVPPVARSSPQHSLSNPLPRRVEQPLYGLDGSAAKEATEEQSALPTLMSVMLAKPRLDTEQLAQRGAGLCFTFVSAQQNSPSSTGSGNTEHSCSSQKQISIQHRQTQSDLTIEKISALENSKNSDLEKKEGRIDDLLRANCDLRRQIDEQQKMLEKYKERLNRCVTMSKKLLIEKSKQEKMACRDKSMQDRLRLGHFTTVRHGASFTEQWTDGYAFQNLIKQQERINSQREEIERQRKMLAKRKPPAMGQAPPATNEQKQRKSKTNGAENETLTLAEYHEQEEIFKLRLGHLKKEEAEIQAELERLERVRNLHIRELKRIHNEDNSQFKDHPTLNDRYLLLHLLGRGGFSEVYKAFDLTEQRYVAVKIHQLNKNWRDEKKENYHKHACREYRIHKELDHPRIVKLYDYFSLDTDSFCTVLEYCEGNDLDFYLKQHKLMSEKEARSIIMQIVNALKYLNEIKPPIIHYDLKPGNILLVNGTACGEIKITDFGLSKIMDDDSYNSVDGMELTSQGAGTYWYLPPECFVVGKEPPKISNKVDVWSVGVIFYQCLYGRKPFGHNQSQQDILQENTILKATEVQFPPKPVVTPEAKAFIRRCLAYRKEDRIDVQQLACDPYLLPHIRKSVSTSSPAGAAIASTSGASNNSSSN

SEQ ID NO: 2517 - protein, 976 aa, Homo sapiens
MERRWPLGLGLVLLLCAPLPPGARAKEVTLMDTSKAQGELGWLLDPPKDGWSEQQQILNGTPLYMYQDCPMQGRRDTDHWLRSNWIYRGEEASRVHVELQFTVRDCKSFPGGAGPLGCKETFNLLYMESDQDVGIQLRRPLFQKVTTVAADQSFTIRDLVSGSVKLNVERCSLGRLTRRGLYLAFHNPGACVALVSVRVFYQRCPETLNGLAQFPDTLPGPAGLVEVAGTCLPHARASPRPSGAPRMHCSPDGEWLVPVGRCHCEPGYEEGGSGEACVACPSGSYRMDMDTPHCLTCPQQSTAESEGATICTCESGHYRAPGEGPQVACTGPPSAPRNLSFSASGTQLSLRWEPPADTGGRQDVRYSVRCSQCQGTAQDGGPCQPCGVGVHFSPGARGLTTPAVHVNGLEPYANYTFNVEAQNGVSGLGSSGHASTSVSISMGHAESLSGLSLRLVKKEPRQLELTWAGSRPRSPGANLTYELHVLNQDEERYQMVLEPRVLLTELQPDTTYIVRVRMLTPLGPGPFSPDHEFRTSPPVSRGLTGGEIVAVIFGLLLGAALLLGILVFRSRRAQRQRQQRQRDRATDVDREDKLWLKPYVDLQAYEDPAQGALDFTRELDPAWLMVDTVIGEGEFGEVYRGTLRLPSQDCKTVAIKTLKDTSPGGQWWNFLREATIMGQFSHPHILHLEGVVTKRKPIMIITEFMENGALDAFLREREDQLVPGQLVAMLQGIASGMNYLSNHNYVHRDLAARNILVNQNLCCKVSDFGLTRLLDDFDGTYETQGGKIPIRWTAPEAIAHRIFTTASDVWSFGIVMWEVLSFGDKPYGEMSNQEVMKSIEDGYRLPPPVDCPAPLYELMKNCWAYDRARRPHFQKLQAHLEQLLANPHSLRTIANFDPRMTLRLPSLSGSDGIPYRTVSEWLESIRMKRYILHFHSAGLDTMECVLELTAEDLTQMGITLPGHQKRILCSIQGFKD

SEQ ID NO: 2518 - protein, 860 aa, Homo sapiens
MAASRSAGEAGPGGSQGRVVRMKRRGGRGPRRGPAGGGEKALKRLKLAVEEFVHATSEGEAPGGCEGRGAPVSFRPGGRKSRKELRKEKRHLRKARRLQRTAGPEQGPGLGGRSGAEEASGHRQDTEERARPAPSRDPSPPRKPRPSRVKAKATAATAKTRPSAAATAAARKRALLAANEEEDREIRKLERCLGLNKRKKKDGSSSVPLSFARDGLDYILGALESGKNSGLYDSSGEEEEDAGQTLPESDLESDSQDESEEEEEGDVEKEKKAQEAEAQSEDDDEDTEEEQGEEKEKGAQEKRRGKRVRFAEDEEKSENSSEDGDITDKSLCGSGEKYIPPHVRQAEETVDFKKKEELERLKKHVKGLLNRLSEPNMASISGQLEELYMAHSRKDMNDTLTSALMGACVTASAMPSRLMMEHVLLVSILHHTVGIEVGAHFLEAVVRKFDAIYKYGSEGKECDNLFTVIAHLYNFHVVQSLLIFDILKKLIGTFTEKDIELILLMLKNVGFSLRKDDALSLKELITEAQTKASGAGSEFQDQTRIRFMLETMLALKNNDMRKIPGYDPEPVEKLRKLQRALVRNAGSGSETQLRVSWDSVLSAEQTGRWWIVGSAWSGAPMIDNSHHTHLQKQLVGTVSSKILELARKQRMNTDIRRNIFCTIMTSEDFLDAFEKLLKLGLKDQQEREIIHVLMDCCLQEKTYNPFYAFLASKFCEYERRFQMTFQFSIWDKFRDLENLPATNFSNLVHLVAHLLKTKSLSLSILKVVEFSELDKPRVRFLRKVLSILLMETEVEDLSLIFTRVSDNPKLGVLREGLKLFISHFLLKNAQAHRSADEANVLREKADLATKCLQGKASLRM

SEQ ID NO: 2519 - protein, 429 aa, Homo sapiens
MLMSWSPEECKGQGEPLDDRHPLCARLVEKPSRGSEEHLKSGPGPIVTRTASGPALAFWQAVLAGDVGCVSRILADSSTGLAPDSVFDTSDPERWRDFRFNIRALRLWSLTYEEELTTPLHVAASRGHTEVLRLLLRRRARPDSAPGGRTALHEACAAGHTACVHVLLVAGADPNIADQDGKRPLHLCRGPGTLECAELLLRFGARVDGRSEEEEETPLHVAARLGHVELADLLLRRGACPDARNAEGWTPLLAACDVRCQSITDAEATTARCLQLCSLLLSAGADADAADQDKQRPLHLACRRGHAAVVELLLSCGVSANTMDYGGHTPLHCALQGPAAALAQSPEHVVRALLNHGAVRVWPGALPKKHQRFYSSLFALVRQPRSLQHLSRCALRSHLEGSLPQALPRLPLPPRLLRYLQLDFEGVLY

SEQ ID NO: 2520 - protein, 816 aa, Homo sapiens
MSRPQGLLWLPLLFTPVCVMLNSNVLLWLTALAIKFTLIDSQAQYPVVNTNYGKIRGLRTPLPNEILGPVEQYLGVPYASPPTGERRFQPPEPPSSWTGIRNTTQFAAVCPQHLDERSLLHDMLPIWFTANLDTLMTYVQDQNEDCLYLNIYVPTEDDIHDQNSKKPVMVYIHGGSYMEGTGNMIDGSILASYGNVIVITINYRLGILGFLSTGDQAAKGNYGLLDQIQALRWIEENVGAFGGDPKRVTIFGSGAGASCVSLLTLSHYSEGLFQKAIIQSGTALSSWAVNYQPAKYTRILADKVGCNMLDTTDMVECLRNKNYKELIQQTITPATYHIAFGPVIDGDVIPDDPQILMEQGEFLNYDIMLGVNQGEGLKFVDGIVDNEDGVTPNDFDFSVSNFVDNLYGYPEGKDTLRETIKFMYTDWADKENPETRRKTLVALFTDHQWVAPAVATADLHAQYGSPTYFYAFYHHCQSEMKPSWADSAHGDEVPYVFGIPMIGPTELFSCNFSKNDVMLSAVVMTYWTNFAKTGDPNQPVPQDTKFIHTKPNRFEEVAWSKYNPKDQLYLHIGLKPRVRDHYRATKVAFWLELVPHLHNLNEIFQYVSTTTKVPPPDMTSFPYGTRRSPAKIWPTTKRPAITPANNPKHSKDPHKTGPEDTTVLIETKRDYSTELSVTIAVGASLLFLNILAFAALYYKKDKRRHETHRRPSPQRNTTNDIAHIQNEEIMSLQMKQLEHDHECESLQAHDTLRLTCPPDYTLTLRRSPDDIPLMTPNTITMIPNTLTGMQPLHTFNTFSGGQNSTNLPHGHSTTRV

SEQ ID NO: 2521 - protein, 1009 aa, Homo sapiens
MDMFSLDMIISDPAAEASRAGKKQLRGVQNPCPSARARPRHKSLNIKDKISEWEGKKEVPTPAPSRRADGQEDYLPSSTVERRSSDGVRTQVTEAKNGMRPGTESTEKERNKGAVNVGGQDPEPGQDLSQPEREVDPSWGRGREPRLGKLRFQNDPLSVLKQVKKLEQALKDGSAGLDPQLPGTCYSPHCPPDKAEAGSTLPENLGGGSGSEVSQRVHPSDLEGREPTPELVEDRKGSCRRPWDRSLENVYRGSEGSPTKPFINPLPKPRRTFKHAGEGDKDGKPGIGFRKEKRNLPPLPSLPPPPLPSSPPPSSVNRRLWTGRQKSSADHRKSYEFEDLLQSSSESSRVDWYAQTKLGLTRTLSEENVYEDILDPPMKENPYEDIELHGRCLGKKCVLNFPASPTSSIPDTLTKQSLSKPAFFRQNSERRNFKLLDTRKLSRDGTGSPSKISPPSTPSSPDDIFFNLGDPQNGRKKRKIPKLVLRINAIYEVRRGKKRVKRLSQSMESNSGKVTDENSESDSDTEEKLKAHSQRLVNVKSRLKQAPRYPSLARELIEYQERQLFEYFVVVSLHKKQAGAAYVPELTQQFPLKLERSFKFMREAEDQLKAIPQFCFPDAKDWVPVQQFTSETFSFVLTGEDGSRRFGYCRRLLPGGKGKRLPEVYCIVSRLGCFSLFSRILDEVEKRRGISPALVQPLMRSVMEAPFPALGKTILVKNFLPGSGTEVIELCRPLDSRLEHVDFESLFSSLSVRHLVCVFASLLLERRVIFIADKLSILSKCCHAMVALIYPFAWQHTYIPVLPPAMVDIVCSPTPFLIGLLSSSLPLLRELPLEEVLVVDLVNSRFLRQMDDEDSILPRKLQVALEHILEQRNELACEQDEGPLDGRHGPESSPLNEVVSEAFVRFFVEIVGHYSLFLTSGEREERTLQREAFRKAVSSKSLRHFLEVFMETQMFRGFIQERELRRQDAKGLFEVRAQEYLETLPSGEHSGVNKFLKGLGNKMKFLHKK

SEQ ID NO: 2522 - protein, 181 aa, Homo sapiens
MASAGSGMEEVRVSVLTPLKLVGLVCIFLALCLDLGAVLSPAWVTADHQYYLSLWESCRKPASLDIWHCESTLSSDWQIATLALLLGGAAIILIAFLVGLISICVGSRRRFYRPVAVMLFAAVVLQVCSLVLYPIKFIETVSLKIYHEFNWGYGLAWGATIFSFGGAILYCLNPKNYEDYY

SEQ ID NO: 2523 - protein, 1395 aa, Homo sapiens
MLLPLPPQSSKPVPKKSQSSKIVPSHHDPSEKTGENCQTKISPSSLQESPSSLQGALKKRSAFEDLTNASQCQPVQPKKEANKEFVKVVSKKINRNTHALGLAKKNKRNLKWHKLEVTPVVASTTVVPNIMEKPLILDISTTSKTPNTEEASLFRKPLVLKEEPTIEDETLINKSLSLKKCSNHEEVSLLEKLQPLQEESDSDDAFVIEPMTFKKTHKTEEAAITKKTLSLKKKMCASQRKQSCQEESLAVQDVNMEEDSFFMESMSFKKKPKTEESIPTHKLSSLKKKCTIYGKICHFRKPPVLQTTICGAMSSIKKPTTEKETLFQELSVLQEKHTTEHEMSILKKSLALQKTNFKEDSLVKESLAFKKKPSTEEAIMMPVILKEQCMTEGKRSRLKPLVLQEITSGEKSLIMKPLSIKEKPSTEKESFSQEPSALQKKHTTQEEVSILKEPSSLLKSPTEESPFDEALAFTKKCTIEEAPPTKKPLILKRKHATQGTMSHLKKPLILQTTSGEKSLIKEPLPFKEEKVSLKKKCTTQEMMSICPELLDFQDMIGEDKNSFFMEPMSFRKNPTTEETVLTKTSLSLQEKKITQGKMSHLKKPLVLQKITSEEESFYKKLLPFKMKSTTEEKFLSQEPSALKEKHTTLQEVSLSKESLAIQEKATTEEEFSQELFSLHVKHTNKSGSLFQEALVLQEKTDAEEDSLKNLLALQEKSTMEEESLINKLLALKEELSAEAATNIQTQLSLKKKSTSHGKVFFLKKQLALNETINEEEFLNKQPLALEGYPSIAEGETLFKKLLAMQEEPSIEKEAVLKEPTIDTEAHFKEPLALQEEPSTEKEAVLKEPSVDTEAHFKETLALQEKPSIEQEALFKRHSALWEKPSTEKETIFKESLDLQEKPSIKKETLLKKPLALKMSTINEAVLFEDMIALNEKPTTGKELSFKEPLALQESPTYKEDTFLKTLLVPQVGTSPNVSSTAPESITSKSSIATMTSVGKSGTINEAFLFEDMITLNEKPTTGKELSFKEPLALQESPTCKEDTFLETFLIPQIGTSPYVFSTTPESITEKSSIATMTSVGKSRTTTESSACESASDKPVSPQAKGTPKEITPREDIDEDSSDPSFNPMYAKEIFSYMKEREEQFILTDYMNRQIEITSDMRAILVDWLVEVQVSFEMTHETLYLAVKLVDLYLMKAVCKKDKLQLLGATAFMIAAKFEEHNSPRVDDFVYICDDNYQRSEVLSMEINILNVLKCDINIPIAYHFLRRYARCIHTNMKTLTLSRYICEMTLQEYHYVQEKASKLAAASLLLALYMKKLGYWVPFLEHYSGYSISELHPLVRQLNKLLTFSSYDSLKAVYYKYSHPVFFEVAKIPALDMLKLEEILNCDCEAQGLVL

SEQ ID NO: 2524 - protein, 570 aa, Homo sapiens
MPLYGRARDHVTHPSILGTRPGRPMAGPITAAVPEKICNGAFCSCSGAFPLDPNNPSLGPLPSISHLNLRTQIAMDRMKKIKRQLSMTLRGGRGIDKTNGAPEQIGLDESGGGGGSDPGEAPTRAAPGELRSARGPLSSAPEIVHEDLKMGSDGESDQASATSSDEVQSPVRVRMRNHPPRKISTEDINKRLSLPADIRLPEGYLEKLTLNSPIFDKPLSRRLRRVSLSEIGFGKLETYIKLDKLGEGTYATVYKGKSKLTDNLVALKEIRLEHEEGAPCTAIREVSLLKDLKHANIVTLHDIIHTEKSLTLVFEYLDKDLKQYLDDCGNIINMHNVKLFLFQLLRGLAYCHRQKVLHRDLKPQNLLINERGELKLADFGLARAKSIPTKTYSNEVVTLWYRPPDILLGSTDYSTQIDMWGVGCIFYEMATGRPLFPGSTVEEQLHFIFRILGTPTEETWPGILSNEEFKTYNYPKYRAEALLSHAPRLDSDGADLLTKLLQFEGRNRISAEDAMKHPFFLSLGERIHKLPDTTSIFALKEIQLQKEASLRSSSMPDSGRPAFRVVDTEF

SEQ ID NO: 2525 - protein, 486 aa, Homo sapiens
MKGRRRRRREYCKFALLLVLYTLVLLLVPSVLDGGRDGDKGAEHCPGLQRSLGVWSLEAAAAGEREQGAEARAAEEGGANQSPRFPSNLSGAVGEAVSREKQHIYVHATWRTGSSFLGELFNQHPDVFYLYEPMWHLWQALYPGDAESLQGALRDMLRSLFRCDFSVLRLYAPPGDPAARAPDTANLTTAALFRWRTNKVICSPPLCPGAPRARAEVGLVEDTACERSCPPVAIRALEAECRKYPVVVIKDVRLLDLGVLVPLLRDPGLNLKVVQLFRDPRAVHNSRLKSRQGLLRESIQVLRTRQRGDRFHRVLLAHGVGARPGGQSRALPAAPRADFFLTGALEVICEAWLRDLLFARGAPAWLRRRYLRLRYEDLVRQPRAQLRRLLRFSGLRALAALDAFALNMTRGAAYGADRPFHLSARDAREAVHAWRERLSREQVRQVEAACAPAMRLLAYPRSGEEGDAEQPREGETPLEMDADGAT

SEQ ID NO: 2526 - protein, 1893 aa, Homo sapiens
MGPGCDLLLRTAATITAAAIMSDTDSDEDSAGGGPFSLAGFLFGNINGAGQLEGESVLDDECKKHLAGLGALGLGSLITELTANEELTGTDGALVNDEGWVRSTEDAVDYSDINEVAEDESRRYQQTMGSLQPLCHSDYDEDDYDADCEDIDCKLMPPPPPPPGPMKKDKDQDSITGVSENGEGIILPSIIAPSSLASEKVDFSSSSDSESEMGPQEATQAESEDGKLTLPLAGIMQHDATKLLPSVTELFPEFRPGKVLRFLRLFGPGKNVPSVWRSARRKRKKKHRELIQEEQIQEVECSVESEVSQKSLWNYDYAPPPPPEQCLSDDEITMMAPVESKFSQSTGDIDKVTDTKPRVAEWRYGPARLWYDMLGVPEDGSGFDYGFKLRKTEHEPVIKSRMIEEFRKLEENNGTDLLADENFLMVTQLHWEDDIIWDGEDVKHKGTKPQRASLAGWLPSSMTRNAMAYNVQQGFAATLDDDKPWYSIFPIDNEDLVYGRWEDNIIWDAQAMPRLLEPPVLTLDPNDENLILEIPDEKEEATSNSPSKESKKESSLKKSRILLGKTGVIKEEPQQNMSQPEVKDPWNLSNDEYYYPKQQGLRGTFGGNIIQHSIPAVELRQPFFPTHMGPIKLRQFHRPPLKKYSFGALSQPGPHSVQPLLKHIKKKAKMREQERQASGGGEMFFMRTPQDLTGKDGDLILAEYSEENGPLMMQVGMATKIKNYYKRKPGKDPGAPDCKYGETVYCHTSPFLGSLHPGQLLQAFENNLFRAPIYLHKMPETDFLIIRTRQGYYIRELVDIFVVGQQCPLFEVPGPNSKRANTHIRDFLQVFIYRLFWKSKDRPRRIRMEDIKKAFPSHSESSIRKRLKLCADFKRTGMDSNWWVLKSDFRLPTEEEIRAMVSPEQCCAYYSMIAAEQRLKDAGYGEKSFFAPEEENEEDFQMKIDDEVRTAPWNTTRAFIAAMKGKCLLEVTGVADPTGCGEGFSYVKIPNKPTQQKDDKEPQPVKKTVTGTDADLRRLSLKNAKQLLRKFGVPEEEIKKLSRWEVIDVVRTMSTEQARSGEGPMSKFARGSRFSVAEHQERYKEECQRIFDLQNKVLSSTEVLSTDTDSSSAEDSDFEEMGKNIENMLQNKKTSSQLSREREEQERKELQRMLLAAGSAASGNNHRDDDTASVTSLNSSATGRCLKIYRTFRDEEGKEYVRCETVRKPAVIDAYVRIRTTKDEEFIRKFALFDEQHREEMRKERRRIQEQLRRLKRNQEKEKLKGPPEKKPKKMKERPDLKLKCGACGAIGHMRTNKFCPLYYQTNAPPSNPVAMTEEQEEELEKTVIHNDNEELIKVEGTKIVLGKQLIESADEVRRKSLVLKFPKQQLPPKKKRRVGTTVHCDYLNRPHKSIHRRRTDPMVTLSSILESIINDMRDLPNTYPFHTPVNAKVVKDYYKIITRPMDLQTLRENVRKRLYPSREEFREHLELIVKNSATYNGPKHSLTQISQSMLDLCDEKLKEKEDKLARLEKAINPLLDDDDQVAFSFILDNIVTQKMMAVPDSWPFHHPVNKKFVPDYYKVIVNPMDLETIRKNISKHKYQSRESFLDDVNLILANSVKYNGPESQYTKTAQEIVNVCYQTLTEYDEHLTQLEKDICTAKEAALEEAELESLDPMTPGPYTPQPPDLYDTNTSLSMSRDASVFQDESNMSVLDIPSATPEKQVTQEGEDGDGDLADEEEGTVQQPQASVLYEDLLMSEGEDDEEDAGSDEEGDNPFSAIQLSESGSDSDVGSGGIRPKQPRMLQENTRMDMENEESMMSYEGDGGEASHGLEDSNISYGSYEEPDPKSNTQDTSFSSIGGYEVSEEEEDEEEEEQRSGPSVLSQVHLSEDEEDSEDFHSIAGDSDLDSDE

SEQ ID NO: 2527 - protein, 761 aa, Homo sapiens
MDSGGGSLGLHTPDSRMAHTMIMQDFVAGMAGTAHIDGDHIVVSVPEAVLVSDVVTDDGITLDHGLAAEVVHGPDIITETDVVTEGVIVPEAVLEADVAIEEDLEEDDGDHILTSELITETVRVPEQVFVADLVTGPNGHLEHVVQDCVSGVDSPTMVSEEVLVTNSDTETVIQAAGGVPGSTVTIKTEDDDDDDVKSTSEDYLMISLDDVGEKLEHMGNTPLKIGSDGSQEDAKEDGFGSEVIKVYIFKAEAEDDVEIGGTEIVTESEYTSGHSVAGVLDQSRMQREKMVYMAVKDSSQEEDDIRDERRVSRRYEDCQASGNTLDSALESRSSTAAQYLQICDGINTNKVLKQKAKKRRRGETRQWQTAVIIGPDGQPLTVYPCHICTKKFKSRGFLKRHMKNHPDHLMRKKYQCTDCDFTTNKKVSFHNHLESHKLINKVDKTHEFTEYTRRYREASPLSSNKLILRDKEPKMHKCKYCDYETAEQGLLNRHLLAVHSKNFPHVCVECGKGFRHPSELKKHMRTHTGEKPYQCQYCIFRCADQSNLKTHIKSKHGNNLPYKCEHCPQAFGDERELQRHLDLFQGHKTHQCPHCDHKSTNSSDLKRHIISVHTKDFPHKCEVCDKGFHRPSELKKHSDIHKGRKIHQCRHCDFKTSDPFILSGHILSVHTKDQPLKCKRCKRGFRQQNELKKHMKTHTGRKIYQCEYCEYSTTDASGFKRHVISIHTKDYPHRCEFCKKGFRRPSEKNQHIMRHHKEALM

SEQ ID NO: 2528 - protein, 301 aa, Homo sapiens
MSYPTKEGSDTAGNAHKNSENEPPNDCSTDIESPSADPNMIYQVETNPINREPGTATSQEDVVPQAAENSELETEIQKDQREEDLKEELLLLQTPIPRKLVSHKPLNDRSRSHSGKVEMKANNFPINHKTRFRLSTSWRVPFINSHEIRSMILHLLCDRYFSQAAGCQNTMWVKRKYIACLYHPNSFTHHERAITFRRPSRVHYYRPLTERMTSGKFCKSTDTKGKCRFRAIVRSVLFVSQIQIESIFNIKGFVDILTYIHTMNVMITNTNNGWKYFCPICGRLFNTYSELRQHSCSSSGN

SEQ ID NO: 2529 - protein, 1810 aa, Homo sapiens
METLDSQRVQDRLLAAPGCSSPSGQQELFSSHVMQEESANDMECEQLPAEILRQVTVHRDPIYGFGFVAGSERPVVVRSVRPGGPSENKLLAGDQIVAINEEDVSEAPRERLIELIRSAKEFIVLTVLHTHQSPKSAFISAAKKAKLRSNPVKVRFSEQVAVGETDAKMMKKEALLLIPNVLKVFLENGQIKSFTFDGRTTVKDVMLTLQDRLSLRFIEHFALVLEYAGPEQNHKFLLLQDKQPLAYVVQRTHYHGMKCLFRISFFPKDPVELLRRDPAAFEYLYIQSRNDVIRERFGMDPKPEMLLGLAALHIYITVSATRPSQKISLKNVEKEWGLEPFLPPSLLQVIKEKNLRKSLSQQLKAHQTHPSCGTKGSAIQAKLQYLRILNELPTFTGVLFNTVGLDEKQSATTLLVGPRHGISHVIDLKTNLTTVLSEFSKISKIQLFRENQGVARVETSIMDAKPLVLLMEWPEATNFACLIAGYCRLLLDSRKMVFSRPASQPLPPPMIKADYMHSAHRPVTGGHLGKKESSYVGSVGTSPRKSSRCTPPPADSELVSFCYLHMREQRKEQESRTDVNENLIFFEETRPRTKSDPTSKSSGQGYEVVPDDFDAASLDHEPCASRARSYTLDNSLGAEALNFYCDSCKAKLQEQLGPRKGGKPGSSRDNIVDLMSLPPPGSEEEEEEEDETTSLLPAIAAPPPGFRDNSSDEDDPKRRAVQSQEQGRHLRGLLYDEIPVTLIDSVQTRTVRDHAQELDDALVSTLQALEALAASEDGPHPPPPQTAGLIVLATITPESSLDSGHETNSSELTDMSEMMSAMKQHQNTTYFLAQHLNKDSLLARKDLPFRIQSCAAQAVLTAPYSLGRPDPNPSLQPIATGQSPGPPGARRKLPQSEGQVQGERTYSLAVHPALSPQLSEQKNLSLLSPVPEDKGPGHTRAGLEMSLRAATSSLSEEQVSELRDNLPKEVRLSPKLILDPKSSVTPAIISAALQQVVHNKSLVTAGGALGNPPSRGERRLEASMGRPEVSMMSSSASKNLKFKISPSAPETSWNSQHQLGAEVSSSPRAPTGSRADSLHLSQQEDSLPVQNFPPKSYLLRTSRESVGKQATGEVAGKGGPVGGKPTLQKQGTISSQGEKAQLESTPKRSKLEETSLVPRATYPMALQSPSCQSRSHSPSCQPHGHSPSSQSRGQSPSCQPRGQSPLRSQAASRQVSTMPSRKLETTLNGAHSTSEGPAKPKSSRGPFRLRNLFSATFPTRQKKETDERQAQLQKVKQYELEFLEELLKPPSQGELPGTEYLQPPAPGRCSCQLRSSPVQQGPGMSREQRRSCDCKRICRGGRPQATQTPVPSLRGRERDRVLPSQRQPEAGPGVSLSSPINVQRIRSTSLESRECRSDPESGVSCLTTCASGGECLGAPNYRKLMRRYSISELDQGDRASLTSDVYPHPPLGMLPREAKEVEASLPIALGPKSRSLESPTLGDPSYVQVAPETKGPRQMAVFSLPEEVYRKPAELDEDSESSKCCSIRYCFYYRKCDMADDASDGKDELSYSIPMKILPGMKLDEQVVPVVSRTLQVLDAATCSSSSPEASRTQEIDLRVSTFEGSLAKINALRAHAYGLPDGFLAARLDTNELLTVLRQCVASPEARAPKPYVSQISEYKLELALKFKELRASCRRVANVDKSPTHMLAAITGSFQVLSSLIETFVRLVFIVRSEAQRQELLAKVEEVVRNYTFLLRAAEESTARNLNQQQQQQQQQQQQQQQQQQQQQQQQQQQVAAAAGAATEHPPGSPTSATVMSTFTHSLKTLIK

SEQ ID NO: 2530 - protein, 458 aa, Homo sapiens
MVNLRNAVHSFLVHLIGLLVWQSDISVSPVAAIVTDIFNTSDGGRFKFPDGVQNWPALSIVIIIIMTIGGNILVIMAVSMEKKLHNATNYFLMSLAIADMLVGLLVMPLSLLAILYDYVWPLPRYLCPVWISLDVLFSTASIMHLCAISLDRYVAIRNPIEHSRFNSRTKAIMKIAIVWAISIGVSVPIPVIGLRDEEKVFVNNTTCVLNDPNFVLIGSFVAFFIPLTIMVITYCLTIYVLRRQALMLLHGHTEEPPGLSLDFLKCCKRNTAEEENSANPNQDQNARRRKKKERRPRGTMQAINNERKASKVLGIVFFVFLIMWCPFFITNILSVLCEKSCNQKLMEKLLNVFVWIGYVCSGINPLVYTLFNKIYRRAFSNYLRCNYKVEKKPPVRQIPRVAATALSGRELNVNIYRHTNEPVIEKASDNEPGIEMQVENLELPVNPSSVVSERISSV

SEQ ID NO: 2531 - protein, 483 aa, Homo sapiens
MKEEKEHRPKEKRVTLLTPAGATGSGGGTSGDSSKGEDKQDRNKEKKEALSKVVIRRLPPTLTKEQLQEHLQPMPEHDYFEFFSNDTSLYPHMYARAYINFKNQEDIILFRDRFDGYVFLDNKGQEYPAIVEFAPFQKAAKKKTKKRDTKVGTIDDDPEYRKFLESYATDNEKMTSTPETLLEEIEAKNRELIAKKTTPLLSFLKNKQRMREEKREERRRREIERKRQREEERRKWKEEEKRKRKDIEKLKKIDRIPERDKLKDEPKIKVHRFLLQAVNQKNLLKKPEKGDEKELDKREKAKKLDKENLSDERASGQSCTLPKRSDSELKDEKPKRPEDESGRDYREREREYERDQERILRERERLKRQEEERRRQKERYEKEKTFKRKEEEMKKEKDTLRDKGKKAESTESIGSSEKTEKKEEVVKRDRIRNKDRPAMQLYQPGARSRNRLCPPDDSTKSGDSAAERKQESGISHRKEGGEE

SEQ ID NO: 2532 - protein, 2073 aa, Homo sapiens
MAEVRKFTKRLSKPGTAAELRQSVSEAVRGSVVLEKAKVVEPLDYENVIAQRKTQIYSDPLRDLLMFPMEDISISVIGRQRRTVQSTVPEDAEKRAQSLFVKECIKTYSTDWHVVNYKYEDFSGDFRMLPCKSLRPEKIPNHVFEIDEDCEKDEDSSSLCSQKGGVIKQGWLHKANVNSTITVTMKVFKRRYFYLTQLPDGSYILNSYKDEKNSKESKGCIYLDACIDVVQCPKMRRHAFELKMLDKYSHYLAAETEQEMEEWLITLKKIIQINTDSLVQEKKETVETAQDDETSSQGKAENIMASLERSMHPELMKYGRETEQLNKLSRGDGRQNLFSFDSEVQRLDFSGIEPDIKPFEEKCNKRFLVNCHDLTFNILGQIGDNAKGPPTNVEPFFINLALFDVKNNCKISADFHVDLNPPSVREMLWGSSTQLASDGSPKGSSPESYIHGIAESQLRYIQQGIFSVTNPHPEIFLVARIEKVLQGNITHCAEPYIKNSDPVKTAQKVHRTAKQVCSRLGQYRMPFAWAARPIFKDTQGSLDLDGRFSPLYKQDSSKLSSEDILKLLSEYKKPEKTKLQIIPGQLNITVECVPVDLSNCITSSYVPLKPFEKNCQNITVEVEEFVPEMTKYCYPFTIYKNHLYVYPLQLKYDSQKTFAKARNIAVCVEFRDSDESDASALKCIYGKPAGSVFTTNAYAVVSHHNQNPEFYDEIKIELPIHLHQKHHLLFTFYHVSCEINTKGTTKKQDTVETPVGFAWVPLLKDGRIITFEQQLPVSANLPPGYLNLNDAESRRQCNVDIKWVDGAKPLLKIKSHLESTIYTQDLHVHKFFHHCQLIQSGSKEVPGELIKYLKCLHAMEIQVMIQFLPVILMQLFRVLTNMTHEDDVPINCTMVLLHIVSKCHEEGLDSYLRSFIKYSFRPEKPSAPQAQLIHETLATTMIAILKQSADFLSINKLLKYSWFFFEIIAKSMATYLLEENKIKLPRGQRFPETYHHVLHSLLLAIIPHVTIRYAEIPDESRNVNYSLASFLKRCLTLMDRGFIFNLINDYISGFSPKDPKVLAEYKFEFLQTICNHEHYIPLNLPMAFAKPKLQRVQDSNLEYSLSDEYCKHHFLVGLLLRETSIALQDNYEIRYTAISVIKNLLIKHAFDTRYQHKNQQAKIAQLYLPFVGLLLENIQRLAGRDTLYSCAAMPNSASRDEFPCGFTSPANRGSLSTDKDTAYGSFQNGHGIKREDSRGSLIPEGATGFPDQGNTGENTRQSSTRSSVSQYNRLDQYEIRSLLMCYLYIVKMISEDTLLTYWNKVSPQELINILILLEVCLFHFRYMGKRNIARVHDAWLSKHFGIDRKSQTMPALRNRSGVMQARLQHLSSLESSFTLNHSSTTTEADIFHQALLEGNTATEVSLTVLDTISFFTQCFKTQLLNNDGHNPLMKKVFDIHLAFLKNGQSEVSLKHVFASLRAFISKFPSAFFKGRVNMCAAFCYEVLKCCTSKISSTRNEASALLYLLMRNNFEYTKRKTFLRTHLQIIIAVSQLIADVALSGGSRFQESLFIINNFANSDRPMKATAFPAEVKDLTKRIRTVLMATAQMKEHEKDPEMLIDLQYSLAKSYASTPELRKTWLDSMAKIHVKNGDFSEAAMCYVHVAALVAEFLHRKKLFPNGCSAFKKITPNIDEEGAMKEDAGMMDVHYSEEVLLELLEQCVDGLWKAERYEIISEISKLIVPIYEKRREFEKLTQVYRTLHGAYTKILEVMHTKKRLLGTFFRVAFYGQSFFEEEDGKEYIYKEPKLTGLSEISLRLVKLYGEKFGTENVKIIQDSDKVNAKELDPKYAHIQVTYVKPYFDDKELTERKTEFERNHNISRFVFEAPYTLSGKKQGCIEEQCKRRTILTTSNSFPYVKKRIPINCEQQINLKPIDVATDEIKDKTAELQKLCSSTDVDMIQLQLKLQGCVSVQVNAGPLAYARAFLNDSQASKYPPKKVSELKDMFRKFIQACSIALELNERLIKEDQVEYHEGLKSNFRDMVKELSDIIHEQILQEDTMHSPWMSNTLHVFCAISGTSSDRGYGSPRYAEV

SEQ ID NO: 2533 - protein, 2077 aa, Homo sapiens
MAEVRKFTKRLSKPGTAAELRQSVSEAVRGSVVLEKAKVVEPLDYENVIAQRKTQIYSDPLRDLLMFPMEDISISVIGRQRRTVQSTVPEDAEKRAQSLFVKECIKTYSTDWHVVNYKYEDFSGDFRMLPCKSLRPEKIPNHVFEIDEDCEKDEDSSSLCSQKGGVIKQGWLHKANVNSTITVTMKVFKRRYFYLTQLPDGSYILNSYKDEKNSKESKGCIYLDACIDVVQCPKMRRHAFELKMLDKYSHYLAAETEQEMEEWLITLKKIIQINTDSLVQEKKETVETAQDDETSSQGKAENIMASLERSMHPELMKYGRETEQLNKLSRGDGRQNLFSFDSEVQRLDFSGIEPDIKPFEEKCNKRFLVNCHDLTFNILGQIGDNAKGPPTNVEPFFINLALFDVKNNCKISADFHVDLNPPSVREMLWGSSTQLASDGSPKGSSPESYIHGIAESQLRYIQQGIFSVTNPHPEIFLVARIEKVLQGNITHCAEPYIKNSDPVKTAQKVHRTAKQVCSRLGQYRMPFAWAARPIFKDTQGSLDLDGRFSPLYKQDSSKLSSEDILKLLSEYKKPEKTKLQIIPGQLNITVECVPVDLSNCITSSYVPLKPFEKNCQNITVEVEEFVPEMTKYCYPFTIYKNHLYVYPLQLKYDSQKTFAKARNIAVCVEFRDSDESDASALKCIYGKPAGSVFTTNAYAVVSHHNQNPEFYDEIKIELPIHLHQKHHLLFTFYHVSCEINTKGTTKKQDTVETPVGFAWVPLLKDGRIITFEQQLPVSANLPPGYLNLNDAESRRQCNVDIKWVDGAKPLLKIKSHLESTIYTQDLHVHKFFHHCQLIQSGSKEVPGELIKYLKCLHAMEIQVMIQFLPVILMQLFRVLTNMTHEDDVPINCTMVLLHIVSKCHEEGLDSYLRSFIKYSFRPEKPSAPQAQLIHETLATTMIAILKQSADFLSINKLLKYSWFFFEIIAKSMATYLLEENKIKLPRGQRFPETYHHVLHSLLLAIIPHVTIRYAEIPDESRNVNYSLASFLKRCLTLMDRGFIFNLINDYISGFSPKDPKVLAEYKFEFLQTICNHEHYIPLNLPMAFAKPKLQRVQDSNLEYSLSDEYCKHHFLVGLLLRETSIALQDNYEIRYTAISVIKNLLIKHAFDTRYQHKNQQAKIAQLYLPFVGLLLENIQRLAGRDTLYSCAAMPNSASRDEFPCGFTSPANRGSLSTDKDTAYGSFQNGHGIKREDSRGSLIPEGATGFPDQGNTGENTRQSSTRSSVSQYNRLDQYEIRSLLMCYLYIVKMISEDTLLTYWNKVSPQELINILILLEVCLFHFRYMGKRNIARVHDAWLSKHFGIDRKSQTMPALRNRSGVMQARLQHLSSLESSFTLNHSSTTTEADIFHQALLEGNTATEVSLTVLDTISFFTQCFKTQLLNNDGHNPLMKKVFDIHLAFLKNGQSEVSLKHVFASLRAFISKFPSAFFKGRVNMCAAFCYEVLKCCTSKISSTRNEASALLYLLMRNNFEYTKRKTFLRTHLQIIIAVSQLIADVALSGGSRFQESLFIINNFANSDRPMKATAFPAEVKDLTKRIRTVLMATAQMKEHEKDPEMLIDLQYSLAKSYASTPELRKTWLDSMAKIHVKNGDFSEAAMCYVHVAALVAEFLHRKKLFPNGCSAFKKITPNIDEEGAMKEDAGMMDVHYSEEVLLELLEQCVDGLWKAERYEIISEISKLIVPIYEKRREFEKLTQVYRTLHGAYTKILEVMHTKKRLLGTFFRVAFYGQSFFEEEDGKEYIYKEPKLTGLSEISLRLVKLYGEKFGTENVKIIQDSDKVNAKELDPKYAHIQVTYVKPYFDDKELTERKTEFERNHNISRFVFEAPYTLSGKKQGCIEEQCKRRTILTTSNSFPYVKKRIPINCEQQINLKPIDVATDEIKDKTAELQKLCSSTDVDMIQLQLKLQGCVSVQVNAGPLAYARAFLNDSQASKYPPKKVSELKDMFRKFIQACSIALELNERLIKEDQVEYHEGLKSNFRDMVKELSDIIHEQASIRILQEDTMHSPWMSNTLHVFCAISGTSSDRGYGSPRYAEV

SEQ ID NO: 2534 - protein, 547 aa, Homo sapiens
MGGCIPFLKAARALCPRIMPPLLLLSAFIFLVSVLGGAPGHNPDRRTKMVSIHSLSELERLKLQETAYHELVARHFLSEFKPDRALPIDRPNTLDKWFLILRGQQRAVSHKTFGISLEEVLVNEFTRRKHLELTATMQVEEATGQAAGRRRGNVVRRVFGRIRRFFSRRRNEPTLPREFTRRGRRGAVSVDSLAELEDGALLLQTLQLSKISFPIGQRLLGSKRKMSLNPIAKQIPQVVEACCQFIEKHGLSAVGIFTLEYSVQRVRQLREEFDQGLDVVLDDNQNVHDVAALLKEFFRDMKDSLLPDDLYMSFLLTATLKPQDQLSALQLLVYLMPPCHSDTLERLLKALHKITENCEDSIGIDGQLVPGNRMTSTNLALVFGSALLKKGKFGKRESRKTKLGIDHYVASVNVVRAMIDNWDVLFQVPPHIQRQVAKRVWKSSPEALDFIRRRNLRKIQSARIKMEEDALLSDPVETSAEARAAVLAQSKPSDEGSSEEPAVPSGTARSHDDEEGAGNPPIPEQDRPLLRVPREKEAKTGVSYFFP

SEQ ID NO: 2535 - protein, 1528 aa, Homo sapiens
MSVAIRKRSWEEHVTHWMGQPFNSDDRNTACHHGLVADSLQASMEKDATLNVDRKEKCVSLPDCCHGSELRDFPGRPMGHLSKDVDENDSHEGEDQFLSLEASTETLVHVSDEDNNADLCLTDDKQVLNTQGQKTSGQHMIQGAGSLEKALPIIQSNQVSSNSWGIAGETELALVKESGERKVTDSISKSLELCNEISLSEIKDAPKVNAVDTLNVKDIAPEKQLLNSAVIAQQRRKPDPPKDENERSTCNVVQNEFLDTPCTNRGLPLLKTDFGSCLLQPPSCPNGMSAENGLEKSGFSQHQNKSPPKVKAEDGMQCLQLKETLATQEPTDNQVRLRKRKEIREDRDRARLDSMVLLIMKLDQLDQDIENALSTSSSPSGTPTNLRRHVPDLESGSESGADTISVNQTRVNLSSDTESTDLPSSTPVANSGTKPKTTAIQGISEKEKAEIEAKEACDWLRATGFPQYAQLYEDFLFPIDISLVKREHDFLDRDAIEALCRRLNTLNKCAVMKLEISPHRKRSDDSDEDEPCAISGKWTFQRDSKRWSRLEEFDVFSPKQDLVPGSPDDSHPKDGPSPGGTLMDLSERQEVSSVRSLSSTGSLPSHAPPSEDAATPRTNSVISVCSSSNLAGNDDSFGSLPSPKELSSFSFSMKGHEKTAKSKTRSLLKRMESLKLKSSHHSKHKAPSKLGLIISGPILQEGMDEEKLKQLNCVEISALNGNRINVPMVRKRSVSNSTQTSSSSSQSETSSAVSTPSPVTRTRSLSACNKRVGMYLEGFDPFNQSTFNNVVEQNFKNRESYPEDTVFYIPEDHKPGTFPKALTNGSFSPSGNNGSVNWRTGSFHGPGHISLRRENSSDSPKELKRRNSSSSMSSRLSIYDNVPGSILYSSSGDLADLENEDIFPELDDILYHVKGMQRIVNQWSEKFSDEGDSDSALDSVSPCPSSPKQIHLDVDNDRTTPSDLDSTGNSLNEPEEPSEIPERRDSGVGASLTRSNRHRLRWHSFQSSHRPSLNSVSLQINCQSVAQMNLLQKYSLLKLTALLEKYTPSNKHGFSWAVPKFMKRIKVPDYKDRSVFGVPLTVNVQRTGQPLPQSIQQAMRYLRNHCLDQVGLFRKSGVKSRIQALRQMNEGAIDCVNYEGQSAYDVADMLKQYFRDLPEPLMTNKLSETFLQIYQYVPKDQRLQAIKAAIMLLPDENREVLQTLLYFLSDVTAAVKENQMTPTNLAVCLAPSLFHLNTLKRENSSPRVMQRKQSLGKPDQKDLNENLAATQGLAHMIAECKKLFQVPEEMSRCRNSYTEQELKPLTLEALGHLGNDDSADYQHFLQDCVDGLFKEVKEKFKGWVSYSTSEQAELSYKKVSEGPPLRLWRSVIEVPAVPEEILKRLLKEQHLWDVDLLDSKVIEILDSQTEIYQYVQNSMAPHPARDYVVLRTWRTNLPKGACALLLTSVDHDRAPVVGVRVNVLLSRYLIEPCGPGKSKLTYMCRVDLRGHMPEWYTKSFGHLCAAEVVKIRDSFSNQNTETKDTKSR

SEQ ID NO: 2536 - protein, 317 aa, Homo sapiens
MSSEQKSQHCKPEEGVEAQEEALGLVGAQAPTTEEQEAAVSSSSPLVPGTLEEVPAAESAGPPQSPQGASALPTTISFTCWRQPNEGSSSQEEEGPSTSPDAESLFREALSNKVDELAHFLLRKYRAKELVTKAEMLERVIKNYKRCFPVIFGKASESLKMIFGIDVKEVDPASNTYTLVTCLGLSYDGLLGNNQIFPKTGLLIIVLGTIAMEGDSASEEEIWEELGVMGVYDGREHTVYGEPRKLLTQDWVQENYLEYRQVPGSNPARYEFLWGPRALAETSYVKVLEHVVRVNARVRIAYPSLREAALLEEEEGV

SEQ ID NO: 2537 - protein, 525 aa, Homo sapiens
MLRTILDAPQRLLKEGRASRQLVLVVVFVALLLDNMLFTVVVPIVPTFLYDMEFKEVNSSLHLGHAGSSPHALASPAFSTIFSFFNNNTVAVEESVPSGIAWMNDTASTIPPPATEAISAHKNNCLQGTGFLEEEITRVGVLFASKAVMQLLVNPFVGPLTNRIGYHIPMFAGFVIMFLSTVMFAFSGTYTLLFVARTLQGIGSSFSSVAGLGMLASVYTDDHERGRAMGTALGGLALGLLVGAPFGSVMYEFVGKSAPFLILAFLALLDGALQLCILQPSKVSPESAKGTPLFMLLKDPYILVAAGSICFANMGVAILEPTLPIWMMQTMCSPKWQLGLAFLPASVSYLIGTNLFGVLANKMGRWLCSLIGMLVVGTSLLCVPLAHNIFGLIGPNAGLGLAIGMVDSSMMPIMGHLVDLRHTSVYGSVYAIADVAFCMGFAIGPSTGGAIVKAIGFPWLMVITGVINIVYAPLCYYLRSPPAKEEKLAILSQDCPMETRMYATQKPTKEFPLGEDSDEEPDHEE

SEQ ID NO: 2538 - protein, 466 aa, Homo sapiens
MVFLSGNASDSSNCTQPPAPVNISKAILLGVILGGLILFGVLGNILVILSVACHRHLHSVTHYYIVNLAVADLLLTSTVLPFSAIFEVLGYWAFGRVFCNIWAAVDVLCCTASIMGLCIISIDRYIGVSYPLRYPTIVTQRRGLMALLCVWALSLVISIGPLFGWRQPAPEDETICQINEEPGYVLFSALGSFYLPLAIILVMYCRVYVVAKRESRGLKSGLKTDKSDSEQVTLRIHRKNAPAGGSGMASAKTKTHFSVRLLKFSREKKAAKTLGIVVGCFVLCWLPFFLVMPIGSFFPDFKPSETVFKIVFWLGYLNSCINPIIYPCSSQEFKKAFQNVLRIQCLCRKQSSKHALGYTLHPPSQAVEGQHKDMVRIPVGSRETFYRISKTDGVCEWKFFSSMPRGSARITVSKDQSSCTTARVRSKSFLQVCCCVGPSTPSLDKNHQVPTIKVHTISLSENGEEV

SEQ ID NO: 2539 - protein, 494 aa, Homo sapiens
MLTSKGQGFLHGGLCLWLCVFTPFFKGCVGCATEERLFHKLFSHYNQFIRPVENVSDPVTVHFEVAITQLANVDEVNQIMETNLWLRHIWNDYKLRWDPMEYDGIETLRVPADKIWKPDIVLYNNAVGDFQVEGKTKALLKYNGMITWTPPAIFKSSCPMDITFFPFDHQNCSLKFGSWTYDKAEIDLLIIGSKVDMNDFWENSEWEIIDASGYKHDIKYNCCEEIYTDITYSFYIRRLPMFYTINLIIPCLFISFLTVLVFYLPSDCGEKVTLCISVLLSLTVFLLVITETIPSTSLVVPLVGEYLLFTMIFVTLSIVVTVFVLNIHYRTPTTHTMPRWVKTVFLKLLPQVLLMRWPLDKTRGTGSDAVPRGLARRPAKGKLASHGEPRHLKECFHCHKSNELATSKRRLSHQPLQWVVENSEHSPEVEDVINSVQFIAENMKSHNETKEVEDDWKYVAMVVDRVFLWVFIIVCVFGTAGLFLQPLLGNTGKS

SEQ ID NO: 2540 - protein, 412 aa, Homo sapiens
MGDGAVKQGFLYLQQQQTFGKKWRRFGASLYGGSDCALARLELQEGPEKPRRCEAARKVIRLSDCLRVAEAGGEASSPRDTSAFFLETKERLYLLAAPAAERGDWVQAICLLAFPGQRKELSGPEGKQSRPCMEENELYSSAVTVGPHKEFAVTMRPTEASERCHLRGSYTLRAGESALELWGGPEPGTQLYDWPYRFLRRFGRDKVTFSFEAGRRCVSGEGNFEFETRQGNEIFLALEEAISAQKNAAPATPQPQPATIPASLPRPDSPYSRPHDSLPPPSPTTPVPAPRPRGQEGEYAVPFDAVARSLGKNFRGILAVPPQLLADPLYDSIEETLPPRPDHIYDEPEGVAALSLYDSPQEPRGEAWRRQATADRDPAGLQHVQPAGQDFSASGWQPGTEYDNVVLKKGPK

SEQ ID NO: 2541 - protein, 440 aa, Homo sapiens
MEQRGQNAPAASGARKRHGPGPREARGARPGPRVPKTLVLVVAAVLLLVSAESALITQQDLAPQQRAAPQQKRSSPSEGLCPPGHHISEDGRDCISCKYGQDYSTHWNDLLFCLRCTRCDSGEVELSPCTTTRNTVCQCEEGTFREEDSPEMCRKCRTGCPRGMVKVGDCTPWSDIECVHKESGTKHSGEVPAVEETVTSSPGTPASPCSLSGIIIGVTVAAVVLIVAVFVCKSLLWKKVLPYLKGICSGGGGDPERVDRSSQRPGAEDNVLNEIVSILQPTQVPEQEMEVQEPAEPTGVNMLSPGESEHLLEPAEAERSQRRRLLVPANEGDPTETLRQCFDDFADLVPFDSWEPLMRKLGLMDNEIKVAKAEAAGHRDTLYTMLIKWVNKTGRDASVHTLLDALETLGERLAKQKIEDHLLSSGKFMYLEGNADSAMS

SEQ ID NO: 2542 - protein, 1870 aa, Homo sapiens
MARWIPTKRQKYGVAIYNYNASQDVELSLQIGDTVHILEMYEGWYRGYTLQNKSKKGIFPETYIHLKEATVEDLGQHETVIPGELPLVQELTSTLREWAVIWRKLYVNNKLTLFRQLQQMTYSLIEWRSQILSGTLPKDELAELKKKVTAKIDHGNRMLGLDLVVRDDNGNILDPDETSTIALFKAHEVASKRIEEKIQEEKSILQNLDLRGQSIFSTIHTYGLYVNFKNFVCNIGEDAELFMALYDPDQSTFISENYLIRWGSNGMPKEIEKLNNLQAVFTDLSSMDLIRPRVSLVCQIVRVGHMELKEGKKHTCGLRRPFGVAVMDITDIIHGKVDDEEKQHFIPFQQIAMETYIRQRQLIMSPLITSHVIGENEPLTSVLNKVIAAKEVNHKGQGLWVSLKLLPGDLTQVQKNFSHLVDRSTAIARKMGFPEIILPGDVRNDIYVTLIHGEFDKGKKKTPKNVEVTMSVHDEEGKLLEKAIHPGAGYEGISEYKSVVYYQVKQPCWYETVKVSIAIEEVTRCHIRFTFRHRSSQETRDKSERAFGVAFVKLMNPDGTTLQDGRHDLVVYKGDNKKMEDAKFYLTLPGTKMEMEEKELQASKNLVTFTPSKDSTKDSFQIATLICSTKLTQNVDLLGLLNWRSNSQNIKHNLKKLMEVDGGEIVKFLQDTLDALFNIMMEMSDSETYDFLVFDALVFIISLIGDIKFQHFNPVLETYIYKHFSATLAYVKLSKVLNFYVANADDSSKTELLFAALKALKYLFRFIIQSRVLYLRFYGQSKDGDEFNNSIRQLFLAFNMLMDRPLEEAVKIKGAALKYLPSIINDVKLVFDPVELSVLFCKFIQSIPDNQLVRQKLNCMTKIVESTLFRQSECREVLLPLLTDQLSGQLDDNSNKPDHEASSQLLSNILEVLDRKDVGATAVHIQLIMERLLRRINRTVIGMNRQSPHIGSFVACMIALLQQMDDSHYSHYISTFKTRQDIIDFLMETFIMFKDLIGKNVYAKDWMVMNMTQNRVFLRAINQFAEVLTRFFMDQASFELQLWNNYFHLAVAFLTHESLQLETFSQAKRNKIVKKYGDMRKEIGFRIRDMWYNLGPHKIKFIPSMVGPILEVTLTPEVELRKATIPIFFDMMQCEFNFSGNGNFHMFENELITKLDQEVEGGRGDEQYKVLLEKLLLEHCRKHKYLSSSGEVFALLVSSLLENLLDYRTIIMQDESKENRMSCTVNVLNFYKEKKREDIYIRYLYKLRDLHRDCENYTEAAYTLLLHAELLQWSDKPCVPHLLQKDSYYVYTQQELKEKLYQEIISYFDKGKMWEKAIKLSKELAETYESKVFDYEGLGNLLKKRASFYENIIKAMRPQPEYFAVGYYGQGFPSFLRNKIFIYRGKEYERREDFSLRLLTQFPNAEKMTSTTPPGEDIKSSPKQYMQCFTVKPVMSLPPSYKDKPVPEQILNYYRANEVQQFRYSRPFRKGEKDPDNEFATMWIERTTYTTAYTFPGILKWFEVKQISTEEISPLENAIETMELTNERISNCVQQHAWDRSLSVHPLSMLLSGIVDPAVMGGFSNYEKAFFTEKYLQEHPEDQEKVELLKRLIALQMPLLTEGIRIHGEKLTEQLKPLHERLSSCFRELKEKVEKHYGVITLPPNLTERKQSRTGSIVLPYIMSSTLRRLSITSVTSSVVSTSSNSSDNAPSRPGSDGSILEPLLERRASSGARVEDLSLREENSENRISKFKRKDWSLSKSQVIAEKAPEPDLMSPTRKAQRPKSLQLMDNRLSPFHGSSPPQSTPLSPPPLTPKATRTLSSPSLQTDGIAATPVPPPPPPKSKPYEGSQRNSTELAPPLPVRREAKAPPPPPPKARKSGIPTSEPGSQ

SEQ ID NO: 2543 - protein, 1047 aa, Homo sapiens
MDAEAEDKTLRTRSKGTEVPMDSLIQELSVAYDCSMAKKRTAEDQALGVPVNKRKSLLMKPRHYSPKADCQEDRSDRTEDDGPLETHGHSTAEEIMIKPMDESLLSTAQENSSRKEDRYSCYQELMVKSLMHLGKFEKNVSVQTVSENLNDSGIQSLKAESDEADECFLIHSDDGRDKIDDSQPPFCSSDDNESNSESAENGWDSGSNFSEETKPPRVPKYVLTDHKKDLLEVPEIKTEGDKFIPCENRCDSETERKDPQNALAEPLDGNAQPSFPDVEEEDSESLAVMTEEGSDLEKAKGNLSLLEQAIALQAERGCVFHNTYKELDRFLLEHLAGERRQTKVIDMGGRQIFNNKHSPRPEKRETKCPIPGCDGTGHVTGLYPHHRSLSGCPHKVRVPLEILAMHENVLKCPTPGCTGRGHVNSNRNTHRSLSGCPIAAAEKLAMSQDKNQLDSPQTGQCPDQAHRTSLVKQIEFNFPSQAITSPRATVSKEQEKFGKVPFDYASFDAQVFGKRPLIQTVQGRKTPPFPESKHFPNPVKFPNRLPSAGAHTQSPGRASSYSYGQCSEDTHIAAAAAILNLSTRCREATDILSNKPQSLHAKGAEIEVDENGTLDLSMKKNRILDKSAPLTSSNTSIPTPSSSPFKTSSILVNAAFYQALCDQEGWDTPINYSKTHGKTEEEKEKDPVSSLENLEEKKFPGEASIPSPKPKLHARDLKKELITCPTPGCDGSGHVTGNYASHRSVSGCPLADKTLKSLMAANSQELKCPTPGCDGSGHVTGNYASHRSLSGCPRARKGGVKMTPTKEEKEDPELKCPVIGCDGQGHISGKYTSHRTASGCPLAAKRQKENPLNGASLSWKLNKQELPHCPLPGCNGLGHVNNVFVTHRSLSGCPLNAQVIKKGKVSEELMTIKLKATGGIESDEEIRHLDEEIKELNESNLKIEADMMKLQTQITSMESNLKTIEEENKLIEQNNESLLKELAGLSQALISSLADIQLPQMGPISEQNFEAYVNTLTDMYSNLERDYSPECKALLESIKQAVKGIHV

SEQ ID NO: 2544 - protein, 395 aa, Homo sapiens
MAFSPWQILSPVQWAKWTWSAVRGGAAGEDEAGGPEGDPEEEDSQAETKSLSFRSGCKVKKHETQSLALDACSRDEGAVISQISDISNRDGHATDEEKLASTSCGQKSAGAEVKGEPEEDLEYFECSNVPVSTINHAFSSSEAGIEKETCQKMEEDGSTVLGLLESSAEKAPVSVSCGGESPLDGICLSESDKTAVLTLIREEIITKEIEANEWKKKYEETRQEVLEMRKIVAEYEKTIAQMIEDEQRTSMTSQKSFQQLTMEKEQALADLNSVERSLSDLFRRYENLKGVLEGFKKNEEALKKCAQDYLARVKQEEQRYQALKIHAEEKLDKANEEIAQVRTKAKAESAALHAGLRKEQMKVESLERALQQKNQEIEELTKICDELIAKLGKTD

SEQ ID NO: 2545 - protein, 540 aa, Homo sapiens
MSASLNYKSFSKEQQTMDNLEKQLICPICLEMFTKPVVILPCQHNLCRKCASDIFQASNPYLPTRGGTTMASGGRFRCPSCRHEVVLDRHGVYGLQRNLLVENIIDIYKQESTRPEKKSDQPMCEEHEEERINIYCLNCEVPTCSLCKVFGAHKDCQVAPLTHVFQRQKSELSDGIAILVGSNDRVQGVISQLEDTCKTIEECCRKQKQELCEKFDYLYGILEERKNEMTQVITRTQEEKLEHVRALIKKYSDHLENVSKLVESGIQFMDEPEMAVFLQNAKTLLKKISEASKAFQMEKIEHGYENMNHFTVNLNREEKIIREIDFYREDEDEEEEEGGEGEKEGEGEVGGEAVEVEEVENVQTEFPGEDENPEKASELSQVELQAAPGALPVSSPEPPPALPPAADAPVTQGEVVPTGSEQTTESETPVPAAAETADPLFYPSWYKGQTRKATTNPPCTPGSEGLGQIGPPGSEDSNVRKAEVAAAAASERAAVSGKETSAPAATSQELVICLALLAFLILHYIWSQIQCLIFTLMDWI

SEQ ID NO: 2546 - protein, 656 aa, Homo sapiens
MTGAKRKKKSMLWSKMHTPQCEDIIQWCRRRLPILDWAPHYNLKENLLPDTVSGIMLAVQQVTQGLAFAVLSSVHPVFGLYGSLFPAIIYAIFGMGHHVATGTFALTSLISANAVERIVPQNMQNLTTQSNTSVLGLSDFEMQRIHVAAAVSFLGGVIQVAMFVLQLGSATFVVTEPVISAMTTGAATHVVTSQVKYLLGMKMPYISGPLGFFYIYAYVFENIKSVRLEALLLSLLSIVVLVLVKELNEQFKRKIKVVLPVDLVLIIAASFACYCTNMENTYGLEVVGHIPQGIPSPRAPPMNILSAVITEAFGVALVGYVASLALAQGSAKKFKYSIDDNQEFLAHGLSNIVSSFFFCIPSAAAMGRTAGLYSTGAKTQVACLISCIFVLIVIYAIGPLLYWLPMCVLASIIVVGLKGMLIQFRDLKKYWNVDKIDWGIWVSTYVFTICFAANVGLLFGVVCTIAIVIGRFPRAMTVSIKNMKEMEFKVKTEMDSETLQQVKIISINNPLVFLNAKKFYTDLMNMIQKENACNQPLDDISKCEQNTLLNSLSNGNCNEEASQSCPNEKCYLILDCSGFTFFDYSGVSMLVEVYMDCKGRSVDVLLAHCTASLIKAMTYYGNLDSEKPIFFESVSAAISHIHSNKNLSKLSDHSEV

SEQ ID NO: 2547 - protein, 663 aa, Homo sapiens
MGPLRESKKEHRVQHHDKEISRSRIPRLILRPHMPQQQHKVSPASESPFSEEESREFNPSSSGRSARTVSSNSFCSDDTGCPSSQSVSPVKTPSDAGNSPIGFCPGSDEGFTRKKCTIGMVGEGSIQSSRYKKESKSGLVKPGSEADFSSSSSTGSISAPEVHMSTAGSKRSSSSRNRGPHGRSNGASSHKPGSSPSSPREKDLLSMLCRNQLSPVNIHPSYAPSSPSSSNSGSYKGSDCSPIMRRSGRYMSCGENHGVRPPNPEQYLTPLQQKEVTVRHLKTKLKESERRLHERESEIVELKSQLARMREDWIEEECHRVEAQLALKEARKEIKQLKQVIETMRSSLADKDKGIQKYFVDINIQNKKLESLLQSMEMAHSGSLRDELCLDFPCDSPEKSLTLNPPLDTMADGLSLEEQVTGEGADRELLVGDSIANSTDLFDEIVTATTTESGDLELVHSTPGANVLELLPIVMGQEEGSVVVERAVQTDVVPYSPAISELIQSVLQKLQDPCPSSLASPDESEPDSMESFPESLSALVVDLTPRNPNSAILLSPVETPYANVDAEVHANRLMRELDFAACVEERLDGVIPLARGGVVRQYWSSSFLVDLLAVAAPVVPTVLWAFSTQRGGTDPVYNIGALLRGCCVVALHSLRRTAFRIKT

SEQ ID NO: 2548 - protein, 519 aa, Homo sapiens
MAAPSRLLIRGGRVVNDDFSEVADVLVEDGVVRALGHDLLPPGGAPAGLRVLDAAGKLVLPGGIDTHTHMQFPFMGSRSIDDFHQGTKAALSGGTTMIIDFAIPQKGGSLIEAFETWRSWADPKVCCDYSLHVAVTWWSDQVKEEMKILVQDKGVNSFKMFMAYKDLYMVTDLELYEAFSRCKEIGAIAQVHAENGDLIAEGAKKMLALGITGPEGHELCRPEAVEAEATLRAITIASAVNCPLYIVHVMSKSAAKVIADARRDGKVVYGEPIAASLGTDGTHYWNKEWHHAAHHVMGPPLRPDPSTPDFLMNLLANDDLTTTGTDNCTFNTCQKALGKDDFTKIPNGVNGVEDRMSVIWEKGVHSGKMDENRFVAVTSTNAAKIFNLYPRKGRIAVGSDADIVIWDPKGTRTISAKTHHQAVNFNIFEGMVCHGVPLVTISRGKVVYEAGVFSVTAGDGKFIPRKPFAEYIYKRIKQRDRTCTPTPVERAPYKGEVATLKSRVTKEDATAGTRKQAHP

SEQ ID NO: 2549 - protein, 859 aa, Homo sapiens
MACRWSTKESPRWRSALLLLFLAGVYGNGALAEHSENVHISGVSTACGETPEQIRAPSGIITSPGWPSEYPAKINCSWFIRANPGEIITISFQDFDIQGSRRCNLDWLTIETYKNIESYRACGSTIPPPYISSQDHIWIRFHSDDNISRKGFRLAYFSGKSEEPNCACDQFRCGNGKCIPEAWKCNNMDECGDSSDEEICAKEANPPTAAAFQPCAYNQFQCLSRFTKVYTCLPESLKCDGNIDCLDLGDEIDCDVPTCGQWLKYFYGTFNSPNYPDFYPPGSNCTWLIDTGDHRKVILRFTDFKLDGTGYGDYVKIYDGLEENPHKLLRVLTAFDSHAPLTVVSSSGQIRVHFCADKVNAARGFNATYQVDGFCLPWEIPCGGNWGCYTEQQRCDGYWHCPNGRDETNCTMCQKEEFPCSRNGVCYPRSDRCNYQNHCPNGSDEKNCFFCQPGNFHCKNNRCVFESWVCDSQDDCGDGSDEENCPVIVPTRVITAAVIGSLICGLLLVIALGCTCKLYSLRMFERRSFETQLSRVEAELLRREAPPSYGQLIAQGLIPPVEDFPVCSPNQASVLENLRLAVRSQLGFTSVRLPMAGRSSNIWNRIFNFARSRHSGSLALVSADGDEVVPSQSTSREPERNHTHRSLFSVESDDTDTENERRDMAGASGGVAAPLPQKVPPTTAVEATVGACASSSTQSTRGGHADNGRDVTSVEPPSVSPARHQLTSALSRMTQGLRWVRFTLGRSSSLSQNQSPLRQLDNGVSGREDDDDVEMLIPISDGSSDFDVNDCSRPLLDLASDQGQGLRQPYNATNPGVRPSNRDGPCERCGIVHTAQIPDTCLEVTLKNETSDDEALLLC

SEQ ID NO: 2550 - protein, 366 aa, Homo sapiens
MYSRHAQRIPPGKKMASRKEGTGSTATSSSSTAGAAGKGKGKGGSGDSAVKQVQIDGLVVLKIIKHYQEEGQGTEVVQGVLLGLVVEDRLEITNCFPFPQHTEDDADFDEVQYQMEMMRSLRHVNIDHLHVGWYQSTYYGSFVTRALLDSQFSYQHAIEESVVLIYDPIKTAQGSLSLKAYRLTPKLMEVCKEKDFSPEALKKANITFEYMFEEVPIVIKNSHLINVLMWELEKKSAVADKHELLSLASSNHLGKNLQLLMDRVDEMSQDIVKYNTYMRNTSKQQQQKHQYQQRRQQENMQRQSRGEPPLPEEDLSKLFKPPQPPARMDSLLIAGQINTYCQNIKEFTAQNLGKLFMAQALQEYNN

SEQ ID NO: 2551 - protein, 508 aa, Homo sapiens
MPSMLERISKNLVKEIGSKDLTPVKYLLSATKLRQFVILRKKKDSRSSFWEQSDYVPVEFSLNDILEPSSSVLETVVTGPFHFSDIMIQKHKADMGVNVGIEVSVSGEASVDHGCSLEFQIVTIPSPNLEDFQKRKLLDPEPSFLKECRRRGDNLYVVTEAVELINNTVLYDSSSVNILGKIALWITYGKGQGQGESLRVKKKALTLQKGMVMAYKRKQLVIKEKAILISDDDEQRTFQDEYEISEMVGYCAARSEGLLPSFHTISPTLFNASSNDMKLKPELFLTQQFLSGHLPKYEQVHILPVGRIEEPFWQNFKHLQEEVFQKIKTLAQLSKDVQDVMFYSILAMLRDRGALQDLMNMLELDSSGHLDGPGGAILKKLQQDSNHAWFNPKDPILYLLEAIMVLSDFQHDLLACSMEKRILLQQQELVRSILEPNFRYPWSIPFTLKPELLAPLQSEGLAITYGLLEECGLRMELDNPRSTWDVEAKMPLSALYGTLSLLQQLAEA

SEQ ID NO: 2552 - protein, 1141 aa, Homo sapiens
MSEIQGTVEFSVELHKFYNVDLFQRGYYQIRVTLKVSSRIPHRLSASIAGQTESSSLHSACVHDSTVHSRVFQILYRNEEVPINDAVVFRVHLLLGGERMEDALSEVDFQLKVDLHFTDSEQQLRDVAGAPMVSSRTLGLHFHPRNGLHHQVPVMFDYFHLSVISVTVHAALVALQQPLISFTRPGRGSWLGKGGPDTGQEQSIISLENLVFGAGYCKPTSSEGSFYITSENCMQHAHKWHRDLCLLLLHAYRGLRLHFLVIMRDIPELPHTELEALAVEETLSQLCSELQMLNNPEKIAEQISKDLAWLTSHMMTLWTQFLDTVTLHSQVTTYLTQEHHTLRVRRFSEAFFYMEHQKLAVLTFQENLIQTHSQLSLDIRNSEYLTSMPPLPAECLDIDGDWNTLPVIFEDRYVDCPATGHNLSVYPNFDVPVTSPTIMNLKDKEDNCMVNSNLSFREDLVLSTIKPSQMDSDEEVIRCPEPGENVATQNHMDMCSESQVYISIGEFQNKAGVPEDECWTGQTSDAGTYPVADVDTSRRSPGPEDGQAPVLTYIDVKSSNKNPSRAEPLVAFNAQHESRSSRDKYGLDRTGLSKVVVGGSHQNAISSDKTTLHELSTLGKGIDQEGKMVLLSLKLTPSEPCDPLSSTLREPLDIRSSLKDSHTEEQEELSVLSGVIKRSSSIISDSGIESEPSSVAWSEARSRALELPSDREVLHPFVRRHALHRNSLEGGHTESNTSLPSGIQASLTSISSLPFEEDEREVALTKLTKSVSAPHISSPEEAAEDADTKQQDGGFAEPSDMHSKSQGSPGSCSQLCGDSGTDAGADHPLVEIVLDADNQQGPGYIDIPKGKGKQFDAQGHCLPDGRTENTPGVETKGLNLKIPRVIALENPRTRSLHRALEETPKGMPKDLNVGQQALSNSGISEVEGLSQHQVPELSCTSAADAINRNSTGQQSQSGSPCIMDDTAFNRGVNAFPEAKHKAGTVCPTVTHSVHSQVLKNQELKAGTSIMGSHLTSAETFTLDSLKAVEVVNLSVSCTATCLPFSSVPKETPARAGFSSKQTLFPITHQPLGSFGVVSTHSSTLDEEVSERMFRGRGRKFGRWNSPGCLCPWPGWEQCRPPAGKDFHRTGAPWRKTGLPNV

SEQ ID NO: 2553 - protein, 682 aa, Homo sapiens
MPSLRTRREEAEMELSVPGPSPWTPAAQARVRDAPAVTHPGSAACGTPCCSDTELEAICPHYQQPDCDTRTEDKEFLHKEDIHEDLESQAEISENYAGDVSQVPELGDLCDDVSERDWGVPEGRRLPQSLSQEGDFTPAAMGLLRGPLGEKDLDCNGFDSRFSLSPNLMACQEIPTEERPHPYDMGGQSFQHSVDLTGHEGVPTAESPLICNECGKTFQGNPDLIQRQIVHTGEASFMCDDCGKTFSQNSVLKNRHRSHMSEKAYQCSECGKAFRGHSDFSRHQSHHSSERPYMCNECGKAFSQNSSLKKHQKSHMSEKPYECNECGKAFRRSSNLIQHQRIHSGEKPYVCSECGKAFRRSSNLIKHHRTHTGEKPFECGECGKAFSQSAHLRKHQRVHTGEKPYECNDCGKPFSRVSNLIKHHRVHTGEKPYKCSDCGKAFSQSSSLIQHRRIHTGEKPHVCNVCGKAFSYSSVLRKHQIIHTGEKPYRCSVCGKAFSHSSALIQHQGVHTGDKPYACHECGKTFGRSSNLILHQRVHTGEKPYECTECGKTFSQSSTLIQHQRIHNGLKPHECNQCGKAFNRSSNLIHHQKVHTGEKPYTCVECGKGFSQSSHLIQHQIIHTGERPYKCSECGKAFSQRSVLIQHQRIHTGVKPYDCAACGKAFSQRSKLIKHQLIHTRE

SEQ ID NO: 2554 - protein, 1083 aa, Homo sapiens
MSQTQDYECRSHNVDLPESRIPGSNTRLEWVEIIEPRTRERMYANLVTGECVWDPPAGVRIKRTSENQWWELFDPNTSRFYYYNASTQRTVWHRPQGCDIIPLAKLQTLKQNTESPRASAESSPGRGSSVSREGSTSSSLEPEPDTEKAQELPARAGRPAAFGTVKEDSGSSSPPGVFLEKDYEIYRDYSADGQLLHYRTSSLRWNSGAKERMLIKVADREPSFLAAQGNGYAPDGPPGVRSRRPSGSQHSPSLQTFAPEADGTIFFPERRPSPFLKRAELPGSSSPLLAQPRKPSGDSQPSSPRYGYEPPLYEEPPVEYQAPIYDEPPMDVQFEAGGGYQAGSPQRSPGRKPRPFLQPNKQGPPSPCQQLVLTKQKCPERFLSLEYSPAGKEYVRQLVYVEQAGSSPKLRAGPRHKYAPNPGGGSYSLQPSPCLLRDQRLGVKSGDYSTMEGPELRHSQPPTPLPQAQEDAMSWSSQQDTLSSTGYSPGTRKRKSRKPSLCQATSATPTEGPGDLLVEQPLAEEQPPCGTSLAPVKRAEGEAEGARGAAEPFLAQARLAWEAQQAHFHMKQRSSWDSQQDGSGYESDGALPLPMPGPVVRAFSEDEALAQQENRHWRRGTFEKLGFPQILLEKSVSVQTNLASPEPYLHPSQSEDLAACAQFESSRQSRSGVPSSSCVFPTFTLRKPSSETDIENWASKHFNKHTQGLFRRKVSIANMLAWSSESIKKPMIVTSDRHVKKEACELFKLIQMYMGDRRAKADPLHVALEVATKGWSVQGLRDELYIQLCRQTTENFRLESLARGWELMAICLAFFPPTPKFHSYLEGYIYRHMDPVNDTKGVAISTYAKYCYHKLQKAALTGAKKGLKKPNVEEIRHAKNAVFSPSMFGSALQEVMGMQRERYPERQLPWVQTRLSEEVLALNGDQTEGIFRVPGDIDEVNALKLQVDQWKVPTGLEDPHVPASLLKLWYRELEEPLIPHEFYEQCIAHYDSPEAAVAVVHALPRINRMVLCYLIRFLQVFVQPANVAVTKMDVSNLAMVMAPNCLRCQSDDPRVIFENTRKEMSFLRVLIQHLDTSFMEGVL

SEQ ID NO: 2555 - protein, 622 aa, Homo sapiens
MVDVVGLERETGPRGSPWPGLPLPSLVGPAPLLTCLCPQCLSVEDALGLGEPEGSGLPPGPVLEARYVARLSAAAVLYLSNPEGTCEDARAGLWASHADHLLALLESPKALTPGLSWLLQRMQARAAGQTPKMACVDIPQLLEEAVGAGAPGSAGGVLAALLDHVRSGSCFHALPSPQYFVDFVFQQHSSEVPMTLAELSALMQRLGVGREAHSDHSHRHRGASSRDPVPLISSSNSSSVWDTVCLSARDVMAAYGLSEQAGVTPEAWAQLSPALLQQQLSGACTSQSRPPVQDQLSQSERYLYGSLATLLICLCAVFGLLLLTCTGCRGVTHYILQTFLSLAVGAVTGDAVLHLTPKVLGLHTHSEEGLSPQPTWRLLAMLAGLYAFFLFENLFNLLLPRDPEDLEDGPCGHSSHSHGGHSHGVSLQLAPSELRQPKPPHEGSRADLVAEESPELLNPEPRRLSPELRLLPYMITLGDAVHNFADGLAVGAAFASSWKTGLATSLAVFCHELPHELGDFAALLHAGLSVRQALLLNLASALTAFAGLYVALAVGVSEESEAWILAVATGLFLYVALCDMLPAMLKVRDPRPWLLFLLHNVGLLGGWTVLLLLSLYEDDITF

SEQ ID NO: 2556 - protein, 802 aa, Homo sapiens
MWIQVRTIDGSKTCTIEDVSRKATIEELRERVWALFDVRPECQRLFYRGKQLENGYTLFDYDVGLNDIIQLLVRPDPDHLPGTSTQIEAKPCSNSPPKVKKAPRVGPSNQPSTSARARLIDPGFGIYKVNELVDARDVGLGAWFEAHIHSVTRASDGQSRGKTPLKNGSSCKRTNGNIKHKSKENTNKLDSVPSTSNSDCVAADEDVIYHIQYDEYPESGTLEMNVKDLRPRARTILKWNELNVGDVVMVNYNVESPGQRGFWFDAEITTLKTISRTKKELRVKIFLGGSEGTLNDCKIISVDEIFKIERPGAHPLSFADGKFLRRNDPECDLCGGDPEKKCHSCSCRVCGGKHEPNMQLLCDECNVAYHIYCLNPPLDKVPEEEYWYCPSCKTDSSEVVKAGERLKMSKKKAKMPSASTESRRDWGRGMACVGRTRECTIVPSNHYGPIPGIPVGSTWRFRVQVSEAGVHRPHVGGIHGRSNDGAYSLVLAGGFADEVDRGDEFTYTGSGGKNLAGNKRIGAPSADQTLTNMNRALALNCDAPLDDKIGAESRNWRAGKPVRVIRSFKGRKISKYAPEEGNRYDGIYKVVKYWPEISSSHGFLVWRYLLRRDDVEPAPWTSEGIERSRRLCLRLQYPAGYPSDKEGKKPKGQSKKQPSGTTKRPISDDDCPSASKVYKASDSAEAIEAFQLTPQQQHLIREDCQNQKLWDEVLSHLVEGPNFLKKLEQSFMCVCCQELVYQPVTTECFHNVCKDCLQRSFKAQVFSCPACRHDLGQNYIMIPNEILQTLLDLFFPGYSKGR

SEQ ID NO: 2557 - protein, 683 aa, Homo sapiens
MECCRRATPGTLLLFLAFLLLSSRTARSEEDRDGLWDAWGPWSECSRTCGGGASYSLRRCLSSKSCEGRNIRYRTCSNVDCPPEAGDFRAQQCSAHNDVKHHGQFYEWLPVSNDPDNPCSLKCQAKGTTLVVELAPKVLDGTRCYTESLDMCISGLCQIVGCDHQLGSTVKEDNCGVCNGDGSTCRLVRGQYKSQLSATKSDDTVVAIPYGSRHIRLVLKGPDHLYLETKTLQGTKGENSLSSTGTFLVDNSSVDFQKFPDKEILRMAGPLTADFIVKIRNSGSADSTVQFIFYQPIIHRWRETDFFPCSATCGGGYQLTSAECYDLRSNRVVADQYCHYYPENIKPKPKLQECNLDPCPASDGYKQIMPYDLYHPLPRWEATPWTACSSSCGGGIQSRAVSCVEEDIQGHVTSVEEWKCMYTPKMPIAQPCNIFDCPKWLAQEWSPCTVTCGQGLRYRVVLCIDHRGMHTGGCSPKTKPHIKEECIVPTPCYKPKEKLPVEAKLPWFKQAQELEEGAAVSEEPSFIPEAWSACTVTCGVGTQVRIVRCQVLLSFSQSVADLPIDECEGPKPASQRACYAGPCSGEIPEFNPDETDGLFGGLQDFDELYDWEYEGFTKCSESCGGGVQEAVVSCLNKQTREPAEENLCVTSRRPPQLLKSCNLDPCPARSSIDSAWNACNVLC

SEQ ID NO: 2558 - protein, 705 aa, Homo sapiens
MIDSVKLRRDSAADFFSHYEYLCALQNSVPLPAVRACLREGVLDFNADRLRGVDWAPLLSTLKINKDLPLVSIKSFFQPWLGDTGSDMNKFCRSRVPAIRYKDVTFQLCKALKGCLSISSVLKNLELNGLILRERDLTILAKGLNKSASLVHLSLANCPIGDGGLEIICQGIKSSITLKTVNFTGCNLTWQGADHMAKILKYQTMRRHEETWAESLRYRRPDLDCMAGLRRITLNCNTLIGDLGACAFADSLSEDLWLRALDLQQCGLTNEGAKALLEALETNTTLVVLDIRKNPLIDHSMMKAVIKKVLQNGRSAKSEYQWITSPSVKEPSKTAKQKRRTIILGSGHKGKATIRIGLATKKPVSSGRKHSLGKEYYAPAPLPPGVSGFLPWRTAERAKRHRGFPLIKTRDICNQLQQPGFPVTVTVESPSSSEVEEVDDSSESVHEVPEKTSIEQEALQEKLEECLKQLKEERVIRLKVDKRVSELEHENAQLRNINFSLSEALHAQSLTNMILDDEGVLGSIENSFQKFHAFLDLLKDAGLGQLATMAGIDQSDFQLLGHPQMTSTVSNPPKEEKKALEDEKPEPKQNALGQMQNIQFQKITGDARIPLPLDSFPVPVSTPEGLGTSSNNLGVPATEQRQESFEGFIARMCSPSPDATSGTGSQRKEEELSRNSRSSSEKKTKTGEYTKKHSDKQHPGKDLHS

SEQ ID NO: 2559 - protein, 784 aa, Homo sapiens
MGNEHISVHPENSDCIQADVNSDDYKGDKVYHPETGRKNEKEKVGRKGKHLLTVDQKRGEHVVCGSTRNNESESTLDLEGFQNPTAKECEGLATLDNKADLDGESTEGTEELEDSLNHFTHSVQGQTSEMIPSDEEEEDDEEEEEEEEPRLTINQREDEDGMANEDELDNTYTGSGDEDALSEEDDELGEAAKYEDVKECGKHVERALLVELNKISLKEENVCEEKNSPVDQSDFFYEFSKLIFTKGKSPTVVCSLCKREGHLKKDCPEDFKRIQLEPLPPLTPKFLNILDQVCIQCYKDFSPTIIEDQAREHIRQNLESFIRQDFPGTKLSLFGSSKNGFGFKQSDLDVCMTINGLETAEGLDCVRTIEELARVLRKHSGLRNILPITTAKVPIVKFFHLRSGLEVDISLYNTLALHNTRLLSAYSAIDPRVKYLCYTMKVFTKMCDIGDASRGSLSSYAYTLMVLYFLQQRNPPVIPVLQEIYKGEKKPEIFVDGWNIYFFDQIDELPTYWSECGKNTESVGQLWLGLLRFYTEEFDFKEHVISIRRKSLLTTFKKQWTSKYIVIEDPFDLNHNLGAGLSRKMTNFIMKAFINGRRVFGIPVKGFPKDYPSKMEYFFDPDVLTEGELAPNDRCCRICGKIGHFMKDCPMRRKVRRRRDQEDALNQRYPENKEKRSKEDKEIHNKYTEREVSTKEDKPIQCTPQKAKPMRAAADLGREKILRPPVEKWKRQDDKDLREKRCFICGREGHIKKECPQFKGSSGSLSSKYMTQGKASAKRTQQES

SEQ ID NO: 2560 - protein, 1118 aa, Homo sapiens
MGVQGFQDYIEKHCPSAVVPVELQKLARGSLVGGGRQRPPQTPLRLLVDADNCLHRLYGGFYTDWVSGGQWNHMLGYLAALAKACFGGNIELFVFFNGALEKARLHEWVKRQGNERQTAQQIVSHVQNKGTPPPKVWFLPPVCMAHCIRLALIRFHVKVAQSIEDHHQEVIGFCRENGFHGLVAYDSDYALCNIPYYFSAHALKLSRNGKSLTTSQYLMHEVAKQLDLNPNRFPIFAALLGNHILPDEDLASFHWSLLGPEHPLASLKVRAHQLVLPPCDVVIKAVADYVRNIQDTSDLDAIAKDVFQHSQSRTDDKVIRFKRAIGYYSATSKPMSFHPPHYLAARPGPFGMPGMVPPHVPPQMLNIPQTSLQAKPVAPQVPSPGGAPGQGPYPYSLSEPAPLTLDTSGKNLTEQNSYSNIPHEGKHTPLYERSSPINPAQSGSPNHVDSAYFPGSSTSSSSDNDEGSGGATNHISGNKIGWEKTGSHSEPQARGDPGDQTKAEGSSTASSGSQLAEGKGSQMGTVQPIPCLLSMPTRNHMDITTPPLPPVAPEVLRVAEHRHKKGLMYPYIFHVLTKGEIKIAVSIEDEANKDLPPAALLYRPVRQYVYGVLFSLAESRKKTERLAFRKNRLPPEFSPVIIKEWAAYKGKSPQTPELVEALAFREWTCPNLKRLWLGKAVEDKNRRMRAFLACMRSDTPAMLNPANVPTHLMVLCCVLRYMVQWPGARILRRQELDAFLAQALSPKLYEPDQLQELKIENLDPRGIQLSALFMSGVDMALFANDACGQPIPWEHCCPWMYFDGKLFQSKLLKASREKTPLIDLCDGQADQAAKVEKMRQSVLEGLSFSRQSHTLPFPPPPALPFYPASAYPRHFGPVPPSQGRGRGFAGVCGFGGPYGETVATGPYRAFRVAAASGHCGAFSGSDSSRTSKSQGGVQPIPSQGGKLEIAGTVVGHWAGSRRGRGGRGPFPLQVVSVGGPARGRPRGVISTPVIRTFGRGGRYYGRGYKNQAAIQGRPPYAASAEEVAKELKSKSGESKSSAMSSDGSLAENGVMAEEKPAPQMNGSTGDARAPSHSESALNNDSKTCNTNPHLNALSTDSACRREAALEAAVLNKEE

SEQ ID NO: 2561 - protein, 318 aa, Homo sapiens
MDKINQTFVREFILLGLSGYPKLEIIFFALILVMYVVILIGNGVLIIASILDSRLHMPMYFFLGNLSFLDICYTTSSIPSTLVSLISKKRNISFSGCAVQMFFGFAMGSTECFLLGMMAFDRYVAICNPLRYPIIMNKVVYVLLTSVSWLSGGINSTVQTSLAMRWPFCGNNIINHFLCEILAVLKLACSDISVNIVTLAVSNIAFLVLPLLVIFFSYMFILYTILRTNSATGRHKAFSTCSAHLTVVIIFYGTIFFMYAKPKSQDLLGKDNLQATEGLVSMFYGVVTPMLNPIIYSLRNKDVKAAIKYLLSRKAINQ

SEQ ID NO: 2562 - protein, 2506 aa, Homo sapiens
MEVLQCDGCDFRAPSYEDLKAHIQDVHTAFLQPTDVAEDNVNELRCGSVNASNQTEVEFSSIKDEFAIAEDLSGQNATSLGTGGYYGHSPGYYGQHIAANPKPTNKFFQCKFCVRYFRSKNLLIEHTRKVHGAQAEGSSSGPPVPGSLNYNIMMHEGFGKVFSCQFCTYKSPRRARIIKHQKMYHKNNLKETTAPPPAPAPMPDPVVPPVSLQDPCKELPAEVVERSILESMVKPLTKSRGNFCCEWCSYQTPRRERWCDHMMKKHRSMVKILSSLRQQQEGTNLPDVPNKSAPSPTSNSTYLTMNAASREIPNTTVSNFRGSMGNSIMRPNSSASKFSPMSYPQMKPKSPHNSGLVNLTERSRYGMTDMTNSSADLETNSMLNDSSSDEELNEIDSENGLSAMDHQTSGLSAEQLMGSDGNKLLETKGIPFRRFMNRFQCPFCPFLTMHRRSISRHIENIHLSGKTAVYKCDECPFTCKSSLKLGAHKQCHTGTTSDWDAVNSQSESISSSLNEGVVSYESSSINGRKSGVMLDPLQQQQPPQPPPPPPPPPPSQPQPLQQPQPPQLQPPHQVPPQPQTQPPPTQQPQPPTQAAPLHPYKCTMCNYSTTTLKGLRVHQQHKHSFCDNLPKFEGQPSSLPLENETDSHPSSSNTVKKSQTSILGLSSKNNFVAKASRKLANDFPLDLSPVKKRTRIDEIASNLQSKINQTKQQEDAVINVEDDEEEEEDNEVEIEVELDREEEPTEPIIEVPTSFSAQQIWVRDTSEPQKEPNFRNITHDYNATNGAEIELTLSEDEEDYYGSSTNLKDHQVSNTALLNTQTPIYGTEHNSENTDFGDSGRLYYCKHCDFNNKSARSVSTHYQRMHPYIKFSFRYILDPNDHSAVYRCLECYIDYTNFEDLQQHYGEHHPEAMNVLNFDHSDLIYRCRFCSYTSPNVRSLMPHYQRMHPTVKINNAMIFSSYVVEQQEGLNTESQTLREILNSAPKNMATSTPVARGGGLPATFNKNTPKTFTPECENQKDPLVNTVVVYDCDVCSFASPNMHSVLVHYQKKHPEEKASYFRIQKTMRMVSVDRGSALSQLSFEVGAPMSPKMSNMGSPPPPQPPPPDLSTELYYCKHCSYSNRSVVGVLVHYQKRHPEIKVTAKYIRQAPPTAAMMRGVEGPQGSPRPPAPIQQLNRSSSERDGPPVENEMFFCQHCDYGNRTVKGVLIHYQKKHRDFKANADVIRQHTATIRSLCDRNQKKPASCVLVSPSNLERDKTKLRALKCRQCSYTSPYFYALRKHIKKDHPALKATVTSIMRWAFLDGLIEAGYHCEWCIYSHTEPNGLLLHYQRRHPEHYVDYTYMATKLWAGPDPSPPSLTMPAEAKTYRCRDCVFEAVSIWDITNHYQAFHPWAMNGDESVLLDIIKEKDAVEKPILSSEELAGPVNCENSIPTPFPEQEAECPEDARLSPEKSLQLASANPAISSTPYQCTVCQSEYNNLHGLLTHYGKKHPGMKVKAADFAQDIDINPGAVYKCRHCPYINTRIHGVLTHYQKRHPSIKVTAEDFVHDVEQSADISQNDVEETSRIFKQGYGAYRCKLCPYTHGTLEKLKIHYEKYHNQPEFDVFSQSPPKLPVPLEPEMTTEVSPSQVSITEEEVGEEPVSTSHFSTSHLVSHTVFRCQLCKYFCSTRKGIARHYRIKHNNVRAQPEGKNNLFKCALCAYTNPIRKGLAAHYQKRHDIDAYYTHCLAASRTISDKPNKVIIPSPPKDDSPQLSEELRRAVEKKKCSLCSFQSFSKKGIVSHYMKRHPGVFPKKQHASKLGGYFTAVYADEHEKPTLMEEEERGNFEKAEVEGEAQEIEWLPFRCIKCFKLSFSTAELLCMHYTDHHSRDLKRDFIILGNGPRLQNSTYQCKHCDSKLQSTAELTSHLNIHNEEFQKRAKRQERRKQLLSKQKYADGAFADFKQERPFGHLEEVPKIKERKVVGYKCKFCVEVHPTLRAICNHLRKHVQYGNVPAVSAAVKGLRSHERSHLALAMFTREDKYSCQYCSFVSAFRHNLDRHMQTHHGHHKPFRCKLCSFKSSYNSRLKTHILKAHAGEHAYKCSWCSFSTMTISQLKEHSLKVHGKALTLPRPRIVSLLSSHSHHSSQKATPAEEVEDSNDSSYSEPPDVQQQLNHYQSAALARNNSRVSPVPLSGAAAGTEQKTEAVLHCEFCEFSSGYIQSIRRHYRDKHGGKKLFKCKDCSFYTGFKSAFTMHVEAGHSAVPEEGPKDLRCPLCLYHTKYKRNMIDHIVLHREERVVPIEVCRSKLSKYLQGVVFRCDKCTFTCSSDESLQQHIEKHNELKPYKCQLCYYETKHTEELDSHLRDEHKVSRNFELVGRVNLDQLEQMKEKMESSSSDDEDKEEEMNSKAEDRELMRFSDHGAALNTEKRFPCEFCGRAFSQGSEWERHVLRHGMALNDTKQVSREEIHPKEIMENSVKMPSIEEKEDDEAIGIDFSLKNETVAICVVTADKSLLENAEAKKE

SEQ ID NO: 2563 - protein, 421 aa, Homo sapiens
MPFLHGFRRIIFEYQPLVDAILGSLGIQDPERQESLDRPSYVASEESRILVLTELLERKAHSPFYQEGVSNALLKMAELGLTRAADVLLRHGANLNFEDPVTYYTALHIAVLRNQPDMVELLVHHGADVNRRDRIHESSPLDLASEEPERLPCLQRLLDLGADVNAADKHGKTALLHALASSDGVQIHNTENIRLLLEGGADVKATTKDGDTVFTCIIFLLGETVGGDKEEAQMINRFCFQVTRLLLAHGADPSECPAHESLTHICLKSFKLHFPLLRFLLESGAAYNCSLHGASCWSGFHIIFERLCSHPGCTEDESHADLLRKAETVLDLMVTNSQKLQLPENFDIHPVGSLAEKIQALHFSLRQLESYPPPLKHLCRVAIRLYLQPWPVDVKVKALPLPDRLKWYLLSEHSGSVEDDI

SEQ ID NO: 2564 - protein, 870 aa, Homo sapiens
MFSQQQQQQLQQQQQQLQQLQQQQLQQQQLQQQQLLQLQQLLQQSPPQAPLPMAVSRGLPPQQPQQPLLNLQGTNSASLLNGSMLQRALLLQQLQGLDQFAMPPATYDTAGLTMPTATLGNLRGYGMASPGLAAPSLTPPQLATPNLQQFFPQATRQSLLGPPPVGVPMNPSQFNLSGRNPQKQARTSSSTTPNRKDSSSQTMPVEDKSDPPEGSEEAAEPRMDTPEDQDLPPCPEDIAKEKRTPAPEPEPCEASELPAKRLRSSEEPTEKEPPGQLQVKAQPQARMTVPKQTQTPDLLPEALEAQVLPRFQPRVLQVQAQVQSQTQPRIPSTDTQVQPKLQKQAQTQTSPEHLVLQQKQVQPQLQQEAEPQKQVQPQVQPQAHSQGPRQVQLQQEAEPLKQVQPQVHTQAQPSVQPQEHPPAQVSVQPPEQTHEQPHTQPQVSLLAPEQTPVVVHVCGLEMPPDAVEAGGGMEKTLPEPVGTQVSMEEIQNESACGLDVGECENRAREMPGVWGAGGSLKVTILQSSDSRAFSTVPLTPVPRPSDSVSSTPAATSTPSKQALQFFCYICKASCSSQQEFQDHMSEPQHQQRLGEIQHMSQACLLSLLPVPRDVLETEDEEPPPRRWCNTCQLYYMGDLIQHRRTQDHKIAKQSLRPFCTVCNRYFKTPRKFVEHVKSQGHKDKAKELKSLEKEIAGQDEDHFITVDAVGCFEGDEEEEEDDEDEEEIEVEEELCKQVRSRDISREEWKGSETYSPNTAYGVDFLVPVMGYICRICHKFYHSNSGAQLSHCKSLGHFENLQKYKAAKNPSPTTRPVSRRCAINARNALTALFTSSGRPPSQPNTQDKTPSKVTARPSQPPLPRRSTRLKT

SEQ ID NO: 2565 - protein, 227 aa, Homo sapiens
MSDINLDWVDRRQLQRLEEMLIVVDENDKVIGADTKRNCHLNENIEKGLLHRAFSVVLFNTKNRILIQQRSDTKVTFPGYFTDSCSSHPLYNPAELEEKDAIGVRRAAQRRLQAELGIPGEQISPEDIVFMTIYHHKAKSDRIWGEHEICYLLLVRKNVTLNPDPSETKSILYLSQEELWELLEREARGEVKVTPWLRTIAERFLYRWWPHLDDVTPFVELHKIHRV

SEQ ID NO: 2566 - protein, 1317 aa, Homo sapiens
MEEEKDDSPQLTGIAVGALLALALVGVLILFMFRRLRQFRQAQPTPQYRFRKRDKVMFYGRKIMRKVTTLPNTLVENTALPRQRARKRTKVLSLAKRILRFKKEYPALQPKEPPPSLLEADLTEFDVKNSHLPSEVLYMLKNVRVLGHFEKPLFLELCKHIVFVQLQEGEHVFQPREPDPSICVVQDGRLEVCIQDTDGTEVVVKEVLAGDSVHSLLSILDIITGHAAPYKTVSVRAAIPSTILRLPAAAFHGVFEKYPETLVRVVQIIMVRLQRVTFLALHNYLGLTTELFNAESQAIPLVSVASVAAGKAKKQVFYGEEERLKKPPRLQESCDSDHGGGRPAAAGPLLKRSHSVPAPSIRKQILEELEKPGAGDPDPSAPQGGPGSATSDLGMACDRARVFLHSDEHPGSSVASKSRKSVMVAEIPSTVSQHSESHTDETLASRKSDAIFRAAKKDLLTLMKLEDSSLLDGRVALLHVPAGTVVSRQGDQDASILFVVSGLLHVYQRKIGSQEDTCLFLTRPGEMVGQLAVLTGEPLIFTVKANRDCSFLSISKAHFYEIMRKQPTVVLGVAHTVVKRMSSFVRQIDFALDWVEVEAGRAIYRQGDKSDCTYIMLSGRLRSVIRKDDGKKRLAGEYGRGDLVGVVETLTHQARATTVHAVRDSELAKLPAGALTSIKRRYPQVVTRLIHLLGEKILGSLQQGPVTGHQLGLPTEGSKWDLGNPAVNLSTVAVMPVSEEVPLTAFALELEHALSAIGPTLLLTSDNIKRRLGSAALDSVHEYRLSSWLGQQEDTHRIVLYQADGTLTPWTQRCVRQADCILIVGLGDQEPTVGELERMLESTAVRAQKQLILLHREEGPAPARTVEWLNMRSWCSGHLHLCCPRRVFSRRSLPKLVEMYKHVFQRPPDRHSDFSRLARVLTGNAIALVLGGGGARGCAQVGVLKALAECGIPVDMVGGTSIGAFVGALYSEERNYSQMRIRAKQWAEGMTSLMKAALDLTYPITSMFSGAGFNSSIFSVFKDQQIEDLWIPYFAITTDITASAMRVHTDGSLWWYVRASMSLSGYMPPLCDPKDGHLLMDGGYINNLPADVARSMGAKVVIAIDVGSRDETDLTNYGDALSGWWLLWKRWNPLATKVKVLNMAEIQTRLAYVCCVRQLEVVKSSDYCEYLRPPIDSYSTLDFGKFNEICEVGYQHGRTVFDIWGRSGVLEKMLRDQQGPSKKPASAVLTCPNASFTDLAEIVSRIEPAKPAMVDDESDYQTEYEEELLDVPRDAYADFQSTSAQQGSDLEDESSLRHRHPSLAFPKLSEGSSDQDG

SEQ ID NO: 2567 - protein, 751 aa, Homo sapiens
PAAAASSLERETERFRELLLYGRKKDALESAMKNGLWGHALLLASKMDSRTHARVMTRFANSLPINDPLQTVYQLMSGRMPAASTCCGDEKWGDWRPHLAMVLSNLNNNMDVESRTMATMGDTLASRGLLDAAHFCYLMAQAGFGVYTKKTTKLVLIGSNHSLPFLKFATNEAIQRTEAYEYAQSLGAETCPLPSFQVFKFIYSCRLAEMGLATQAFHYCEAIAKSILTQPHLYSPVLISQLVQMASQLRLFDPQLKEKPEEESLAAPTWLVHLQQVERQIKEGAGVWHQDGALPQQCPGTPSSEMEQLDRPGLSQPGALGIANPLLAVPAPSPEHSSPSVRLLPSAPQTLPDGPLASPARVPMFPVPLPPGPLEPGPGCVTPGPALGFLEPSGPGLPPGVPPLQERRHLLQEARSPDPGIVPQEAPVGNSLSELSEENFDGKFANLTPSRTVPDSEAPPGWDRADSGPTQPPLSLSPAPETKRPGQAAKKETKEPKKGESWFFRWLPGKKKTEAYLPDDKNKSIVWDEKKNQWVNLNEPEEEKKAPPPPPTSMPKTVQAAPPALPGPPGAPVNMYSRRAAGTRARYVDVLNPSGTQRSEPALAPADFVAPLAPLPIPSNLFVPTPDAEEPQLPDGTGREGPAAARGLANPEPAPEPKVLSSAASLPGSELPSSRPEGSQGGELSRCSSMSSLSREVSQHFNQAPGDLPAAGGPPSGAMPFYNPAQLAQACATSGSSRLGRIGQRKHLVLN

SEQ ID NO: 2568 - protein, 2237 aa, Homo sapiens [sequence omitted]

SEQ ID NO: 2569 - protein, 2237 aa, Homo sapiens
MVRFGDELGGRYGGPGGGERARGGGAGGAGGPGPGGLQPGQRVLYKQSIAQRARTMALYNPIPVKQNCFTVNRSLFVFSEDNVVRKYAKRITEWPPFEYMILATIIANCIVLALEQHLPDGDKTPMSERLDDTEPYFIGIFCFEAGIKIIALGFVFHKGSYLRNGWNVMDFVVVLTGILATAGTDFDLRTLRAVRVLRPLKLVSGIPSLQVVLKSIMKAMVPLLQIGLLLFFAILMFAIIGLEFYMGKFHKACFPNSTDAEPVGDFPCGKEAPARLCEGDTECREYWPGPNFGITNFDNILFAILTVFQCITMEGWTDILYNTNDAAGNTWNWLYFIPLIIIGSFFMLNLVLGVLSGEFAKERERVENRRAFLKLRRQQQIERELNGYLEWIFKAEEVMLAEEDRNAEEKSPLDVLKRAATKKSRNDLIHAEEGEDRFADLCAVGSPFARASLKSGKTESSSYFRRKEKMFRFFIRRMVKAQSFYWVVLCVVALNTLCVAMVHYNQPRRLTTTLYFAEFVFLGLFLTEMSLKMYGLGPRSYFRSSFNCFDFGVIVGSVFEVVWAAIKPGSSFGISVLRALRLLRIFKVTKYWSSLRNLVVSLLNSMKSIISLLFLLFLFIVVFALLGMQLFGGQFNFQDETPTTNFDTFPAAILTVFQILTGEDWNAVMYHGIESQGGVSKGMFSSFYFIVLTLFGNYTLLNVFLAIAVDNLANAQELTKDEEEMEEAANQKLALQKAKEVAEVSPMSAANISIAARQQNSAKARSVWEQRASQLRLQNLRASCEALYSEMDPEERLRFATTRHLRPDMKTHLDRPLVVELGRDGARGPVGGKARPEAAEAPEGVDPPRRHHRHRDKDKTPAAGDQDRAEAPKAESGEPGAREERPRPHRSHSKEAAGPPEARSERGRGPGPEGGRRHHRRGSPEEAAEREPRRHRAHRHQDPSKECAGAKGERRARHRGGPRAGPREAESGEEPARRHRARHKAQPAHEAVEKETTEKEATEKEAEIVEADKEKELRNHQPREPHCDLETSGTVTVGPMHTLPSTCLQKVEEQPEDADNQRNVTRMGSQPPDPNTIVHIPVMLTGPLGEATVVPSGNVDLESQAEGKKEVEADDVMRSGPRPIVPYSSMFCLSPTNLLRRFCHYIVTMRYFEVVILVVIALSSIALAAEDPVRTDSPRNNALKYLDYIFTGVFTFEMVIKMIDLGLLLHPGAYFRDLWNILDFIVVSGALVAFAFSGSKGKDINTIKSLRVLRVLRPLKTIKRLPKLKAVFDCVVNSLKNVLNILIVYMLFMFIFAVIAVQLFKGKFFYCTDESKELERDCRGQYLDYEKEEVEAQPRQWKKYDFHYDNVLWALLTLFTVSTGEGWPMVLKHSVDATYEEQGPSPGYRMELSIFYVVYFVVFPFFFVNIFVALIIITFQEQGDKVMSECSLEKNERACIDFAISAKPLTRYMPQNRQSFQYKTWTFVVSPPFEYFIMAMIALNTVVLMMKFYDAPYEYELMLKCLNIVFTSMFSMECVLKIIAFGVLNYFRDAWNVFDFVTVLGSITDILVTEIAETNNFINLSFLRLFRAARLIKLLRQGYTIRILLWTFVQSFKALPYVCLLIAMLFFIYAIIGMQVFGNIALDDDTSINRHNNFRTFLQALMLLFRSATGEAWHEIMLSCLSNQACDEQANATECGSDFAYFYFVSFIFLCSFLMLNLFVAVIMDNFEYLTRDSSILGPHHLDEFIRVWAEYDPAACGRISYNDMFEMLKHMSPPLGLGKKCPARVAYKRLVRMNMPISNEDMTVHFTSTLMALIRTALEIKLAPAGTKQHQCDAELRKEISVVWANLPQKTLDLLVPPHKPDEMTVGKVYAALMIFDFYKQNKTTRDQMQQAPGGLSQMGPVSLFHPLKATLEQTQPAVLRGARVFLRQKSSTSLSNGGAIQNQESGIKESVSWGTQRTQDAPHEARPPLERGHSTEIPVGRSGALAVDVQMQSITRRGPDGEPQPGLESQGRAASMPRLAAETQPVTDASPMKRSISTLAQRPRGTHLCSTTPDRPPPSQASSHHHHHRCHRRRDRKQRSLEKGPSLSADMDGAPSSAVGPGLPPGEGPTGCRRERERRQERGRSQERRQPSSSSSEKQRFYSCDRFGGREPPKPKPSLSSHPTSPTAGQEPGPHPQAGSAVGFPNTTPCCRETPSASPWPLALELALTLTWGSVWTVRPLSTPCLRTLSLSRRLWPPTRAAPPGLPTCPP

SEQ ID NO: 2570 - protein, 845 aa, Homo sapiens
MRTEAVVNSQGQTDYLTKDSDQDVALKLAQERAEIVAKYDRGREGAEIEPWEDADYLVYKVTDRFGFLHEEELPDHNVAVERQKHLEIERTTKWLKMLKGWEKYKNTEKFHRRIYKGIPLQLRGEVWALLLEIPKMKEETRDLYSKLKHRARGCSPDIRQIDLDVNRTFRDHIMFRDRYGVKQQSLFHVLAAYSIYNTEVGYCQGMSQITALLLMYMNEEDAFWALVKLFSGPKHAMHGFFVQGFPKLLRFQEHHEKILNKFLSKLKQHLDSQEIYTSFYTMKWFFQCFLDRTPFTLNLRIWDIYIFEGERVLTAMSYTILKLHKKHLMKLSMEELVEFFQETLAKDFFFEDDFVIEQLQISMTELKRAKLDLPEPGKEDEYPKKPLGQLPPELQSWGVHHLSNGQRSVGRPSPLASGRRESGAPHRRHEHSPHPQSRTGTPERAQPPRRKSVEEESKKLKDEADFQRKLPSGPQDSSRQYNHAAANQNSNATSNIRKEFVPKWNKPSDVSATERTAKYTMEGKGRAAHPALAVTVPGPAEVRVSNVRPKMKALDAEDGKRGSTASQYDNVPGPELDSGASVEEALERAYSQSPRHALYPPSPRKHAEPSSSPSKVSNKFTFKVQPPSHARYPSQLDGEARGLAHPPSYSNPPVYHGNSPKHFPTANSSFASPQFSPGTQLNPSRRPHGSTLSVSASPEKSYSRPSPLVLPSSRIEVLPVDTGAGGYSGNSGSPKNGKLIIPPVDYLPDNRTWSEVSYTYRPETQGQSWTRDASRGNLPKYSAFQLAPFQDHGLPAVSVDSPVRYKASPAAEDASPSGYPYSGPPPPAYHYRNRDGLSIQESVLL

SEQ ID NO: 2571 - protein, 445 aa, Homo sapiens
MSELTKELMELVWGTKSSPGLSDTIFCRWTQGFVFSESEGSALEQFEGGPCAVIAPVQAFLLKKLLFSSEKSSWRDCSEEEQKELLCHTLCDILESACCDHSGSYCLVSWLRGKTTEETASISGSPAESSCQVEHSSALAVEELGFERFHALIQKRSFRSLPELKDAVLDQYSMWGNKFGVLLFLYSVLLTKGIENIKNEIEDASEPLIDPVYGHGSQSLINLLLTGHAVSNVWDGDRECSGMKLLGIHEQAAVGFLTLMEALRYCKVGSYLKSPKFPIWIVGSETHLTVFFAKDMALVAPEAPSEQARRVFQTYDPEDNGFIPDSLLEDVMKALDLVSDPEYINLMKNKLDPEGLGIILLGPFLQEFFPDQGSSGPESFTVYHYNGLKQSNYNEKVMYVEGTAVVMGFEDPMLQTDDTPIKRCLQTKWPYIELLWTTDRSPSLN

SEQ ID NO: 2572 - protein, 947 aa, Homo sapiens
MCVDSLVRICSGLSYGRIRNIKSLSDIQIVQVACGYYHSLALSKASEVFCWGQNKYGQLGLGTDCKKQTSPQLLKSLLGIPFMQVAAGGAHSFVLTLSGAIFGWGRNKFGQLGLNDENDRYVPNLLKSLRSQKIVYICCGEDHTAALTKEGGVFTFGAGGYGQLGHNSTSHEINPRKVFELMGSIVTEIACGRQHTSAFVPSSGRIYSFGLGGNGQLGTGSTSNRKSPFTVKGNWYPYNGQCLPDIDSEEYFCVKRIFSGGDQSFSHYSSPQNCGPPDDFRCPNPTKQIWTVNEALIQKWLSYPSGRFPVEIANEIDGTFSSSGCLNGSFLAVSNDDHYRTGTRFSGVDMNAARLLFHKLIQPDHPQISQQVAASLEKNLIPKLTSSLPDVEALRFYLTLPECPLMSDSNNFTTIAIPFGTALVNLEKAPLKVLENWWSVLEPPLFLKIVELFKEVVVHLLKLYKIGIPPSERRIFNSFLHTALKVLEILHRVNEKMGQIIQYDKFYIHEVQELIDIRNDYINWVQQQAYGMDVNHGLTELADIPVTICTYPFVFDAQAKTTLLQTDAVLQMQMAIDQAHRQNVSSLFLPVIESVNPCLILVVRRENIVGDAMEVLRKTKNIDYKKPLKVIFVGEDAVDAGGVRKEFFLLIMRELLDPKYGMFRYYEDSRLIWFSDKTFEDSDLFHLIGVICGLAIYNCTIVDLHFPLALYKKLLKKKPSLDDLKELMPDVGRSMQQLLDYPEDDIEETFCLNFTITVENFGATEVKELVLNGADTAVNKQNRQEFVDAYVDYIFNKSVASLFDAFHAGFHKVCGGKVLLLFQPNELQAMVIGNTNYDWKELEKNTEYKGEYWAEHPTIKIFWEVFHELPLEKKKQFLLFLTGSDRIPILGMKSLKLVIQSTGGGEEYLPVSHTCFNLLDLPKYTEKETLRSKLIQAIDHNEGFSLI

SEQ ID NO: 2573 - protein, 495 aa, Homo sapiens
MATTATCTRFTDDYQLFEELGKGAFSVVRRCVKKTSTQEYAAKIINTKKLSARDHQKLEREARICRLLKHPNIVRLHDSISEEGFHYLVFDLVTGGELFEDIVAREYYSEADASHCIHQILESVNHIHQHDIVHRDLKPENLLLASKCKGAAVKLADFGLAIEVQGEQQAWFGFAGTPGYLSPEVLRKDPYGKPVDIWACGVILYILLVGYPPFWDEDQHKLYQQIKAGAYDFPSPEWDTVTPEAKNLINQMLTINPAKRITADQALKHPWVCQRSTVASMMHRQETVECLRKFNARRKLKGAILTTMLVSRNFSAAKSLLNKKSDGGVKEPQTTVVHNATDGIKGSTESCNTTTEDEDLKVRKQEIIKITEQLIEAINNGDFEAYTKICDPGLTSFEPEALGNLVEGMDFHKFYFENLLSKNSKPIHTTILNPHVHVIGEDAACIAYIRLTQYIDGQGRPRTSQSEETRVWHRRDGKWLNVHYHCSGAPAAPLQ

SEQ ID NO: 2574 - protein, 558 aa, Homo sapiens
MYRYLGEALLLSRAGPAALGSASADSAALLGWARGQPAAAPQPGLALAARRHYSEAVADREDDPNFFKMVEGFFDRGASIVEDKLVEDLRTRESEEQKRNRVRGILRIIKPCNHVLSLSFPIRRDDGSWEVIEGYRAQHSQHRTPCKGGIRYSTDVSVDEVKALASLMTYKCAVVDVPFGGAKAGVKINPKNYTDNELEKITRRFTMELAKKGFIGPGIDVPAPDMSTGEREMSWIADTYASTIGHYDINAHACVTGKPISQGGIHGRISATGRGVFHGIENFINEASYMSILGMTPGFGDKTFVVQGFGNVGLHSMRYLHRFGAKCIAVGESDGSIWNPDGIDPKELEDFKLQHGSILGFPKAKPYEGSILEADCDILIPAASEKQLTKSNAPRVKAKIIAEGANGPTTPEADKIFLERNIMVIPDLYLNAGGVTVSYFEWLKNLNHVSYGRLTFKYERDSNYHLLMSVQESLERKFGKHGGTIPIVPTAEFQDRISGASEKDIVHSGLAYTMERSARQIMRTAMKYNLGLDLRTAAYVNAIEKVFKVYNEAGVTFT

SEQ ID NO: 2575 - protein, 254 aa, Homo sapiens
MAVFADLDLRAGSDLKALRGLVETAAHRELPRLRAWPTSCHPDHRATLRIGYSVVAINHIVDFKEKKQEIEKPVAVSELFTTLPIVQGKSRPIKILTRLTIIVSDPSHCNVLRATSSRARLYDVVAVFPKTEKLFHIACTHLDVDLVCITVTEKLPFYFKRPPINVAIDRGLAFELVYSPAIKDSTMRRYTISSALNLMQICKGKNVIISSAAERPLEIRGPYDVANLGLLFGLSESDAKAAVSTNCRAALLHG

SEQ ID NO: 2576 - protein, 674 aa, Homo sapiens
MSSDASQGVITTPPPPSMPHKERYFDRINENDPEYIRERNMSPDLRQDFNMMEQRKRVTQILQSPAFREDLECLIQEQMKKGHNPTGLLALQQIADYIMANSFSGFSSPPLSLGMVTPINDLPGADTSSYVKGEKLTRCKLASLYRLVDLFGWAHLANTYISVRISKEQDHIIIIPRGLSFSEATASNLVKVNIIGEVVDQGSTNLKIDHTGFSPHAAIYSTRPDVKCVIHIHTLATAAVSSMKCGILPISQESLLLGDVAYYDYQGSLEEQEERIQLQKVLGPSCKVLVLRNHGVVALGETLEEAFHYIFNVQLACEIQVQALAGAGGVDNLHVLDFQKYKAFTYTVAASGGGGVNMGSHQKWKVGEIEFEGLMRTLDNLGYRTGYAYRHPLIREKPRHKSDVEIPATVTAFSFEDDTVPLSPLKYMAQRQQREKTRWLNSPNTYMKVNVPEESRNGETSPRTKITWMKAEDSSKVSGGTPIKIEDPNQFVPLNTNPNEVLEKRNKIREQNRYDLKTAGPQSQLLAGIVVDKPPSTMQFEDDDHGPPAPPNPFSHLTEGELEEYKRTIERKQQGLEENHELFSKSFISMEVPVMVVNGKDDMHDVEDELAKRVSRLSTSTTIENIEITIKSPEKIEEVLSPEGSPSKSPSKKKKKFRTPSFLKKNKKKEKVEA

SEQ ID NO: 2577 - protein, 206 aa, Homo sapiens
LTVNASMSRFPPHMVPPHHTLHTTGIPHPAIVTPTVKQESSQSDVGSLHSSKHQDSKKEEEKKKPHIKKPLNAFMLYMKEMRAKVVAECTLKESAAINQILGRRWHALSREEQAKYYELARKERQLHMQLYPGWSARDNYGKKKKRKRDKQPGETNDLSAPKKCRARFGLDQQNNWCGPCRRKKKCVRYIQGEGSCLSPPSSDGSL

SEQ ID NO: 2578 - protein, 1151 aa, Homo sapiens
MSSECDGGSKAVMNGLAPGSNGQDKATADPLRARSISAVKIIPVKTVKNASGLVLPTDMDLTKICTGKGAVTLRASSSYRETPSSSPASPQETRQHESKPGLEPEPSSADEWRLSSSADANGNAQPSSLAAKGYRSVHPNLPSDKSQDATSSSAAQPEVIVVPLYLVNTDRGQEGTARPPTPLGPLGCVPTIPATASAASPLTFPTLDDFIPPHLQRWPHHSQPARASGSFAPISQTPPSFSPPPPLVPPAPEDLRRVSEPDLTGAVSSTDSSPLLNEVSSSLIGTDSQAFPSVSKPSSAYPSTTIVNPTIVLLQHNREQQKRLSSLSDPVSERRVGEQDSAPTQEKPTSPGKAIEKRAKDDSRRVVKSTQDLSDVSMDEVGIPLRNTERSKDWYKTMFKQIHKLNRDTPEENPYFPTYKFPELPEIQQTSEETKSCSVMSPRLECSGTVIAHCSLKLLDSSNPPTSASQVAGTADDDSDLYSPRYSFSEDTKSPLSVPRSKSEMSYIDGEKVVKRSATLPLPARSSSLKSSSERNDWEPPDKKVDTRKYRAEPKSIYEYQPGKSSVLTNEKMSRDISPEEIDLKNEPWYKFFSELEFGKPPPKKIWDYTPGDCSILPREDRKTNLDKDLSLCQTELEADLEKMETLNKAPSANVPQSSAISPTPEISSETPGYIYSSNFHAVKRESDGAPGDLTSLENERQIYKSVLEGGDIPLQGLSGLKRPSSSASTKDSESPRHFIPADYLESTEEFIRRRHDDKEKLLADQRRLKREQEEADIAARRHTGVIPTHHQFITNERFGDLLNIDDTAKRKSGSEMRPARAKFDFKAQTLKELPLQKGDIVYIYKQIDQNWYEGEHHGRVGIFPRTYIELLPPAEKAQPKKLTPVQVLEYGEAIAKFNFNGDTQVEMSFRKGERITLLRQVDENWYEGRIPGTSRQGIFPITYVDVIKRPLVKNPVDYMDLPFSSSPSRSATASPQPWREESGQYERKAERGAGERGPGGPKISKKSCLKPSDVVRCLSTEQRLSDLNTPEESRPGKPLGSAFPGSEAEQTERHRGGEQAGRKAARRGGSQQPQAQQRRVTPDRSQTSQDLFSYQALYSYIPQNDDELELRDGDIVDVMEKCDDGWFVGTSRRTKQFGTFPGNYVKPLYL

SEQ ID NO: 2579 - protein, 1004 aa, Homo sapiens
MSSECDGGSKAVMNGLAPGSNGQDKATADPLRARSISAVKIIPVKTVKNASGLVLPTDMDLTKICTGKGAVTLRASSSYRETPSSSPASPQETRQHESKPDEWRLSSSADANGNAQPSSLAAKGYRSVHPNLPSDKSQDATSSSAAQPEVIVVPLYLVNTDRGQEGTARPPTPLGPLGCVPTIPATASAASPLTFPTLDDFIPPHLQRWPHHSQPARASGSFAPISQTPPSFSPPPPLVPPAPEDLRRVSEPDLTGAVSSTDSSPLLNEVSSSLIGTDSQAFPSVSKPSSAYPSTTIVNPTIVLLQHNREQQKRLSSLSDPVSERRVGEQDSAPTQEKPTSPGKAIEKRAKDDSRRVVKSTQDLSDVSMDEVGIPLRNTERSKDWYKTMFKQIHKLNRDTPEENPYFPTYKFPELPEIQQTSEDDDSDLYSPRYSFSEDTKSPLSVPRSKSEMSYIDGEKVVKRSATLPLPARSSSLKSSSERNDWEPPDKKVDTRKYRAEPKSIYEYQPGKSSVLTNEKMSRDISPEEIDLKNEPWYKFFSELEFGKPPPKKIWDYTPGDCSILPREDRKTNLDKDLSLCQTELEADLEKMETLNKAPSANVPQSSAISPTPEISSETPGYIYSSNFHAVKRESDGAPGDLTSLENERQIYKSVLEGGDIPLQGLSGLKRPSSSASTKDSESPRHFIPADYLESTEEFIRRRHDDKEKLLADQRRLKREQEEADIAARRHTGVIPTHHQFITNERFGDLLNIDDTAKRKSGSEMRPARAKFDFKAQTLKELPLQKGDIVYIYKQIDQNWYEGEHHGRVGIFPRTYIELLPPAEKAQPKKLTPVQVLEYGEAIAKFNFNGDTQVEMSFRKGERITLLRQVDENWYEGRIPGTSRQGIFPITYVDVIKRPLVKNPVDYMDLPFSSSPSRSATASPQQPQAQQRRVTPDRSQTSQDLFSYQALYSYIPQNDDELELRDGDIVDVMEKCDDGWFVGTSRRTKQFGTFPGNYVKPLYL

SEQ ID NO: 2580 - protein, 511 aa, Homo sapiens [sequence omitted]

SEQ ID NO: 2581 - protein, 940 aa, Homo sapiens
MAQGRERDEGPHSAGGASLSVRWVQGFPKQNVHFVNDNTICYPCGNYVIFINIETKKKTVLQCSNGIVGVMATNIPCEVVAFSDRKLKPLIYVYSFPGLTRRTKLKGNILLDYTLLSFSYCGTYLASYSSLPEFELALWNWESSIILCKKSQPGMDVNQMSFNPMNWRQLCLSSPSTVSVWTIERSNQEHCFRARSVKLPLEDGSFFNETDVVFPQSLPKDLIYGPVLPLSAIAGLVGKEAETFRPKDDLYPLLHPTMHCWTPTSDLYIGCEEGHLLMINGDTLQVTVLNKIEEESPLEDRRNFISPVTLVYQKEGVLASGIDGFVYSFIIKDRSYMIEDFLEIERPVEHMTFSPNYTVLLIQTDKGSVYIYTFGKEPTLNKVLDACDGKFQAIDFITPGTQYFMTLTYSGEICVWWLEDCACVSKIYLNTLATVLACCPSSLSAAVGTEDGSVYFISVYDKESPQVVHKAFLSESSVQHVVYDQQGIFLLVGTAEGKVFIINANSSSSFQIIGFTEVAKDILQISTVSLLETDIVEVMVLSSLPEAGRSRLEMFTLPTLLPQVSTTFADERGRLKDEIIHKYLYELEHALSSAVLGFQSNQIYGFCSQVPYICSYLLPEEEHTGIYILKPYKKVQSRQYGPGLLYLSSHGLWLITIAKCGILCIRDVYTLETFAWCRSHSHQGHGIQSMRISMDGQNILVNGRDDGTLVYLKWKRFGGHLASEILDYYQKLLISLSSAMDKENHYLSTTPKVSVDLGSDSEHTKQKASTDLSQDELVLTDVKKEIPWIQQKSQEAIKKEVNLFSKKRKEIKQGIKSLSKTILNMMEENDKLENIAKLDQQEFGLDLEELERLHDESQEEVAKMIKDVEMHNLAKSYLAELIKEECWNSMAVKGRALKCFHIPCVVENFPMKARTVEELKELERVLQQKKIEAECLKVLF

SEQ ID NO: 2582 - protein, 1664 aa, Homo sapiens
MAARRGRRDGVAPPPSGGPGPDPGGGARGSGWGSRSQAPYGTLGAVSGGEQVLLHEEAGDSGFVSLSRLGPSLRDKDLEMEELMLQDETLLGTMQSYMDASLISLIEDFGSLGESRLSLEDQNEVSLLTALTEILDNADSENLSPFDSIPDSELLVSPREGSSLHKLLTLSRTPPERDLITPVDPLGPSTGSSRGSGVEMSLPDPSWDFSPPSFLETSSPKLPSWRPPRSRPRWGQSPPPQQRSDGEEEEEVASFSGQILAGELDNCVSSIPDFPMHLACPEEEDKATAAEMAVPAAGDESISSLSELVRAMHPYCLPNLTHLASLEDELQEQPDDLTLPEGCVVLEIVGQAATAGDDLEIPVVVRQVSPGPRPVLLDDSLETSSALQLLMPTLESETEAAVPKVTLCSEKEGLSLNSEEKLDSACLLKPREVVEPVVPKEPQNPPANAAPGSQRARKGRKKKSKEQPAACVEGYARRLRSSSRGQSTVGTEVTSQVDNLQKQPQEELQKESGPLQGKGKPRAWARAWAAALENSSPKNLERSAGQSSPAKEGPLDLYPKLADTIQTNPIPTHLSLVDSAQASPMPVDSVEADPTAVGPVLAGPVPVDPGLVDLASTSSELVEPLPAEPVLINPVLADSAAVDPAVVPISDNLPPVDAVPSGPAPVDLALVDPVPNDLTPVDPVLVKSRPTDPRRGAVSSALGGSAPQLLVESESLDPPKTIIPEVKEVVDSLKIESGTSATTHEARPRPLSLSEYRRRRQQRQAETEERSPQPPTGKWPSLPETPTGLADIPCLVIPPAPAKKTALQRSPETPLEICLVPVGPSPASPSPEPPVSKPVASSPTEQVPSQEMPLLARPSPPVQSVSPAVPTPPSMSAALPFPAGGLGMPPSLPPPPLQPPSLPLSMGPVLPDPFTHYAPLPSWPCYPHVSPSGYPCLPPPPTVPLVSGTPGAYAVPPTCSVPWAPPPAPVSPYSSTCTYGPLGWGPGPQHAPFWSTVPPPPLPPASIGRAVPQPKMESRGTPAGPPENVLPLSMAPPLSLGLPGHGAPQTEPTKVEVKPVPASPHPKHKVSALVQSPQMKALACVSAEGVTVEEPASERLKPETQETRPREKPPLPATKAVPTPRQSTVPKLPAVHPARLRKLSFLPTPRTQGSEDVVQAFISEIGIEASDLSSLLEQFEKSEAKKECPPPAPADSLAVGNSGGVDIPQEKRPLDRLQAPELANVAGLTPPATPPHQLWKPLAAVSLLAKAKSPKSTAQEGTLKPEGVTEAKHPAAVRLQEGVHGPSRVHVGSGDHDYCVRSRTPPKKMPALVIPEVGSRWNVKRHQDITIKPVLSLGPAAPPPPCIAASREPLDHRTSSEQADPSAPCLAPSSLLSPEASPCRNDMNTRTPPEPSAKQRSMRCYRKACRSASPSSQGWQGRRGRNSRSVSSGSNRTSEASSSSSSSSSSSRSRSRSLSPPHKRWRRSSCSSSGRSRRCSSSSSSSSSSSSSSSSSSSSRSRSRSPSPRRRSDRRRRYSSYRSHDHYQRQRVLQKERAIEERRVVFIGKIPGRMTRSELKQRFSVFGEIEECTIHFRVQGDNYGFVTYRYAEEAFAAIESGHKLRQADEQPFDLCFGGRRQFCKRSYSDLDSNREDFDPAPVKSKFDSLDFDTLLKQAQKNLRR

SEQ ID NO: 2583 - protein, 475 aa, Homo sapiens
MAGRPHPYDGNSSDPENWDRKLHSRPRKLYKHSSTSSRIAKGGVDHTKMSLHGASGGHERSRDRRRSSDRSRDSSHERTESQLTPCIRNVTSPTRQHHVEREKDHSSSRPSSPRPQKASPNGSISSAGNSSRNSSQSSSDGSCKTAGEMVFVYENAKEGARNIRTSERVTLIVDNTRFVVDPSIFTAQPNTMLGRMFGSGREHNFTRPNEKGEYEVAEGIGSTVFRAILDYYKTGIIRCPDGISIPELREACDYLCISFEYSTIKCRDLSALMHELSNDGARRQFEFYLEEMILPLMVASAQSGERECHIVVLTDDDVVDWDEEYPPQMGEEYSQIIYSTKLYRFFKYIENRDVAKSVLKERGLKKIRLGIEGYPTYKEKVKKRPGGRPEVIYNYVQRPFIRMSWEKEEGKSRHVDFQCVKSKSITNLAAAAADIPQDQLVVMHPTPQVDELDILPIHPPSGNSDLDPDAQNPML

SEQ ID NO: 2584 - protein, 640 aa, Homo sapiens
MLNKMTLHPQQIMIGPRFNRALFDPLLVVLLALQLLVVAGLVRAQTCPSVCSCSNQFSKVICVRKNLREVPDGISTNTRLLNLHENQIQIIKVNSFKHLRHLEILQLSRNHIRTIEIGAFNGLANLNTLELFDNRLTTIPNGAFVYLSKLKELWLRNNPIESIPSYAFNRIPSLRRLDLGELKRLSYISEGAFEGLSNLRYLNLAMCNLREIPNLTPLIKLDELDLSGNHLSAIRPGSFQGLMHLQKLWMIQSQIQVIERNAFDNLQSLVEINLAHNNLTLLPHDLFTPLHHLERIHLHHNPWNCNCDILWLSWWIKDMAPSNTACCARCNTPPNLKGRYIGELDQNYFTCYAPVIVEPPADLNVTEGMAAELKCRASTSLTSVSWITPNGTVMTHGAYKVRIAVLSDGTLNFTNVTVQDTGMYTCMVSNSVGNTTASATLNVTAATTTPFSYFSTVTVETMEPSQDEARTTDNNVGPTPVVDWETTNVTTSLTPQSTRSTEKTFTIPVTDINSGIPGIDEVMKTTKIIIGCFVAITLMAAVMLVIFYKMRKQHHRQNHHAPTRTVEIINVDDEITGDTPMESHLPMPAIEHEHLNHYNSYKSPFNHTTTVNTINSIHSSVHEPLLIRMNSKDNVQETQI

SEQ ID NO: 2585 - protein, 488 aa, Homo sapiens
MTSPVLVDIREEVTCPICLELLTEPLSIDCGHSFCQACITPNGRESVIGQEGERSCPVCQTSYQPGNLRPNRHLANIVRRLREVVLGPGKQLKAVLCADHGEKLQLFCQEDGKVICWLCERSQEHRGHHTFLVEEVAQEYQEKFQESLKKLKNEEQEAEKLTAFIREKKTSWKNQMEPERCRIQTEFNQLRNILDRVEQRELKKLEQEEKKGLRIIEEAENDLVHQTQSLRELISDLERRCQGSTMELLQDVSDVTERSEFWTLRKPEALPTKLRSMFRAPDLKRMLRVCRELTDVQSYWVDVTLNPHTANLNLVLAKNRRQVRFVGAKVSGPSCLEKHYDCSVLGSQHFSSGKHYWEVDVAKKTAWILGVCSNSLGPTFSFNHFAQNHSAYSRYQPQSGYWVIGLQHNHEYRAYEDSSPSLLLSMTVPPRRVGVFLDYEAGTVSFYNVTNHGFPIYTFSKYYFPTTLCPYFNPCNCVIPMTLRRPSS

SEQ ID NO: 2586 - protein, 517 aa, Homo sapiens
MQPLSKLMAISKPRNLSLREQREVLRADMSWQQETNPVVETHDSEASRQKFRHFQYLKVSGPHEALSQLWELCLQWLRPEIHTKKQIIELLVLEQFLAILPEEVRTWVNLQHPNNSKDMVTLIEDVIEMLEDEDMPCKDSALQMGSIKEKMKAGSRTGKPQEPVTFKDVVVEFSKEEWGQLDSAVKNLYRNVMLENFRNLNSLRKAHLLSKPFESLKLESKKKRWIMEKEIPRKTIFDMKSISGEESSHGVIMTRLTESGHPSSDAWKGENWLYRNQKKWDINLPQEAFIPETIYTEEEDFECSENKKSFDINSVSSICAIQVGIPSRKGSPKCDKFKTYFKFNLDSVGKQHSEYEYGNDLSLSTDIRHQKSHTTMNSYECYQCGKAFCRSSSLIRHQIIHTGEKPYKCSECGRFFNRRTNLTKHQKLHAEAKACTSNKCGKAFSKSEDSNNPTLHFGNNFYQCVNCGKSFNRSSSLIRHQMIHTGEKPFKCKECSKAFNRSSNLVKHQKLHTRDKS

SEQ ID NO: 2587 - protein, 312 aa, Homo sapiens
MESALPAAGFLYWVGAGTVAYLALRISYSLFTALRVWGVGNEAGVGPGLGEWAVVTGSTDGIGKSYAEELAKHGMKVVLISRSKDKLDQVSSEIKEKFKVETRTIAVDFASEDIYDKIKTGLAGLEIGILVNNVGMSYEYPEYFLDVPDLDNVIKKMININILSVCKMTQLVLPGMVERSKGAILNISSGSGMLPVPLLTIYSATKTFVDFFSQCLHEEYRSKGVFVQSVLPYFVATKLAKIRKPTLDKPSPETFVKSAIKTVGLQSRTNGYLIHALMGSIISNLPSWIYLKIVMNMNKSTRAHYLKKTKKN

SEQ ID NO: 2588 - protein, 314 aa, Homo sapiens
MTRKNYTSLTEFVLLGLADTLELQIILFLFFLVIYTLTVLGNLGMILLIRIDSQLHTPMYFFLANLSFVDVCNSTTITPKMLADLLSEKKTISFAGCFLQMYFFISLATTECILFGLMAYDRYAAICRPLLYSLIMSRTVYLKMAAGAFAAGLLNFMVNTSHVSSLSFCDSNVIHHFFCDSPPLFKLSCSDTILKESISSILAGVNIVGTLLVILSSYSYVLFSIFSMHSGEGRHRAFSTCASHLTAIILFYATCIYTYLRPSSSYSLNQDKVASVFYTVVIPMLNPLIYSLRSKEVKKALANVISRKRTSSFL

SEQ ID NO: 2589 - protein, 559 aa, Homo sapiens
MAPTLQQAYRRRWWMACTAVLENLFFSAVLLGWGSLLIILKNEGFYSSTCPAESSTNTTQDEQRRWPGCDQQDEMLNLGFTIGSFVLSATTLPLGILMDRFGPRPVRLVGSACFTASCTLMALASRDVEALSPLIFLALSLNGFGGICLTFTSLTLPNMFGNLRSTLMALMIGSYASSAITFPGIKLIYDAGVAFVVIMFTWSGLACLIFLNCTLNWPIEAFPAPEEVNYTKKIKLSGLALDHKVTGDLFYTHVTTMGQRLSQKAPSLEDGSDAFMSPQDVRGTSENLPERSVPLRKSLCSPTFLWSLLTMGMTQLRIIFYMAAVNKMLEYLVTGGQEHETNEQQQKVAETVGFYSSVFGAMQLLCLLTCPLIGYIMDWRIKDCVDAPTQGTVLGDARDGVATKSIRPRYCKIQKLTNAISAFTLTNLLLVGFGITCLINNLHLQFVTFVLHTIVRGFFHSACGSLYAAVFPSNHFGTLTGLQSLISAVFALLQQPLFMAMVGPLKGEPFWVNLGLLLFSLLGFLLPSYLFYYRARLQQEYAANGMGPLKVLSGSEVTA

SEQ ID NO: 2590 - protein, 2769 aa, Homo sapiens
MDVKERKPYRSLTRRRDAERRYTSSSADSEEGKAPQKSYSSSETLKAYDQDARLAYGSRVKDIVPQEAEEFCRTGANFTLRELGLEEVTPPHGTLYRTDIGLPHCGYSMGAGSDADMEADTVLSPEHPVRLWGRSTRSGRSSCLSSRANSNLTLTDTEHENTETDHPGGLQNHARLRTPPPPLSHAHTPNQHHAASINSLNRGNFTPRSNPSPAPTDHSLSGEPPAGGAQEPAHAQENWLLNSNIPLETRNLGKQPFLGTLQDNLIEMDILGASRHDGAYSDGHFLFKPGGTSPLFCTTSPGYPLTSSTVYSPPPRPLPRSTFARPAFNLKKPSKYCNWKCAALSAIVISATLVILLAYFVAMHLFGLNWHLQPMEGQMYEITEDTASSWPVPTDVSLYPSGGTGLETPDRKGKGTTEGKPSSFFPEDSFIDSGEIDVGRRASQKIPPGTFWRSQVFIDHPVHLKFNVSLGKAALVGIYGRKGLPPSHTQFDFVELLDGRRLLTQEARSLEGTPRQSRGTVPPSSHETGFIQYLDSGIWHLAFYNDGKESEVVSFLTTAIESVDNCPSNCYGNGDCISGTCHCFLGFLGPDCGRASCPVLCSGNGQYMKGRCLCHSGWKGAECDVPTNQCIDVACSNHGTCITGTCICNPGYKGESCEEVDCMDPTCSGRGVCVRGECHCSVGWGGTNCETPRATCLDQCSGHGTFLPDTGLCSCDPSWTGHDCSIEICAADCGGHGVCVGGTCRCEDGWMGAACDQRACHPRCAEHGTCRDGKCECSPGWNGEHCTIAHYLDRVVKEGCPGLCNGNGRCTLDLNGWHCVCQLGWRGAGCDTSMETACGDSKDNDGDGLVDCMDPDCCLQPLCHINPLCLGSPNPLDIIQETQVPVSQQNLHSFYDRIKFLVGRDSTHIIPGENPFDGGHACVIRGQVMTSDGTPLVGVNISFVNNPLFGYTISRQDGSFDLVTNGGISIILRFERAPFITQEHTLWLPWDRFFVMETIIMRHEENEIPSCDLSNFARPNPVVSPSPLTSFASSCAEKGPIVPEIQALQEEISISGCKMRLSYLSSRTPGYKSVLRISLTHPTIPFNLMKVHLMVAVEGRLFRKWFAAAPDLSYYFIWDKTDVYNQKVFGLSEAFVSVGYEYESCPDLILWEKRTTVLQGYEIDASKLGGWSLDKHHALNIQSGILHKGNGENQFVSQQPPVIGSIMGNGRRRSISCPSCNGLADGNKLLAPVALTCGSDGSLYVGDFNYIRRIFPSGNVTNILELRNKDFRHSHSPAHKYYLATDPMSGAVFLSDSNSRRVFKIKSTVVVKDLVKNSEVVAGTGDQCLPFDDTRCGDGGKATEATLTNPRGITVDKFGLIYFVDGTMIRRIDQNGIISTLLGSNDLTSARPLSCDSVMDISQVHLEWPTDLAINPMDNSLYVLDNNVVLQISENHQVRIVAGRPMHCQVPGIDHFLLSKVAIHATLESATALAVSHNGVLYIAETDEKKINRIRQVTTSGEISLVAGAPSGCDCKNDANCDCFSGDDGYAKDAKLNTPSSLAVCADGELYVADLGNIRIRFIRKNKPFLNTQNMYELSSPIDQELYLFDTTGKHLYTQSLPTGDYLYNFTYTGDGDITLITDNNGNMVNVRRDSTGMPLWLVVPDGQVYWVTMGTNSALKSVTTQGHELAMMTYHGNSGLLATKSNENGWTTFYEYDSFGRLTNVTFPTGQVSSFRSDTDSSVHVQVETSSKDDVTITTNLSASGAFYTLLQDQVRNSYYIGADGSLRLLLANGMEVALQTEPHLLAGTVNPTVGKRNVTLPIDNGLNLVEWRQRKEQARGQVTVFGRRLRVHNRNLLSLDFDRVTRTEKIYDDHRKFTLRILYDQAGRPSLWSPSSRLNGVNVTYSPGGYIAGIQRGIMSERMEYDQAGRITSRIFADGKTWSYTYLEKSMVLLLHSQRQYIFEFDKNDRLSSVTMPNVARQTLETIRSVGYYRNIYQPPEGNASVIQDFTEDGHLLHTFYLGTGRRVIYKYGKLSKLAETLYDTTKVSFTYDETAGMLKTINLQNEGFTCTIRYRQIGPLIDRQIFRFTEEGMVNARFDYNYDNSFRVTSMQAVINETPLPIDLYRYDDVSGKTEQFGKFGVIYYDINQIITTAVMTHTKHFDAYGRMKEVQYEIFRSLMYWMTVQYDNMGRVVKKELKVGPYANTTRYSYEYDADGQLQTVSINDKPLWRYSYDLNGNLHLLSPGNSARLTPLRYDIRDRITRLGDVQYKMDEDGFLRQRGGDIFEYNSAGLLIKAYNRAGSWSVRYRYDGLGRRVSSKSSHSHHLQFFYADLTNPTKVTHLYNHSSSEITSLYYDLQGHLFAMELSSGDEFYIACDNIGTPLAVFSGTGLMIKQILYTAYGEIYMDTNPNFQIIIGYHGGLYDPLTKLVHMGRRDYDVLAGRWTSPDHELWKHLSSSNVMPFNLYMFKNNNPISNSQDIKCFMTDVNSWLLTFGFQLHNVIPGYPKPDMDAMEPSYELIHTQMKTQEWDNSKSILGVQCEVQKQLKAFVTLERFDQLYGSTITSCQQAPKTKKFASSGSVFGKGVKFALKDGRVTTDIISVANEDGRRVAAILNHAHYLENLHFTIDGVDTHYFVKPGPSEGDLAILGLSGGRRTLENGVNVTVSQINTVLNGRTRRYTDIQLQYGALCLNTRYGTTLDEEKARVLELARQRAVRQAWAREQQRLREGEEGLRAWTEGEKQQVLSTGRVQGYDGFFVISVEQYPELSDSANNIHFMRQSEMGRR

SEQ ID NO: 2591 - protein, 259 aa, Homo sapiens
MAVQISKKRKFVADGIFKAELNEFLTRELAEDGYSGVEVRVTPTRTEIIILATRTQNVLGEKGRRIRELTAVVQKRFGFPEGSVELKIMVMVTGYPLLPLKLYAEKVATRGLCAIAQAESLRYKLLGGLAVRRACYGVLRFIMESGAKGCEVVVSGKLRGQRAKSMKFVDGLMIHSGDPVNYYVDTAVRHVLLRQGVLGIKVKIMLPWDPTGKIGPKKPLPDHVSIVEPKDEILPTTPISEQKGGKPEPPAMPQPVPTA

SEQ ID NO: 2592 - protein, 883 aa, Homo sapiens
MPGGGSQEYGVLCIQEYRKNSKVESSTRNNFMGLKDHLGHDLGHLYVESTDPQLSPAVPWSTVENPSMDTVNVGKDEKEASEENASSGDSEENTNSDHESEQLGSISVEPGLITKTHRQLCRSPCLEPHILKRNEILQDFKPEESQTTSKEAKKPPDVVREYQTKLEFALKLGYSEEQVQLVLNKLGTDALINDILGELVKLGNKSEADQTVSTINTITRETSSLESQRSESPMQEIVTDDGENLRPIVIDGSNVAMSHGNKEVFSCRGIKLAVDWFLERGHKDITVFVPAWRKEQSRPDALITDQEILRKLEKEKILVFTPSRRVQGRRVVCYDDRFIVKLAFESDGIIVSNDNYRDLANEKPEWKKFIDERLLMYSFVNDKFMPPDDPLGRHGPSLDNFLRKKPIVPEHKKQPCPYGKKCTYGHKCKYYHPERGSQPQRSVADELRAMSRNTAAKTANEGGLVKSNSVPCSTKADSTSDVKRGAPKRQSDPSIRTQVYQDLEEKLPTKNKLETRSVPSLVSIPATSTAKPQSTTSLSNGLPSGVHFPPQDQRPQGQYPSMMMATKNHGTPMPYEQYPKCDSPVDIGYYSMLNAYSNLSLSGPRSPERRFSLDTDYRISSVASDCSSEGSMSCGSSDSYVGYNDRSYVSSPDPQLEENLKCQHMHPHSRLNPQPFLQNFHDPLTRGQSYSHEEPKFHHKPPLPHLALHLPHSAVGARSSCPGDYPSPPSSAHSKAPHLGRSLVATRIDSISDSRLYDSSPSRQRKPYSRQEGLGSWERPGYGIDAYGYRQTYSLPDNSTQPCYEQFTFQSLPEQQEPAWRIPYCGMPQDPPRYQDNREKIYINLCNIFPPDLVRIVMKRNPHMTDAQQLAAAILVEKSQLGY

SEQ ID NO: 2593 - protein, 414 aa, Homo sapiens
MDPLNLSWYDDDLERQNWSRPFNGSDGKADRPHYNYYATLLTLLIAVIVFGNVLVCMAVSREKALQTTTNYLIVSLAVADLLVATLVMPWVVYLEVVGEWKFSRIHCDIFVTLDVMMCTASILNLCAISIDRYTAVAMPMLYNTRYSSKRRVTVMISIVWVLSFTISCPLLFGLNNADQNECIIANPAFVVYSSIVSFYVPFIVTLLVYIKIYIVLRRRRKRVNTKRSSRAFRAHLRAPLKEAARRAQELEMEMLSSTSPPERTRYSPIPPSHHQLTLPDPSHHGLHSTPDSPAKPEKNGHAKDHPKIAKIFEIQTMPNGKTRTSLKTMSRRKLSQQKEKKATQMLAIVLGVFIICWLPFFITHILNIHCDCNIPPVLYSAFTWLGYVNSAVNPIIYTTFNIEFRKAFLKILHC

SEQ ID NO: 2594 - protein, 1427 aa, Homo sapiens
MLLPSDVARLVLGYLQQENLISTCQTFILESSDLKEYAEHCTDEGFIPACLLSLFGKNLTTILNEYVAMKTKETSNNVPAIMSSLWKKLDHTLSQIRSMQSSPRFAGSQRARTRTGIAEIKRQRKLASQTAPASAELLTLPYLSGQFTTPPSTGTQVTRPSGQISDPSRSYFVVVNHSQSQDTVTTGEALNVIPGAQEKKAHASLMSPGRRKSESQRKSTTLSGPHSTIRNFQDPNAFAVEKQMVIENAREKILSNKSLQEKLAENINKFLTSDNNIAQVPKQTDNNPTEPETSIDEFLGLPSEIHMSEEAIQDILEQTESDPAFQALFDLFDYGKTKNNKNISQSISSQPMESNPSIVLADETNLAVKGSFETEESDGQSGQPAFCTSYQNDDPLNALKNSNNHDVLRQEDQENFSQISTSIQKKAFKTAVPTEQKCDIDITFESVPNLNDFNQRGNSNAECNPHCAELYTNQMSTETEMAIGIEKNSLSSNVPSESQLQPDQPDIPITSFVSLGCEANNENLILSGKSSQLLSQDTSLTGKPSKKSQFCENSNDTVKLKINFHGSKSSDSSEVHKSKIEINVLEPVMSQLSNCQDNSCLQSEILPVSVESSHLNVSGQVEIHLGDSLSSTKQPSNDSASVELNHTENEAQASKSENSQEPSSSVKEENTIFLSLGGNANCEKVALTPPEGTPVENSHSLPPESVCSSVGDSHPESQNTDDKPSSNNSAEIDASNIVSLKVIISDDPFVSSDTELTSAVSSINGENLPTIILSSPTKSPTKNAELVKCLSSEETVGAVVYAEVGDSASMEQSLLTFKSEDSAVNNTQNEDGIAFSANVTPCVSKDGGYIQLMPATSTAFGNSNNILIATCVTDPTALGTSVSQSNVVVLPGNSAPMTAQPLPPQLQTPPRSNSVFAVNQAVSPNFSQGSAIIIASPVQPVLQGMVGMIPVSVVGQNGNNFSTPPRQVLHMPLTAPVCNRSIPQFPVPPKSQKAQGLRNKPCIGKQVNNLVDSSGHSVGCHAQKTEVSDKSIATDLGKKSEETTVPFPEESIVPAAKPCHRRVLCFDSTTAPVANTQGPNHKMVSQNKERNAVSFPNLDSPNVSSTLKPPSNNAIKREKEKPPLPKILSKSESAISRHTTIRETQSEKKVSPTEIVLESFHKATANKENELCSDVERQKNPENSKLSIGQQNGGLRSEKSIASLQEMTKKQGTSSNNKNVLSVGTAVKDLKQEQTKSASSLITTEMLQDIQRHSSVSRLADSSDLPVPRTPGSGAGEKHKEEPIDIIKAPSSRRFSEDSSTSKVMVPPVTPDLPACSPASETGSENSVNMAAHTLMILSRAAISRTTSATPLKDNTQQFRASSRSTTKKRKIEELDERERNSRPSSKNLTNSSIPMKKKKIKKKKLPSSFPAGMDVDKFLLSLHYDE

SEQ ID NO: 2595 - protein, 3056 aa, Homo sapiens
MSLVLNDLLICCRQLEHDRATERKKEVEKFKRLIRDPETIKHLDRHSDSKQGKYLNWDAVFRFLQKYIQKETECLRIAKPNVSASTQASRQKKMQEISSLVKYFIKCANRRAPRLKCQELLNYIMDTVKDSSNGAIYGADCSNILLKDILSVRKYWCEISQQQWLELFSVYFRLYLKPSQDVHRVLVARIIHAVTKGCCSQTDGLNSKFLDFFSKAIQCARQEKSSSGLNHILAALTIFLKTLAVNFRIRVCELGDEILPTLLYIWTQHRLNDSLKEVIIELFQLQIYIHHPKGAKTQEKGAYESTKWRSILYNLYDLLVNEISHIGSRGKYSSGFRNIAVKENLIELMADICHQVFNEDTRSLEISQSYTTTQRESSDYSVPCKRKKIELGWEVIKDHLQKSQNDFDLVPWLQIATQLISKYPASLPNCELSPLLMILSQLLPQQRHGERTPYVLRCLTEVALCQDKRSNLESSQKSDLLKLWNKIWCITFRGISSEQIQAENFGLLGAIIQGSLVEVDREFWKLFTGSACRPSCPAVCCLTLALTTSIVPGTVKMGIEQNMCEVNRSFSLKESIMKWLLFYQLEGDLENSTEVPPILHSNFPHLVLEKILVSLTMKNCKAAMNFFQSVPECEHHQKDKEELSFSEVEELFLQTTFDKMDFLTIVRECGIEKHQSSIGFSVHQNLKESLDRCLLGLSEQLLNNYSSEITNSETLVRCSRLLVGVLGCYCYMGVIAEEEAYKSELFQKAKSLMQCAGESITLFKNKTNEEFRIGSLRNMMQLCTRCLSNCTKKSPNKIASGFFLRLLTSKLMNDIADICKSLASFIKKPFDRGEVESMEDDTNGNLMEVEDQSSMNLFNDYPDSSVSDANEPGESQSTIGAINPLAEEYLSKQDLLFLDMLKFLCLCVTTAQTNTVSFRAADIRRKLLMLIDSSTLEPTKSLHLHMYLMLLKELPGEEYPLPMEDVLELLKPLSNVCSLYRRDQDVCKTILNHVLHVVKNLGQSNMDSENTRDAQGQFLTVIGAFWHLTKERKYIFSVRMALVNCLKTLLEADPYSKWAILNVMGKDFPVNEVFTQFLADNHHQVRMLAAESINRLFQDTKGDSSRLLKALPLKLQQTAFENAYLKAQEGMREMSHSAENPETLDEIYNRKSVLLTLIAVVLSCSPICEKQALFALCKSVKENGLEPHLVKKVLEKVSETFGYRRLEDFMASHLDYLVLEWLNLQDTEYNLSSFPFILLNYTNIEDFYRSCYKVLIPHLVIRSHFDEVKSIANQIQEDWKSLLTDCFPKILVNILPYFAYEGTRDSGMAQQRETATKVYDMLKSENLLGKQIDHLFISNLPEIVVELLMTLHEPANSSASQSTDLCDFSGDLDPAPNPPHFPSHVIKATFAYISNCHKTKLKSILEILSKSPDSYQKILLAICEQAAETNNVYKKHRILKIYHLFVSLLLKDIKSGLGGAWAFVLRDVIYTLIHYINQRPSCIMDVSLRSFSLCCDLLSQVCQTAVTYCKDALENHLHVIVGTLIPLVYEQVEVQKQVLDLLKYLVIDNKDNENLYITIKLLDPFPDHVVFKDLRITQQKIKYSRGPFSLLEEINHFLSVSVYDALPLTRLEGLKDLRRQLELHKDQMVDIMRASQDNPQDGIMVKLVVNLLQLSKMAINHTGEKEVLEAVGSCLGEVGPIDFSTIAIQHSKDASYTKALKLFEDKELQWTFIMLTYLNNTLVEDCVKVRSAAVTCLKNILATKTGHSFWEIYKMTTDPMLAYLQPFRTSRKKFLEVPRFDKENPFEGLDDINLWIPLSENHDIWIKTLTCAFLDSGGTKCEILQLLKPMCEVKTDFCQTVLPYLIHDILLQDTNESWRNLLSTHVQGFFTSCLRHFSQTSRSTTPANLDSESEHFFRCCLDKKSQRTMLAVVDYMRRQKRPSSGTIFNDAFWLDLNYLEVAKVAQSCAAHFTALLYAEIYADKKSMDDQEKRSLAFEEGSQSTTISSLSEKSKEETGISLQDLLLEIYRSIGEPDSLYGCGGGKMLQPITRLRTYEHEAMWGKALVTYDLETAIPSSTRQAGIIQALQNLGLCHILSVYLKGLDYENKDWCPELEELHYQAAWRNMQWDHCTSVSKEVEGTSYHESLYNALQSLRDREFSTFYESLKYARVKEVEEMCKRSLESVYSLYPTLSRLQAIGELESIGELFSRSVTHRQLSEVYIKWQKHSQLLKDSDFSFQEPIMALRTVILEILMEKEMDNSQRECIKDILTKHLVELSILARTFKNTQLPERAIFQIKQYNSVSCGVSEWQLEEAQVFWAKKEQSLALSILKQMIKKLDASCAANNPSLKLTYTECLRVCGNWLAETCLENPAVIMQTYLEKAVEVAGNYDGESSDELRNGKMKAFLSLARFSDTQYQRIENYMKSSEFENKQALLKRAKEEVGLLREHKIQTNRYTVKVQRELELDELALRALKEDRKRFLCKAVENYINCLLSGEEHDMWVFRLCSLWLENSGVSEVNGMMKRDGMKIPTYKFLPLMYQLAARMGTKMMGGLGFHEVLNNLISRISMDHPHHTLFIILALANANRDEFLTKPEVARRSRITKNVPKQSSQLDEDRTEAANRIICTIRSRRPQMVRSVEALCDAYIILANLDATQWKTQRKGINIPADQPITKLKNLEDVVVPTMEIKVDHTGEYGNLVTIQSFKAEFRLAGGVNLPKIIDCVGSDGKERRQLVKGRDDLRQDAVMQQVFQMCNTLLQRNTETRKRKLTICTYKVVPLSQRSGVLEWCTGTVPIGEFLVNNEDGAHKRYRPNDFSAFQCQKKMMEVQKKSFEEKYEVFMDVCQNFQPVFRYFCMEKFLDPAIWFEKRLAYTRSVATSSIVGYILGLGDRHVQNILINEQSAELVHIDLGVAFEQGKILPTPETVPFRLTRDIVDGMGITGVEGVFRRCCEKTMEVMRNSQETLLTIVEVLLYDPLFDWTMNPLKALYLQQRPEDETELHPTLNADDQECKRNLSDIDQSFNKVAERVLMRLQEKLKGVEEGTVLSVGGQVNLLIQQAIDPKNLSRLFPGWKAWV

SEQ ID NO: 2596 - protein, 1175 aa, Homo sapiens
MAKPYEFNWQKEVPSFLQEGAVFDRYEEESFVFEPNCLFKVDEFGFFLTWRSEGKEGQVLECSLINSIRSGAIPKDPKILAALEAVGKSENDLEGRIVCVCSGTDLVNISFTYMVAENPEVTKQWVEGLRSIIHNFRANNVSPMTCLKKHWMKLAFMTNTNGKIPVRSITRTFASGKTEKVIFQALKELGLPSGKNDEIEPTAFSYEKFYELTQKICPRTDIEDLFKKINGDKTDYLTVDQLVSFLNEHQRDPRLNEILFPFYDAKRAMQIIEMYEPDEDLKKKGLISSDGFCRYLMSDENAPVFLDRLELYQEMDHPLAHYFISSSHNTYLTGRQFGGKSSVEMYRQVLLAGCRCVELDCWDGKGEDQEPIITHGKAMCTDILFKDVIQAIKETAFVTSEYPVILSFENHCSKYQQYKMSKYCEDLFGDLLLKQALESHPLEPGRALPSPNDLKRKILIKNKRLKPEVEKKQLEALRSMMEAGESASPANILEDDNEEEIESADQEEEAHPEFKFGNELSADDLGHKEAVANSVKKGLVTVEDEQAWMASYKYVGATTNIHPYLSTMINYAQPVKFQGFHVAEERNIHYNMSSFNESVGLGYLKTHAIEFVNYNKRQMSRIYPKGGRVDSSNYMPQIFWNAGCQMVSLNYQTPDLAMQLNQGKFEYNGSCGYLLKPDFMRRPDRTFDPFSETPVDGVIAATCSVQVISGQFLSDKKIGTYVEVDMYGLPTDTIRKEFRTRMVMNNGLNPVYNEESFVFRKVILPDLAVLRIAVYDDNNKLIGQRILPLDGLQAGYRHISLRNEGNKPLSLPTIFCNIVLKTYVPDGFGDIVDALSDPKKFLSITEKRADQMRAMGIETSDIADVPSDTSKNDKKGKANTAKANVTPQSSSELRPTTTAALASGVEAKKGIELIPQVRIEDLKQMKAYLKHLKKQQKELNSLKKKHAKEHSTMQKLHCTQVDKIVAQYDKEKSTHEKILEKAMKKKGGSNCLEMKKETEIKIQTLTSDHKSKVKEIVAQHTKEWSEMINTHSAEEQEIRDLHLSQQCELLKKLLINAHEQQTQQLKLSHDRESKEMRAHQAKISMENSKAISQDKSIKNKAERERRVRELNSSNTKKFLEERKRLAMKQSKEMDQLKKVQLEHLEFLEKQNEQAKEMQQMVKLEAEMDRRPATVV

SEQ ID NO: 2597 - protein, 855 aa, Homo sapiens [sequence omitted]

SEQ ID NO: 2598 - protein, 532 aa, Homo sapiens
MQSCESSGDSADDPLSRGLRRRGQPRVVVIGAGLAGLAAAKALLEQGFTDVTVLEASSHIGGRVQSVKLGHATFELGATWIHGSHGNPIYHLAEANGLLEETTDGERSVGRISLYSKNGVACYLTNHGRRIPKDVVEEFSDLYNEVYNLTQEFFRHDKPVNAESQNSVGVFTREEVRNRIRNDPDDPEATKRLKLAMIQQYLKVESCESSSHSMDEVSLSAFGEWTEIPGAHHIIPSGFMRVVELLAEGIPAHVIQLGKPVRCIHWDQASARPRGPEIEPRGVLKRQYTSFFRPGLPTEKVAAIHRLGIGTTDKIFLEFEEPFWGPECNSLQFVWEDEAESHTLTYPPELWYRKICGFDVLYPPERYGHVLSGWICGEEALVMEKCDDEAVAEICTEMLRQFTGNPNIPKPRRILRSAWGSNPYFRGSYSYTQVGSSGADVEKLAKPLPYTESSKTAHGSSTKQQPGHLFSSKCPEQPLDANRGAVKPMQVLFSGEATHRKYYSTTHGALLSGQREAARLIEMYRDLFQQGT

SEQ ID NO: 2599 - protein, 445 aa, Homo sapiens
MGGVGEPGPREGPAQPGAPLPTFCWEQIRAHDQPGDKWLVIERRVYDISRWAQRHPGGSRLIGHHGAEDATDAFRAFHQDLNFVRKFLQPLLIGELAPEEPSQDGPLNAQLVEDFRALHQAAEDMKLFDASPTFFAFLLGHILAMEVLAWLLIYLLGPGWVPSALAAFILAISQAQSWCLQHDLGHASIFKKSWWNHVAQKFVMGQLKGFSAHWWNFRHFQHHAKPNIFHKDPDVTVAPVFLLGESSVEYGKKKRRYLPYNQQHLYFFLIGPPLLTLVNFEVENLAYMLVCMQWADLLWAASFYARFFLSYLPFYGVPGVLLFFVAVRVLESHWFVWITQMNHIPKEIGHEKHRDWVSSQLAATCNVEPSLFTNWFSGHLNFQIEHHLFPRMPRHNYSRVAPLVKSLCAKHGLSYEVKPFLTALVDIVRSLKKSGDIWLDAYLHQ

SEQ ID NO: 2600 - protein, 351 aa, Homo sapiens
MAPVLPLVLPLQPRIRLAQGLWLLSWLLALAGGVILLCSGHLLVQLRHLGTFLAPSCQFPVLPQAALAAGAVALGTGLVGVGASRASLNAALYPPWRGVLGPLLVAGTAGGGGLLVVGLGLALALPGSLDEALEEGLVTALAHYKDTEVPGHCQAKRLVDELQLRYHCCGRHGYKDWFGVQWVSSRYLDPGDRDVADRIQSNVEGLYLTDGVPFSCCNPHSPRPCLQNRLSDSYAHPLFDPRQPNQNLWAQGCHEVLLEHLQDLAGTLGSMLAVTFLLQALVLLGLRYLQTALEGLGGVIDAGGETQGYLFPSGLKDMLKTAWLQGGVACRPAPEEAPPGEAPPKEDLSEA

SEQ ID NO: 2601 - protein, 1151 aa, Homo sapiens
MEVVDETEALQRFFEGHDINGALEPSNIDTSILEEYISKEDASDLCFPDISAPASSASYSHGQPAMPGSSGVHHLSPPGGGPSPGRHGPLPPPGYGTPLNCNNNNGMGAAPKPFPGGTGPPIKAEPKAPYAPGTLPDSPPDSGSEAYSPQQVNEPHLLRTITPETLCHVGVPSRLEHPPPPPAHLPGPPPPPPPPPHYPVLQRDLYMKAEPPIPHYAAMGQGLVPTDLHHTQQSQMLHQLLQQHGAELPTHPSKKRKHSESPPSTLNAQMLNGMIKQEPGTVTALPLHPTRAPSPPWPPQGPLSPGPGSLPLSIARVQTPPWHPPGAPSPGLLQDSDSLSGSYLDPNYQSIKWQPHQQNKWATLYDANYKELPMLTYRVDADKGFNFSVGDDAFVCQKKNHFQVTVYIGMLGEPKYVKTPEGLKPLDCFYLKLHGVKLEALNQSINIEQSQSDRSKRPFNPVTVNLPPEQVTKVTVGRLHFSETTANNMRKKGKPNPDQRYFMLVVALQAHAQNQNYTLAAQISERIIVRASNPGQFESDSDVLWQRAQVPDTVFHHGRVGINTDRPDEALVVHGNVKVMGSLMHPSDLRAKEHVQEVDTTEQLKRISRMRLVHYRYKPEFAASAGIEATAPETGVIAQEVKEILPEAVKDTGDMVFANGKTIENFLVVNKERIFMENVGAVKELCKLTDNLETRIDELERWSHKLAKLRRLDSLKSTGSSGAFSHAGSQFSRAGSVPHKKRPPKVASKSSSVVPDQACISQRFLQGTIIALVVVMAFSVVSMSTLYVLSLRTEEDLVDTDGSFAVSTSCLLALLRPQPPGGSEALCPWSSQSFGTTQLRQSPLTTGLPGIQPSLLLVTTSLTSSAPGSAVRTLDMCSSHPCPVICCSSPTTNPTTGPSLGPSFNPGHVLSPSPSPSTNRSGPSQMALLPVTNIRAKSWGLSVNGIGHSKHHKSLEPLASPAVPFPGGQGKAKNSPSLGFHGRARRGALQSSVGPAEPTWAQGQSASLLAEPVPSLTSIQVLENSMSITSQYCAPGDACRPGNFTYHIPVSSGTPLHLSLTLQMNSSSPVSVVLCSLRSKEEPCEEGSLPQSLHTHQDTQGTSHRWPITILSFREFTYHFRVALLGQANCSSEALAQPATDYHFHFYRLCD

SEQ ID NO: 2602 - protein, 897 aa, Homo sapiens
MDGAAGPGDGPAREALQSLSQRLRVQEQEMELVKAALAEALRLLRLQVPPSSLQGSGTPAPPGDSSLAAPPGLPPTCTPSLVSRGTQTETEVELKSSPGPPGLSNGPPAPQGASEEPSGTQSEGGGSSSSGAGSPGPPGILRPLQPPQRADTPRRNSSSSSSPSERPRQKLSRKAISSANLLVRSGSTESRGGKDPLSSPGGPGSRRSNYNLEGISVKMFLRGRPITMYIPSGIRSLEELPSGPPPETLSLDWVYGYRGRDSRSNLFVLRSGEVVYFIACVVVLYRPGGGPGGPGGGGQRHYRGHTDCVRCLAVHPDGVRVASGQTAGVDKDGKPLQPVVHIWDSETLLKLQEIGLGAFERGVGALAFSAADQGAFLCVVDDSNEHMLSVWDCSRGMKLAEIKSTNDSVLAVGFNPRDSSCIVTSGKSHVHFWNWSGGVGVPGNGTLTRKQGVFGKYKKPKFIPCFVFLPDGDILTGDSEGNILTWGRSPSDSKTPGRGGAKETYGIVAQAHAHEGSIFALCLRRDGTVLSGGGRDRRLVQWGPGLVALQEAEIPEHFGAVRAIAEGLGSELLVGTTKNALLRGDLAQGFSPVIQGHTDELWGLCTHPSQNRFLTCGHDRQLCLWDGESHALAWSIDLKETGLCADFHPSGAVVAVGLNTGRWLVLDTETREIVSDVIDGNEQLSVVRYSPDGLYLAIGSHDNVIYIYSVSSDGAKSSRFGRCMGHSSFITHLDWSKDGNFIMSNSGDYEILYWDVAGGCKQLKNRYESRDREWATYTCVLGFHVYGVWPDGSDGTDINSLCRSHNERVVAVADDFCKVHLFQYPCARAKAPSRMYGGHGSHVTSVRFTHDDSHLVSLGGKDASIFQWRVLGAGGAGPAPATPSRTPSLSPASSLDV

SEQ ID NO: 2603 - protein, 914 aa, Homo sapiens
MGTTAPGPIHLLELCDQKLMEFLCNMDNKDLVWLEEIQEEAERMFTREFSKEPELMPKTPSQKNRRKKRRISYVQDENRDPIRRRLSRRKSRSSQLSSRRLRSKDSVEKLATVVGENGSVLRRVTRAAAAAAAATMALAAPSSPTPESPTMLTKKPEDNHTQCQLVPVVEIGISERQNAEQHVTQLMSTEPLPRTLSPTPASATAPTSQGIPTSDEESTPKKSKARILESITVSSLMATPQDPKGQGVGTGRSASKLRIAQVSPGPRDSPAFPDSPWRERVLAPILPDNFSTPTGSRTDSQSVRHSPIAPSSPSPQVLAQKYSLVAKQESVVRRASRRLAKKTAEEPAASGRIICHSYLERLLNVEVPQKVGSEQKEPPEEAEPVAAAEPEVPENNGNNSWPHNDTEIANSTPNPKPAASSPETPSAGQQEAKTDQADGPREPPQSARRKRSYKQAVSELDEEQHLEDEELQPPRSKTPSSPCPASKVVRPLRTFLHTVQRNQMLMTPTSAPRSVMKSFIKRNTPLRMDPKEKERQRLENLRRKEEAEQLRRQKVEEDKRRRLEEVKLKREERLRKVLQARERVEQMKEEKKKQIEQKFAQIDEKTEKAKEERLAEEKAKKKAAAKKMEEVEARRKQEEEARRLRWLQQEEEERRHQELLQKKKEEEQERLRKAAEAKRLAEQREQERREQERREQERREQERREQERREQERQLAEQERRREQERLQAERELQEREKALRLQKEQLQRELEEKKKKEEQQRLAERQLQEEQEKKAKEAAGASKALNVTVDVQSPACTSYQMTPQGHRAPPKINPDNYGMDLNSDDSTDDEAHPRKPIPTWARGTPLSQAIIHQYYHPPNLLELFGTILPLDLEDIFKKSKPRYHKRTSSAVWNSPPLQGARVPSSLAYSLKKH

SEQ ID NO: 2604 - protein, 638 aa, Homo sapiens
MAGGSATTWGYPVALLLLVATLGLGRWLQPDPGLPGLRHSYDCGIKGMQLLVFPRPGQTLRFKVVDEFGNRFDVNNCSICYHWVTSRPQEPAVFSADYRGCHVLEKDGRFHLRVFMEAVLPNGRVDVAQDATLICPKPDPSRTLDSQLAPPAMFSVSTPQTLSFLPTSGHTSQGSGHAFPSPLDPGHSSVHPTPALPSPGPGPTLATLAQPHWGTLEHWDVNKRDYIGTHLSQEQCQVASGHLPCIVRRTSKEACQQAGCCYDNTREVPCYYGNTATVQCFRDGYFVLVVSQEMALTHRITLANIHLAYAPTSCSPTQHTEAFVVFYFPLTHCGTTMQVAGDQLIYENWLVSGIHIQKGPQGSITRDSTFQLHVRCVFNASDFLPIQASIFPPPSPAPMTQPGPLRLELRIAKDETFSSYYGEDDYPIVRLLREPVHVEVRLLQRTDPNLVLLLHQCWGAPSANPFQQPQWPILSDGCPFKGDSYRTQMVALDGATPFQSHYQRFTVATFALLDSGSQRALRGLVYLFCSTSACHTSGLETCSTACSTGTTRQRRSSGHRNDTARPQDIVSSPGPVGFEDSYGQEPTLGPTDSNGNSSLRPLLWAVLLLPAVALVLGFGVFVGLSQTWAQKLWESNRQ

SEQ ID NO: 2605 - protein, 1238 aa, Homo sapiens
ARTWVTGLRYLMAGISDEDSLARRQRTRDQWLKQTFDEADKNGDGSLSIGEVLQLLHKLNVNLPRQRVKQMFREADTDDHQGTLGFEEFCAFYKMMSTRRDLYLLMLTYSNHKDHLDAASLQRFLQVEQKMAGVTLESCQDIIEQFEPCPENKSKGLLGIDGFTNYTRSPAGDIFNPEHHHVHQDMTQPLSHYFITSSHNTYLVGDQLMSQSRVDMYAWVLQAGCRCVEVDCWDGPDGEPIVHHGYTLTSKILFKDVIETINKYAFIKNEYPVILSIENHCSVIQQKKMAQYLTDILGDKLDLSSVSSEDATTLPSPQMLKGKILVKGKKLPANISEDAEEGEVSDEDSADEIDDDCKLLNGDASTNRKRVENTAKRKLDSLIKESKIRDCEDPNNFSVSTLSPSGKLGRKSKAEEDVESGEDAGASRRNGRLVVGSFSRRKKKGSKLKKAASVEEGDEGQDSPGGQSRGATRQKKTMKLSRALSDLVKYTKSVATHDIEMEAASSWQVSSFSETKAHQILQQKPAQYLRFNQQQLSRIYPSSYRVDSSNYNPQPFWNAGCQMGVFNPNSEDPLPGQLKKQLVLRIISGQQLPKPRDSMLGDRGEIIDPFVEVEIIGLPVDCSREQTRVVDDNGFNPTWEETLVFMVHMPEIALVRFLVWDHDPIGRDFIGQRTLAFSSMMPGYRHVYLEGMEEASIFVHVAVSDISGKVKQALGLKGLFLRGPKPGSLDSHAAGRPPARPSVSQRILRRTASAPTKSQKPGRRGFPELVLGTRDTGSKGVADDVVPPGPGPAPEAPAQEGPGSGSPRDTRPLSTQRPLPPLCSLETIAEEPAPGPGPPPPAAVPTSSSQGRPPYPTGPGANVASPLEDTEEPRDSRPRPCNGEGAGGAYERAPGSQTDGRSQPRTLGHLPVIRRVKSEGQVPTEPLGGWRPLAAPFPAPAVYSDATGSDPLWQRLEPCGHRDSVSSSSSMSSSDTVIDLSLPSLGLGRSRENLAGAHMGRLPPRPHSASAARPDLPPVTKSKSNPNLRATGQRPPIPDELQPRSLAPRMAGLPFRPPWGCLSLVGVQDCPVAAKSKSLGDLTADDFAPSFEGGSRRLSHSLGLPGGTRRVSGPGVRRDTLTEQLRWLTVFQQAGDITSPTSLGPAGEGVAGGPGFVRRSSSRSHSRVRAIASRARQAQERQQRLQGLGRQGPPEEERGTPEGACSVGHEGSVDAPAPSKGALGPASAAAENLVLLRL

SEQ ID NO: 2606 - protein, 1382 aa, Homo sapiens
MDEEENHYVSQLREVYSSCDTTGTGFLDRQELTQLCLKLHLEQQLPVLLQTLLGNDHFARVNFEEFKEGFVAVLSSNAGVRPSDEDSSSLESAASSAIPPKYVNGSKWYGRRSRPELCDAATEARRVPEQQTQASLKSHLWRSASLESVESPKSDEEAESTKEAQNELFEAQGQLQTWDSEDFGSPQKSCSPSFDTPESQIRGVWEELGVGSSGHLSEQELAVVCQSVGLQGLEKEELEDLFNKLDQDGDGKVSLEEFQLGLFSHEPALLLESSTRVKPSKAWSHYQVPEESGCHTTTTSSLVSLCSSLRLFSSIDDGSGFAFPDQVLAMWTQEGIQNGREILQSLDFSVDEKVNLLELTWALDNELMTVDSAVQQAALACYHQELSYQQGQVEQLARERDKARQDLERAEKRNLEFVKEMDDCHSTLEQLTEKKIKHLEQGYRERLSLLRSEVEAERELFWEQAHRQRAALEWDVGRLQAEEAGLREKLTLALKENSRLQKEIVEVVEKLSDSERLALKLQKDLEFVLKDKLEPQSAELLAQEERFAAVLKEYELKCRDLQDRNDELQAELEGLWARLPKNRHSPSWSPDGRRRQLPGLGPAGISFLGNSAPVSIETELMMEQVKEHYQDLRTQLETKVNYYEREIAALKRNFEKERKDMEQARRREVSVLEGQKADLEELHEKSQEVIWGLQEQLQDTARGPEPEQMGLAPCCTQALCGLALRHHSHLQQIRREAEAELSGELSGLGALPARRDLTLELEEPPQGPLPRGSQRSEQLELERALKLQPCASEKRAQMCVSLALEEEELELARGKRVDGPSLEAEMQALPKDGLVAGSGQEGTRGLLPLRPGCGERPLAWLAPGDGRESEEAAGAGPRRRQAQDTEATQSPAPAPAPASHGPSERWSRMQPCGVDGDIVPKEPEPFGASAAGLEQPGARELPLLGTERDASQTQPRMWEPPLRPAASCRGQAERLQAIQEERARSWSRGTQEQASEQQARAEGALEPGCHKHSVEVARRGSLPSHLQLADPQGSWQEQLAAPEEGETKIALEREKDDMETKLLHLEDVVRALEKHVDLRENDRLEFHRLSEENTLLKNDLGRVRQELEAAESTHDAQRKEIEVLKKDKEKACSEMEVLNRQNQNYKDQLSQLNVRVLQLGQEASTHQAQNEEHRVTIQMLTQSLEEVVRSGQQQSDQIQKLRVELECLNQEHQSLQLPWSELTQTLEESQDQVQGAHLRLRQAQAQHLQEVRLVPQDRVAELHRLLSLQGEQARRRLDAQREEHEKQLKATEERVEEAEMILKNMEMLLQEKVDKLKEQFEKNTKSDLLLKELYVENAHLVRALQATEEKQRGAEKQSRLLEEKVRALNKLVSRIAPAALSV

SEQ ID NO: 2607 - protein, 1460 aa, Homo sapiens
MAGRPLRIGDQLVLEEDYDETYIPSEQEILEFAREIGIDPIKEPELMWLAREGIVAPLPGEWKPCQDITGDIYYFNFANGQSMWDHPCDEHYRSLVIQERAKLSTSGAIKKKKKKKEKKDKKDRDPPKSSLALGSSLAPVHVPLGGLAPLRGLVDTPPSALRGSQSVSLGSSVESGRQLGELMLPSQGLKTSAYTKGLLGSIYEDKTALSLLGLGEETNEEDEEESDNQSVHSSSEPLRNLHLDIGALGGDFEYEESLRTSQPEEKKDVSLDSDAAGPPTPCKPSSPGADSSLSSAVGKGRQGSGARPGLPEKEENEKSEPKICRNLVTPKADPTGSEPAKASEKEAPEDTVDAGEEGSRREEAAKEPKKKASALEEGSSDASQELEISEHMKEPQLSDSIASDPKSFHGLDFGFRSRISEHLLDVDVLSPVLGGACRQAQQPLGIEDKDDSQSSQDELQSKQSKGLEERLSPPLPHEERAQSPPRSLATEEEPPQGPEGQPEWKEAEELGEDSAASLSLQLSLQREQAPSPPAACEKGKEQHSQAEELGPGQEEAEDPEEKVAVSPTPPVSPEVRSTEPVAPPEQLSEAALKAMEEAVAQVLEQDQRHLLESKQEKMQQLREKLCQEEEEEILRLHQQKEQSLSSLRERLQKAIEEEEARMREEESQRLSWLRAQVQSSTQADEDQIRAEQEASLQKLREELESQQKAERASLEQKNRQMLEQLKEEIEASEKSEQAALNAAKEKALQQLREQLEGERKEAVATLEKEHSAELERLCSSLEAKHREVVSSLQKKIQEAQQKEEAQLQKCLGQVEHRVHQKSYHVAGYEHELSSLLREKRQEVEGEHERRLDKMKEEHQQVMAKAREQYEAEERKQRAELLGHLTGELERLQRAHERELETVRQEQHKRLEDLRRRHREQERKLQDLELDLETRAKDVKARLALLEVQEETARREKQQLLDVQRQVALKSEEATATHQQLEEAQKEHTHLLQSNQQLREILDELQARKLKLESQVDLLQAQSQQLQKHFSSLEAEAQKKQHLLREVTVEENNASPHFEPDLHIEDLRKSLGTNQTKEVSSSLSQSKEDLYLDSLSSHNVWHLLSAEGVALRSAKEFLVQQTRSMRRRQTALKAAQQHWRHELASAQEVAKDPPGIKALEDMRKNLEKETRHLDEMKSAMRKGHNLLKKKEEKLNQLESSLWEEASDEGTLGGSPTKKAVTFDLSDMDSLSSESSESFSPPHREWWRQQRIDSTPSLTSRKIHGLSHSLRQISSQLSSVLSILDSLNPQSPPPLLASMPAQLPPRDPKSTPTPTYYGSLARFSALSSATPTSTQWAWDSGQGPRLPSSVAQTVDDFLLEKWRKYFPSGIPLLSNSPTPLESRLGYMSASEQLRLLQHSHSQVPEAGSTTFQGIIEANRRWLERVKNDPRLPLFSSTPKPKATLSLLQLGLDEHNRVKVYRF

SEQ ID NO: 2608 - protein, 215 aa, Homo sapiens
MYGKSSTRAVLLLLGIQLTALWPIAAVEIYTSRVLEAVNGTDARLKCTFSSFAPVGDALTVTWNFRPLDGGPEQFVFYYHIDPFQPMSGRFKDRVSWDGNPERYDASILLWKLQFDDNGTYTCQVKNPPDVDGVIGEIRLSVVHTVRFSEIHFLALAIGSACALMIIIVIVVVLFQHYRKKRWAERAHKVVEIKSKEEERLNQEKKVSVYLEDTD

SEQ ID NO: 2609 - protein, 855 aa, Homo sapiens
MFALGLPFLVLLVASVESHLGVLGPKNVSQKDAEFERTYVDEVNSELVNIYTFNHTVTRNRTEGVRVSVNVLNKQKGAPLLFVVRQKEAVVSFQVPLILRGMFQRKYLYQKVERTLCQPPTKNESEIQFFYVDVSTLSPVNTTYQLRVSRMDDFVLRTGEQFSFNTTAAQPQYFKYEFPEGVDSVIVKVTSNKAFPCSVISIQDVLCPVYDLDNNVAFIGMYQTMTKKAAITVQRKDFPSNSFYVVVVVKTEDQACGGSLPFYPFAEDEPVDQGHRQKTLSVLVSQAVTSEAYVSGMLFCLGIFLSFYLLTVLLACWENWRQKKKTLLVAIDRACPESGHPRVLADSFPGSSPYEGYNYGSFENVSGSTDGLVDSAGTGDLSYGYQGHDQFKRRLPSGQMRQLCIAMGRSFEPVGTRPRVDSMSSVEEDDYDTLTDIDSDKNVIRTKQYLYVADLARKDKRVLRKKYQIYFWNIATIAVFYALPVVQLVITYQTVVNVTGNQDICYYNFLCAHPLGNLSAFNNILSNLGYILLGLLFLLIILQREINHNRALLRNDLCALECGIPKHFGLFYAMGTALMMEGLLSACYHVCPNYTNFQFDTSFMYMIAGLCMLKLYQKRHPDINASAYSAYACLAIVIFFSVLGVVFGKGNTAFWIVFSIIHIIATLLLSTQLYYMGRWKLDSGIFRRILHVLYTDCIRQCSGPLYVDRMVLLVMGNVINWSLAAYGLIMRPNDFASYLLAIGICNLLLYFAFYIIMKLRSGERIKLIPLLCIVCTSVVWGFALFFFFQGLSTWQKTPAESREHNRDCILLDFFDDHDIWHFLSSIAMFGSFLVSGPPGRAGWVREGSSCLLLCG

SEQ ID NO: 2610 - protein, 1200 aa, Homo sapiens
MDPPSLDTAIQHALAGLYPPFEATAPTVLGQVFRLLDSGFQGDGLSFLLDFLIPAKRLCEQVREAACAPYSHCLFLHEGWPLCLRDEVVVHLAPLNPLLLRQGDFYLQVEPQEEQSVCIMIKCLSLDLCTVDKKPVPEPAYPILFTQEWLEAINSDFEGNPLHNCLVASENGIAPVPWTKITSPEFVDDRPQVVNALCQAWGPLPLEALDLSSPQELHQASSPDNQVLPAQSLAKGKGRTYGSKYPGLIKVEQARCGEVAFRMDEVVSQDFEGDYVALLGFSQESRGESPSREAGTSSGCTSGALEEIAGTKETPLFQKILPLSEANEGPSLGNRACTKPESSEERPYNLGFRRKVNLKAPTHNSERPPQGSYMNVLEDALDCASGLRAGVSQEPAASKMQGPLGNPENMVQLRPGPRQASSPRLSPASPAAAASETKIEVKTKERNGRLPKPMPCPSRNTSSPEPPTPGLKFSFLRGQRQPSVTPEKASLQHNGPWKVLCSLYSPKPNRAKSLGKAGTTQTKTSGPATAPSPLTEEKAALPEASAGSPERGPTLEEEPPGPEPRIGALGVKVFRSRIACLPGGRDRAGRPLLLVSTTEGAWEAPWCTVSEVTKLLSYLCTIPRPEDKAKGLAVLIDARRQPPQPGLVSALQATQAQVPASIRAILFLGEKEAALQLQTLPDVQVEVLTSLKALSHHVDPSQLPAVLEGPFPYCHTEWVHFFQKLDPFLADLHQASSLLQASIEEFEKADPPGGMQEATRCLSKSKELMEAVLRDPGLLGLQREGGATLARLQHDASRLDFSPDVRSHLAAATALYSLVDEQLHVLVTASNSLLGKLELRVRLGRLEAAIHQVSDWMEQEGRRCLQSLTPKDGSLETVEKAHAEFENFFLQAAAQYRRGLELSKQAAQLGATARGAGEAERAEFPELAAFASTQRAFQAELTHFYMAAERQRTDLETLLHLHRFCKRMTWFHMDCQDLMAQLRLDKTSRVSPGDQRRLHRYLQRLASEFPAEKLAAVGLQVASLSRAGLGQELWEEARIRHEEIRMLLEKALTHSSCPEAPAAHSARPERRGVAAKGQGVSVEVTSKGRWDQPPLDSLGMDHLPKSYWPPGPPRGEQNRTFQAGSPPQEAGQAAEAEDGKGSHKLPDPAREHLLATTFFRQQPPRQSQVPRLTGGSFSSEGTDSQTSLEDSPQTSPLASL

SEQ ID NO: 2611 - protein, 602 aa, Homo sapiens
MAALAAAAKKVWSARRLLVLLFTPLALLPVVFALPPKEGRCLFVILLMAVYWCTEALPLSVTALLPIVLFPFMGILPSNKVCPQYFLDTNFLFLSGLIMASAIEEWNLHRRIALKILMLVGVQPARLILGMMVTTSFLSMWLSNTASTAMMLPIANAILKSLFGQKEVRKDPSQESEENTAAVRRNGLHTVPTEMQFLASTEAKDHPGETEVPLDLPADSRKEDEYRRNIWKGFLISIPYSASIGGTATLTGTAPNLILLGQLKSFFPQCDVVNFGSWFIFAFPLMLLFLLAGWLWISFLYGGLSFRGWRKNKSEIRTNAEDRARAVIREEYQNLGPIKFAEQAVFILFCMFAILLFTRDPKFIPGWASLFNPGFLSDAVTGVAIVTILFFFPSQRPSLKWWFDFKAPNTETEPLLTWKKAQETVPWNIILLLGGGFAMAKGCEESGLSVWIGGQLHPLENVPPALAVLLITVVIAFFTEFASNTATIIIFLPVLAELAIRLRVHPLYLMIPGTVGCSFAFMLPVSTPPNSIAFASGHLLVKDMVRTGLLMNLMGVLLLSLAMNTWAQTIFQLGTFPDWADMYSVNVTALPPTLANDTFRTL

SEQ ID NO: 2612 - protein, 566 aa, Homo sapiens
MPGHPGAAEQLVKTGWRSWHLGFWKALAPLQAAWDAFSQPVPASCGQLLTQLLLCASLAAAAAGLVYHWLASLLLYPPGPSAMVATVCGLLVFLSLGLVPPVRCLFALSVPTLGMEQGRRLLLSYSTATLAIAVVPNVLANVGAAGQVLRCVTEGSLESLLNTTHQLHAASRALGPTGQAGSRGLTFEAQDNGSAFYLHMLRVTQQVLEDFSGLESLARAAALGTQRVVTGLFMLGLLVESAWYLHCYLTDLRFDNIYATQQLTQRLAQAQATHLLAPPPTWLLQAAQLRLSQEELLSCLLRLGLLALLLVATAVAVATDHVAFLLAQATVDWAQKLPTVPITLTVKYDVAYTVLGFIPFLFNQLAPESPFLSVHSSYQWELRLTSARCPLLPARRPRAAAPLAAGALQLLAGSTVLLEAYARRLRHAIAASFFTAQEARRVRHLHARLQRRHDRHQGQQLPLGDPSCVPTPRPACKPPAWIDYRLDALRTESSEGEGKELWSCRDLSCNLGPVPPPCVTLGKSLHLSEPRFLHLHNDSIFTIDVTYFPRRDVVRMEGNTGHDRPG

SEQ ID NO: 2613 - protein, 1016 aa, Homo sapiens
MLEMRDVYMEEDVYQLQELRQQLDQASKTCRILQYRLRKAERRSLRAAQTGQVDGELIRGLEQDVKVSKDISMRLHKELEVVEKKRARLEEENEELRQRLIETELAKQVLQTELERPREHSLKKRGTRSLGKADKKTLVQEDSADLKCQLHFAKEESALMCKKLTKLAKENDSMKEELLKYRSLYGDLDSALSAEELADAPHSRETELKVHLKLVEEEANLLSRRIVELEVENRGLRAEMDDMKDHGGGCGGPEARLAFSALGGGECGESLAELRRHLQFVEEEAELLRRSSAELEDQNKLLLNELAKFRSEHELDVALSEDSCSVLSEPSQEELAAAKLQIGELSGKVKKLQYENRVLLSNLQRCDLASCQSTRPMLETDAEAGDSAQCVPAPLGETHESHAVRLCRAREAEVLPGLREQAALVSKAIDVLVADANGFTAGLRLCLDNECADFRLHEAPDNSEGPRDTKLIHAILVRLSVLQQELNAFTRKADAVLGCSVKEQQESFSSLPPLGSQGLSKEILLAKDLGSDFQPPDFRDLPEWEPRIREAFRTGDLDSKPDPSRSFRPYRAEDNDSYASEIKELQLVLAEAHDSLRGLQEQLSQERQLRKEEADNFNQKMVQLKEDQQRALLRREFELQSLSLQRRLEQKFWSQEKNMLVQESQQFKHNFLLLFMKLRWFLKRWRQGKVLPSEGDDFLEVNSMKELYLLMEEEEINAQHSDNKACTGDSWTQNTPNEYIKTLADMKVTLKELCWLLRDERRGLTELQQQFAKAKATWETERAELKGHTSQMELKTGKGAGERAGPDWKAALQREREEQQHLLAESYSAVMELTRQLQISERNWSQEKLQLVERLQGEKQQVEQQVKELQNRLSQLQKAADPWVLKHSELEKQDNSWKETRSEKIHDKEAVSEVELGGNGLKRTKSVSSMSEFESLLDCSPYLAGGDARGKKLPNNPAFGFVSSEPGDPEKDTKEKPGLSSRDCNHLGALACQDPPGSQKLPFLLILAPPQPPPIL

SEQ ID NO: 2614 - protein, 553 aa, Homo sapiens
MAFQDLLGHAGDLWRFQILQTVFLSIFAVATYLHFMLENFTAFIPGHRCWVHILDNDTVSDNDTGALSQDALLRISIPLDSNMRPEKCRRFVHPQWQLLHLNGTFPNTSDADMEPCVDGWVYDRISFSSTIVTEWDLVCDSQSLTSVAKFVFMAGMMVGGILGGHLSDRFGRRFVLRWCYLQVAIVGTCAALAPTFLIYCSLRFLSGIAAMSLITNTIMLIAEWATHRFQAMGITLGMCPSGIAFMTLAGLAFAIRDWHILQLVVSVPYFVIFLTSSWLLESARWLIINNKPEEGLKELRKAAHRSGMKNARDTLTLEILKSTMKKELEAAQKKKPSLCEMLHMPNICKRISLLSFTRFANFMAYFGLNLHVQHLGNNVFLLQTLFGAVILLANCVAPWALKYMNRRASQMLLMFLLAICLLAIIFVPQEMQTLREVLATLGLGASALANTLAFAHGNEVIPTIIRARAMGINATFANIAGALAPLMMILSVYSPPLPWIIYGVFPFISGFAFLLLPETRNKPLFDTIQDEKNERKDPREPKQEDPRVEVTQF

SEQ ID NO: 2615 - protein, 667 aa, Homo sapiens
MAGMKTASGDYIDSSWELRVFVGEEDPEAESVTLRVTGESHIGGVLLKIVEQINRKQDWSDHAIWWEQKRQWLLQTHWTLDKYGILADARLFFGPQHRPVILRLPNRRALRLRASFSQPLFQAVAAICRLLSIRHPEELSLLRAPEKKEKKKKEKEPEEELYDLSKVVLAGGVAPALFRGMPAHFSDSAQTEACYHMLSRPQPPPDPLLLQRLPRPSSLSDKTQLHSRWLDSSRCLMQQGIKAGDALWLRFKYYSFFDLDPKTDPVRLTQLYEQARWDLLLEEIDCTEEEMMVFAALQYHINKLSQSGEVGEPAGTDPGLDDLDVALSNLEVKLEGSAPTDVLDSLTTIPELKDHLRIFRIPRRPRKLTLKGYRQHWVVFKETTLSYYKSQDEAPGDPIQQLNLKGCEVVPDVNVSGQKFCIKLLVPSPEGMSEIYLRCQDEQQYARWMAGCRLASKGRTMADSSYTSEVQAILAFLSLQRTGSGGPGNHPHGPDASAEGLNPYGLVAPRFQRKFKAKQLTPRILEAHQNVAQLSLAEAQLRFIQAWQSLPDFGISYVMVRFKGSRKDEILGIANNRLIRIDLAVGDVVKTWRFSNMRQWNVNWDIRQVAIEFDEHINVAFSCVSASCRIVHEYIGGYIFLSTRERARGEELDEDLFLQLTGGHEAF

SEQ ID NO: 2616 - protein, 1234 aa, Homo sapiens
MAGAQPGVHALQLEPPTVVETLRRGSKFIKWDEETSSRNLVTLRVDPNGFFLYWTGPNMEVDTLDISSIRDTRTGRYARLPKDPKIREVLGFGGPDARLEEKLMTVVSGPDPVNTVFLNFMAVQDDTAKVWSEELFKLAMNILAQNASRNTFLRKAYTKLKLQVNQDGRIPVKNILKMFSADKKRVETALESCGLKFNRSESIRPDEFSLEIFERFLNKLCLRPDIDKILLEIGAKGKPYLTLEQLMDFINQKQRDPRLNEVLYPPLRPSQARLLIEKYEPNQQFLERDQMSMEGFSRYLGGEENGILPLEALDLSTDMTQPLSAYFINSSHNTYLTAGQLAGTSSVEMYRQALLWGCRCVELDVWKGRPPEEEPFITHGFTMTTEVPLRDVLEAIAETAFKTSPYPVILSFENHVDSAKQQAKMAEYCRSIFGDALLIEPLDKYPLAPGVPLPSPQDLMGRILVKNKKRHRPSAGGPDSAGRKRPLEQSNSALSESSAATEPSSPQLGSPSSDSCPGLSNGEEVGLEKPSLEPQKSLGDEGLNRGPYVLGPADREDEEEDEEEEEQTDPKKPTTDEGTASSEVNATEEMSTLVNYIEPVKFKSFEAARKRNKCFEMSSFVETKAMEQLTKSPMEFVEYNKQQLSRIYPKGTRVDSSNYMPQLFWNVGCQLVALNFQTLDVAMQLNAGVFEYNGRSGYLLKPEFMRRPDKSFDPFTEVIVDGIVANALRVKVISGQFLSDRKVGIYVEVDMFGLPVDTRRKYRTRTSQGNSFNPVWDEEPFDFPKVVLPTLASLRIAAFEEGGKFVGHRILPVSAIRSGYHYVCLRNEANQPLCLPALLIYTEASDYIPDDHQDYAEALINPIKHVSLMDQRARQLAALIGESEAQAGQETCQDTQSQQLGSQPSSNPTPSPLDASPRRPPGPTTSPASTSLSSPGQRDDLIASILSEVAPTPLDELRGHKALVKLRSRQERDLRELRKKHQRKAVTLTRRLLDGLAQAQAEGRCRLRPGALGGAADVEDTKEGEDEAKRYQEFQNRQVQSLLELREAQVDAEAQRRLEHLRQALQRLREVVLDANTTQFKRLKEMNEREKKELQKILDRKRHNSISEAKMRDKHKKEAELTEINRRHITESVNSIRRLEEAQKQRHDRLVAGQQQVLQQLAEEEPKLLAQLAQECQEQRARLPQEIRRSLLGEMPEGLGDGPLVACASNGHAPGSSGHLSGADSESQEENTQL

SEQ ID NO: 2617 - protein, 714 aa, Homo sapiens
MSEEIITPVYCTGVSAQVQKQRARELGLGRHENAIKYLGQDYEQLRVRCLQSGTLFRDEAFPPVPQSLGYKDLGPNSSKTYGIKWKRPTELLSNPQFIVDGATRTDICQGALGDCWLLAAIASLTLNDTLLHRVVPHGQSFQNGYAGIFHFQLWQFGEWVDVVVDDLLPIKDGKLVFVHSAEGNEFWSALLEKAYAKVNGSYEALSGGSTSEGFEDFTGGVTEWYELRKAPSDLYQIILKALERGSLLGCSIDISSVLDMEAITFKKLVKGHAYSVTGAKQVNYRGQVVSLIRMRNPWGEVEWTGAWSDSSSEWNNVDPYERDQLRVKMEDGEFWMSFRDFMREFTRLEICNLTPDALKSRTIRKWNTTLYEGTWRRGSTAGGCRNYPATFWVNPQFKIRLDETDDPDDYGDRESGCSFVLALMQKHRRRERRFGRDMETIGFAVYEVPPELVGQPAVHLKRDFFLANASRARSEQFINLREVSTRFRLPPGEYVVVPSTFEPNKEGDFVLRFFSEKSAGTVELDDQIQANLPDEQVLSEEEIDENFKALFRQLAGEDMEISVKELRTILNRIISKHKDLRTKGFSLESCRSMVNLMDRDGNGKLGLVEFNILWNRIRNYLSIFRKFDLDKSGSMSAYEMRMAIESAGFKLNKKLYELIITRYSEPDLAVDFDNFVCCLVRLETMFRFFKTLDTDLDGVVTFDLFKWLQLTMFA

SEQ ID NO: 2618 - protein, 782 aa, Homo sapiens
MAAAAAAGPSPGSGPGDSPEGPEGEAPERRRKAHGMLKLYYGLSEGEAAGRPAGPDPLDPTDLNGAHFDPEVYLDKLRRECPLAQLMDSETDMVRQIRALDSDMQTLVYENYNKFISATDTIRKMKNDFRKMEDEMDRLATNMAVITDFSARISATLQDRHERITKLAGVHALLRKLQFLFELPSRLTKCVELGAYGQAVRYQGRAQAVLQQYQHLPSFRAIQDDCQVITARLAQQLRQRFREGGSGAPEQAECVELLLALGEPAEELCEEFLAHARGRLEKELRNLEAELGPSPPAPDVLEFTDHGGSGFVGGLCQVAAAYQELFAAQGPAGAEKLAAFARQLGSRYFALVERRLAQEQGGGDNSLLVRALDRFHRRLRAPGALLAAAGLADAATEIVERVARERLGHHLQGLRAAFLGCLTDVRQALAAPRVAGKEGPGLAELLANVASSILSHIKASLAAVHLFTAKEVSFSNKPYFRGEFCSQGVREGLIVGFVHSMCQTAQSFCDSPGEKGGATPPALLLLLSRLCLDYETATISYILTLTDEQFLVQDQFPVTPVSTLCAEARETARRLLTHYVKVQGLVISQMLRKSVETRDWLSTLEPRNVRAVMKRVVEDTTAIDVQVGLLYEEGVRKAQSSDSSKRTFSVYSSSRQQGRYAPSYTPSAPMDTNLLSNIQKLFSERIDVFSPVEFNKVSVLTGIIKISLKTLLECVRLRTFGRFGLQQVQVDCHFLQLYLWRFVADEELVHLLLDEVVASAALRCPDPVPMEPSVVEVICERG

SEQ ID NO: 2619 - protein, 1049 aa, Homo sapiens
MPAGGRAGSLKDPDVAELFFKDDPEKLFSDLREIGHGSFGAVYFARDVRNSEVVAIKKMSYSGKQSNEKWQDIIKEVRFLQKLRHPNTIQYRGCYLREHTAWLVMEYCLGSASDLLEVHKKPLQEVEIAAVTHGALQGLAYLHSHNMIHRDVKAGNILLSEPGLVKLGDFGSASIMAPANSFVGTPYWMAPEVILAMDEGQYDGKVDVWSLGITCIELAERKPPLFNMNAMSALYHIAQNESPVLQSGHWSEYFRNFVDSCLQKIPQDRPTSEVLLKHRFVLRERPPTVIMDLIQRTKDAVRELDNLQYRKMKKILFQEAPNGPGAEAPEEEEEAEPYMHRAGTLTSLESSHSVPSMSISASSQSSSVNSLADASDNEEEEEEEEEEEEEEEGPEAREMAMMQEGEHTVTSHSSIIHRLPGSDNLYDDPYQPEITPSPLQPPAAPAPTSTTSSARRRAYCRNRDHFATIRTASLVSRQIQEHEQDSALREQLSGYKRMRRQHQKQLLALESRLRGEREEHSARLQRELEAQRAGFGAEAEKLARRHQAIGEKEARAAQAEERKFQQHILGQQKKELAALLEAQKRTYKLRKEQLKEELQENPSTPKREKAEWLLRQKEQLQQCQAEEEAGLLRRQRQYFELQCRQYKRKMLLARHSLDQDLLREDLNKKQTQKDLECALLLRQHEATRELELRQLQAVQRTRAELTRLQHQTELGNQLEYNKRREQELRQKHAAQVRQQPKSLKSKELQIKKQFQETCKIQTRQYKALRAHLLETTPKAQHKSLLKRLKEEQTRKLAILAEQYDQSISEMLSSQALRLDETQEAEFQALRQQLQQELELLNAYQSKIKIRTESQHERELRELEQRVALRRALLEQRVEEELLALQTGRSERIRSLLERQAREIEAFDAESMRLGFSSMALGGIPAEAAAQGYPAPPPAPAWPSRPVPRSGAHWSHGPPPPGMPPPAWRQPSLLAPPGPPNWLGPPTQSGTPRGGALLLLRNSPQPLRRAASGGSGSENVGPPAAAVPGPLSRSTSVASHILNGSSHFYS

SEQ ID NO: 2620 - protein, 476 aa, Homo sapiens
MMHLAFLVLLCLPVCSAYPLSGAAKEEDSNKDLAQQYLEKYYNLEKDVKQFRRKDSNLIVKKIQGMQKFLGLEVTGKLDTDTLEVMRKPRCGVPDVGHFSSFPGMPKWRKTHLTYRIVNYTPDLPRDAVDSAIEKALKVWEEVTPLTFSRLYEGEADIMISFAVKEHGDFYSFDGPGHSLAHAYPPGPGLYGDIHFDDDEKWTEDASGTNLFLVAAHELGHSLGLFHSANTEALMYPLYNSFTELAQFRLSQDDVNGIQSLYGPPPASTEEPLVPTKSVPSGSEMPAKCDPALSFDAISTLRGEYLFFKDRYFWRRSHWNPEPEFHLISAFWPSLPSYLDAAYEVNSRDTVFIFKGNEFWAIRGNEVQAGYPRGIHTLGFPPTIRKIDAAVSDKEKKKTYFFAADKYWRFDENSQSMEQGFPRLIADDFPGVEPKVDAVLQAFGFFYFFSGSSQFEFDPNARMVTHILKSNSWLHC

SEQ ID NO: 2621 - protein, 868 aa, Homo sapiens
MALIMEPVSKWSPSQVVDWMKGLDDCLQQYIKNFEREKISGDQLLRITHQELEDLGVSRIGHQELILEAVDLLCALNYGLETENLKTLSHKLNASAKNLQNFITGRRRSGHYDGRTSRKLPNDFLTSVVDLIGAAKSLLAWLDRSPFAAVTDYSVTRNNVIQLCLELTTIVQQDCTVYETENKILHVCKTLSGVCDHIISLSSDPLVSQSAHLEVIQLANIKPSEGLGMYIKSTYDGLHVITGTTENSPADRCKKIHAGDEVIQVNHQTVVGWQLKNLVNALREDPSGVILTLKKRPQSMLTSAPALLKNMRWKPLALQPLIPRSPTSSVATPSSTISTPTKRDSSALQDLYIPPPPAEPYIPRDEKGNLPCEDLRGHMVGKPVHKGSESPNSFLDQEYRKRFNIVEEDTVLYCYEYEKGRSSSQGRRESTPTYENSLLRYMSNEKIAQEEYMFQRNSKKDTGKKSKKKGDKSNSPTHYSLLPSLQMDALRQDIMGTPVPETTLYHTFQQSSLQHKSKKKNKGPIAGKSKRRISCKDLGRGDCEGWLWKKKDAKSYFSQKWKKYWFVLKDASLYWYINEEDEKAEGFISLPEFKIDRASECRKKYAFKACHPKIKSFYFAAEHLDDMNRWLNRINMLTAGYAERERIKQEQDYWSESDKEEADTPSTPKQDSPPPPYDTYPRPPSMSCASPYVEAKHSRLSSTETSQSQSSHEEFRQEVTGSSAVSPIRKTASQRRSWQDLIETPLTSSGLHYLQTLPLEDSVFSDSAAISPEHRRQSTLPTQKCHLQDHYGPYPLAESERMQVLNGNGGKPRSFTLPRDSGFNHCCLNAPVSACDPQDDVQPPEVEEEEEEEEEEGEAAGENIGEKS

SEQ ID NO: 2622 - protein, 1084 aa, Homo sapiens
LTEYSKSLPGLSTSYAALLRIKKSSSSSLFGSKTRPRYSSPSLGTLSASSPSWLGAAQNYYSPINLYHSSDAFKQDESVDYGPVFVQEPDDIIFPTDSDEKKVALNCEVRGNPVPSYRWLRNGTEIDLESDYRYSLIDGTFIISNPSEAKDSGHYQCLATNTVGSILSREATLQFAYLGNFSGRTRSAVSVREGQGVVLMCSPPPHSPEIIYSWVFNEFPSFVAEDSRRFISQETGNLYISKVQTSDVGSYICLVKNTVTNARVLSPPTPLTLRNDGVMGEYEPKIEVHFPFTVTAAKGTTVKMECFALGNPVPTITWMKVNGYIPSKARLRKSQAVLEIPNVQLDDAGIYECRAENSRGKNSFRGQLQVYTYPHWVEKLNDTQLDSGSPLRWECKATGKPRPTYRWLKNGVPLSPQSRVEMVNGVLMIHNVNQSDAGMYQCLAENKYGAIYASAELKILASAPTFALNQLKKTIIVTKDQEVVIECKPQGSPKPTISWKKGDRAVRENKRIAILPDGSLRILNASKSDEGKYVCRGENVFGSAEIIASLSVKEPTRIELTPKRTELTVGESIVLNCKAIHDASLDVTFYWTLKGQPIDFEEEGGHFESIRAQASSADLMIRNILLMHAGRYGCRVQTTADSVSDEAELLVRGPPGPPGIVIVEEITESTATLSWSPAADNHSPISSYNLQARSPFSLGWQTVKTVPEIITGDMESAMAVDLNPWVEYEFRVVATNPIGTGDPSTPSRMIRTNEAVPKTAPTNVSGRSGRRHELVIAWEPVSEEFQNGEGFGYIVAFRPNGTRGWKEKMVTSSEASKFIYRDESVPPLTPFEVKVGVYNNKGDGPFSQIVVICSAEGEPSAAPTDVKATSVSVSEILVAWKHIKESLGRPQGFEVGYWKDMEQEDTAETVKTRGNESFVILTGLEGNTLYHFTVRAYNGAGYGPPSSEVSATTKKSPPSQAPSNLRWEQQGSQVSLGWEPVIPLANESEVVGYKVFYRQEGHSNSQVIETQKLQAVVPLPDAGVYIIEVRAYSEGGDGTASSQIRVPSYSGGKITSAQSTLHSLSTSSSSVTLLLALMIPSTSW

SEQ ID NO: 2623 - protein, 319 aa, Homo sapiens
MNHVVKHNHTAVTKVTEFILMGITDNPGLQAPLFGLFLIIYLVTVIGNLGMVILTYLDSKLHTPMYFFLRHLSITDLGYSTVIAPKMLVNFIVHKNTISYNWYATQLAFFEIFIISELFILSAMAYDRYVAICKPLLYVIIMAEKVLWVLVIVPYLYSTFVSLFLTIKLFKLSFCGSNIISYFYCDCIPLMSILCSDTNELELIILIFSGCNLLFSLSIVLISYMFILVAILRMNSRKGRYKAFSTCSSHLTVVIMFYGTLLFIYLQPKSSHTLAIDKMASVFYTLLIPMLNPLIYSLRNKEVKDALKRTLTNRFKIPI

SEQ ID NO: 2624 - protein, 1188 aa, Homo sapiens
MEPNSLQWVGSPCGLHGPYIFYKAFQFHLEGKPRILSLGDFFFVRCTPKDPICIAELQLLWEERTSRQLLSSSKLYFLPEDTPQGRNSDHGEDEVIAVSEKVIVKLEDLVKWVHSDFSKWRCGFHAGPVKTEALGRNGQKEALLKYRQSTLNSGLNFKDVLKEKADLGEDEEETNVIVLSYPQYCRYRSMLKRIQDKPSSILTDQFALALGGIAVVSRNPQILYCRDTFDHPTLIENESICDEFAPNLKGRPRKKKPCPQRRDSFSGVKDSNNNSDGKAVAKVKCEARSALTKPKNNHNCKKVSNEEKPKVAIGEECRADEQAFLVALYKYMKERKTPIERIPYLGFKQINLWTMFQAAQKLGGYETITARRQWKHIYDELGGNPGSTSAATCTRRHYERLILPYERFIKGEEDKPLPPIKPRKQENSSQENENKTKVSGTKRIKHEIPKSKKEKENAPKPQDAAEVSSEQEKEQETLISQKSIPEPLPAADMKKKIEGYQEFSAKPLASRVDPEKDNETDQGSNSEKVAEEAGEKGPTPPLPSAPLAPEKDSALVPGASKQPLTSPSALVDSKQESKLCCFTESPESEPQEASFPSFPTTQPPLANQNETEDDKLPAMADYIANCTVKVDQLGSDDIHNALKQTPKVLVVQSFDMFKDKDLTGPMNENHGLNYTPLLYSRGNPGIMSPLAKKKLLSQVSGASLSSSYPYGSPPPLISKKKLIARDDLCSSLSQTHHGQSTDHMAVSRPSVIQHVQSFRSKPSEERKTINDIFKHEKLSRSDPHRCSFSKHHLNPLADSYVLKQEIQEGKDKLLEKRALPHSHMPSFLADFYSSPHLHSLYRHTEHHLHNEQTSKYPSRDMYRESENSSFPSHRHQEKLHVNYLTSLHLQDKKSAAAEAPTDDQPTDLSLPKNPHKPTGKVLGLAHSTTGPQESKGISQFQVLGSQSRDCHPKACRVSPMTMSGPKKYPESLSRSGKPHHVRLENFRKMEGMVHPILHRKMSPQNIGAARPIKRSLEDLDLVIAGKKARAVSPLDPSKEVSGKEKASEQESEGSKAAHGGHSGGGSEGHKLPLSSPIFPGLYSGSLCNSGLNSRLPAGYSHSLQYLKNQTVLSPLMQPLAFHSLVMQRGIFTSPTNSQQLYRHLAAATPVGSSYGDLLHNSIYPLAAINPQAAFPSSQLSSVHPSTKL

SEQ ID NO: 2625 - protein, 1464 aa, Homo sapiens
MAGIIKKQILKHLSRFTKNLSPDKINLSTLKGEGELKNLELDEEVLQNMLDLPTWLAINKVFCNKASIRIPWTKLKTHPICLSLDKVIMEMSTCEEPRSPNGPSPIATASGQSEYGFAEKVVEGISVSVNSIVIRIGAKAFNASFELSQLRIYSVNAHWEHGDLRFTRIQDPQRGEVLTFKEINWQMIRIEADATQSSHLEIMCAPVRLITNQSKIRVTLKRRLKDCNVIATKLVLILDDLLWVLTDSQLKAMVQYAKSLSEAIEKSTEQRKSMAPEPTQSSTVVASAQQVKTTQTSNAPDVNDAIVKLFNDFDVKETSHHLVISHLDLHICDDIHAKEKESNRRITGGAMQLSFTQLTIDYYPYHKAGDSCNHWMYFSDATKTKNGWANELLHEFECNVEMLKQAVKDHNVGSPPKSPTHASPQHTQTEKDYPLKGTCRTPSVLSQQSKAKLMSSSVVVRLADFNIYQVSTAEQCRSSPKSMICCNKKSLYLPQEMSAVYIEFTEYYYPDGKDFPIPSPNLYSQLNALQFTVDERSILWLNQFLLDLKQSLNQFMAVYKLNDNSKSDEHVDVRVDGLMLKFVIPSEVKSECHQDQPRAISIQSSEMIATNTRHCPNCRHSDLEALFQDFKDCDFFSKTYTSFPKSCDNFNLLHPIFQRHAHEQDTKMHEIYKGNITPQLNKNTLKTSAATDVWAVYFSQFWIDYEGMKSGKGRPISFVDSFPLSIWICQPTRYAESQKEPQTCNQVSLNTSQSESSDLAGRLKRKKLLKEYYSTESEPLTNGGQKPSSSDTFFRFSPSSSEADIHLLVHVHKHVSMQINHYQYLLLLFLHESLILLSENLRKDVEAVTGSPASQTSICIGILLRSAELALLLHPVDQANTLKSPVSESVSPVVPDYLPTENGDFLSSKRKQISRDINRIRSVTVNHMSDNRSMSVDLSHIPLKDPLLFKSASDTNLQKGISFMDYLSDKHLGKISEDESSGLVYKSGSGEIGSETSDKKDSFYTDSSSILNYREDSNILSFDSDGNQNILSSTLTSKGNETIESIFKAEDLLPEAASLSENLDISKEETPPVRTLKSQSSLSGKPKERCPPNLAPLCVSYKNMKRSSSQMSLDTISLDSMILEEQLLESDGSDSHMFLEKGNKKNSTTNYRGTAESVNAGANLQNYGETSPDAISTNSEGAQENHDDLMSVVVFKITGVNGEIDIRGEDTEICLQVNQVTPDQLGNISLRHYLCNRPVGSDQKAVIHSKSSPEISLRFESGPGAVIHSLLAEKNGFLQCHIENFSTEFLTSSLMNIQHFLEDETVATVMPMKIQVSNTKINLKDDSPRSSTVSLEPAPVTVHIDHLVVERSDDGSFHIRDSHMLNTGNDLKENVKSDSVLLTSGKYDLKKQRSVTQATQTSPGVPWPSQSANFPEFSFDFTREQLMEENESLKQELAKAKMALAEAHLEKDALLHHIKKMTVE

SEQ ID NO: 2626 - protein, 582 aa, Homo sapiens
MDPKAGGGGEEDDCVDSGAETGGSDYSHLSSTSNGFSTWRMPCCLFLYCTHGDKEKGRWSLQVEHTWPSGELSVEEAQDPFLVSIHIIADPGESQPLQEAIDNVLAWIHPDLPLFRVSERRASRRRRKPPKGAQPALAVVLFLQEEYGEEQILQLHRTLQQPPWRHHHTEQVHGRFLPYLPCSQDFFTLAPGTPLWAIRPVHYGKEIVRFTVYCRYDNYADSLRFYQLILRRSPSQKKADFCIFPIFSNLDVDIQFSLKRLPCDQCPVPTDSSVLEFRVRDIGELVPLLPNPCSPISEGRWQTEDHDGNKILLQAQRVHKKFPKPGRVHHASEKKRHSTPLPSTAVPSHTPGSSQQSPLNSPHPGPIRTGLPPGHQQEFAGRANSTPNPPWSFQRSKSLFCLPTGGPSLASSAEPQWFSNTGAPGHRASEWRHGHLLSIDDLEGAQETDVDTGLRLSSSDLSVVSAYSAPSRFCSTVETPLPSERCSSHWAAHKDSREGPLPTVSRVTTEASWASLPFFTKRSSSSSATARAAPPAPSTSTLTDSSPQLPCDTPKVKQTDGDMPPPPGSAGPGDNDMEEFYI

SEQ ID NO: 2627 - protein, 654 aa, Homo sapiens
MAKFGVHRILLLAISLTKCLESTKLLADLKKCGDLECEALINRVSAMRDYRGPDCRYLNFTKGEEISVYVKLAGEREDLWAGSKGKEFGYFPRDAVQIEEVFISEEIQMSTKESDFLCLLGVSYTFDNEDSELNGDYGENIYPYEEDKDEKSSIYESDFQIEPGFYATYESTLFEDQVPALEAPEDIGSTSESKDWEEVVVESMEQDRIPEVHVPPSSAVSGVKEWFGLGGEQAEEKAFESVIEPVQESSFRSRKIAVEDENDLEELNNGEPQTEHQQESESEIDSVPKTQSELASESEHIPKPQSTGWFGGGFTSYLGFGDEDTGLELIAEESNPPLQDFPNSISSDKEATVPCTEILTEKKDTITNDSLSLKPSWFDFGFAILGFAYAKEDKIMLDDRKNEEDGGADEHEHPLTSELDPEKEQEIETIKIIETEDQIDKKPVSEKTDESDTIPYLKKFLYNFDNPWNFQNIPKETELPFPKQILDQNNVIENEETGEFSIDNYPTDNTKVMIFKSSYSLSDMVSNIELPTRIHEEVYFEPSSSKDSDENSKPSVDTEGPALVEIDRSVENTLLNSQMVSTDNSLSSQNYISQKEDASEFQILKYLFQIDVYDFMNSAFSPIVILTERVSLPFKPFAIILPILLNIRVATKYV

SEQ ID NO: 2628 - protein, 804 aa, Homo sapiens
MEEPGVTPQPYLGLLLEELRRVVAALPEGMRPDSNLYGFPWELVICAAVVGFFAVLFFLWRSFRSVRSRLYVGREKKLALMLSGLIEEKSKLLEKFSLVQKEYEGYEVESSLKDASFEKEATEAQSLEATCEKLNRSNSELEDEILCLEKELKEEKSKHSEQDELMADISKRIQSLEDESKSLKSQVAEAKMTFKIFQMNEERLKIAIKDALNENSQLQESQKQLLQEAEVWKEQVSELNKQKVTFEDSKVHAEQVLNDKESHIKTLTERLLKMKDWAAMLGEDITDDDNLELEMNSESENGAYLDNPPKGALKKLIHAAKLNASLKTLEGERNQIYIQLSEVDKTKEELTEHIKNLQTEQASLQSENTHFENENQKLQQKLKVMTELYQENEMKLHRKLTVEENYRLEKEEKLSKVDEKISHATEELETYRKRAKDLEEELERTIHSYQGQIISHEKKAHDNWLAARNAERNLNDLRKENAHNRQKLTETELKFELLEKDPYALDVPNTAFGREHSPYGPSPLGWPSSETRAFLSPPTLLEGPLRLSPLLPGGGGRGSRGPGNPLDHQITNERGESSCDRLTDPHRAPSDTGSLSPPWDQDRRMMFPPPGQSYPDSALPPQRQDRFCSNSGRLSGPAELRSFNMPSLDKMDGSMPSEMESSRNDTKDDLGNLNVPDSSLPAENEATGPGFVPPPLAPIRGPLFPVDARGPFLRRGPPFPPPPPGAMFGASRDYFPPGDFPGPPPAPFAMRNVYPPRGFPPYLPPRPGFFPPPPHSEGRSEFPSGLIPPSNEPATEHPEPQQET

SEQ ID NO: 2629 - protein, 392 aa, Homo sapiens
MSREPTPPLPGDMSTGPIAESWCYTQVKVVKFSYMWTINNFSFCREEMGEVLKSSTFSSGPSDKMKWCLRVNPKGLDDESKDYLSLYLLLVSCPKSEVRAKFKFSLLNAKREETKAMESQRAYRFVQGKDWGFKKFIRRDFLLDEANGLLPDDKLTLFCEVSVVQDSVNISGHTNTNTLKVPECRLAEDLGNLWENTRFTDCSFFVRGQEFKAHKSVLAARSPVFNAMFEHEMEESKKNRVEINDLDPEVFKEMMRFIYTGRAPNLDKMADNLLAAADKYALERLKVMCEEALCSNLSVENVADTLVLADLHSAEQLKAQAIDFINRCSVLRQLGCKDGKNWNSNQATDIMETSGWKSMIQSHPHLVAEAFRALASAQCPQFGIPRKRLKQS

SEQ ID NO: 2630 - protein, 469 aa, Homo sapiens
MDVENEQILNVNPADPDNLSDSLFSGDEENAGTEEIKNEINGNWISASSINEARINAKAKRRLRKNSSRDSGRGDSVSDSGSDALRSGLTVPTSPKGRLLDRRSRSGKGRGLPKKGGAGGKGVWGTPGQVYDVEEVDVKDPNYDDDQENCVYETVVLPLDERAFEKTLTPIIQEYFEHGDTNEVAEMLRDLNLGEMKSGVPVLAVSLALEGKASHREMTSKLLSDLCGTVMSTTDVEKSFDKLLKDLPELALDTPRAPQLVGQFIARAVGDGILCNTYIDSYKGTVDCVQARAALDKATVLLSMSKGGKRKDSVWGSGGGQQSVNHLVKEIDMLLKEYLLSGDISEAEHCLKELEVPHFHHELVYEAIIMVLESTGESTFKMILDLLKSLWKSSTITVDQMKRGYERIYNEIPDINLDVPHSYSVLERFVEECFQAGIISKQLRDLCPSRGRKRFVSEGDGGRLKPESY

SEQ ID NO: 2631 - protein, 465 aa, Homo sapiens
MFRQEQPLAEGSFAPMGSLQPDAGNASWNGTEAPGGGARATPYSLQVTLTLVCLAGLLMLLTVFGNVLVIIAVFTSRALKAPQNLFLVSLASADILVATLVIPFSLANEVMGYWYFGKAWCEIYLALDVLFCTSSIVHLCAISLDRYWSITQAIEYNLKRTPRRIKAIIITVWVISAVISFPPLISIEKKGGGGGPQPAEPRCEINDQKWYVISSCIGSFFAPCLIMILVYVRIYQIAKRRTRVPPSRRGPDAVAAPPGGTERRPNGLGPERSAGPGGAEAEPLPTQLNGAPGEPAPAGPRDTDALDLEESSSSDHAERPPGPRRPERGPRGKGKARASQVKPGDSLPRRGPGATGIGTPAAGPGEERVGAAKASRWRGRQNREKRFTFVLAVVIGVFVVCWFPFFFTYTLTAVGCSVPRTLFKFFFWFGYCNSSLNPVIYTIFNHDFRRAFKKILCRGDRKRIV

SEQ ID NO: 2632 - protein, 278 aa, Homo sapiens
MEENMEEGQTQKGCFECCIKCLGGIPYASLIATILLYAGVALFCGCGHEALSGTVNILQTYFEMARTAGDTLDVFTMIDIFKYVIYGIAAAFFVYGILLMVEGFFTTGAIKDLYGDFKITTCGRCVSAWFIMLTYLFMLAWLGVTAFTSLPVYMYFNLWTICRNTTLVEGANLCLDLRQFGIVTIGEEKKICTVSENFLRMCESTELNMTFHLFIVALAGAGAAVIAMVHYLMVLSANWAYVKDACRMQKYEDIKSKEEQELHDIHSTRSKERLNAYT

SEQ ID NO: 2633 - protein, 1322 aa, Homo sapiens
MAWMTYISNWFEQDDWYEGLQRANMSQVRQVGLLAAGCQPWNKDVCAASGDRFAYCATLAIYIYQLDHRYNEFKLHAIMSEHKKTITAISWCPHNPDLFASGSTDNLVIIWNVAEQKVIAKLDSTKGIPASLSWCWNAEDVVAFVSHRGPLFIWTISGPDSGVIVHKDAHSFLSDICMFRWHTHQKGKVVFGHIDGSLSIFHPGNKNQKHVLRPESLEGTDEEDPVTALEWDPLSTDYLLVVNLHYGIRLVDSESLSCITTFNLPSAAASVQCLAWVPSAPGMFITGDSQVGVLRIWNVSRTTPIDNLKLKKTGFHCLHVLNSPPRKKFSVQSPTKNHYTSSTSEAVPPPTLTQNQAFSLPPGHAVCCFLDGGVGLYDMGAKKWDFLRDLGHVETIFDCKFKPDDPNLLATASFDGTIKVWDINTLTAVYTSPGNEGVIYSLSWAPGGLNCIAGGTSRNGAFIWNVQKGKIIQRFNEHGTNGIFCIAWSHKDSKRIATCSSDGFCIIRTIDGKVLHKYKHPAAVFGCDWSQNNKDMIATGCEDTNVRVYYVATSSDQPLKVFSGHTAKVFHVKWSPLREGILCSGSDDGTVRIWDYTQDACINILNGHTAPVRGLMWNTEIPYLLISGSWDYTIKVWDTREGTCVDTVYDHGADVYGLTCHPSRPFTMASCSRDSTVRLWSLTALVTPVQINILADRSWEEIIGNTDYAIEPGTPPLLCGKVSRDIRQEIEKLTANSQVKKLRWFSECLSPPGGSDNLWNLVAVIKGQDDSLLPQNYCKGIMHLKHLIKFRTSEAQELTTVKMSKFGGGIGVPAKEERLKEAAEIHLRLGQIQRYCELMVELGEWDKALSIAPGVSVKYWKKLMQRRADQLIQEDKDDVIPYCIAIGDVKKLVHFFMSRGQLKEALLVAQAACEGNMQPLHVSVPKGASYSDDIYKEDFNELLHKVSKELAEWYFQDGRAVLAACCHLAIDNIELAMAYLIRGNELELAVCVGTVLGESAAPATHYALELLARKCMMISVCFPCVGYSVPFCYVNRNLAADLLLMIPDNELHLIKLCAFYPGCTEEINDLHDKCKLPTVEECMQLAETARADDNIFETVKYYLLSQEPEKALPIGISFVKEYISSSDWTLDTIYPVLDLLSYIRTEKLLLHTCTEARNELLILCGYIGALLAIRRQYQSIVPALYEYTSQLLKRREVSVPLKIEYLSEELDAWRACTQSTNRSLEDSPYTPPSDSQRMIYATLLKRLKEESLKGIIGPDYVTGSNLPSHSDIHISCLTGLKIQGPVFFLEDGKSAISLNDALMWAKVNPFSPLGTGIRLNPF

SEQ ID NO: 2634 - protein, 336 aa, Homo sapiens
MDYPTLLLALLHVYRALCEEVLWHTSVPFAENMSLECVYPSMGILTQVEWFKIGTQQDSIAIFSPTHGMVIRKPYAERVYFLNSTMASNNMTLFFRNASEDDVGYYSCSLYTYPQGTWQKVIQVVQSDSFEAAVPSNSHIVSEPGKNVTLTCQPQMTWPVQAVRWEKIQPRQIDLLTYCNLVHGRNFTSKFPRQIVSNCSHGRWSVIVIPDVTVSDSGLYRCYLQASAGENETFVMRLTVAEGKTDNQYTLFVAGGTVLLLLFVISITTIIVIFLNRRRRRERRDLFTESWDTQKAPNNYRSPISTSQPTNQSMDDTREDIYVNYPTFSRRPKTRV

SEQ ID NO: 2635 - protein, 581 aa, Homo sapiens
MDIIKGNLDGISKPASNSRIRPGSRSSNASLEVLSTEPGSFKVDTASNLNSGKEDHSESSNTENRRTSNDDKQESCSEKIKLAEEGSDEDLDLVQHQIISECSDEPKLKELDSQLQDAIQKMKKLDKILAKKQRREKEIKKQGLEMRIKLWEEIKSAKYSEAWQSKEEMENTKKFLSLTAVSEETVGPSHEEEDTFSSVFHTQIPPEEYEMQMQKLNKDFTCDVERNESLIKSGKKPFSNTEKIELRGKHNQDFIKRNIELAKESRNPVVMVDREKKRLVELLKDLDEKDSGLSSSEGDQSGWVVPVKGYELAVTQHQQLAEIDIKLQELSAASPTISSFSPRLENRNNQKPDRDGERNMEVTPGEKILRNTKEQRDLHNRLREIDEKLKMMKENVLESTSCLSEEQLKCLLDECILKQKSIIKLSSERKKEDIEDVTPVFPQLSRSIISKLLNESETKVQKTEVEDADMLESEECEASKGYYLTKALTGHNMSEALVTEAENMKCLQFSKDVIISDTKDYFMSKTLGIGRLKRPSFLDDPLYGISVSLSSEDQHLKLSSPENTIADEQETKDAAEECKEP

SEQ ID NO: 2636 - protein, 909 aa, Homo sapiens
MNAYLTKQHSCSRGSDGMDAVRSAPTLIRDAHCACGWQRNCQGLGYSSQTMPSSGPGGPASNRTGGSSFNRTLWDSVRKSPHKTSTKGKGTCGEHCTCPHGWFSPAQASPAPIIVNTDTLDTIPYVNGTEIEYEFEEITLERGNSGLGFSIAGGTDNPHIGDDPGIFITKIIPGGAAAEDGRLRVNDCILRVNEVDVSEVSHSKAVEALKEAGSIVRLYVRRRRPILETVVEIKLFKGPKGLGFSIAGGVGNQHIPGDNSIYVTKIIDGGAAQKDGRLQVGDRLLMVNNYSLEEVTHEEAVAILKNTSEVVYLKVGKPTTIYMTDPYGPPDITHSYSPPMENHLLSGNNGTLEYKTSLPPISPGRYSPIPKHMLVDDDYTRPPEPVYSTVNKLCDKPASPRHYSPVECDKSFLLSAPYSHYHLGLLPDSEMTSHSQHSTATRQPSMTLQRAVSLEGEPRKVVLHKGSTGLGFNIVGGEDGEGIFVSFILAGGPADLSGELQRGDQILSVNGIDLRGASHEQAAAALKGAGQTVTIIAQYQPEDYARFEAKIHDLREQMMNHSMSSGSGSLRTNQKRSLYVRAMFDYDKSKDSGLPSQGLSFKYGDILHVINASDDEWWQARRVMLEGDSEEMGVIPSKRRVERKERARLKTVKFNAKPGVIDSKGSFNDKRKKSFIFSRKFPFYKNKEQSEQETSDPERGQEDLILSYEPVTRQEINYTRPVIILGPMKDRINDDLISEFPDKFGSCVPHTTRPKRDYEVDGRDYHFVISREQMEKDIQEHKFIEAGQYNDNLYGTSVQSVRFVAERGKHCILDVSGNAIKRLQVAQLYPIAIFIKPRSLEPLMEMNKRLTEEQAKKTYDRAIKLEQEFGEYFTAIVQGDTLEDIYNQCKLVIEEQSGPFIWIPSKEKL

SEQ ID NO: 2637 - protein, 444 aa, Homo sapiens
MENSGKANKKDTHDGPPKEIKLPTSEALLDYQCQIKEDAVEQFMFQIKTLRKKNQKYHERNSRLKEEQIWHIRHLLKELSEEKAEGLPVVTREDVEEAMKEKWKFERDQEKNLRDMRMQISNAEKLFLEKLSEKEYWEEYKNVGSERHAKLITSLQNDINTVKENAEKMSEHYKITLEDTRKKIIKETLLQLDQKKEWATQNAVKLIDKGSYLEIWENDWLKKEVAIHRKEVEELKNAIHELEAENLVLIDQLSNCRLVDLKIPRYPVLHSCPTSNPRHLLLLPLESCLISARRCWRLYLTQAAGLEVPPEEMSLELPETHIEEKSELQPTEVESRDLMSSSDESTILHLSHENSIEDLQYVKIDKEENSGTEFGDTDMKYLLYEDEKDFKDYVNLGPLGVKLMSVESKKMPIHFQEKEIPVKLYKDVRSPESHITYKMMKSFL

SEQ ID NO: 2638 - protein, 1865 aa, Homo sapiens
MTRWVPTKREEKYGVAFYNYDARGADELSLQIGDTVHILETYEGWYRGYTLRKKSKKGIFPASYIHLKEAIVEGKGQHETVIPGDLPLIQEVTTTLREWSTIWRQLYVQDNREMFRSVRHMIYDLIEWRSQILSGTLPQDELKELKKKVTAKIDYGNRILDLDLVVRDEDGNILDPELTSTISLFRAHEIASKQVEERLQEEKSQKQNIDINRQAKFAATPSLALFVNLKNVVCKIGEDAEVLMSLYDPVESKFISENYLVRWSSSGLPKDIDRLHNLRAVFTDLGSKDLKREKISFVCQIVRVGRMELRDNNTRKLTSGLRRPFGVAVMDVTDIINGKVDDEDKQHFIPFQPVAGENDFLQTVINKVIAAKEVNHKGQGLWVTLKLLPGDIHQIRKEFPHLVDRTTAVARKTGFPEIIMPGDVRNDIYVTLVQGDFDKGSKTTAKNVEVTVSVYDEDGKRLEHVIFPGAGDEAISEYKSVIYYQVKQPRWFETVKVAIPIEDVNRSHLRFTFRHRSSQDSKDKSEKIFALAFVKLMRYDGTTLRDGEHDLIVYKAEAKKLEDAATYLSLPSTKAELEEKGHSATGKSMQSLGSCTISKDSFQISTLVCSTKLTQNVDLLGLLKWRSNTSLLQQNLRQLMKVDGGEVVKFLQDTLDALFNIMMENSESETFDTLVFDALVFIIGLIADRKFQHFNPVLETYIKKHFSATLAYTKLTKVLKNYVDGAEKPGVNEQLYKAMKALESIFKFIVRSRILFNQLYENKGEADFVESLLQLFRSINDMMSSMSDQTVRVKGAALKYLPTIVNDVKLVFDPKELSKMFTEFILNVPMGLLTIQKLYCLIEIVHSDLFTQHDCREILLPMMTDQLKYHLERQEDLEACCQLLSHILEVLYRKDVGPTQRHVQIIMEKLLRTVNRTVISMGRDSELIGNFVACMTAILRQMEDYHYAHLIKTFGKMRTDVVDFLMETFIMFKNLIGKNVYPFDWVIMNMVQNKVFLRAINQYADMLNKKFLDQANFELQLWNNYFHLAVAFLTQESLQLENFSSAKRAKILNKYGDMRRQIGFEIRDMWYNLGQHKIKFIPEMVGPILEMTLIPETELRKATIPIFFDMMQCEFHSTRSFQMFENEIITKLDHEVEGGRGDEQYKVLFDKILLEHCRKHKYLAKTGETFVKLVVRLMERLLDYRTIMHDENKENRMSCTVNVLNFYKEIEREEMYIRYLYKLCDLHKECDNYTEAAYTLLLHAKLLKWSEDVCVAHLTQRDGYQATTQGQLKEQLYQEIIHYFDKGKMWEEAIALGKELAEQYENEMFDYEQLSELLKKQAQFYENIVKVIRPKPDYFAVGYYGQGFPTFLRGKVFIYRGKEYERREDFEARLLTQFPNAEKMKTTSPPGDDIKNSPGQYIQCFTVKPKLDLPPKFHRPVSEQIVSFYRVNEVQRFEYSRPIRKGEKNPDNEFANMWIERTIYTTAYKLPGILRWFEVKSVFMVEISPLENAIETMQLTNDKINSMVQQHLDDPSLPINPLSMLLNGIVDPAVMGGFANYEKAFFTDRYLQEHPEAHEKIEKLKDLIAWQIPFLAEGIRIHGDKVTEALRPFHERMEACFKQLKEKVEKEYGVRIMPSSLDDRRGSRPRSMVRSFTMPSSSRPLSVASVSSLSSDSTPSRPGSDGFALEPLLPKKMHSRSQDKLDKDDLEKEKKDKKKEKRNSKHQEIFEKEFKPTDISLQQSEAVILSETISPLRPQRPKSQVMNVIGSERRFSVSPSSPSSQQTPPPVTPRAKLSFSMQSSLELNGMTGADVADVPPPLPLKGSVADYGNLMENQDLLGSPTPPPPPPHQRHLPPPLPSKTPPPPPPKTTRKQASVDSGIVQ

SEQ ID NO: 2639 - protein, 981 aa, Homo sapiens
MAEGGAADLDTQRSDIATLLKTSLRKGDTWYLVDSRWFKQWKKYVGFDSWDKYQMGDQNVYPGPIDNSGLLKDGDAQSLKEHLIDELDYILLPTEGWNKLVSWYTLMEGQEPIARKVVEQGMFVKHCKVEVYLTELKLCENGNMNNVVTRRFSKADTIDTIEKEIRKIFSIPDEKETRLWNKYMSNTFEPLNKPDSTIQDAGLYQGQVLVIEQKNEDGTWPRGPSTPKSPGASNFSTLPKISPSSLSNNYNNMNNRNVKNSNYCLPSYTAYKNYDYSEPGRNNEQPGLCGLSNLGNTCFMNSAIQCLSNTPPLTEYFLNDKYQEELNFDNPLGMRGEIAKSYAELIKQMWSGKFSYVTPRAFKTQVGRFAPQFSGYQQQDCQELLAFLLDGLHEDLNRIRKKPYIQLKDADGRPDKVVAEEAWENHLKRNDSIIVDIFHGLFKSTLVCPECAKISVTFDPFCYLTLPLPMKKERTLEVYLVRMDPLTKPMQYKVVVPKIGNILDLCTALSALSGIPADKMIVTDIYNHRFHRIFAMDENLSSIMERDDIYVFEININRTEDTEHVIIPVCLREKFRHSSYTHHTGSSLFGQPFLMAVPRNNTEDKLYNLLLLRMCRYVKISTETEETEGSLHCCKDQNINGNGPNGIHEEGSPSEMETDEPDDESSQDQELPSENENSQSEDSVGGDNDSENGLCTEDTCKGQLTGHKKRLFTFQFNNLGNTDINYIKDDTRHIRFDDRQLRLDERSFLALDWDPDLKKRYFDENAAEDFEKHESVEYKPPKKPFVKLKDCIELFTTKEKLGAEDPWYCPNCKEHQQATKKLDLWSLPPVLVVHLKRFSYSRYMRDKLDTLVDFPINDLDMSEFLINPNAGPCRYNLIAVSNHYGGMGGGHYTAFAKNKDDGKWYYFDDSSVSTASEDQIVSKAAYVLFYQRQDTFSGTGFFPLDRETKGASAATGIPLESDEDSNDNDNDIENENCMHTN

SEQ ID NO: 2640 - protein, 823 aa, Homo sapiens
MSRRKQGNPQHLSQRELITPEADHVEAAILEEDEGLEIEEPSGLGLMVGGPDPDLLTCGQCQMNFPLGDILVFIEHKRKQCGGSLGACYDKALDKDSPPPSSRSELRKVSEPVEIGIQVTPDEDDHLLSPTKGICPKQENIAGKDEPSSYICTTCKQPFNSAWFLLQHAQNTHGFRIYLEPGPASSSLTPRLTIPPPLGPEAVAQSPLMNFLGDSNPFNLLRMTGPILRDHPGFGEGRLPGTPPLFSPPPRHHLDPHRLSAEEMGLVAQHPSAFDRVMRLNPMAIDSPAMDFSRRLRELAGNSSTPPPVSPGRGNPMHRLLNPFQPSPKSPFLSTPPLPPMPPGGTPPPQPPAKSKSCEFCGKTFKFQSNLIVHRRSHTGEKPYKCQLCDHACSQASKLKRHMKTHMHKAGSLAGRSDDGLSAASSPEPGTSELAGEGLKAADGDFRHHESDPSLGHEPEEEDEEEEEEEEELLLENESRPESSFSMDSELSRNRENGGGGVPGVPGAGGGAAKALADEKALVLGKVMENVGLGALPQYGELLADKQKRGAFLKRAAGGGDAGDDDDAGGCGDAGAGGAVNGRGGGFAPGTEPFPGLFPRKPAPLPSPGLNSAAKRIKVEKDLELPPAALIPSENVYSQWLVGYAASRHFMKDPFLGFTDARQSPFATSSEHSSENGSLRFSTPPGDLLDGGLSGRSGTASGGSTPHLGGPGPGRPSSKEGRRSDTCEYCGKVFKNCSNLTVHRRSHTGERPYKCELCNYACAQSSKLTRHMKTHGQIGKEVYRCDICQMPFSVYSTLEKHMKKWHGEHLLTNDVKIEQAERS

SEQ ID NO: 2641 - protein, 396 aa, Homo sapiens
MEVKNFAVWDYVVFAALFFISSGIGVFFAIKERKKATSREFLVGGRQMSFGPVGLSLTASFMSAVTVLGTPSEVYRFGASFLVFFIAYLFVILLTSELFLPVFYRSGITSTYEYLQLRFNKPVRYAATVIYIVQTILYTGVVVYAPALALNQVTGFDLWGSVFATGIVCTFYCTLGGLKAVVWTDAFQMVVMIVGFLTVLIQGSTHAGGFHNVLEQSTNGSRLHIFDFDVDPLRRHTFWTITVGGTFTWLGIYGVNQSTIQRCISCKTEKHAKLALYFNLLGLWIILVCAVFSGLIMYSHFKDCDPWTSGIISAPDQLMPYFVMEIFATMPGLPGLFVACAFSGTLSTVASSINALATVTFEDFVKSCFPHLSDKLSTWISKGLCRYSWWTFYSIS

SEQ ID NO: 2642 - protein, 3169 aa, Homo sapiens
MHSAGTPGLSSRRTGNSTSFQPGPPPPPRLLLLLLLLLSLVSRVPAQPAAFGRALLSPGLAGAAGVPAEEAIVLANRGLRVPFGREVWLDPLHDLVLQVQPGDRCAVSVLDNDALAQRPGRLSPKRFPCDFGPGEVRYSHLGARSPSRDRVRLQLRYDAPGGAVVLPLVLEVEVVFTQLEVVTRNLPLVVEELLGTSNALDARSLEFAFQPETEECRVGILSGLGALPRYGELLHYPQVPGGAREGGAPETLLMDCKAFQELGVRYRHTAASRSPNRDWIPMVVELRSRGAPVGSPALKREHFQVLVRIRGGAENTAPKPSFVAMMMMEVDQFVLTALTPDMLAAEDAESPSDLLIFNLTSPFQPGQGYLVSTDDRSLPLSSFTQRDLRLLKIAYQPPSEDSDQERLFELELEVVDLEGAASDPFAFMVVVKPMNTMAPVVTRNTGLILYEGQSRPLTGPAGSGPQNLVISDEDDLEAVRLEVVAGLRHGHLVILGASSGSSAPKSFTVAELAAGQVVYQHDDRDGSLSDNLVLRMVDGGGRHQVQFLFPITLVPVDDQPPVLNANTGLTLAEGETVPILPLSLSATDMDSDDSLLLFVLESPFLTTGHLLLRQTHPPHEKQELLRGLWRKEGAFYERTVTEWQQQDITEGRLFYRHSGPHSPGPVTDQFTFRVQDNHDPPNQSGLQRFVIRIHPVDRLPPELGSGCPLRMVVQESQLTPLRKKWLRYTDLDTDDRELRYTVTQPPTDTDENHLPAPLGTLVLTDNPSVVVTHFTQAQINHHKIAYRPPGQELGVATRVAQFQFQVEDRAGNVAPGTFTLYLHPVDNQPPEILNTGFTIQEKGHHILSETELHVNDVDTDVAHISFTLTQAPKHGHMRVSGQILHVGGLFHLEDIKQGRVSYAHNGDKSLTDSCSLEVSDRHHVVPITLRVNVRPVDDEVPILSHPTGTLESYLDVLENGATEITANVIKGTNEETDDLMLTFLLEDPPLYGEILVNGIPAEQFTQRDILEGSVVYTHTSGEIGLLPKADSFNLSLSDMSQEWRIGGNTIQGVTIWVTILPVDSQAPEIFVGEQLIVMEGDKSVITSVHISAEDVDSLNDDILCTIVIQPTSGYVENISPAPGSEKSRAGIAISAFNLKDLRQGHINYVQSVHKGVEPVEDRFVFRCSDGINFSERQFFPIVIIPTNDEQPEMFMREFMVMEGMSLVIDTPILNAADADVPLDDLTFTITQFPTHGHIMNQLINGTVLVESFTLDQIIESSSIIYEHDDSETQEDSFVIKLTDGKHSVEKTVLIIVIPVDDETPRMTINNGLEIEIGDTKIINNKILMATDLDSEDKSLVYIIRYGPGHGLLQRRKPTGAFENITLGMNFTQDEVDRNLIQYVHLGQEGIRDLIKFDVTDGINPLIDRYFYVSIGSIDIVFPDVISKGVSLKEGGKVTLTTDLLSTSDLNSPDENLVFTITRAPMRGHLECTDQPGVSITSFTQLQLAGNKIYYIHTADDEVKMDSFEFQVTDGRNPVFRTFRISISDVDNKKPVVTIHKLVVSESENKLITPFELTVEDRDTPDKLLKFTITQVPIHGHLLFNNTRPVMVFTKQDLNENLISYKHDGTESSEDSFSFTVTDGTHTDFYVFPDTVFETRRPQVMKIQVLAVDNSVPQIAVNKGASTLRTLATGHLGFMITSKILKVEDRDSLHISLRFIVTEAPQHGYLLNLDKGNHSITQFTQADIDDMKICYVLREGANATSDMFYFAVEDGGGNKLTYQNFRLNWAWISFEKEYYLVNEDSKFLDVVLKRRGYLGETSFISIGTRDRTAEKDKDFKGKAQKQVQFNPGQTRATWRVRILSDGEHEQSETFQVVLSEPVLAALEFPTVATVEIVDPGDEPTVFIPQSKYSVEEDVGELFIPIRRSGDVSQELMVVCYTQQGTATGTVPTSVLSYSDYISRPEDHTSVVRFDKDEREKLCRIVIIDDSLYEEEETFHVLLSMPMGGRIGSEFPGAQVTIVPDKDDEPIFYFGDVEYSVDESAGYVEVQVWRTGTDLSKSSSVTVRSRKTDPPSADAGTDYVGISRNLDFAPGVNMQPVRVVILDDLGQPALEGIEKFELVLRMPMNAALGEPSKATVSINDSVSDLPKMQFKERIYTGSESDGQIVTMIHRTGDVQYRSSVRCYTRQGSAQVMMDFEERPNTDTSIITFLPGETEKPCILELMDDVLYEEVEELRLVLGTPQSNSPFGAAVGEQNETLIRIRDDADKTVIKFGETKFSVTEPKEPGESVVIRIPVIRQGDTSKVSIVRVHTKDGSATSGEDYHPVSEEIEFKEGETQHVVEIEVTFDGVREMREAFTVHLKPDENMIAEMQLTKAIVYIEEMSSMADVTFPSVPQIVSLLMYDDTSKAKESAEPMSGYPVICITACNPKYSDYDKTGSICASENINDTLTRYRWLISAPAGPDGVTSPMREVDFDTFFTSSKMVTLDSIYFQPGSRVQCAARAVNTNGDEGLELMSPIVTISREEGLCQPRVPGVVGAEPFSAKLRYTGPEDADYTNLIKLTVTMPHIDGMLPVISTRELSNFELTLSPDGTRVGNHKCSNLLDYTEVKTHYGFLTDATKNPEIIGETYPYQYSLSIRGSTTLRFYRNLNLEACLWEFVSYYDMSELLADCGGTIGTDGQVLNLVQSYVTLRVPLYVSYVFHSPVGVGGWQHFDLKSELRLTFVYDTAILWNDGIGSPPEAELQGSLYPTSMRIGDEGRLAVHFKTEAQFHGLFVLSHPASFTSSVIMSADHPGLTFSLRLIRSEPTYNQPVQQWSFVSDFAVRDYSGTYTVKLVPCTAPSHQEYRLPVTCNPREPVTFDLDIRFQQVSDPVAAEFSLNTQMYLLSKKSLWLSDGSMGFGQESDVAFAEGDIIYGRVMVDPVQNLGDSFYCSIEKVFLCTGADGYVPKYSPMNAEYGCLADSPSLLYRFKIVDKAQPETQATSFGNVLFNAKLAVDDPEAILLVNQPGSDGFKVDSTPLFQVALGREWYIHTIYTVRSKDNANRGIGKRSVEYHSLVSQGKPQSTTKSRKKREIRSTPSLAWEIGAENSRGTNIQHIALDRTKRQIPHGRAPPDGILPWELNSPSSAVSLVTVVGGTTVGLLTICLTVIAVLMCRGKESFRGKDAPKGSSSSEPMVPPQSHHNDSSEV

SEQ ID NO: 2643 - protein, 1036 aa, Homo sapiens
MYLVAGDRGLAGCGHLLVSLLGLLLLLARSGTRALVCLPCDESKCEEPRNCPGSIVQGVCGCCYTCASQRNESCGGTFGIYGTCDRGLRCVIRPPLNGDSLTEYEAGVCEDENWTDDQLLGFKPCNENLIAGCNIINGKCECNTIRTCSNPFEFPSQDMCLSALKRIEEEKPDCSKARCEVQFSPRCPEDSVLIEGYAPPGECCPLPSRCVCNPAGCLRKVCQPGNLNILVSKASGKPGECCDLYECKPVFGVDCRTVECPPVQQTACPPDSYETQVRLTADGCCTLPTRCECLSGLCGFPVCEVGSTPRIVSRGDGTPGKCCDVFECVNDTKPACVFNNVEYYDGDMFRMDNCRFCRCQGGVAICFTAQCGEINCERYYVPEGECCPVCEDPVYPFNNPAGCYANGLILAHGDRWREDDCTFCQCVNGERHCVATVCGQTCTNPVKVPGECCPVCEEPTIITVDPPACGELSNCTLTGKDCINGFKRDHNGCRTCQCINTEELCSERKQGCTLNCPFGFLTDAQNCEICECRPRPKKCRPIICDKYCPLGLLKNKHGCDICRCKKCPELSCSKICPLGFQQDSHGCLICKCREASASAGPPILSGTCLTVDGHHHKNEESWHDGCRECYCLNGREMCALITCPVPACGNPTIHPGQCCPSCADDFVVQKPELSTPSICHAPGGEYFVEGETWNIDSCTQCTCHSGRVLCETEVCPPLLCQNPSRTQDSCCPQCTDQPFRPSLSRNNSVPNYCKNDEGDIFLAAESWKPDVCTSCICIDSVISCFSESCPSVSCERPVLRKGQCCPYCIEDTIPKKVVCHFSGKAYADEERWDLDSCTHCYCLQGQTLCSTVSCPPLPCVEPINVEGSCCPMCPEMYVPEPTNIPIEKTNHRGEVDLEVPLWPTPSENDIVHLPRDMGHLQVDYRDNRLHPSEDSSLDSIASVVVPIIICLSIIIAFLFINQKKQWIPLLCWYRTPTKPSSLNNQLVSVDCKKGTRVQVDSSQRMLRIAEPDARFSGFYSMQKQNHLQADNFYQTV

SEQ ID NO: 2644 - protein, 1032 aa, Homo sapiens
MSQQGYVATPPYSQPQPGIGLSPPHYGHYGDPSHTASPTGMMKPAGPLGATATRGMLPPGPPPPGPHQFGQNGAHATGHPPQRFPGPPPVNNVASSHAPYQPSAQSSYPGPISTSSVTQLGSQLSAMQINSYGSGMAPPSQGPPGPLSATSLQTPPRPPQPSILQPGSQVLPPPPTTLNGPGASPLPLPMYRPDGLSGPPPPNAQYQPPPLPGQTLGAGYPPQQANSGPQMAGAQLSYPGGFPGGPAQMAGPPQPQKKLDPDSIPSPIQVIENDRASRGGQVYATNTRGQIPPLVTTDCMIQDQGNASPRFIRCTTYCFPCTSDMAKQAQIPLAAVIKPFATIPSNESPLYLVNHGESGPVRCNRCKAYMCPFMQFIEGGRRYQCGFCNCVNDVPPFYFQHLDHIGRRLDHYEKPELSLGSYEYVATLDYCRKSKPPNPPAFIFMIDVSYSNIKNGLVKLICEELKTMLEKIPKEEQEETSAIRVGFITYNKVLHFFNVKSNLAQPQMMVVTDVGEVFVPLLDGFLVNYQESQSVIHNLLDQIPDMFADSNENETVFAPVIQAGMEALKAADCPGKLFIFHSSLPTAEAPGKLKNRDDKKLVNTDKEKILFQPQTNVYDSLAKDCVAHGCSVTLFLFPSQYVDVASLGLVPQLTGGTLYKYNNFQMHLDRQQFLNDLRNDIEKKIGFDAIMRVRTSTGFRATDFFGGILMNNTTDVEMAAIDCDKAVTVEFKHDDKLSEDSGALIQCAVLYTTISGQRRLRIHNLGLNCSSQLADLYKSCETDALINFFAKSAFKAVLHQPLKVIREILVNQTAHMLACYRKNCASPSAASQLILPDSMKVLPVYMNCLLKNCVLLSRPEISTDERAYQRQLVMTMGVADSQLFFYPQLLPIHTLDVKSTMLPAAVRCSESRLSEEGIFLLANGLHMFLWLGVSSPPELIQGIFNVPSFAHINTDMTLLPEVGNPYSQQLRMIMGIIQQKRPYSMKLTIVKQREQPEMVFRQFLVEDKGLYGGSSYVDFLCCVHKEICQLLN

SEQ ID NO: 2645 - protein, 723 aa, Homo sapiens
MRLWKAVVVTLAFMSVDICVTTAIYVFSHLDRSLLEDIRHFNIFDSVLDLWAACLYRSCLLLGATIGVAKNSALGPRRLRASWLVITLVCLFVGIYAMVKLLLFSEVRRPIRDPWFWALFVWTYISLGASFLLWWLLSTVRPGTQALEPGAATEAEGFPGSGRPPPEQASGATLQKLLSYTKPDVAFLVAASFFLIVAALGETFLPYYTGRAIDGIVIQKSMDQFSTAVVIVCLLAIGSSFAAGIRGGIFTLIFARLNIRLRNCLFRSLVSQETSFFDENRTGDLISRLTSDTTMVSDLVSQNINVFLRNTVKVTGVVVFMFSLSWQLSLVTFMGFPIIMMVSNIYGKYYKRLSKEVQNALARASNTAEETISAMKTVRSFANEEEEAEVYLRKLQQVYKLNRKEAAAYMYYVWGSGSVGSVYSGLMQGVGAAEKVFEFIDRQPTMVHDGSLAPDHLEGRVDFENVTFTYRTRPHTQVLQNVSFSLSPGKVTALVGPSGSGKSSCVNILENFYPLEGGRVLLDGKPISAYDHKYLHRVISLVSQEPVLFARSITDNISYGLPTVPFEMVVEAAQKANAHGFIMELQDGYSTETGEKGAQLSGGQKQRVAMARALVRNPPVLILDEATSALDAESEYLIQQAIHGNLQKHTVLIIAHRLSTVEHAHLIVVLDKGRVVQQGTHQQLLAQGGLYAKLVQRQMLGLQPAADFTAGHNEPVANGSHKA

SEQ ID NO: 2646 - protein, 766 aa, Homo sapiens
MRLWKAVVVTLAFMSVDICVTTAIYVFSHLDRSLLEDIRHFNIFDSVLDLWAACLYRSCLLLGATIGVAKNSALGPRRLRASWLVITLVCLFVGIYAMVKLLLFSEVRRPIRDPWFWALFVWTYISLGASFLLWWLLSTVRPGTQALEPGAATEAEGFPGSGRPPPEQASGATLQKLLSYTKPDVAFLVAASFFLIVAALGETFLPYYTGRAIDGIVIQKSMDQFSTAVVIVCLLAIGSSFAAGIRGGIFTLIFARLNIRLRNCLFRSLVSQETSFFDENRTGDLISRLTSDTTMVSDLVSQNINVFLRNTVKVTGVVVFMFSLSWQLSLVTFMGFPIIMMVSNIYGKYYKRLSKEVQNALARASNTAEETISAMKTVRSFANEEEEAEVYLRKLQQVYKLNRKEAAAYMYYVWGSGLTLLVVQVSILYYGGHLVISGQMTSGNLIAFIIYEFVLGDCMESVGSVYSGLMQGVGAAEKVFEFIDRQPTMVHDGSLAPDHLEGRVDFENVTFTYRTRPHTQVLQNVSFSLSPGKVTALVGPSGSGKSSCVNILENFYPLEGGRVLLDGKPISAYDHKYLHRVISLVSQEPVLFARSITDNISYGLPTVPFEMVVEAAQKANAHGFIMELQDGYSTETGEKGAQLSGGQKQRVAMARALVRNPPVLILDEATSALDAESEYLIQQAIHGNLQKHTVLIIAHRLSTVEHAHLIVVLDKGRVVQQGTHQQLLAQGGLYAKLVQRQMLGLQPAADFTAGHNEPVANGSHKA

SEQ ID NO: 2647 - protein, 1343 aa, Homo sapiens
MIIKEYRIPLPMTVEEYRIAQLYMIQKKSRNETYGEGSGVEILENRPYTDGPGGSGQYTHKVYHVGMHIPSWFRSILPKAALRVVEESWNAYPYTRTRFTCPFVEKFSIDIETFYKTDAGENPDVFNLSPVEKNQLTIDFIDIVKDPVPHNEYKTEEDPKLFQSTKTQRGPLSENWIEEYKKQVFPIMCAYKLCKVEFRYWGMQSKIERFIHDTGLRRVMVRAHRQAWCWQDEWYGLSMENIRELEKEAQLMLSRKMAQFNEDGEEATELVKHEAVSDQTSGEPPEPSSSNGEPLVGRGLKKQWSTSSKSSRSSKRGASPSRHSISEWRMQSIARDSDESSDDEFFDAHEDLSDTEEMFPKDITKWSSNDLMDKIESPEPEDTQDGLYRQGAPEFRVASSVEQLNIIEDEVSQPLAAPPSKIHVLLLVLHGGTILDTGAGDPSSKKGDANTIANVFDTVMRVHYPSALGRLAIRLVPCPPVCSDAFALVSNLSPYSHDEGCLSSSQDHIPLAALPLLATSSPQYQEAVATVIQRANLAYGDFIKSQEGMTFNGQVCLIGDCVGGILAFDALCYSNQPVSESQSSSRRGSVVSMQDNDLLSPGILMNAAHCCGGGGGGGGGGGSSGGGGSSGGSSLESSRHLSRSNVDIPRSNGTEDPKRQLPRKRSDSSTYELDTIQQHQAFLSSLHASVLRTEPCSRHSSSSTMLDGTGALGRFDFEITDLFLFGCPLGLVLALRKTVIPALDVFQLRPACQQVYNLFHPADPSASRLEPLLERRFHALPPFSVPRYQRYPLGDGCSTLLVETVQRNPELVLEGGPLAPLPHGDGFLETSMPVPAPTWQDGPRPGCAESDVLQTHNAAFQEHGAPSSPGTAPASRGFRRASEISIASQVSGMAESYTASSIAQIAAKWWGQKRIDYALYCPDALTAFPTVALPHLFHASYWESTDVVSFLLRQVMRHDNSSILELDGKEVSVFTPSKPREKWQRKRTHVKLRNVTANHRINDALANEDGPQVLTGRFMYGPLDMVTLTGEKVDVHIMTQPPSGEWLYLDTLVTNNSGRVSYTIPESHRLGVGVYPIKMVVRGDHTFADSYITVLPKGTEFVVFSIDGSFAASVSIMGSDPKVRAGAVDVVRHWQDLGYLIIYVTGRPDMQKQRVVAWLAQHNFPHGVVSFCDGLVHDPLRHKANFLKLLISELHLRVHAAYGSTKDVAVYSAISLSPMQIYIVGRPTKKLQQQCQFITDGYAAHLAQLKYSHRARPARNTATRMALRKGSFGLPGQGDFLRSRNHLLRTISAQPSGPSHRHERTQSQADGEQRGQRSMSVAAGCWGRAMTGRLEPGAAAGPK

SEQ ID NO: 2648 - protein, 414 aa, Homo sapiens
MLRCLYHWHRPVLNRRWSRLCLPKQYLFTMKLQSPEFQSLFTEGLKSLTELFVKENHELRIAGGAVRDLLNGVKPQDIDFATTATPTQMKEMFQSAGIRMINNRGEKHGTITARLHEENFEITTLRIDVTTDGRHAEVEFTTDWQKDAERRDLTINSMFLGFDGTLFDYFNGYEDLKNKKVRFVGHAKQRIQEDYLRILRYFRFYGRIVDKPGDHDPETLEAIAENAKGLAGISGERIWVELKKILVGLPANASLEEFDKVSKNVDGFSPKPVTLLASLFKVQDDVTKLDLRLKIAKEEKNLGLFIVKNRKDLIKATDSSDPLKPYQDFIIDSREPDATTRVCELLKYQGEHCLLKEMQQWSIPPFPVSGHDIRKVGISSGKEIGALLQQLREQWKKSGYQMEKDELLSYIKKT

SEQ ID NO: 2649 - protein, 626 aa, Homo sapiens
MMANDAKPDVKTVQVLRDTANRLRIHSIRATCASGSGQLTSCCSAAEVVSVLFFHTMKYKQTDPEHPDNDRFILSRGHAAPILYAAWVEVGDISESDLLNLRKLHSDLERHPTPRLPFVDVATGSLGQGLGTACGMAYTGKYLDKASYRVFCLMGDGESSEGSVWEAFAFASHYNLDNLVAVFDVNRLGQSGPAPLEHGADIYQNCCEAFGWNTYLVDGHDVEALCQAFWQASQVKNKPTAIVAKTFKGRGIPNIEDAENWHGKPVPKERADAIVKLIESQIQTNENLIPKSPVEDSPQISITDIKMTSPPAYKVGDKIATQKTYGLALAKLGRANERVIVLSGDTMNSTFSEIFRKEHPERFIECIIAEQNMVSVALGCATRGRTIAFAGAFAAFFTRAFDQLRMGAISQANINLIGSHCGVSTGEDGVSQMALEDLAMFRSIPNCTVFYPSDAISTEHAIYLAANTKGMCFIRTSQPETAVIYTPQENFEIGQAKVVRHGVNDKVTVIGAGVTLHEALEAADHLSQQGISVRVIDPFTIKPLDAATIISSAKATGGRVITVEDHYREGGIGEAVCAAVSREPDILVHQLAVSGVPQRGKTSELLDMFGISTRHIIAAVTLTLMK

SEQ ID NO: 2650 - protein, 553 aa, Homo sapiens
MKWCWGPVLLIAGATVLMEGLQAAQRACGQRGPGPPKPQEGNTVPGEWPWQASVRRQGAHICSGSLVADTWVLTAAHCFEKAAATELNSWSVVLGSLQREGLSPGAEEVGVAALQLPRAYNHYSQGSDLALLQLAHPTTHTPLCLPQPAHRFPFGASCWATGWDQDTSDAPGTLRNLRLRLISRPTCNCIYNQLHQRHLSNPARPGMLCGGPQPGVQGPCQGDSGGPVLCLEPDGHWVQAGIISFASSCAQEDAPVLLTNTAAHSSWLQARVQGAAFLAQSPETPEMSDEDSCVACGSLRTAGPQAGAPSPWPWEARLMHQGQLACGGALVSEEAVLTAAHCFIGRQAPEEWSVGLGTRPEEWGLKQLILHGAYTHPEGGYDMALLLLAQPVTLGASLRPLCLPYPDHHLPDGERGWVLGRARPGAGISSLQTVPVTLLGPRACSRLHAAPGGDGSPILPGMVCTSAVGELPSCEGLSGAPLVHEVRGTWFLAGLHSFGDACQGPARPAVFTALPAYEDWVSSLDWQVYFAEEPEPEAEPGSCLANISQPTSC

SEQ ID NO: 2651 - protein, 617 aa, Homo sapiens
MAAVAAGGLVGKGRDISLAALQRHDPYINRIVDVASQVALYTFGHRANEWEKTDVEGTLFVYTRSASPKHGFTIMNRLSMENRTEPITKDLDFQLQDPFLLYRNARLSIYGIWFYDKEECQRIAELMKNLTQYEQLKAHQGTGAGISPVILNSGEGKEVDILRMLIKAKDEYTKCKTCSEPKKITSSSAIYDNPNLIKPIPVKPSENQQQRIPQPNQTLDPEPQHLSLTALFGKQDKATCQETVEPPQTLHQQQQQQQQQQEKLPIRQGVVRSLSYEEPRRHSPPIEKQLCPAIQKLMVRSADLHPLSELPENRPCENGSTHSAGEFFTGPVQPGSPHNIGTSRGVQNASRTQNLFEKLQSTPGAANKCDPSTPAPASSAALNRSRAPTSVTPVAPGKGLAQPPQAYFNGSLPPQTVGHQAHGREQSTLPRQTLPISGSQTGSSGVISPQELLKKLQIVQQEQQLHASNRPALAAKFPVLAQSSGTGKPLESWINKTPNTEQQTPLFQVISPQRIPATAAPSLLMSPMVFAQPTSVPPKERESGLLPVGGQEPPAAATSLLLPIQSPEPSVITSSPLTKLQLQEALLYLIQNDDNFLNIIYEAYLFSMTQAAMKKTM

SEQ ID NO: 2652 - protein, 529 aa, Homo sapiens
MRSEKSLTLAAPGEVRGPEGEQQDAGDFPEAGGGGGCCSSERLVINISGLRFETQLRTLSLFPDTLLGDPGRRVRFFDPLRNEYFFDRNRPSFDAILYYYQSGGRLRRPVNVPLDIFLEEIRFYQLGDEALAAFREDEGCLPEGGEDEKPLPSQPFQRQVWLLFEYPESSGPARGIAIVSVLVILISIVIFCLETLPQFRVDGRGGNNGGVSRVSPVSRGSQEEEEDEDDSYTFHHGITPGEMGTGGSSSLSTLGGSFFTDPFFLVETLCIVWFTFELLVRFSACPSKPAFFRNIMNIIDLVAIFPYFITLGTELVQQQEQQPASGGGGQNGQQAMSLAILRVIRLVRVFRIFKLSRHSKGLQILGKTLQASMRELGLLIFFLFIGVILFSSAVYFAEADDDDSLFPSIPDAFWWAVVTMTTVGYGDMYPMTVGGKIVGSLCAIAGVLTIALPVPVIVSNFNYFYHRETEQEEQGQYTHVTCGQPAPDLRATDNGLGKPDFPEANRERRPSYLPTPHRAYAEKRMLTEV

SEQ ID NO: 2653 - protein, 476 aa, Homo sapiens
MNYCMQEIYEVHPAAGSNCYMQSTDYYAYFEDSPGYSGCDAQAVPSNNIYMEQAWAVNQPYTCSYPGNMFKSKDSDLDMALNQYSQPEYFTEEKPTFSQVQSPSYSQKKGYIPSYLDKDELCVVCGDKATGYHYRCITCEGCKGFFRRTIQKNLHPSYSCKYEGKCVIDKVTRNQCQECRFKKCIYVGMATDLVLDDSKRLAKRKLIEENREKRRREELQKSIGHKPEPTDEEWELIKTVTEAHVATNAQGSHWKQKRKFLPEDIGQAPIVNAPEGGKVDLEAFSHFTKIITPAITRVVDFAKKLPMFCELPCEDQIILLKGCCMEIMSLRAAVRYDPESETLTLNGEMAVTRGQLKNGGLGVVSDAIFDLGMSLSSFNLDDTEVALLQAVLLMSSDRPGLACVERIEKYQDSFLLAFEHYINYRKHHVTHFWPKLLMKVTDLRMIGACHASRFLHMKVECPTELFPPLFLEVFED

SEQ ID NO: 2654 - protein, 654 aa, Homo sapiens [sequence omitted]

SEQ ID NO: 2655 - protein, 332 aa, Homo sapiens
MATIKSELIKNFAEEEAIHHNKISIVGTGSVGVACAISILLKGLSDELVLVDVDEGKLKGETMDLQHGSPFMKMPNIVSSKDYLVTANSNLVIITAGARQKKGETRLDLVQRNVSIFKLMIPNITQYSPHCKLLIVTNPVDILTYVAWKLSGFPKNRVIGSGCNLDSARFRYFIGQRLGIHSESCHGLILGEHGDSSVPVWSGVNIAGVPLKDLNPDIGTDKDPEQWENVHKKVISSGYEMVKMKGYTSWGISLSVADLTESILKNLRRVHPVSTLSKGLYGINEDIFLSVPCILGENGITDLIKVKLTLEEEACLQKSAETLWEIQKELKL

SEQ ID NO: 2656 - protein, 116 aa, Homo sapiens
MNQTDKNQQEIPSYLNDEPPEGSMKDHPQQQPGMLSRVTGGIFSVTKGAVGATIGGVAWIGGKSLEVTKTAVTTVPSMGIGLVKGGVSAVAGGVTAVGSAVVNKVPLTGKKKDKSD

SEQ ID NO: 2657 - protein, 1104 aa, Homo sapiens
MARRGKKPVVRTLEDLTLDSGYGGAADSVRSSNLSLCCSDSHPASPYGGSCWPPLADSMHSRHNSFDTVNTALVEDSEGLDCAGQHCSRLLPDLDEVPWTLQELEALLLRSRDPRAGPAVPGGLPKDALAKLSTLVSRALVRIAKEAQRLSLRFAKCTKYEIQSAMEIVLSWGLAAHCTAAALAALSLYNMSSAGGDRLGRGKSARCGLTFSVGRVYRWMVDSRVALRIHEHAAIYLTACMESLFRDIYSRVVASGVPRSCSGPGSGSGSGPGPSSGPGAAPAADKEREAPGGGAASGGACSAASSASGGSSCCAPPAAAAAAVPPAAAANHHHHHHHALHEAPKFTVETLEHTVNNDSEIWGLLQPYQHLICGKNASGVLCLPDSLNLHRDPQRSNKPGELPMFSQSELRTIEQSLLATRVGSIAELSDLVSRAMHHLQPLNAKHHGNGTPLHHKQGALYWEPEALYTLCYFMHCPQMEWENPNVEPSKVNLQVERPFLVLPPLMEWIRVAVAHAGHRRSFSMDSDDVRQAARLLLPGVDCEPRQLRADDCFCASRKLDAVAIEAKFKQDLGFRMLNCGRTDLVKQAVSLLGPDGINTMSEQGMTPLMYACVRGDEAMVQMLLDAGADLNVEVVSTPHKYPSVHPETRHWTALTFAVLHGHIPVVQLLLDAGAKVEGSVEHGEENYSETPLQLAAAVGNFELVSLLLERGADPLIGTMYRNGISTTPQGDMNSFSQAAAHGHRNVFRKLLAQPEKEKSDILSLEEILAEGTDLAETAPPPLCASRNSKAKLRALREAMYHSAEHGYVDVTIDIRSIGVPWTLHTWLESLRIAFQQHRRPLIQCLLKEFKTIQEEEYTEELVTQGLPLMFEILKASKNEVISQQLCVIFTHCYGPYPIPKLTEIKRKQTSRLDPHFLNNKEMSDVTFLVEGRPFYAHKVLLFTASPRFKALLSSKPTNDGTCIEIGYVKYSIFQLVMQYLYYGGPESLLIKNNEIMELLSAAKFFQLEALQRHCEIICAKSINTDNCVDIYNHAKFLGVTELSAYCEGYFLKNMMVLIENEAFKQLLYDKNGEGTGQDVLQDLQRTLAIRIQSIHLSSSKGSVV

SEQ ID NO: 2658 - protein, 4377 aa, Homo sapiens
MAHAASQLKKNRDLEINAEEEPEKKRKHRKRSRDRKKKSDANASYLRAARAGHLEKALDYIKNGVDINICNQNGLNALHLASKEGHVEVVSELLQREANVDAATKKGNTALHIASLAGQAEVVKVLVTNGANVNAQSQNGFTPLYMAAQENHLEVVKFLLDNGASQSLATEDGFTPLAVALQQGHDQVVSLLLENDTKGKVRLPALHIAARKDDTKAAALLLQNDNNADVESKSGFTPLHIAAHYGNINVATLLLNRAAAVDFTARNDITPLHVASKRGNANMVKLLLDRGAKIDAKTRDGLTPLHCGARSGHEQVVEMLLDRAAPILSKTKNGLSPLHMATQGDHLNCVQLLLQHNVPVDDVTNDYLTALHVAAHCGHYKVAKVLLDKKANPNAKALNGFTPLHIACKKNRIKVMELLLKHGASIQAVTESGLTPIHVAAFMGHVNIVSQLMHHGASPNTTNVRGETALHMAARSGQAEVVRYLVQDGAQVEAKAKDDQTPLHISARLGKADIVQQLLQQGASPNAATTSGYTPLHLSAREGHEDVAAFLLDHGASLSITTKKGFTPLHVAAKYGKLEVANLLLQKSASPDAAGKSGLTPLHVAAHYDNQKVALLLLDQGASPHAAAKNGYTPLHIAAKKNQMDIATTLLEYGADANAVTRQGIASVHLAAQEGHVDMVSLLLGRNANVNLSNKSGLTPLHLAAQEDRVNVAEVLVNQGAHVDAQTKMGYTPLHVGCHYGNIKIVNFLLQHSAKVNAKTKNGYTPLHQAAQQGHTHIINVLLQNNASPNELTVNGNTALGIARRLGYISVVDTLKIVTEETMTTTTVTEKHKMNVPETMNEVLDMSDDEVRKANAPEMLSDGEYISDVEEGEDAMTGDTDKYLGPQDLKELGDDSLPAEGYMGFSLGARSASLRSFSSDRSYTLNRSSYARDSMMIEELLVPSKEQHLTFTREFDSDSLRHYSWAADTLDNVNLVSSPIHSGFLVSFMVDARGGSMRGSRHHGMRIIIPPRKCTAPTRITCRLVKRHKLANPPPMVEGEGLASRLVEMGPAGAQFLGPVIVEIPHFGSMRGKERELIVLRSENGETWKEHQFDSKNEDLTELLNGMDEELDSPEELGKKRICRIITKDFPQYFAVVSRIKQESNQIGPEGGILSSTTVPLVQASFPEGALTKRIRVGLQAQPVPDEIVKKILGNKATFSPIVTVEPRRRKFHKPITMTIPVPPPSGEGVSNGYKGDTTPNLRLLCSITGGTSPAQWEDITGTTPLTFIKDCVSFTTNVSARFWLADCHQVLETVGLATQLYRELICVPYMAKFVVFAKMNDPVESSLRCFCMTDDKVDKTLEQQENFEEVARSKDIEVLEGKPIYVDCYGNLAPLTKGGQQLVFNFYSFKENRLPFSIKIRDTSQEPCGRLSFLKEPKTTKGLPQTAVCNLNITLPAHKKETESDQDDEIEKTDRRQSFASLALRKRYSYLTEPGMIERSTGATRSLPTTYSYKPFFSTRPYQSWTTAPITVPGPAKSGFTSLSSSSSNTPSASPLKSIWSVSTPSPIKSTLGASTTSSVKSISDVASPIRSFRTMSSPIKTVVSQSPYNIQVSSGTLARAPAVTEATPLKGLASNSTFSSRTSPVTTAGSLLERSSITMTPPASPKSNINMYSSSLPFKSIITSAAPLISSPLKSVVSPVKSAVDVISSAKITMASSLSSPVKQMPGHAEVALVNGSISPLKYPSSSTLINGCKATATLQEKISSATNSVSSVVSAATDTVEKVFSTTTAMPFSPLRSYVSAAPSAFQSLRTPSASALYTSLGSSISATTSSVTSSIITVPVYSVVNVLPEPALKKLPDSNSFTKSAAALLSPIKTLTTETHPQPHFSRTSSPVKSSLFLAPSALKLSTPSSLSSSQEILKDVAEMKEDLMRMTAILQTDVPEEKPFQPELPKEGRIDDEEPFKIVEKVKEDLVKVSEILKKDVCVDNKGSPKSPKSDKGHSPEDDWIEFSSEEIREARQQAAASQSPSLPERVQVKAKAASEKDYNLTKVIDYLTNDIGSSSLTNLKYKFEDAKKDGEERQKRVLKPAIALQEHKLKMPPASMRTSTSEKELCKMADSFFGTDTILESPDDFSQHDQDKSPLSDSGFETRSEKTPSAPQSAESTGPKPLFHEVPIPPVITETRTEVVHVIRSYDPSAGDVPQTQPEEPVSPKPSPTFMELEPKPTTSSIKEKVKAFQMKASSEEDDHNRVLSKGMRVKEETHITTTTRMVYHSPPGGEGASERIEETMSVHDIMKAFQSGRDPSKELAGLFEHKSAVSPDVHKSAAETSAQHAEKDNQMKPKLERIIEVHIEKGNQAEPTEVIIRETKKHPEKEMYVYQKDLSRGDINLKDFLPEKHDAFPCSEEQGQQEEEELTAEESLPSYLESSRVNTPVSQEEDSRPSSAQLISDDSYKTLKLLSQHSIEYHDDELSELRGESYRFAEKMLLSEKLDVSHSDTEESVTDHAGPPSSELQGSDKRSREKIATAPKKEILSKIYKDVSENGVGKVSKDEHFDKVTVLHYSGNVSSPKHAMWMRFTEDRLDRGREKLIYEDRVDRTVKEAEEKLTEVSQFFRDKTEKLNDELQSPEKKARPKNGKEYSSQSPTSSSPEKVLLTELLASNDEWVKARQHGPDGQGFPKAEEKAPSLPSSPEKMVLSQQTEDSKSTVEAKGSISQSKAPDGPQSGFQLKQSKLSSIRLKFEQGTHAKSKDMSQEDRKSDGQSRIPVKKIQESKLPVYQVFAREKQQKAIDLPDESVSVQKDFMVLKTKDEHAQSNEIVVNDSGSDNVKKQRTEMSSKAMPDSFSEQQAKDLACHITSDLATRGPWDKKVFRTWESSGATNNKSQKEKLSHVLVHDVRENHIGHPESKSVDQKNEFMSVTERERKLLTNGSLSEIKEMTVKSPSKKVLYREYVVKEGDHPGGLLDQPSRRSESSAVSHIPVRVADERRMLSSNIPDGFCEQSAFPKHELSQKLSQSSMSKETVETQHFNSIEDEKVTYSEISKVSKHQSYVGLCPPLEETETSPTKSPDSLEFSPGKESPSSDVFDHSPIDGLEKLAPLAQTEGGKEIKTLPVYVSFVQVGKQYEKEIQQGGVKKIISQECKTVQETRGTFYTTRQQKQPPSPQGSPEDDTLEQVSFLDSSGKSPLTPETPSSEEVSYEFTSKTPDSLIAYIPGKPSPIPEVSEESEEEEQAKSTSLKQTTVEETAVEREMPNDVSKDSNQRPKNNRVAYIEFPPPPPLDADQIESDKKHHYLPEKEVDMIEVNLQDEHDKYQLAEPVIRVQPPSPVPPGADVSDSSDDESIYQPVPVKKYTFKLKEVDDEQKEKPKASAEKASNQKELESNGSGKDNEFGLGLDSPQNEIAQNGNNDQSITECSIATTAEFSHDTDATEIDSLDGYDLQDEDDGLTESDSKLPIQAMEIKKDIWNTEGILKPADRSFSQSKLEVIEEEGKVGPDEDKPPSKSSSSEKTPDKTDQKSGAQFFTLEGRHPDRSVFPDTYFSYKVDEEFATPFKTVATKGLDFDPWSNNRGDDEVFDSKSREDETKPFGLAVEDRSPATTPDTTPARTPTDESTPTSEPNPFPFHEGKMFEMTRSGAIDMSKRDFVEERLQFFQIGEHTSEGKSGDQGEGDKSMVTATPQPQSGDTTVETNLERNVETPTVEPNPSIPTSGECQEGTSSSGSLEKSAAATNTSKVDPKLRTPIKMGISASTMTMKKEGPGEITDKIEAVMTSCQGLENETITMISNTANSQMGVRPHEKHDFQKDNFNNNNNLDSSTIQTDNIMSNIVLTEHSAPTCTTEKDNPVKVSSGKKTGVLQGHCVRDKQKVLGEQQKTKELIGIRQKSKLPIKATSPKDTFPPNHMSNTKASKMKQVSQSEKTKALTTSSCVDVKSRIPVKNTHRDNIIAVRKACATQKQGQPEKGKAKQLPSKLPVKVRSTCVTTTTTTATTTTTTTTTTTTSCTVKVRKSQLKEVCKHSIEYFKGISGETLKLVDRLSEEEKKMQSELSDEEESTSRNTSLSETSRGGQPSVTTKSARDKKTEAAPLKSKSEKAGSEKRSSRRTGPQSPCERTDIRMAIVADHLGLSWTELARELNFSVDEINQIRVENPNSLISQSFMLLKKWVTRDGKNATTDALTSVLTKINRIDIVTLLEGPIFDYGNISGTRSFADENNVFHDPVDGWQNETSSGNLESCAQARRVTGGLLDRLDDSPDQCRDSITSYLKGEAGKFEANGSHTEITPEAKTKSYFPESQNDVGKQSTKETLKPKIHGSGHVEEPASPLAAYQKSLEETSKLIIEETKPCVPVSMKKMSRTSPADGKPRLSLHEEEGSSGSEQKQGEGFKVKTKKEIRHVEKKSHS

SEQ ID NO: 2659 - protein, 409 aa, Homo sapiens
MRRYLRVVVLCVACGFCSLLYAFSQLAVSLEEGTGGGGGKPQAAVASWLAGGGRGAVRGAGVAGPAAHPGVSDRYSLKIQPVEKMHLAVVACGERLEETMTMLKSAIIFSIKPLQFHIFAEDQLHHSFKGRLDNWSFLQTFNYTLYPITFPSENAAEWKKLFKPCASQRLFLPLILKEVDSLLYVDTDILFLRPVDDIWSLLKKFNSTQIAAMAPEHEEPRIGWYNRFARHPYYGKTGVNSGVMLMNMTRMRRKYFKNDMTTVRLQWGDILMPLLKKYKLNITWGDQDLLNIVFFHNPESLFVFPCQWNYRPDHCIYGSNCQEAEEGGIFILHGNRGVYHDDKQPAFRAVYEALRNCSFEDDNIRSLLKPLELELQKTVHTYCGKIYKIFIKQLAKSVRDRYARSPKEK

SEQ ID NO: 2660 - protein, 1556 aa, Homo sapiens
MADRSLEGMALPLEVRARLAELELELSEGDITQKGYEKKRSKLIGAYLPQPPRVDQALPQERRAPVTPSSASRYHRRRSSGSRDERYRSDVHTEAVQAALAKHKERKMAVPMPSKRRSLVVQTSMDAYTPPDTSSGSEDEGSVQGDSQGTPTSSQGSINMEHWISQAIHGSTTSTTSSSSTQSGGSGAAHRLADVMAQTHIENHSAPPDVTTYTSEHSIQVERPQGSTGSRTAPKYGNAELMETGDGVPVSSRVSAKIQQLVNTLKRPKRPPLREFFVDDFEELLEVQQPDPNQPKPEGAQMLAMRGEQLGVVTNWPPSLEAALQRWGTISPKAPCLTTMDTNGKPLYILTYGKLWTRSMKVAYSILHKLGTKQEPMVRPGDRVALVFPNNDPAAFMAAFYGCLLAEVVPVPIEVPLTRKDAGSQQIGFLLGSCGVTVALTSDACHKGLPKSPTGEIPQFKGWPKLLWFVTESKHLSKPPRDWFPHIKDANNDTAYIEYKTCKDGSVLGVTVTRTALLTHCQALTQACGYTEAETIVNVLDFKKDVGLWHGILTSVMNMMHVISIPYSLMKVNPLSWIQKVCQYKAKVACVKSRDMHWALVAHRDQRDINLSSLRMLIVADGANPWSISSCDAFLNVFQSKGLRQEVICPCASSPEALTVAIRRPTDDSNQPPGRGVLSMHGLTYGVIRVDSEEKLSVLTVQDVGLVMPGAIMCSVKPDGVPQLCRTDEIGELCVCAVATGTSYYGLSGMTKNTFEVFPMTSSGAPISEYPFIRTGLLGFVGPGGLVFVVGKMDGLMVVSGRRHNADDIVATALAVEPMKFVYRGRIAVFSVTVLHDERIVIVAEQRPDSTEEDSFQWMSRVLQAIDSIHQVGVYCLALVPANTLPKTPLGGIHLSETKQLFLEGSLHPCNVLMCPHTCVTNLPKPRQKQPEIGPASVMVGNLVSGKRIAQASGRDLGQIEDNDQARKFLFLSEVLQWRAQTTPDHILYTLLNCRGAIANSLTCVQLHKRAEKIAVMLMERGHLQDGDHVALVYPPGIDLIAAFYGCLYAGCVPITVRPPHPQNIATTLPTVKMIVEVSRSACLMTTQLICKLLRSREAAAAVDVRTWPLILDTDDLPKKRPAQICKPCNPDTLAYLDFSVSTTGMLAGVKMSHAATSAFCRSIKLQCELYPSREVAICLDPYCGLGFVLWCLCSVYSGHQSILIPPSELETNPALWLLAVSQYKVRDTFCSYSVMELCTKGLGSQTESLKARGLDLSRVRTCVVVAEERPRIALTQSFSKLFKDLGLHPRAVSTSFGCRVNLAICLQGTSGPDPTTVYVDMRALRHDRVRLVERGSPHSLPLMESGKILPGVRIIIANPETKGPLGDSHLGEIWVHSAHNASGYFTIYGDESLQSDHFNSRLSFGDTQTIWARTGYLGFLRRTELTDANGERHDALYVVGALDEAMELRGMRYHPIDIETSVIRAHKSVTECAVFTWTNLLVVVVELDGSEQEALDLVPLVTNVVLEEHYLIVGVVVVVDIGVIPINSRGEKQRMHLRDGFLADQLDPIYVAYNM

SEQ ID NO: 2661 - protein, 901 aa, Homo sapiens
MEAARPSGSWNGALCRLLLLTLAILIFASDACKNVTLHVPSKLDAEKLVGRVNLKECFTAANLIHSSDPDFQILEDGSVYTTNTILLSSEKRSFTILLSNTENQEKKKIFVFLEHQTKVLKKRHTKEKVLRRAKRRWAPIPCSMLENSLGPFPLFLQQVQSDTAQNYTIYYSIRGPGVDQEPRNLFYVERDTGNLYCTRPVDREQYESFEIIAFATTPDGYTPELPLPLIIKIEDENDNYPIFTEETYTFTIFENCRVGTTVGQVCATDKDEPDTMHTRLKYSIIGQVPPSPTLFSMHPTTGVITTTSSQLDRELIDKYQLKIKVQDMDGQYFGLQTTSTCIINIDDVNDHLPTFTRTSYVTSVEENTVDVEILRVTVEDKDLVNTANWRANYTILKGNENGNFKIVTDAKTNEGVLCVVKPLNYEEKQQMILQIGVVNEAPFSREASPRSAMSTATVTVNVEDQDEGPECNPPIQTVRMKENAEVGTTSNGYKAYDPETRSSSGIRYKKLTDPTGWVTIDENTGSIKVFRSLDREAETIKNGIYNITVLASDQGGRTCTGTLGIILQDVNDNSPFIPKKTVIICKPTMSSAEIVAVDPDEPIHGPPFDFSLESSTSEVQRMWRLKAINDTAARLSYQNDPPFGSYVVPITVRDRLGMSSVTSLDVTLCDCITENDCTHRVDPRIGGGGVQLGKWAILAILLGIALLFCILFTLVCGASGTSKQPKVIPDDLAQQNLIVSNTEAPGDDKVYSANGFTTQTVGASAQGVCGTVGSGIKNGGQETIEMVKGGHQTSESCRGAGHHHTLDSCRGGHTEVDNCRYTYSEWHSFTQPRLGEKVYLCNQDENHKHAQDYVLTYNYEGRGSVAGSVGCCSERQEEDGLEFLDNLEPKFRTLAEACMKR

SEQ ID NO: 2662 - protein, 323 aa, Homo sapiens
MPEMPEDMEQEEVNIPNRRVLVTGATGLLGRAVHKEFQQNNWHAVGCGFRRARPKFEQVNLLDSNAVHHIIHDFQPHVIVHCAAERRPDVVENQPDAASQLNVDASGNLAKEAAAVGAFLIYISSDYVFDGTNPPYREEDIPAPLNLYGKTKLDGEKAVLENNLGAAVLRIPILYGEVEKLEESAVTVMFDKVQFSNKSANMDHWQQRFPTHVKDVATVCRQLAEKRMLDPSIKGTFHWSGNEQMTKYEMACAIADAFNLPSSHLRPITDSPVLGAQRPRNAQLDCSKLETLGIGQRTPFRIGIKESLWPFLIDKRWRQTVFH

SEQ ID NO: 2663 - protein, 2319 aa, Homo sapiens
MLTMSVTLSPLRSQDLDPMATDASPMAINMTPTVEQGEGEEAMKDMDSDQQYEKPPPLHTGADWKIVLHLPEIETWLRMTSERVRDLTYSVQQDSDSKHVDVHLVQLKDICEDISDHVEQIHALLETEFSLKLLSYSVNVIVDIHAVQLLWHQLRVSVLVLRERILQGLQDANGNYTRQTDILQAFSEETKEGRLDSLTEVDDSGQLTIKCSQNYLSLDCGITAFELSDYSPSEDLLSGLGDMTSSQVKTKPFDSWSYSEMEKEFPELIRSVGLLTVAADSISTNGSEAVTEEVSQVSLSVDDKGGCEEDNASAVEEQPGLTLGVSSSSGEALTNAAQPSSETVQQESSSSSHHDAKNQQPVPCENATPKRTIRDCFNYNEDSPTQPTLPKRGLFLKEETFKNDLKGNGGKRQMVDLKPEMSRSTPSLVDPPDRSKLCLVLQSSYPNSPSAASQSYECLHKVGNGNLENTVKFHIKEISSSLGRLNDCYKEKSRLKKPHKTSEEVPPCRTPKRGTGSGKQAKNTKSSAVPNGELSYTSKAIEGPQTNSASTSSLEPCNQRSWNAKLQLQSETSSSPAFTQSSESSVGSDNIMSPVPLLSKHKSKKGQASSPSHVTRNGEVVEAWYGSDEYLALPSHLKQTEVLALKLENLTKLLPQKPRGETIQNIDDWELSEMNSDSEIYPTYHVKKKHTRLGRVSPSSSSDIASSLGESIESGPLSDILSDEESSMPLAGMKKYADEKSERASSSEKNESHSATKSALIQKLMQDIQHQDNYEAIWEKIEGFVNKLDEFIQWLNEAMETTENWTPPKAEMDDLKLYLETHLSFKLNVDSHCALKEAVEEEGHQLLELIASHKAGLKDMLRMIASQWKELQRQIKRQHSWILRALDTIKAEILATDVSVEDEEGTGSPKAEVQLCYLEAQRDAVEQMSLKLYSEQYTSSSKRKEEFADMSKVHSVGSNGLLDFDSEYQELWDWLIDMESLVMDSHDLMMSEEQQQHLYKRYSVEMSIRHLKKTELLSKVEALKKGGVLLPNDLLEKVDSINEKWELLGKTLGEKIQDTMAGHSGSSPRDLLSPESGSLVRQLEVRIKELKGWLRDTELFIFNSCLRQEKEGTMNTEKQLQYFKSLCREIKQRRRGVASILRLCQHLLDDRETCNLNADHQPMQLIIVNLERRWEAIVMQAVQWQTRLQKKMGKESETLNVIDPGLMDLNGMSEDALEWDEMDISNKLISLNEESNDLDQELQPVIPSLKLGETSNEDPGYDEEADNHGGSQYASNITAPSSPHIYQVYSLHNVELYEDNHMPFLKNNPKVTGMTQPNVLTKSLSKDSSFSSTKSLPDLLGGSNLVKPCACHGGDMSQNSGSESGIVSEGDTETTTNSEMCLLNAVDGSPSNLETEHLDPQMGDAVNVLKQKFTDEGESIKLPNSSQSSISPVGCVNGKVGDLNSITKHTPDCLGEELQGKHDVFTFYDYSYLQGSKLKLPMIMKQSQSEKAHVEDPLLRGFYFDKKSCKSKHQTTELQPDVPPHERILASASHEMDRISYKSGNIEKTFTGMQNAKQLSLLSHSSSIESLSPGGDLFGLGIFKNGSDSLQRSTSLESWLTSYKSNEDLFSCHSSGDISVSSGSVGELSKRTLDLLNRLENIQSPSEQKIKRSVSDITLQSSSQKMSFTGQMSLDIASSINEDSAASLTELSSSDELSLCSEDIVLHKNKIPESNASFRKRLTRSVADESDVNVSMIVNVSCTSACTDDEDDSDLLSSSTLTLTEEELCIKDEDDDSSIATDDEIYEDCTLMSGLDYIKNELQTWIRPKLSLTRDKKRCNVSDEMKGSKDISSSEMTNPSDTLNIETLLNGSVKRVSENNGNGKNSSHTHELGTKRENKKTIFKVNKDPYVADMENGNIEGIPERQKGKPNVTSKVSENLGSHGKEISESEHCKCKALMDSLDDSNTAGKEFVSQDVRHLPKKCPNHHHFENQSTASTPTEKSFSELALETRFNNRQDSDALKSSDDAPSMAGKSAGCCLALEQNGTEENASISNISCCNCEPDVFHQKDAEDCSVHNFVKEIIDMASTALKSKSQPENEVAAPTSLTQIKEKVLEHSHRPIQLRKGDFYSYLSLSSHDSDCGEVTNYIEEKSSTPLPLDTTDSGLDDKEDIECFFEACVEGDSDGEEPCFSSAPPNESAVPSEAAMPLQATACSSEFSDSSLSADDADTVALSSPSSQERAEVGKEVNGLPQTSSGCAENLEFTPSKLDSEKESSGKPGESGMPEEHNAASAKSKVQDLSLKANQPTDKAALHPSPKTLTCEENLLNLHEKRHRNMHR

SEQ ID NO: 2664 - protein, 119 aa, Homo sapiens
MIARRNPEPLRFLPDEARSLPPPKLTDPRLLYIGFLGYCSGLIDNLIRRRPIATAGLHRQLLYITAFFFAGYYLVKREDYLYAVRDREMFGYMKLHPEDFPEEDKKTYGEIFEKFHPIR

SEQ ID NO: 2665 - protein, 464 aa, Homo sapiens
MPSCSTSTMPGMICKNPDLEFDSLQPCFYPDEDDFYFGGPDSTPPGEDIWKKFELLPTPPLSPSRGFAEHSSEPPSWVTEMLLENELWGSPAEEDAFGLGGLGGLTPNPVILQDCMWSGFSAREKLERAVSEKLQHGRGPPTAGSTAQSPGAGAASPAGRGHGGAAGAGRAGAALPAELAHPAAECVDPAVVFPFPVNKREPAPVPAAPASAPAAGPAVASGAGIAAPAGAPGVAPPRPGGRQTSGGDHKALSTSGEDTLSDSDDEDDEEEDEEEEIDVVTVEKRRSSSNTKAVTTFTITVRPKNAALGPGRAQSSELILKRCLPIHQQHNYAAPSPYVESEDAPPQKKIKSEASPRPLKSVIPPKAKSLSPRNSDSEDSERRRNHNILERQRRNDLRSSFLTLRDHVPELVKNEKAAKVVILKKATEYVHSLQAEEHQLLLEKEKLQARQQQLLKKIEHARTC

SEQ ID NO: 2666 - protein, 193 aa, Homo sapiens
MDNLRETFLSLEDGLGSSDSPGLLSSWDWKDRAGPFELNQASPSQSLSPAPSLESYSSSPCPAVAGLPCEHGGASSGGSEGCSVGGASGLVEVDYNMLAFQPTHLQGGGGPKAQKGTKVRMSVQRRRKASEREKLRMRTLADALHTLRNYLPPVYSQRGQPLTKIQTLKYTIKYIGELTDLLNRGREPRAQSA

SEQ ID NO: 2667 - protein, 822 aa, Homo sapiens
MGFGSDLKNSHEAVLKLQDWELRLLETVKKFMALRIKSDKEYASTLQNLCNQVDKESTVQMNYVSNVSKSWLLMIQQTEQLSRIMKTHAEDLNSGPLHRLTMMIKDKQQVKKSYIGVHQQIEAEMIKVTKTELEKLKCSYRQLIKEMNSAKEKYKEALAKGKETEKAKERYDKATMKLHMLHNQYVLALKGAQLHQNQYYDITLPLLLDSLQKMQEEMIKALKGIFDEYSQITSLVTEEIVNVHKEIQMSVEQIDPSTEYNNFIDVHRTTAAKEQEIEFDTSLLEENENLQANEIMWNNLTAESLQVMLKTLAEELMQTQQMLLNKEEAVLELEKRIEESSETCEKKSDIVLLLSQKQALEELKQSVQQLRCTEAKFSAQKELLEQKVQENDGKEPPPVVNYEEDARSVTSMERKERLSKFESIRHSIAGIIRSPKSALGSSALSDMISISEKPLAEQDWYHGAIPRIEAQELLKKQGDFLVRESHGKPGEYVLSVYSDGQRRHFIIQYVDNMYRFEGTGFSNIPQLIDHHYTTKQVITKKSGVVLLNPIPKDKKWILSHEDVILGELLGKGNFGEVYKGTLKDKTSVAVKTCKEDLPQELKIKFLQEAKILKQYDHPNIVKLIGVCTQRQPVYIIMELVSGGDFLTFLRRKKDELKLKQLVKFSLDAAAGMLYLESKNCIHRDLAARNCLVGENNVLKISDFGMSRQEDGGVYSSSGLKQIPIKWTAPEALNYGRYSSESDVWSFGILLWETFSLGVCPYPGMTNQQAREQVERGYRMSAPQHCPEDISKIMMKCWDYKPENRPKFSELQKELTIIKRKLT

SEQ ID NO: 2668 - protein, 1165 aa, Homo sapiens [sequence omitted]

SEQ ID NO: 2669 - protein, 432 aa, Homo sapiens
MHLRIHARRSPPRRPAWTLGIWFLFWGCIVSSVWSSSNVASSSSTSSSPGSHSQHEHHFHGSKHHSVPISIYRSPVSLRGGHAGATYIFGKSGGLILYTWPANDRPSTRSDRLAVGFSTTVKDGILVRIDSAPGLGDFLQLHIEQGKIGVVFNIGTVDISIKEERTPVNDGKYHVVRFTRNGGNATLQVDNWPVNEHYPTGRQLTIFNTQAQIAIGGKDKGRLFQGQLSGLYYDGLKVLNMAAENNPNIKINGSVRLVGEVPSILGTTQTTSMPPEMSTTVMETTTTMATTTTRKNRSTASIQPTSDDLVSSAECSSDDEDFVECEPSTGRSANPTEPGIRRVPGASEVIRESSSTTGMVVGIVAAAALCILILLYAMYKYRNRDEGSYQVDETRNYISNSAQSNGTLMKEKQQSSKSGHKKQKNKDREYYV

SEQ ID NO: 2670 - protein, 1094 aa, Homo sapiens
MAESSSESDHFRCRDRLSPWAARSTHRGTRSLPTVEVTEKVNTITSTLQDTSRNLRQVDQMLGRYREYSNGQAGAIEHLKESLEQSIDQLRSQRLLRNSGGRSISVTSLSASDLDGGTGSELHHFPPTSPLKDYGDPQGIKRMRSRTGVRFVQETDDMTQLHGFHQSLRDLSSEQIRLGDDFNRELSRRSRSDAETKRALEELTEKLNEAQKQEVVSDRVERRLQELEREMRTERELVERRQDQLGLMSLQLQEALKKQEAKADEHEGAIKNKLRQTETEKNQLEQELELSRRLLNQSEGSRETLLHQVEELRTQLTKAEGDRKGLQHQVSQISKQQSNYQDEQGEDWRFRRGVEREKQDLEKQMSDLRVQLNFSAMASELEEVKRCMERKDKEKAHLASQVENLTRELENGEKQQLQMLDRLKEIQNHFDTCEAERKHADLQISELTRHAEDATKQAERYLSELQQSEALKEEAEKRREDLKLKAQESIRQWKLKHKKLERALEKQSETVDELTGKNNQILKEKDELKTQLYAALQQIENLRKELNDVLTKRALQEEELHSKEEKLRDIKSHQADLELEVKNSLDTIHRLESELKKQSKIQSQMKVEKAHLEEEIAELKKSQAQDKAKLLEMQESIKDLSAIRADLANKLAEEERAKKAVLKDLSDLTAQAKSRDEETATIITQLKLERDVHQRELKDLTSSLQSVKTKHEQNIQELMKHFKKEKSEAENHIRTLKAESLEEKNMAKIHRGQLEKLKSQCDRLTEELTQNENENKKLKLKYQCLKDQLEEREKHISIEEEHLRRMEEARLQLKDQLLCLETEQESILGVIGKEIDAACKTFSKDSVEKLKVFSSGPDIHYDPHRWLAESKTKLQWLCEELKERENREKNLRHQLMLCRQQLRNLTENKESELQCLFQQIERQEQLLDEIHREKRDLLEETQRKDEEMGSLQDRVIALETSTQVALDHLESVPEKLSLLEDFKDFRDSCSSSERTDGRYSKYRVRRNSLQHHQDDTKYRTKSFKGDRTFLEGSHTRGLDHSSSWQDHSRFLSSPRFSYVNSFTKRTVAPDSASNKEDATMNGTSSQPKKEEYGS

SEQ ID NO: 2671 - protein, 688 aa, Homo sapiens
MAAEIDFLREQNRRLNEDFRRYQMESFSKYSSVQKAVCQGEGDDTFENLVFDQSFLAPLVTEYDKHLGELNGQLKYYQKQVGEMKLQLENVIKENERLHSELKDAVEKKLEAFPLGTEVGTDIYADDETVRNLQEQLQLANQEKTQAVELWQTVSQELDRLHKLYQEHMTEAQIHVFESQKQKDQLFDFQQLTKQLHVTNENMEVTNQQFLKTVTEQSVIIEQLRKKLRQAKLELRVAVAKVEELTNVTEDLQGQMKKKEKDVVSAHGREEASDRRLQQLQSSIKQLEIRLCVTIQEANQLRTENTHLEKQTRELQAKCNELENERYEAIVRARNSMQLLEEANLQKSQALLEEKQKEEDIEKMKETVSRFVQDATIRTKKEVANTKKQCNIQISRLTEELSALQMECAEKQGQIERVIKEKKAVEEELEKIYREGRGNESDYRKLEEMHQRFLVSERSKDDLQLRLTRAENRIKQLETDSSEEISRYQEMIQKLQNVLESERENCGLVSEQRLKLQQENKQLRKETESLRKIALEAQKKAKVKISTMEHEFSIKERGFEVQLREMEDSNRNSIVELRHLLATQQKAANRWKEETKKLTESAEIRINNLKSELSRQKLHTQELLSQLEMANEKVAENEKLILEHQEKANRLQRRLSQAEERAASASQQLSVITVQRRKAASLMNLENI

SEQ ID NO: 2672 - protein, 315 aa, Homo sapiens
MHREPAKKKAEKRLFDASSFGKDLLAGGVAAAVSKTAVAPIERVKLLLQVQASSKQISPEARYKGMVDCLVRIPREQGFFSFWRGNLANVIRYFPTQALNFAFKDKYKQLFMSGVNKEKQFWRWFLANLASGGAAGATSLCVVYPLDFARTRLGVDIGKGPEERQFKGLGDCIMKIAKSDGIAGLYQGFGVSVQGIIVYRASYFGAYDTVKGLLPKPKKTPFLVSFFIAQVVTTCSGILSYPFDTVRRRMMMQSGEAKRQYKGTLDCFVKIYQHEGISSFFRGAFSNVLRGTGGALVLVLYDKIKEFFHIDIGGR

SEQ ID NO: 2673 - protein, 349 aa, Homo sapiens
MEEEKYLPELMAEKDSLDPSFVHASRLLAEEIEKFQGSDGKKEDEEKKYLDVISNKNIKLSERVLIPVKQYPKFNFVGKLLGPRGNSLKRLQEETGAKMSILGKGSMRDKAKEEELRKSGEAKYAHLSDELHVLIEVFAPPGEAYSRMSHALEEIKKFLVPDYNDEIRQEQLRELSYLNGSEDSGRGRGIRGRGIRIAPTAPSRGRGGAIPPPPPPGRGVLTPRGSTVTRGALPVPPVARGVPTPRARGAPTVPGYRAPPPPAHEAYEEYGYDDGYGGEYDDQTYETYDNSYATQTQSVPEYYDYGHGVSEDAYDSYAPEEWATTRSSLKAPPQRSARGGYREHPYGRY

SEQ ID NO: 2674 - protein, 1216 aa, Homo sapiens
MGHLPTGIHGARRLLPLLWLFVLFKNATAFHVTVQDDNNIVVSLEASDVISPASVYVVKITGESKNYFFEFEEFNSTLPPPVIFKASYHGLYYIITLVVVNGNVVTKPSRSITVLTKPLPVTSVSIYDYKPSPETGVLFEIHYPEKYNVFTRVNISYWEGKDFRTMLYKDFFKGKTVFNHWLPGMCYSNITFQLVSEATFNKSTLVEYSGVSHEPKQHRTAPYPPQNISVRIVNLNKNNWEEQSGNFPEESFMRSQDTIGKEKLFHFTEETPEIPSGNISSGWPDFNSSDYETTSQPYWWDSASAAPESEDEFVSVLPMEYENNSTLSETEKSTSGSFSFFPVQMILTWLPPKPPTAFDGFHIHIEREENFTEYLMVDEEAHEFVAELKEPGKYKLSVTTFSSSGSCETRKSQSAKSLSFYISPSGEWIEELTEKPQHVSVHVLSSTTALMSWTSSQENYNSTIVSVVSLTCQKQKESQRLEKQYCTQVNSSKPIIENLVPGAQYQVVIYLRKGPLIGPPSDPVTFAIVPTGIKDLMLYPLGPTAVVLSWTRPYLGVFRKYVVEMFYFNPATMTSEWTTYYEIAATVSLTASVRIANLLPAWYYNFRVTMVTWGDPELSCCDSSTISFITAPVAPEITSVEYFNSLLYISWTYGDDTTDLSHSRMLHWMVVAEGKKKIKKSVTRNVMTAILSLPPGDIYNLSVTACTERGSNTSMLRLVKLEPAPPKSLFAVNKTQTSVTLLWVEEGVADFFEVFCQQVGSSQKTKLQEPVAVSSHVVTISSLLPATAYNCSVTSFSHDSPSVPTFIAVSTMVTEMNPNVVVISVLAILSTLLIGLLLVTLIILRKKHLQMARECGAGTFVNFASLERDGKLPYNWRRSIFAFLTLLPSCLWTDYLLAFYINPWSKNGLKKRKLTNPVQLDDFDAYIKDMAKDSDYKFSLQFEELKLIGLDIPHFAADLPLNRCKNRYTNILPYDFSRVRLVSMNEEEGADYINANYIPGYNSPQEYIATQGPLPETRNDFWKMVLQQKSQIIVMLTQCNEKRRVKCDHYWPFTEEPIAYGDITVEMISEEEQDDWACRHFRINYADEMQDVMHFNYTAWPDHGVPTANAAESILQFVHMVRQQATKSKGPMIIHCSAGVGRTGTFIALDRLLQHIRDHEFVDILGLVSEMRSYRMSMVQTEEQYIFIHQCVQLMWMKKKQQFCISDVIYENVSKS

SEQ ID NO: 2675 - protein, 311 aa, Homo sapiens
MGIIQSILATSRDCYSFKKKPIPKKPTMLALAKILLISTLFYSLLSGSHGKENQDINTTQNIAEVFKTMENKPISLESEANLNSDKENITTSNLKASHSPPLNLPNNSHGITDFSSNSSAEHSLGSLKPTSTISTSPPLIHSFVSKVPWNAPIADEDLLPISAHPNATPALSSENFTWSLVNDTVKTPDNSSITVSILSSEPTSPSVTPLIVEPSGWLTTNSDSFTGFTPYQEKTTLQPTLKFTNNSKLFPNTSDPQKVLRLDNAPEPYDVSFGNSSYYNPTLNDSAMPESEENARDGIPMDDIPPLRTSV

SEQ ID NO: 2676 - protein, 415 aa, Homo sapiens
MKLSLTKVVNGCRLGKIKNLGKTGDHTMDIPGCLLYTKTGSAPHLTHHTLHNIHGVPAMAQLTLSSLAEHHEVLTEYKEGVGKFIGMPESLLYCSLHDPVSPCPAGYVTNKSVSVWSVAGRVEMTVSKFMAIQKALQPDWFQCLSDGEVSCKEATSIKRVRKSVDRSLLFLDNCLRLQEESEVLQKSVIIGVIEGGDVMEERLRSARETAKRPVGGFLLDGFQGNPTTLEARLRLLSSVTAELPEDKPRLISGVSRPDEVLECIERGVDLFESFFPYQVTERGCALTFSFDYQPNPEETLLQQNGTQEEIKCMDQIKKIETTGCNQEITSFEINLKEKKYQEDFNPLVRGCSCYCCKNHTRAYIHHLLVTNELLAGVLLMMHNFEHYFGFFHYIREALKSDKLAQLKELIHRQAS

SEQ ID NO: 2677 - protein, 1302 aa, Homo sapiens
MELYFGEYQHVQQEYGVHLRLASDDTQKSRSSQNSKAGSYGVSIRVQGIDGHPYIVLNNTERCLAGTSFSENGPPFPPPVINNLPLHSSNGSVPKENSEELQLPENPYAQPSPIRNLKQPLLHEGKNGVLDRKDGSVKPSHLLNFQRHPELLQPYDPEKNELNLQNHQPSESNWLKTLTEEGINNKKPWTCFPKPSNSQPTSPSLEDPAKSGVTAIRLCSSVVIEDPKKQTSVCVNVQSCTKERVGEEALFTSGRPLTAHSPHAHPETKKTRPDVLPFRRQDSAGPVLDGARSRRSSSSSTTPTSANSLYRFLLDDQECAIHADNVNRHENRRYIPFLPGTGRDIDTGSIPGVDQLIEKFDQKPGLQRRGRSGKRNRINTDDRKRSRSVDSAFPFGLQGNSEYLIEFSRNLGKSSEHLLRPSQVCPQRPLSQERRGKQSVGRTFAKLQGAAHGASCAHSRPPQPNIDGKVLETEGSQESTVIRAPSLGAQSKKEEEVKTATATLMLQNRATATSPDSGAKKISVKTFPSASNTQATPDLLKGQQELTQQTNEETAKQILYNYLKEGSTDNDDATKRKVNLVFEKIQTLKSRAAGSAQGNNQACNSTSEVKDLLEQKSKLTIEVAELQRQLQLEVKNQQNIKEERERMRANLEELRSQHNEKVEENSTLQQRLEESEGELRKNLEELFQVKMEREQHQTEIRDLQDQLSEMHDELDSAKRSEDREKGALIEELLQAKQDLQDLLIAKEEQEDLLRKRERELTALKGALKEEVSSHDQEMDKLKEQYDAELQALRESVEEATKNVEVLASRSNTSEQDQAGTEMRVKLLQEENEKLQGRSEELERRVAQLQRQIEDLKGDEAKAKETLKKYEGEIRQLEEALVHARKEEKEAVSARRALENELEAAQGNLSQTTQEQKQLSEKLKEESEQKEQLRRLKNEMENERWHLGKTIEKLQKEMADIVEASRTSTLELQNQLDEYKEKNRRELAEMQRQLKEKTLEAEKSRLTAMKMQDEMRLMEEELRDYQRAQDEALTKRQLLEQTLKDLEYELEAKSHLKDDRSRLVKQMEDKVSQLEMELEEERNNSDLLSERISRSREQMEQLRNELLQERAARQDLECDKISLERQNKDLKSRIIHLEGSYRSSKEGLVVQMEARIAELEDRLESEERDRANLQLSNRRLERKVKELVMQVDDEHLSLTDQKDQLSLRLKAMKRQVEEAEEEIDRLESSKKKLQRELEEQMDMNEHLQGQLNSMKKDLRLKKLPSKVLDDMDDDDDLSTDGGSLYEAPVSYTFSKDSTVASQI

SEQ ID NO: 2678 - protein, 409 aa, Homo sapiens
MMMMSLNSKQAFSMPHGGSLHVEPKYSALHSTSPGSSAPIAPSASSPSSSSNAGGGGGGGGGGGGGGGRSSSSSSSGSSGGGGSEAMRRACLPTPPSNIFGGLDESLLARAEALAAVDIVSQSKSHHHHPPHHSPFKPDATYHTMNTIPCTSAASSSSVPISHPSALAGTHHHHHHHHHHHHQPHQALEGELLEHLSPGLALGAMAGPDGAVVSTPAHAPHMATMNPMHQAALSMAHAHGLPSHMGCMSDVDADPRDLEAFAERFKQRRIKLGVTQADVGSALANLKIPGVGSLSQSTICRFESLTLSHNNMIALKPILQAWLEEAEKSHREKLTKPELFNGAEKKRKRTSIAAPEKRSLEAYFAIQPRPSSEKIAAIAEKLDLKKNVVRVWFCNQRQKQKRMKYSAGI

SEQ ID NO: 2679 - protein, 769 aa, Homo sapiens
MASAELQGKYQKLAQEYSKLRAQNQVLKKGVVDEQANSAALKEQLKMKDQSLRKLQQEMDSLTFRNLQLAKRVELLQDELALSEPRGKKNKKSGESSSQLSQEQKSVFDEDLQKKIEENERLHIQFFEADEQHKHVEAELRSRLATLETEAAQHQAVVDGLTRKYMETIEKLQNDKAKLEVKSQTLEKEAKECRLRTEECQLQLKTLHEDLSGRLEESLSIINEKVPFNDTKYSQYNALNVPLHNRRHQLKMRDIAGQALAFVQDLVTALLNFHTYTEQRIQIFPVDSAIDTISPLNQKFSQYLHENASYVRPLEEGMLHLFESITEDTVTVLETTVKLKTFSEHLTSYICFLRKILPYQLKSLEEECESSLCTSALRARNLELSQDMKKMTAVFEKLQTYIALLALPSTEPDGLLRTNYSSVLTNVGAALHGFHDVMKDISKHYSQKAAIEHELPTATQKLITTNDCILSSVVALTNGAGKIASFFSNNLDYFIASLSYGPKAASGFISPLSAECMLQYKKKAAAYMKSLRKPLLESVPYEEALANRRILLSSTESREGLAQQVQQSLEKISKLEQEKEHWMLEAQLAKIKLEKENQRIADKLKNTGSAQLVGLAQENAAVSNTAGQDEATAKAVLEPIQSTSLVPDVESREDLIKNHYMARIVELTSQLQLADSKSVHFYAECRALSKRLALAEKSKEALTEEMKLASQNISRLQDELTTTKRSYEDQLSMMSDHLCSMNETLSKQREEIDTLKMSSKGNSKKNKSR

SEQ ID NO: 2680 - protein, 1170 aa, Homo sapiens
MFFYLSKKISIPNNVKLQCVSWNKEQGFIACGGEDGLLKVLKLETQTDDAKLRGLAAPSNLSMNQTLEGHSGSVQVVTWNEQYQKLTTSDENGLIIVWMLYKGSWIEEMINNRNKSVVRSMSWNADGQKICIVYEDGAVIVGSVDGNRIWGKDLKGIQLSHVTWSADSKVLLFGMANGEIHIYDNQGNFMIKMKLSCLVNVTGAISIAGIHWYHGTEGYVEPDCPCLAVCFDNGRCQIMRHENDQNPVLIDTGMYVVGIQWNHMGSVLAVAGFQKAAMQDKDVNIVQFYTPFGEHLGTLKVPGKEISALSWEGGGLKIALAVDSFIYFANIRPNYKWGYCSNTVVYAYTRPDRPEYCVVFWDTKNNEKYVKYVKGLISITTCGDFCILATKADENHPQFVLVLCNSIGTPLDPKYIDIVPLFVAMTKTHVIAASKEAFYTWQYRVAKKLTALEINQITRSRKEGRERIYHVDDTPSGSMDGVLDYSKTIQGTRDPICAITASDKILIVGRESGTIQRYSLPNVGLIQKYSLNCRAYQLSLNCNSSRLAIIDISGVLTFFDLDARVTDSTGQQVVGELLKLERRDVWDMKWAKDNPDLFAMMEKTRMYVFRNLDPEEPIQTSGYICNFEDLEIKSVLLDEILKDPEHPNKDYLINFEIRSLRDSRALIEKVGIKDASQFIEDNPHPRLWRLLAEAALQKLDLYTAEQAFVRCKDYQGIKFVKRLGKLLSESMKQAEVVGYFGRFEEAERTYLEMDRRDLAIGLRLKLGDWFRVLQLLKTGSGDADDSLLEQANNAIGDYFADRQKWLNAVQYYVQGRNQERLAECYYMLEDYEGLENLAISLPENHKLLPEIAQMFVRVGMCEQAVTAFLKCSQPKAAVDTCVHLNQWNKAVELAKNHSMKEIGSLLARYASHLLEKNKTLDAIELYRKANYFFDAAKLMFKIADEEAKKGSKPLRVKKLYVLSALLIEQYHEQMKNAQRGKVKGKSSEATSALAGLLEEEVLSTTDRFTDNAWRGAEAYHFFILAQRQLYEGCVDTALKTALHLKDYEDIIPPVEIYSLLALCACASRAFGTCSKAFIKLKSLETLSSEQKQQYEDLALEIFTKHTSKDNRKPELDSLMEGGEGKLPTCVATGSPITEYQFWMCSVCKHGVLAQEISHYSFCPLCHSPVG

SEQ ID NO: 2681 - protein, 1006 aa, Homo sapiens
MPDQISVSEFVAETHEDYKAPTASSFTTRTAQCRNTVAAIEEALDVDRMVLYKMKKSVKAINSSGLAHVENEEQYTQALEKFGGNCVCRDDPDLGSAFLKFSVFTKELTALFKNLIQNMNNIISFPLDSLLKGDLKGVKGDLKKPFDKAWKDYETKITKIEKEKKEHAKLHGMIRTEISGAEIAEEMEKERRFFQLQMCEYLLKVNEIKIKKGVDLLQNLIKYFHAQCNFFQDGLKAVESLKPSIETLSTDLHTIKQAQDEERRQLIQLRDILKSALQVEQKEDSQIRQSTAYSLHQPQGNKEHGTERNGSLYKKSDGIRKVWQKRKCSVKNGFLTISHGTANRPPAKLNLLTCQVKTNPEEKKCFDLISHDRTYHFQAEDEQECQIWMSVLQNSKEEALNNAFKGDDNTGENNIVQELTKEIISEVQRMTGNDVCCDCGAPDPTWLSTNLGILTCIECSGIHRELGVHYSRMQSLTLDVLGTSELLLAKNIGNAGFNEIMECCLPAEDSVKPNPGSDMNARKDYITAKYIERRYARKKHADNAAKLHSLCEAVKTRDIFGLLQAYADGVDLTEKIPLANGHEPDETALHLAVRSVDRTSLHIVDFLVQNSGNLDKQTGKGSTALHYCCLTDNAECLKLLLRGKASIEIANESGETPLDIAKRLKHEHCEELLTQALSGRFNSHVHVEYEWRLLHEDLDESDDDMDEKLQPSPNRREDRPISFYQLGSNQLQSNAVSLARDAANLAKEKQRAFMPSILQNETYGALLSGSPPPAQPAAPSTTSAPPLPPRNVGKVQTASSANTLWKTNSVSVDGGSRQRSSSDPPAVHPPLPPLRVTSTNPLTPTPPPPVAKTPSVMEALSQPSKPAPPGISQIRPPPLPPQPPSRLPQKKPAPGADKSTPLTNKGQPRGPVDLSATEALGPLSNAMVLQPPAPMPRKSQATKLKPKRVKALYNCVADNPDELTFSEGDVIIVDGEEDQEWWIGHIDGDPGRKGAFPVSFVHFIAD

SEQ ID NO: 2682 - protein, 1039 aa, Homo sapiens
MQSRLLLLGAPGGHGGPASRRMRLLLRQVVQRRPGGDRQRPEVRLLHAGSGADTGDTVNIGDVSYKLKIPKNPELVPQNYISDSLAQSVVQHLRWIMQKDLLGQDVFLIGPPGPLRRSIAMQYLELTKREVEYIALSRDTTETDLKQRREIRAGTAFYIDQCAVRAATEGRTLILEGLEKAERNVLPVLNNLLENREMQLEDGRFLMSAERYDKLLRDHTKKELDSWKIVRVSENFRVIALGLPVPRYSGNPLDPPLRSRFQARDIYYLPFKDQLKLLYSIGANVSAEKVSQLLSFATTLCSQESSTLGLPDFPLDSLAAAVQILDSFPMMPIKHAIQWLYPYSILLGHEGKMAVEGVLKRFELQDSGSSLLPKEIVKVEKMMENHVSQASVTIRIADKEVTIKVPAGTRLLSQPCASDRFIQTLSHKQLQAEMMQSHMVKDICLIGGKGCGKTVIAKNFADTLGYNIEPIMLYQDMTARDLLQQRYTLPNGDTAWRSSPLVNAALEGKLVLLDGIHRVNAGTLAVLQRLIHDRELSLYDGSRLLREDRYMRLKEELQLSDEQLQKRSIFPIHPSFRIIALAEPPVIGSTAHQWLGPEFLTMFFFHYMKPLVKSEEIQVIKEKVPNVPQEALDKLLSFTHKLRETQDPTAQSLAASLSTRQLLRISRRLSQYPNENLHSAVTKACLSRFLPSLARSALEKNLADATIEINTDDNLEPELKDYKCEVTSGTLRIGAVSAPIYNAHEKMKVPDVLFYDNIQHVIVMEDMLKDFLLGEHLLLVGNQGVGKNKIVDRFLHLLNRPREYIQLHRDTTVQTLTLQPSVKDGLIVYEDSPLVKAVKLGHILVVDEADKAPTNVTCILKTLVENGEMILADGRRIVANSANVNGRENVVVIHPDFRMIVLANRPGFPFLGNDFFGTLGDIFSCHAVDNPKPHSELEMLRQYGPNVPEPILQKLVAAFGELRSLADQGIINYPYSTREVVNIVKHLQKFPTEGLSSVVRNVFDFDSYNNDMREILINTLHKYGIPIGAKPTSVQLAKE

SEQ ID NO: 2683 - protein, 2371 aa, Homo sapiens
MAAPESGPALSPGTAEGEEETILYDLLVNTEWPPETEVQPRGNQKHGASFIITKAIRDRLLFLRQYIWYSPAPFLLPDGLVRLVNKQINWHLVLASNGKLLAAVQDQCVEIRSAKDDFTSIIGKCQVPKDPKPQWRRVAWSYDCTLLAYAESTGTVRVFDLMGSELFVISPASSFIGDLSYAIAGLIFLEYKASAQWSAELLVINYRGELRSYLVSVGTNQSYQESHCFSFSSHYPHGINTAIYHPGHRLLLVGGCETAEVGMSKASSCGLSAWRVLSGSPYYKQVTNGGDGVTAVPKTLGLLRMLSVKFYSRQGQEQDGIFKMSLSPDGMLLAAIHFSGKLSIWAIPSLKQQGEWGQNEQPGYDDLNPDWRLSTEKRKKIKDKESFYPLIDVNWWADSAVTLARCSGALTVSSVKTLKNLLGKSCEWFEPSPQVTATHDGGFLSLECEIKLAPKRSRLETRAGEEDEGEEDSDSDYEISAKARYFGYIKQGLYLVTEMERFAPPRKRPRTITKNYRLVSLRSTTPEELYQRKIESEEYEEALSLAHTYGLDTDLVYQRQWRKSAVNVASIQNYLSKIKKRSWVLHECLERVPENVDAAKELLQYGLKGTDLEALLAIGKGADDGRFTLPGEIDIDSISYEELSPPDEEPAKNKKEKELKKRQELLKLVNFSKLTLEQKELCRCRRKLLTYLDRLATYEEILGVPHASEQRYDAEFFKKFRNQNIVLSARTYAQESNVQALEILFTYHGSDLLPHRLAILSNFPETTSPHEYSVLLPEACFNGDSLMIIPWHEHKHRAKDWCEELACRMVVEPNLQDESEFLYAAQPELLRFRMTQLTVEKVMDWYQTRAEEIEHYARQVDCALSLIRLGMERNIPGLLVLCDNLVTLETLVYEARCDVTLTLKELQQMKDIEKLRLLMNSCSEDKYVTSAYQWMVPFLHRCEKQSPGVANELLKEYLVTLAKGDLKFPLKIFQHSKPDLQQKIIPDQDQLMAIALECIYTCERNDQLCLCYDLLECLPERGYGDKTEATTKLHDMVDQLEQILSVSELLEKHGLEKPISFVKNTQSSSEEARKLMVRLTRHTGRKQPPVSESHWRTLLQDMLTMQQNVYTCLDSDACYEIFTESLLCSSRLENIHLAGQMMHCSACSENPPAGIAHKGKPHYRVSYEKSIDLVLAASREYFNSSTNLTDSCMDLARCCLQLITDRPPAIQEELDLIQAVGCLEEFGVKILPLQVRLCPDRISLIKECISQSPTCYKQSTKLLGLAELLRVAGENPEERRGQVLILLVEQALRFHDYKAASMHCQELMATGYPKSWDVCSQLGQSEGYQDLATRQELMAFALTHCPPSSIELLLAASSSLQTEILYQRVNFQIHHEGGENISASPLTSKAVQEDEVGVPGSNSADLLRWTTATTMKVLSNTTTTTKAVLQAVSDGQWWKKSLTYLRPLQGQKCGGAYQIGTTANEDLEKQGCHPFYESVISNPFVAESEGTYDTYQHVPVESFAEVLLRTGKLAEAKNKGEVFPTTEVLLQLASEALPNDMTLALAYLLALPQVLDANRCFEKQSPSALSLQLAAYYYSLQIYARLAPCFRDKCHPLYRADPKELIKMVTRHVTRHEHEAWPEDLISLTKQLHCYNERLLDFTQAQILQGLRKGVDVQRFTADDQYKRETILGLAETLEESVYSIAISLAQRYSVSRWEVFMTHLEFLFTDSGLSTLEIENRAQDLHLFETLKTDPEAFHQHMVKYIYPTIGGFDHERLQYYFTLLENCGCADLGNCAIKPETHIRLLKKFKVVASGLNYKKLTDENMSPLEALEPVLSSQNILSISKLVPKIPEKDGQMLSPSSLYTIWLQKLFWTGDPHLIKQVPGSSPEWLHAYDVCMKYFDRLHPGDLITVVDAVTFSPKAVTKLSVEARKEMTRKAIKTVKHFIEKPRKRNSEDEAQEAKDSKVTYADTLNHLEKSLAHLETLSHSFILSLKNSEQETLQKYSHLYDLSRSEKEKLHDEAVAICLDGQPLAMIQQLLEVAVGPLDISPKDIVQSAIMKIISALSGGSADLGGPRDPLKVLEGVVAAVHASVDKGEELVSPEDLLEWLRPFCADDAWPVRPRIHVLQILGQSFHLTEEDSKLLVFFRTEAILKASWPQRQVDIADIENEENRYCLFMELLESSHHEAEFQHLVLLLQAWPPMKSEYVITNNPWVRLATVMLTRCTMENKEGLGNEVLKMCRSLYNTKQMLPAEGVKELCLLLLNQSLLLPSLKLLLESRDEHLHEMALEQITAVTTVNDSNCDQELLSLLLDAKLLVKCVSTPFYPRIVDHLLASLQQGRWDAEELGRHLREAGHEAEAGSLLLAVRGTHQAFRTFSTALRAAQHWV

SEQ ID NO: 2684 - protein, 395 aa, Homo sapiens
MRNIMYFGGTCQSPALPALVRPPAPPLQPSLDIKPFLPFPLDTAAAVNLFPNFNAMDPIQKAVINHTFGVPLPHRRKQIISCNICQLRFNSDSQAAAHYKGTKHAKKLKALEAMKNKQKSVTAKDSAKTTFTSITTNTINTSSDKTDGTAGTPAISTTTTVEIRKSSVMTTEITSKVEKSPTTATGNSSCPSTETEEEKAKRLLYCSLCKVAVNSASQLEAHNSGTKHKTMLEARNGSGTIKAFPRAGVKGKGPVNKGNTGLQNKTFHCEICDVHVNSETQLKQHISSRRHKDRAAGKPPKPKYSPYNKLQKTAHPLGVKLVFSKEPSKPLAPRILPNPLAAAAAAAAVAVSSPFSLRTAPAATLFQTSALPPALLRPAPGPIRTAHTPVLFAPY

SEQ ID NO: 2685 - protein, 1748 aa, Homo sapiens
MSARAAAAKSTAMEETAIWEQHTVTLHRAPGFGFGIAISGGRDNPHFQSGETSIVISDVLKGGPAEGQLQENDRVAMVNGVSMDNVEHAFAVQQLRKSGKNAKITIRRKKKVQIPVSRPDPEPVSDNEEDSYDEEIHDPRSGRSGVVNRRSEKIWPRDRSASRERSLSPRSDRRSVASSQPAKPTKVTLVKSRKNEEYGLRLASHIFVKEISQDSLAARDGNIQEGDVVLKINGTVTENMSLTDAKTLIERSKGKLKMVVQRDERATLLNVPDLSDSIHSANASERDDISEIQSLASDHSGRSHDRPPRRSRSRSPDQRSEPSDHSRHSPQQPSNGSLRSRDEERISKPGAVSTPVKHADDHTPKTVEEVTVERNEKQTPSLPEPKPVYAQVGQPDVDLPVSPSDGVLPNSTHEDGILRPSMKLVKFRKGDSVGLRLAGGNDVGIFVAGVLEDSPAAKEGLEEGDQILRVNNVDFTNIIREEAVLFLLDLPKGEEVTILAQKKKDVYRRIVESDVGDSFYIRTHFEYEKESPYGLSFNKGEVFRVVDTLYNGKLGSWLAIRIGKNHKEVERGIIPNKNRAEQLASVQYTLPKTAGGDRADFWRFRGLRSSKRNLRKSREDLSAQPVQTKFPAYERVVLREAGFLRPVTIFGPIADVAREKLAREEPDIYQIAKSEPRDAGTDQRSSGIIRLHTIKQIIDQDKHALLDVTPNAVDRLNYAQWYPIVVFLNPDSKQGVKTMRMRLCPESRKSARKLYERSHKLRKNNHHLFTTTINLNSMNDGWYGALKEAIQQQQNQLVWVSEGKADGATSDDLDLHDDRLSYLSAPGSEYSMYSTDSRHTSDYEDTDTEGGAYTDQELDETLNDEVGTPPESAITRSSEPVREDSSGMHHENQTYPPYSPQAQPQPIHRIDSPGFKPASQQKAEASSPVPYLSPETNPASSTSAVNHNVNLTNVRLEEPTPAPSTSYSPQADSLRTPSTEAAHIMLRDQEPSLSSHVDPTKVYRKDPYPEEMMRQNHVLKQPAVSHPGHRPDKEPNLTYEPQLPYVEKQASRDLEQPTYRYESSSYTDQFSRNYEHRLRYEDRVPMYEEQWSYYDDKQPYPSRPPFDNQHSQDLDSRQHPEESSERGYFPRFEEPAPLSYDSRPRYEQAPRASALRHEEQPAPGYDTHGRLRPEAQPHPSAGPKPAESKQYFEQYSRSYEQVPPQGFTSRAGHFEPLHGAAAVPPLIPSSQHKPEALPSNTKPLPPPPTQTEEEEDPAMKPQSVLTRVKMFENKRSASLETKKDVNDTGSFKPPEVASKPSGAPIIGPKPTSQNQFSEHDKTLYRIPEPQKPQLKPPEDIVRSNHYDPEEDEEYYRKQLSYFDRRSFENKPPAHIAASHLSEPAKPAHSQNQSNFSSYSSKGKPPEADGVDRSFGEKRYEPIQATPPPPPLPSQYAQPSQPVTSASLHIHSKGAHGEGNSVSLDFQNSLVSKPDPPPSQNKPATFRPPNREDTAQAAFYPQKSFPDKAPVNGTEQTQKTVTPAYNRFTPKPYTSSARPFERKFESPKFNHNLLPSETAHKPDLSSKTPTSPKTLVKSHSLAQPPEFDSGVETFSIHAEKPKYQINNISTVPKAIPVSPSAVEEDEDEDGHTVVATARGIFNSNGGVLSSIETGVSIIIPQGAIPEGVEQEIYFKVCRDNSILPPLDKEKGETLLSPLVMCGPHGLKFLKPVELRLPHCDPKTWQNKCLPGDPNYLVGANCVSVLIDHF

SEQ ID NO: 2686 - protein, 669 aa, Homo sapiens
MWTLVGRGWGCARALAPRATGAALLVAPGPRSAPTLGAAPESWATDRLYSSAEFKEKLDMSRFPVENIRNFSIVAHVDHGKSTLADRLLELTGTIDKTKNNKQVLDKLQVERERGITVKAQTASLFYNCEGKQYLLNLIDTPGHVDFSYEVSRSLSACQGVLLVVDANEGIQAQTVANFFLAFEAQLSVIPVINKIDLKNADPERVENQIEKVFDIPSDECIKISAKLGTNVESVLQAIIERIPPPKVHRKNPLRALVFDSTFDQYRGVIANVALFDGVVSKGDKIVSAHTQKTYEVNEVGVLNPNEQPTHKLYAGQVGYLIAGMKDVTEAQIGDTLCLHKQPVEPLPGFKSAKPMVFAGMYPLDQSEYNNLKSAIEKLTLNDSSVTVHRDSSLALGAGWRLGFLGLLHMEVFNQRLEQEYNASVILTTPTVPYKAVLSSSKLIKEHREKEITIINPAQFPDKSKVTEYLEPVVLGTIITPDEYTGKIMMLCEARRAVQKNMIFIDQNRVMLKYLFPLNEIVVDFYDSLKSLSSGYASFDYEDAGYQTAELVKMDILLNGNTVEELVTVVHKDKAHSIGKAICERLKDSLPRQLFEIAIQAAIGSKIIARETVKAYRKNVLAKCYGGDITRKMKLLKRQAEGKKKLRKIGNVEVPKDAFIKVLKTQSSK

SEQ ID NO: 2687 - protein, 631 aa, Homo sapiens
MNPSTPSYPTASLYVGDLHPDVTEAMLYEKFSPAGPILSIRICRDLITSGSSNYAYVNFQHTKDAEHALDTMNFDVIKGKPVRIMWSQRDPSLRKSGVGNIFVKNLDKSINNKALYDTVSAFGNILSCNVVCDENGSKGYGFVHFETHEAAERAIKKMNGMLLNGRKVFVGQFKSRKEREAELGARAKEFPNVYIKNFGEDMDDERLKDLFGKFGPALSVKVMTDESGKSKGFGFVSFERHEDAQKAVDEMNGKELNGKQIYVGRAQKKVERQTELKRTFEQMKQDRITRYQVVNLYVKNLDDGIDDERLRKAFSPFGTITSAKVMMEGGRSKGFGFVCFSSPEEATKAVTEMNGRIVATKPLYVALAQRKEERQAYLTNEYMQRMASVRAVPNQRAPPSGYFMTAVPQTQNHAAYYPPSQIARLRPSPRWTAQGARPHPFQNKPSAIRPGAPRVPFSTMRPASSQVPRVMSTQRVANTSTQTVGPRPAAAAAAAATPAVRTVPRYKYAAGVRNPQQHRNAQPQVTMQQLAVHVQGQETLTASRLASAPPQKQKQMLGERLFPLIQAMHPTLAGKITGMLLEIDNSELLYMLESPESLRSKVDEAVAVLQAHQAKEATQKAVNSATGVPTV

SEQ ID NO: 2688 - protein, 643 aa, Homo sapiens
MWHTIMWKEVAVGDIVKVVNGQYLPADVVLLSSSEPQAMCYVETANLDGETNLKIRQGLSHTADMQTREVLMKLSGTIECEGPNRHLYDFTGNLNLDGKSLVALGPDQILLRGTQLRNTQWVFGIVVYTGHDTKLMQNSTKAPLKRSNVEKVTNVQILVLFGILLVMALVSSAGALYWNRSHGEKNWYIKKMDTTSDNFGYNLLTFIILYNNLIPISLLVTLEVVKYTQALFINWDTDMYYIGNDTPAMARTSNLNEELGQVKYLFSDKTGTLTCNIMNFKKCSIAGVTYGHFPELAREPSSDDFCRMPPPCSDSCDFDDPRLLKNIEDRHPTAPCIQEFLTLLAVCHTVVPEKDGDNIIYQASSPDEAALVKGAKKLGFVFTARTPFSVIIEAMGQEQTFGILNVLEFSSDRKRMSVIVRTPSGRLRLYCKGADNVIFERLSKDSKYMEETLCHLEYFATEGLRTLCVAYADLSENEYEEWLKVYQEASTILKDRAQRLEECYEIIEKNLLLLGATAIEDRLQAGVPETIATLLKAEIKIWVLTGDKQETAINIGYSCRLVSQNMALILLKEDSLDATRAAITQHCTDLGNLLGKENDVALIIDGHTLKYALSFEVRRSFLDLALSCKAVICCRSLFLSKWR

SEQ ID NO: 2689 - protein, 854 aa, Homo sapiens
MGMCSRQERIQKDIDVVIQKSRAEKDCLFADFRYSDSTFTFTYVGGPRSVSYSVHVSEDYPDNTYVSSSENDEDVLVTTEPIPVIFHRIATELRKTNDINCCLSIKSKLQKENGEESRQNSTVEEDSEGDNDSEEFYYGGQVNYDGELHKHPQLEADLSAVREIYGPHAVSLREYGAIDDVDIDLHIDVSFLDEEIAVAWEVIRTEPIIVRLHCSLTQYLNGPVPTVDVFQISTKERFGLGHQLKKIMQTFVTQQWKQSKEKSNCLHNKKLSEKKVKSPLHLFSTLRRSPSYPPPGCGKSKSKLKSEQDGISKTHKLLRRTCSSTVKTDDVCVTKSHRTFGRSLSSDPRAEQAMTAIKSHKLLNRPCPAAVKSEECLTLKSHRLLTRSCSGDPRCEHNTNLKPHKLLSRSYSSNLRMEELYGLKNHKLLSKSYSSAPKSSKTELFKEPNAEGRRLSLTSGLIGILTPSSSSSSQLAPNGAKCIPVRDRGFLVQTIEFAEQRIPVLNEYCVVCDEPHVFQNGPMLRPTVCERELCVFAFQTLGVMNEAADEIATGAQVVDLLVSMCRSALESPRKVVIFEPYPSVVDPNDPQMLAFNPRKKNYDRVMKALDSITSIREMTQAPYLEIKKQMDKQDPLAHPLLQWVISSNRSHIVKLPVNRQLKFMHTPHQFLLLSSPPAKESNFRAAKKLFGSTFAFHGSHIENWHSILRNGLVVASNTRLQLHGAMYGSGIYLSPMSSISFGYSGMNKKQKVSAKDEPASSSKSSNTSQSQKKGQQSQFLQSRNLKCIALCEVITSSDLHKHGEIWVVPNTDHVCTRFFFVYEDGQVGDANINTQEGGIHKEILRVIGNQTATG

SEQ ID NO: 2690 - protein, 856 aa, Homo sapiens
MKPRPAGFVDNKLKQRVIQYLTSNKCGKYVDIGVLASDLQRVYSIDYGRRKRNAFRIQVEKVFSIISSEKELKNLTELEDEHLAKRARQGEEDNEYTESYSDDDSSMEDYPDPQSANHMNSSLLSLYRKGNPDSVSNTPEMEQRETTSSTPRISSKTGSIPLKTPAKDSEGGWFIDKTPSVKKDSFFLDLSCEKSNPKKPITEIQDSKDSSLLESDMKRKGKLKNKGSKRKKEDLQEVDGEIEAVLQKKAKARGLEFQISNVKFEDVGGNDMTLKEVCKMLIHMRHPEVYHHLGVVPPRGVLLHGPPGCGKTLLAHAIAGELDLPILKVAAPEIVSGVSGESEQKLRELFEQAVSNAPCIIFIDEIDAITPKREVASKDMERRIVAQLLTCMDDLNNVAATARVLVIGATNRPDSLDPALRRAGRFDREICLGIPDEASRERILQTLCRKLRLPQAFDFCHLAHLTPGFVGADLMALCREAAMCAVNRVLMKLQEQQKKNPEMEDLPSKGVQEERLGTEPTSETQDELQRLLGLLRDQDPLSEEQMQGLCIELNDFIVALSSVQPSAKREGFVTVPNVTWADIGALEDIREELTMAILAPVRNPDQFKALGLVTPAGVLLAGPPGCGKTLLAKAVANESGLNFISVKGPELLNMYVGESERAVRQVFQRAKNSAPCVIFFDEVDALCPRRSDRETGASVRVVNQLLTEMDGLEARQQVFIMAATNRPDIIDPAILRPGRLDKTLFVGLPPPADRLAILKTITKNGTKPPLDADVNLEAIAGDLRCDCYTGADLSALVREASICALRQEMARQKSGNEKGELKVSHKHFEEAFKKVRSSISKKDQIMYERLQESLSR

SEQ ID NO: 2691 - protein, 266 aa, Homo sapiens
MRLLFLAVLRPHTGNAVTAQRVRAHLEAAGHVCVLKDAFDFESRSEIANLILAENCEAALALHLYRGGRLLQGHRIPFGVIFGGTDVNEDANQAEKNTVMGRVLEEARFAVAFTESMKEMAQAQWVDPVFTREVKAKVKRAAGVRLIGEMPQEDLHAVVKNCFAVVNSSVSEGMSAAILEAMDLEVPVLARNIPGNAAVVKHEVTGLLFSNPQEFVHLAKRLVSDPALEKEIVVNGREYVRMYHSWQVERDTYQQLIRKLEGSTED

SEQ ID NO: 2692 - protein, 707 aa, Homo sapiens
MNQELLSVGSKRRRTGGSLRGNPSSSQVDEEQMNRVVEEEQQQQLRQQEEEHTARNGEVVGVEPRPGGQNDSQQGQLEENNNRFISVDEDSSGNQEEQEEDEEHAGEQDEEDEEEEEMDQESDDFDQSDDSSREDEHTHTNSVTNSSSIVDLPVHQLSSPFYTKTTKMKRKLDHGSEVRSFSLGKKPCKVSEYTSTTGLVPCSATPTTFGDLRAANGQGQQRRRITSVQPPTGLQEWLKMFQSWSGPEKLLALDELIDSCEPTQVKHMMQVIEPQFQRDFISLLPKELALYVLSFLEPKDLLQAAQTCRYWRILAEDNLLWREKCKEEGIDEPLHIKRRKVIKPGFIHSPWKSAYIRQHRIDTNWRRGELKSPKVLKGHDDHVITCLQFCGNRIVSGSDDNTLKVWSAVTGKCLRTLVGHTGGVWSSQMRDNIIISGSTDRTLKVWNAETGECIHTLYGHTSTVRCMHLHEKRVVSGSRDATLRVWDIETGQCLHVLMGHVAAVRCVQYDGRRVVSGAYDFMVKVWDPETETCLHTLQGHTNRVYSLQFDGIHVVSGSLDTSIRVWDVETGNCIHTLTGHQSLTSGMELKDNILVSGNADSTVKIWDIKTGQCLQTLQGPNKHQSAVTCLQFNKNFVITSSDDGTVKLWDLKTGEFIRNLVTLESGGSGGVVWRIRASNTKLVCAVGSRNGTEETKLLVLDFDVDMK

SEQ ID NO: 2693 - protein, 533 aa, Homo sapiens
MNEENIDGTNGCSKVRTGIQNEAALLALMEKTGYNMVQENGQRKFGGPPPGWEGPPPPRGCEVFVGKIPRDMYEDELVPVFERAGKIYEFRLMMEFSGENRGYAFVMYTTKEEAQLAIRILNNYEIRPGKFIGVCVSLDNCRLFIGAIPKEKKKEEILDEMKKVTEGVVDVIVYPSATDKTKNRGFAFVEYESHRAAAMARRKLIPGTFQLWGHTIQVDWADPEKEVDEETMQRVKVLYVRNLMISTTEETIKAEFNKFKPGAVERVKKLRDYAFVHFFNREDAVAAMSVMNGKCIDGASIEVTLAKPVNKENTWRQHLNGQISPNSENLIVFANKEESHPKTLGKLPTLPARLNGQHSPSPPEVERCTYPFYPGTKLTPISMYSLKSNHFNSAVMHLDYYCNKNNWAPPEYYLYSTTSQDGKVLLVYKIVIPAIANGSQSYFMPDKLCTTLEDAKELAAQFTLLHLDYNFHRSSINSLSPVSATLSSGTPSVLPYTSRPYSYPGYPLSPTISLANGSHVGQRLCISNQASFF

SEQ ID NO: 2694 - protein, 987 aa, Homo sapiens
MTPALREATAKGISFSSLPSTMESDKMLYMESPRTVDEKLKGDTFSQMLGFPTPEPTLNTNFVNLKHFGSPQSSKHYQTVFLMRSNSTLNKHNENYKQKKLGEPSCNKLKNILYNGSNIQLSKICLSHSEEFIKKEPLSDTTSQCMKDVQIILDSNITKDTNVDKVQLQNCKWYQENALLDKVTDAEIKKGLLHCTQKKIVPGHSNVPVSSSAAEKEEEVHARLLHCVSKQKILLSQARRTQKHLQMLLAKHVVKHYGQQMKLSMKHQLPKMKTFHEPTTILGNSLPKCTEIKPEVNTLTAENKLWDDAKNGFARCTAAEIQRFAFSATGLLSHVEEGLDSDATDSSSDDDLDEYTLRKNVAVNCSTEWKWLVDRARVGSRWTWLQAQISDLECKIQQLTDIHRQIRASKGIVVLEECQLPKDILKKQMQFADQAASLNILGNPQVPQECQDPVPEQDFEMSPSSPTLLLRNIEKQSAQLTEIINSLIAPLNLSPTSSPLSSKSCSHKCLANGIYRSASENLDELSSSSSWLLNQKHSKKKRKDRTRLKSSSLTFMSTSARTRPLQSFHKRKLYRLSPTFYWTPQTLPSKETAFLNTTQMPCLQSASTWSSYEHNSESYLLREHVSELDSSFHSVLSLPSDVPLHFHFETLLKKTEIKGNLAENKFVDEYIISPSPVHSTLNQWRNGYSPICKPQIRSESSAQLLQGRKKRHLSETALGERTKLEESDFQHTESGSHSNFTAVSNVNVLSRIQNSSRNTARRRLRSESSYDIDNIVIPMSLVAPAKLEKLQYKEILTPSWRMVVLQPLDEYNLGKEEIEDLSDEVFSLRHKKYEEREQARWSLWEQSKWHRRNSRAYSKNVEGQDLLLKEYPNNFSSSQQCAAASPPGLPSENQDLCAYGLPSLNQSQETKSLWWERRAFPLKGEDMAALLCQDEKKDQVERSSTAFHGEIFGTSVPENGHHPKKQSDGMEEYKTFGLGLTNVKKNR

SEQ ID NO: 2695 - protein, 340 aa, Homo sapiens
MNPFHASCWNTSAELLNKSWNKEFAYQTASVVDTVILPSMIGIICSTGLVGNILIVFTIIRSRKKTVPDIYICNLAVADLVHIVGMPFLIHQWARGGEWVFGGPLCTIITSLDTCNQFACSAIMTVMSVDRYFALVQPFRLTRWRTRYKTIRINLGLWAASFILALPVWVYSKVIKFKDGVESCAFDLTSPDDVLWYTLYLTITTFFFPLPLILVCYILILCYTWEMYQQNKDARCCNPSVPKQRVMKLTKMVLVLVVVFILSAAPYHVIQLVNLQMEQPTLAFYVGYYLSICLSYASSSINPFLYILLSGNFQKRLPQIQRRATEKEINNMGNTLKSHF

SEQ ID NO: 2696 - protein, 986 aa, Homo sapiens
MAGIFYFALFSCLFGICDAVTGSRVYPANEVTLLDSRSVQGELGWIASPLEGGWEEVSIMDEKNTPIRTYQVCNVMEPSQNNWLRTDWITREGAQRVYIEIKFTLRDCNSLPGVMGTCKETFNLYYYESDNDKERFIRENQFVKIDTIAADESFTQVDIGDRIMKLNTEIRDVGPLSKKGFYLAFQDVGACIALVSVRVFYKKCPLTVRNLAQFPDTITGADTSSLVEVRGSCVNNSEEKDVPKMYCGADGEWLVPIGNCLCNAGHEERSGECQACKIGYYKALSTDATCAKCPPHSYSVWEGATSCTCDRGFFRADNDAASMPCTRPPSAPLNLISNVNETSVNLEWSSPQNTGGRQDISYNVVCKKCGAGDPSKCRPCGSGVHYTPQQNGLKTTKVSITDLLAHTNYTFEIWAVNGVSKYNPNPDQSVSVTVTTNQAAPSSIALVQAKEVTRYSVALAWLEPDRPNGVILEYEVKYYEKDQNERSYRIVRTAARNTDIKGLNPLTSYVFHVRARTAAGYGDFSEPLEVTTNTVPSRIIGDGANSTVLLVSVSGSVVLVVILIAAFVISRRRSKYSKAKQEADEEKHLNQGVRTYVDPFTYEDPNQAVREFAKEIDASCIKIEKVIGVGEFGEVCSGRLKVPGKREICVAIKTLKAGYTDKQRRDFLSEASIMGQFDHPNIIHLEGVVTKCKPVMIITEYMENGSLDAFLRKNDGRFTVIQLVGMLRGIGSGMKYLSDMSYVHRDLAARNILVNSNLVCKVSDFGMSRVLEDDPEAAYTTRGGKIPIRWTAPEAIAYRKFTSASDVWSYGIVMWEVMSYGERPYWDMSNQDVIKAIEEGYRLPPPMDCPIALHQLMLDCWQKERSDRPKFGQIVNMLDKLIRNPNSLKRTGTESSRPNTALLDPSSPEFSAVVSVGDWLQAIKMDRYKDNFTAAGYTTLEAVVHVNQEDLARIGITAITHQNKILSSVQAMRTQMQQMHGRMVPV

SEQ ID NO: 2697 - protein, 589 aa, Homo sapiens
MPTVSVKRDLLFQALGRTYTDEEFDELCFEFGLELDEITSEKEIISKEQGNVKAAGASDVVLYKIDVPANRYDLLCLEGLVRGLQVFKERIKAPVYKRVMPDGKIQKLIITEETAKIRPFAVAAVLRNIKFTKDRYDSFIELQEKLHQNICRKRALVAIGTHDLDTLSGPFTYTAKRPSDIKFKPLNKTKEYTACELMNIYKTDNHLKHYLHIIENKPLYPVIYDSNGVVLSMPPIINGDHSRITVNTRNIFIECTGTDFTKAKIVLDIIVTMFSEYCENQFTVEAAEVVFPNGKSHTFPELAYRKEMVRADLINKKVGIRETPENLAKLLTRMYLKSEVIGDGNQIEIEIPPTRADIIHACDIVEDAAIAYGYNNIQMTLPKTYTIANQFPLNKLTELLRHDMAAAGFTEALTFALCSQEDIADKLGVDISATKAVHISNPKTAEFQVARTTLLPGLLKTIAANRKMPLPLKLFEISDIVIKDSNTDVGAKNYRHLCAVYYNKNPGFEIIHGLLDRIMQLLDVPPGEDKGGYVIKASEGPAFFPGRCAEIFARGQSVGKLGVLHPDVITKFELTMPCSSLEINVGPFL

SEQ ID NO: 2698 - protein, 221 aa, Homo sapiens
MHFLTIYPNCSSGVVRAQSRTEQKNPLGLDDLGIQNLGQTVSLAPAVEAASMLKMEPLNSTHPGTAASSSPLESRAAGGGSGNGNEYFYILVVMSFYGIFLIGIMLGYMKSKRREKKSSLLLLYKDEERLWGEAMKPLPVVSGLRSVQVPLMLNMLQESVAPALSCTLCSMEGDSVSSESSSPDVHLTIQEEGADDELEETSETPLNESSEGSSENIHQNS

SEQ ID NO: 2699 - protein, 2210 aa, Homo sapiens
MTAAANWVANGASLEDCHSNLFSLAELTGIKWRRYNFGGHGDCGPIISAPAQDDPILLSFIRCLQANLLCVWRRDVKPDCKELWIFWWGDEPNLVGVIHHELQVVEEGLWENGLSYECRTLLFKAIHNLLERCLMDKNFVRIGKWFVRPYEKDEKPVNKSEHLSCAFTFFLHGESNVCTSVEIAQHQPIYLINEEHIHMAQSSPAPFQVLVSPYGLNGTLTGQAYKMSDPATRKLIEEWQYFYPMVLKKKEESKEEDELGYDDDFPVAVEVIVGGVRMVYPSAFVLISQNDIPVPQSVASAGGHIAVGQQGLGSVKDPSNCGMPLTPPTSPEQAILGESGGMQSAASHLVSQDGGMITMHSPKRSGKIPPKLHNHMVHRVWKECILNRTQSKRSQMSTPTLEEEPASNPATWDFVDPTQRVSCSCSRHKLLKRCAVGPNRPPTVSQPGFSAGPSSSSSLPPPASSKHKTAERQEKGDKLQKRPLIPFHHRPSVAEELCMEQDTPGQKLGLAGIDSSLEVSSSRKYDKQMAVPSRNTSKQMNLNPMDSPHSPISPLPPTLSPQPRGQETESLDPPSVPVNPALYGNGLELQQLSTLDDRTVLVGQRLPLMAEVSETALYCGIRPSNPESSEKWWHSYRLPPSDDAEFRPPELQGERCDAKMEVNSESTALQRLLAQPNKRFKIWQDKQPQLQPLHFLDPLPLSQQPGDSLGEVNDPYTFEDGDIKYIFTANKKCKQGTEKDSLKKNKSEDGFGTKDVTTPGHSTPVPDGKNAMSIFSSATKTDVRQDNAAGRAGSSSLTQVTDLAPSLHDLDNIFDNSDDDELGAVSPALRSSKMPAVGTEDRPLGKDGRAAVPYPPTVADLQRMFPTPPSLEQHPAFSPVMNYKDGISSETVTALGMMESPMVSMVSTQLTEFKMEVEDGLGSPKPEEIKDFSYVHKVPSFQPFVGSSMFAPLKMLPSHCLLPLKIPDACLFRPSWAIPPKIEQLPMPPAATFIRDGYNNVPSVGSLADPDYLNTPQMNTPVTLNSAAPASNSGAGVLPSPATPRFSVPTPRTPRTPRTPRGGGTASGQGSVKYDSTDQGSPASTPSTTRPLNSVEPATMQPIPEAHSLYVTLILSDSVMNIFKDRNFDSCCICACNMNIKGADVGLYIPDSSNEDQYRCTCGFSAIMNRKLGYNSGLFLEDELDIFGKNSDIGQAAERRLMMCQSTFLPQVEGTKKPQEPPISLLLLLQNQHTQPFASLNFLDYISSNNRQTLPCVSWSYDRVQADNNDYWTECFNALEQGRQYVDNPTGGKVDEALVRSATVHSWPHSNVLDISMLSSQDVVRMLLSLQPFLQDAIQKKRTGRTWENIQHVQGPLTWQQFHKMAGRGTYGSEESPEPLPIPTLLVGYDKDFLTISPFSLPFWERLLLDPYGGHRDVAYIVVCPENEALLEGAKTFFRDLSAVYEMCRLGQHKPICKVLRDGIMRVGKTVAQKLTDELVSEWFNQPWSGEENDNHSRLKLYAQVCRHHLAPYLATLQLDSSLLIPPKYQTPPAAAQGQATPGNAGPLAPNGSAAPPAGSAFNPTSNSSSTNPAASSSASGSSVPPVSSSASAPGISQISTTSSSGFSGSVGGQNPSTGGISADRTQGNIGCGGDTDPGQSSSQPSQDGQESVTERERIGIPTEPDSADSHAHPPAVVIYMVDPFTYAAEEDSTSGNFWLLSLMRCYTEMLDNLPEHMRNSFILQIVPCQYMLQTMKDEQVFYIQYLKSMAFSVYCQCRRPLPTQIHIKSLTGFGPAASIEMTLKNPERPSPIQLYSPPFILAPIKDKQTELGETFGEASQKYNVLFVGYCLSHDQRWLLASCTDLHGELLETCVVNIALPNRSRRSKVSARKIGLQKLWEWCIGIVQMTSLPWRVVIGRLGRLGHGELKDWSILLGECSLQTISKKLKDVCRMCGISAADSPSILSACLVAMEPQGSFVVMPDAVTMGSVFGRSTALNMQSSQLNTPQDASCTHILVFPTSSTIQVAPANYPNEDGFSPNNDDMFVDLPFPDDMDNDIGILMTGNLHSSPNSSPVPSPGSPSGIGVGSHFQHSRSQGERLLSREAPEELKQQPLALGYFVSTAKAENLPQWFWSSCPQAQNQCPLFLKASLHHHISVAQTDELLPARNSQRVPHPLDSKTTSDVLRFVLEQYNALSWLTCNPATQDRTSCLPVHFVVLTQLYNAIMNIL

SEQ ID NO: 2700 - protein, 726 aa, Homo sapiens
MAQTVQNVTLSLTLPITCHICLGKVRQPVICINNHVFCSICIDLWLKNNSQCPACRVPITPENPCKEIIGGTSESEPMLSHTVRKHLRKTRLELLHKEYEDEIDCLQKEVEELKSKNLSLESQIKTILDPLTLVQGNQNEDKHLVTDNPSKINPETVAEWKKKLRTANEIYEKVKDDVDKLKEANKKLKLENGGLVRENLRLKAEVDNRSPQKFGRFAVAALQSKVEQYERETNRLKKALERSDKYIEELESQVAQLKNSSEEKEAMNSICQTALSADGKGSKGSEEDVVSKNQGDSARKQPGSSTSSSSHLAKPSSSRLCDTSSARQESTSKADLNCSKNKDLYQEQVEVMLDVTDTSMDTYLEREWGNKPSDCVPYKDEELYDLPAPCTPLSLSCLQLSTPENRESSVVQAGGSKKHSNHLRKLVFDDFCDSSNVSNKDSSEDDISRSENEKKSECFSSPKTGFWDCCSTSYAQNLDFESSEGNTIANSVGEISSKLSEKSGLCLSKRLNSIRSFEMNRTRTSSEASMDAAYLDKISELDSMMSESDNSKSPCNNGFKSLDLDGLSKSSQGSEFLEEPDKLEEKTELNLSKGSLTNDQLENGSEWKPTSFFLLSPSDQEMNEDFSLHSSSCPVTNEIKPPSCLFQTEFSQGILLSSSHRLFEDQRFGSSLFKMSSEMHSLHNHLQSPWSTSFVPEKRNKNVNQSTKRKIQSSLSSASPSKATKS

SEQ ID NO: 2701 - protein, 1564 aa, Homo sapiens
MSKIRRKVTVENTKTISDSTSRRPSVFERLGPSTGSTAETQCRNWLKTGNCLYGNTCRFVHGPSPRGKGYSSNYRRSPERPTGDLRERMKNKRQDVDTEPQKRNTEESSSPVRKESSRGRHREKEDIKITKERTPESEEENVEWETNRDDSDNGDINYDYVHELSLEMKRQKIQRELMKLEQENMEKREEIIIKKEVSPEVVRSKLSPSPSLRKSSKSPKRKSSPKSSSASKKDRKTSAVSSPLLDQQRNSKTNQSKKKGPRTPSPPPPIPEDIALGKKYKEKYKVKDRIEEKTRDGKDRGRDFERQREKRDKPRSTSPAGQHHSPISSRHHSSSSQSGSSIQRHSPSPRRKRTPSPSYQRTLTPPLRRSASPYPSHSLSSPQRKQSPPRHRSPMREKGRHDHERTSQSHDRRHERREDTRGKRDREKDSREEREYEQDQSSSRDHRDDREPRDGRDRRDARDTRDRRELRDSRDMRDSREMRDYSRDTKESRDPRDSRSTRDAHDYRDREGRDTHRKEDTYPEESRSYGRNHLREESSRTEIRNESRNESRSEIRNDRMGRSRGRVPELPEKGSRGSRGSQIDSHSSNSNYHDSWETRSSYPERDRYPERDNRDQARDSSFERRHGERDRRDNRERDQRPSSPIRHQGRNDELERDERREERRVDRVDDRRDERARERDRERERDRERERERERERDREREKERELERERAREREREREKERDRERDRDRDHDRERERERERDREKEREREREERERERERERERERERERERERARERDKERERQRDWEDKDKGRDDRREKREEIREDRNPRDGHDERKSKKRYRNEGSPSPRQSPKRRREHSPDSDAYNSGDDKNEKHRLLSQVVRPQESRSLSPSHLTEDRQGRWKEEDRKPERKESSRRYEEQELKEKVSSVDKQREQTEILESSRMRAQDIIGHHQSEDRETSDRAHDENKKKAKIQKKPIKKKKEDDVGIERGNIETTSEDGQVFSPKKGQKKKSIEKKRKKSKGDSDISDEEAAQQSKKKRGPRTPPITTKEELVEMCNGKNGILEDSQKKEDTAFSDWSDEDVPDRTEVTEAEHTATATTPGSTPSPLSSLLPPPPPVATATATTVPATLAATTAAAATSFSTSAITISTSATPTNTTNNTFANEDSHRKCHRTRVEKVETPHVTIEDAQHRKPMDQKRSSSLGSNRSNRSHTSGRLRSPSNDSAHRSGDDQSGRKRVLHSGSRDREKTKSLEITGERKSRIDQLKRGEPSRSTSSDRQDSRSHSSRRSSPESDRQVHSRSGSFDSRDRLQERDRYEHDRERERERRDTRQREWDRDADKDWPRNRDRDRLRERERERERDKRRDLDRERERLISDSVERDRDRDRDRTFESSQIESVKRCEAKLEGEHERDLESTSRDSLALDKERMDKDLGSVQGFEETNKSERTESLEAGDDESKLDDAHSLGSGAGEGYEPISDDELDEILAGDAEKREDQQDEEKMPDPLDVIDVDWSGLMPKHPKEPREPGAALLKFTPGAVMLRVGISKKLAGSELFAKVKETCQRLLEKPKGSFILL

SEQ ID NO: 2702 - protein, 1007 aa, Homo sapiens
MEVFPFLLVLSVWWSRTWDSANADSIIHIGAIFDESAKKDDEVFRTAVGDLNQNEEILQTEKITFSVTFVDGNNPFQAVQEACELMNQGILALVSSIGCTSAGSLQSLADAMHIPHLFIQRSTAGTPRSGCGLTRSNRNDDYTLSVRPPVYLHDVILRVVTEYAWQKFIIFYDSEYDIRGIQEFLDKVSQQGMDVALQKVENNINKMITTLFDTMRIEELNRYRDTLRRAILVMNPATAKSFITEVVETNLVAFDCHWIIINEEINDVDVQELVRRSIGRLTIIRQTFPVPQNISQRCFRGNHRISSTLCDPKDPFAQNMEISNLYIYDTVLLLANAFHKKLEDRKWHSMASLSCIRKNSKPWQGGRSMLETIKKGGVSGLTGELEFGENGGNPNVHFEILGTNYGEELGRGVRKLGCWNPVTGLNGSLTDKKLENNMRGVVLRVVTVLEEPFVMVSENVLGKPKKYQGFSIDVLDALSNYLGFNYEIYVAPDHKYGSPQEDGTWNGLVGELVFKRADIGISALTITPDRENVVDFTTRYMDYSVGVLLRRAEKTVDMFACLAPFDLSLWACIAGTVLLVGLLVYLLNWLNPPRLQMGSMTSTTLYNSMWFVYGSFVQQGGEVPYTTLATRMMMGAWWLFALIVISSYTANLAAFLTITRIESSIQSLQDLSKQTEIPYGTVLDSAVYEHVRMKGLNPFERDSMYSQMWRMINRSNGSENNVLESQAGIQKVKYGNYAFVWDAAVLEYVAINDPDCSFYTIGNTVADRGYGIALQHGSPYRDVFSQRILELQQNGDMDILKHKWWPKNGQCDLYSSVDTKQKGGALDIKSFAGVFCILAAGIVLSCFIAMLETWWNKRKGSRVPSKEDDKEIDLEHLHRRVNSLCTDDDSPHKQFSTSSIDLTPLDIDTLPTRQALEQISDFRNTHITTTTFIPEQIQTLSRTLSAKAASGFTFGNVPEHRTGPFRHRAPNGGFFRSPIKTMSSIPYQPTPTLGLNLGNDPDRGTSI

SEQ ID NO: 2703 - protein, 2579 aa, Homo sapiens
MAEAVKPQRRAKAKASRTKTKEKKKYETPQREESSEVSLPKTSREQEIPSLACEFKGDHLKVVTDSQLQDDASGQNESEMFDVPLTSLTISNEESLTCNTEPPKEGGEARPCVGDSAVTPKVHPGDNVGTKVETPKNFTEVEENMSVQGGLSESAPQSNFSYTQPAMENIQVRETQNSKEDKQGLVCSSEVPQNVGLQSSCPAKHGFQTPRVKKLYPQLPAEIAGEAPALVAVKPLLRSERLYPELPSQLELVPFTKEQLKILEPGSWLENVESYLEEFDSMAHQDRHEFYELLLNYSRCRKQLLLAEAELLTLTSDCQNAKSRLWQFKEEQMSVQGICADQVKVFSYHRYQRVEMNENALVELKKLFDAKSEHLHQTLALHSYTSVLSRLQVESYIYALLSSSAVLRSSAIHQQGRASKQTESIPSDLCQLKECISVLFMFTRRVNEDTQFHDDILLWLQKLVSVLQRVGCPGDHLFLLNHILRCPAGVSKWAVPFIQIKVLHNPSGVFHFMQSLALLMSPVKNRAEFMCHMKPSERKPSSSGPGSGTWTLVDEGGEEDEDPETSWILLNEDDLVTILAQFPFHELFQHLLGFKAKGDYLPETTRPQEMMKIFAFANSLVELLAVGLETFNRARYRQFVKRIGYMIRMTLGYVSDHWAQYVSHNQGSGLAQQPYSMEKLQVEFDELFLRAVLHVLKAKRLGIWLFMSEMPFGTLSVQMLWKLFYLMHQVESENLQQLSSSLQPAQCKQQLQDPEHFTNFEKCLSSMNSSEEICLLTTFAQMAQARRTNVDEDFIKIIVLEIYEVSYVTLSTRETFSKVGRELLGTITAVHPEIISVLLDRVQETIDQVGMVSLYLFKELPLYLWQPSASEIAVIRDWLLNYNLTVVKNKLACVILEGLNWGFAKQATLHLDQAVHAEVALMVLEAYQKYLAQKPYAGILSESMKQVSYLASIVRYGETPETSFNQWAWNLILRLKLHKNDYGIQPNCPAVPFSVTVPDMTESPTFHPLLKAVKAGMPIGCYLALSMTAVGHSIEKFCAEGIPLLGILVQSRHLRTVVHVLDKILPLFYPCQYYLLKNEQFLSHLLLFLHLDSGVPQGVTQQVTHKVAQHLTGASHGDNVKLLNSMIQAHISVSTQPNEVGPVAVLEFWVQALISQHLWYREQPILFLMDHLCKAAFQLMQEDCIQKLLYQQHKNALGYHCDRSLLSSLVSWIVAGNITPSFVEGLATPTQVWFAWTVLNMESIFEEDSQLRRVIEGELVINSAFTPDQALKKAQTQLKLPIVPSLQRLLIYRWAHQALVTPSDHPLLPLIWQKFFLLYLHRPGPQYGLPIDGCIGRRFFQSPAHINLLKEMKRRLTEVADFHHAASKALRVPAEGSEGLPESHSGTPGYLTSPELHKELVRLFNVYILWLEDENFQKGDTYIPSLPKHYDIHRLAKVMQNQQDLWMEYLNMERIYHEFQETVGLWTQAKLESHSTPCSLSVQLDFTDPLLAKERVLSNLRKHEAPQPPLALHPTKPPVPVISSAVLLSQKDATQLVCTDLNLLQQQARTAALRESQQVALDGELLDTMPKQYVNREEQTTLHLECRGSSGKKCQGAAVVTVQFEGMHKNEAISQQLHVLRKEVKQLQAEAAKPPSLNIVEAAVHAENLITALVNAYKLQPTPGIQKVGISLFFTIVDYVSDETQRHPPTRQFFTSCIEILGQVFISGIKSECRKVLETILKNSRLCSLLSPFFTPNAAPAEFIQLYEQVVKFLSEDNSDMIFMLLTKFDLKQWLSATKPPLSDRTRLLESIHLALTAWGLEPDEDILMPFNLFCKHWTYLLLYQFPDQYSDILRLLMQSSAEQLLSPECWKATLRALGCCAPSCQQGAASTEGAVLPSSSDALLSDKQVMETIQWLSDFFYKLRLSKMDFKSFGLFSKWSPYMADVKTFLGYLVKRLIDLEMTCLAQDPTASRKTVLKSLHSVIIQLFKPWILVLEDNESSQQRHYPWLESDTVVASSIVQLFTDCIDSLHESFKDKLLPGDAGALWLHLMHYCEACTAPKMPEFILYAFHSTYRKLPWKDLHPDQMLMEAFFKVERGSPKSCFLFLGSVLCEVNWVSVLSDAWNSSPHPETRSMIVCLLFMMILLAKEVQLVDQTDSPLLSLLGQTSSLSWHLVDIVSYQSVLSYFSSHYPPSIILAKESYAELIMKLLKVSAGLSIPTDSQKHLDAVPKCQAFTHQMVQFLSTLEQNGKITLAVLEQEMSKLLDDIIVFNPPDMDSQTRHMALSSLFMEVLMMMNNATIPTAEFLRGSIRTWIGQKMHGLVVLPLLTAACQSLASVRHMAETTEACITAYFKESPLNQNSGWGPILVSLQVPELTMEEFLQECLTLGSYLTLYVYLLQCLNSEQTLRNEMKVLLILSKWLEQVYPSSVEEEAKLFLWWHQVLQLSLIQTEQNDSVLTESVIRILLLVQSRQNLVAEERLSSGILGAIGFGRKSPLSNRFRVVARSMAAFLSVQVPMEDQIRLRPGSELHLTPKAQQALNALESMASSKQYVEYQDQILQATQFIRHPGHCLQDGKSFLALLVNCLYPEVHYLDHIR

SEQ ID NO: 2704 - protein, 115 aa, Homo sapiens
MIPAKDMAKVMIVMLAICFLTKSDGKSVKKRSVSEIQLMHNLGKHLNSMERVEWLRKKLQDVHNFVALGAPLAPRDAGSQRPRKKEDNVLVESHEKSLGEADKADVNVLTKAKSQ

SEQ ID NO: 2705 - protein, 1112 aa, Homo sapiens
MRRDERDAKAMRSLQPPDGAGSPPESLRNGYVKSCVSPLRQDPPRGFFFHLCRFCNVELRPPPASPQQPRRCSPFCRARLSLGALAAFVLALLLGAEPESWAAGAAWLRTLLSVCSHSLSPLFSIACAFFFLTCFLTRTKRGPGPGRSCGSWWLLALPACCYLGDFLVWQWWSWPWGDGDAGSAAPHTPPEAAAGRLLLVLSCVGLLLTLAHPLRLRHCVLVLLLASFVWWVSFTSLGSLPSALRPLLSGLVGGAGCLLALGLDHFFQIREAPLHPRLSSAAEEKVPVIRPRRRSSCVSLGETAASYYGSCKIFRRPSLPCISREQMILWDWDLKQWYKPHYQNSGGGNGVDLSVLNEARNMVSDLLTDPSLPPQVISSLRSISSLMGAFSGSCRPKINPLTPFPGFYPCSEIEDPAEKGDRKLNKGLNRNSLPTPQLRRSSGTSGLLPVEQSSRWDRNNGKRPHQEFGISSQGCYLNGPFNSNLLTIPKQRSSSVSLTHHVGLRRAGVLSSLSPVNSSNHGPVSTGSLTNRSPIEFPDTADFLNKPSVILQRSLGNAPNTPDFYQQLRNSDSNLCNSCGHQMLKYVSTSESDGTDCCSGKSGEEENIFSKESFKLMETQQEEETEKKDSRKLFQEGDKWLTEEAQSEQQTNIEQEVSLDLILVEEYDSLIEKMSNWNFPIFELVEKMGEKSGRILSQVMYTLFQDTGLLEIFKIPTQQFMNYFRALENGYRDIPYHNRIHATDVLHAVWYLTTRPVPGLQQIHNGCGTGNETDSDGRINHGRIAYISSKSCSNPDESYGCLSSNIPALELMALYVAAAMHDYDHPGRTNAFLVATNAPQAVLYNDRSVLENHHAASAWNLYLSRPEYNFLLHLDHVEFKRFRFLVIEAILATDLKKHFDFLAEFNAKANDVNSNGIEWSNENDRLLVCQVCIKLADINGPAKVRDLHLKWTEGIVNEFYEQGDEEANLGLPISPFMDRSSPQLAKLQESFITHIVGPLCNSYDAAGLLPGQWLEAEEDNDTESGDDEDGEELDTEDEEMENNLNPKPPRRKSRRRIFCQLMHHLTENHKIWKEIVEEEEKCKADGNKLQVENSSLPQADEIQVIEEADEEE

SEQ ID NO: 2706 - protein, 588 aa, Homo sapiens
MPQLGGGGGGGGGGSGGGGGSSAGAAGGGDDLGANDELIPFQDEGGEEQEPSSDSASAQRDLDEVKSSLVNESENQSSSSDSEAERRPQPVRDTFQKPRDYFAEVRRPQDSAFFKGPPYPGYPFLMIPDLSSPYLSNGPLSPGGARTYLQMKWPLLDVPSSATVKDTRSPSPAHLSNKVPVVQHPHHMHPLTPLITYSNDHFSPGSPPTHLSPEIDPKTGIPRPPHPSELSPYYPLSPGAVGQIPHPLGWLVPQQGQPMYSLPPGGFRHPYPALAMNASMSSLVSSRFSPHMVAPAHPGLPTSGIPHPAIVSPIVKQEPAPPSLSPAVSVKSPVTVKKEEEKKPHVKKPLNAFMLYMKEMRAKVVAECTLKESAAINQILGRKWHNLSREEQAKYYELARKERQLHSQLYPTWSARDNYGKKKKRKREKQLSQTQSQQQVQEAEGALASKSKKPCVQYLPPEKPCDSPASSHGSMLDSPATPSAALASPAAPAATHSEQAQPLSLTTKPETRAQLALHSAAFLSAKAAASSSGQMGSQPPLLSRPLPLGSMPTALLASPPSFPATLHAHQALPVLQAQPLSLVTKSAH

SEQ ID NO: 2707 - protein, 408 aa, Homo sapiens
MAGRGFSWGPGHLNEDNARFLLLAALIVLYLLGGAAVFSALELAHERQAKQRWEERLANFSRGHNLSRDELRGFLRHYEEATRAGIRVDNVRPRWDFTGAFYFVGTVVSTIGFGMTTPATVGGKIFLIFYGLVGCSSTILFFNLFLERLITIIAYIMKSCHQRQLRRRGALPQESLKDAGQCEVDSLAGWKPSVYYVMLILCTASILISCCASAMYTPIEGWSYFDSLYFCFVAFSTIGFGDLVSSQNAHYESQGLYRFANFVFILMGVCCIYSLFNVISILIKQSLNWILRKMDSGCCPQCQRGLLRSRRNVVMPGSVRNRCNISIETDGVAESDTDGRRLSGEMISMKDLLAANKASLAILQKQLSEMANGCPHQTSTLARDNEFSGGVGAFAIMNNRLAETSGDR

SEQ ID NO: 2708 - protein, 377 aa, Homo sapiens
DDYFRNWNPNKPFDQALDPSKDPCLKVKCSPHKVCVTQDYQTALCVSRKHLLPRQKKGNVAQKHWVGPSNLVKCKPCPVAQSAMVCGSDGHSYTSKCKLEFHACSTGKSLATLCDGPCPCLPEPEPPKHKAERSACTDKELRNLASRLKDWFGALHEDANRVIKPTSSNTAQGRFDTSILPICKDSLGWMFNKLDMNYDLLLDPSEINAIYLDKYEPCIKPLFNSCDSFKDGKLSNNEWCYCFQKPGGLPCQNEMNRIQKLSKGKSLLGAFIPRCNEEGYYKATQCHGSTGQCWCVDKYGNELAGSRKQGAVSCEEEQETSGDFGSGGSVVLLDDLEYERELGPKDKEGKLRVHTRAVTEDDEDEDDDKEDEVGYIW

SEQ ID NO: 2709 - protein, 763 aa, Homo sapiens
MSRRKISSESFSSLGSDYLETSPEEEGECPLSRLCWNGSRSPPGPLEPSPAAAAAAAAPAPTPAASAAAAAATAGARRVQRRRRVNLDSLGESISRLTAPSPQTIQQTLKRTLQYYEHQVIGYRDAEKNFHNISNRCSYADHSNKEEIEDVSGILQCTANILGLKFEEIQKRFGEEFFNICFHENERVLRAVGGTLQDFFNGFDALLEHIRTSFGKQATLESPSFLCKELPEGTLMLHYFHPHHIVGFAMLGMIKAAGKKIYRLDVEVEQVANEKLCSDVSNPGNCSCLTFLIKECENTNIMKNLPQGTSQVPADLRISINTFCRAFPFHLMFDPSMSVLQLGEGLRKQLRCDTHKVLKFEDCFEIVSPKVNATFERVLLRLSTPFVIRTKPEASGSENKDKVMEVKGQMIHVPESNSILFLGSPCVDKLDELMGRGLHLSDIPIHDATRDVILVGEQAKAQDGLKKRMDKLKATLERTHQALEEEKKKTVDLLYSIFPGDVAQQLWQGQQVQARKFDDVTMLFSDIVGFTAICAQCTPMQVISMLNELYTRFDHQCGFLDIYKVETIGDAYCVAAGLHRKSLCHAKPIALMALKMMELSEEVLTPDGRPIQPQRSELLFSFPVSIQLVPDQHQSETDLGTEKMRIGIHSGSVLAGVVGVRMPRYCLFGNNVTLASKFESGSHPRRINVSPTTYQLLKREESFTFIPRSREELPDNFPKEIPGICYFLEVRTGPKPPKPSLSSSRIKKVSYNIGTMFLRETSL

SEQ ID NO: 2710 - protein, 894 aa, Homo sapiens
MATSMAAASGRFESAKSIEERKEQTRNARAEVLRQAKANFEKEERRKELKRLRGEDTWMLPDVNERIEQFSQEHSVKKKKKKDKHSKKAKKEKKKKSKKQKYEKNNESSDSSSSSEDEWVEAVPSQTPDKEKAWKVKDEKSGKDDTQIIKRDEWMTVDFMSVKTVSSSSLKAEKETMRKIEQEKNQALEQSKLMERELNPYWKDGGTGLPPEDCSVSSITKVSVVEDGGLSWLRKSYLRMKEQAEKQSRNFEDIVAERYGSMEIFQSKLEDAEKAASTKEDYRRERWRKPTYSDKAQNCQESRESDLVKYGNSSRDRYATTDTAKNSNNEKFIGDEKDKRPGSLETCRRESNPRQNQEFSFGNLRAKFLRPSDDEELSFHSKGRKFEPLSSSSALVAQGSLCSGFRKPTKNSEERLTSWSRSDGRGDKKHSNQKPSETSTDEHQHVPEDPREKSQDEVLRDDPPKKEHLRDTKSTFAGSPERESIHILSVDEKNKLGAKIIKAEMMGNMELAEQLKVQLEKANKFKETITQIPKKSGVENEDQQEVILVRTDQSGRVWPVNTPGKSLESQGGRRKRQMVSTHEERERVRYFHDDDNLSLNDLVKNEKMGTAENQNKLFMRMASKFMGKTDGDYYTLDDMFVSKAAERERLGEEEENQRKKAIAEHRSLAAQMEKCLYCFDSSQFPKHLIVAIGVKVYLCLPNVRSLTEGHCLIVPLQHHRAATLLDEDIWEEIQMFRKSLVKMFEDKGLDCIFLETNMSMKKQYHMVYECIPLPKEVGDMAPIYFKKAIMESDEEWSMNKKLIDLSSKDIRKSVPRGLPYFSVDFGLHGGFAHVIEDQHKFPHYFGKEIIGGMLDIEPRLWRKGIRESFEDQRKKALQFAQWWKPYDFTKSKNY

SEQ ID NO: 2711 - protein, 993 aa, Homo sapiens
MAVLKLTDQPPLVQAIFSGDPEEIRMLIHKTEDVNTLDSEKRTPLHVAAFLGDAEIIELLILSGARVNAKDNMWLTPLHRAVASRSEEAVQVLIKHSADVNARDKNWQTPLHVAAANKAVKCAEVIIPLLSSVNVSDRGGRTALHHAALNGHVEMVNLLLAKGANINAFDKKDRRALHWAAYMGHLDVVALLINHGAEVTCKDKKGYTPLHAAASNGQINVVKHLLNLGVEIDEINVYGNTALHIACYNGQDAVVNELIDYGANVNQPNNNGFTPLHFAAASTHGALCLELLVNNGADVNIQSKDGKSPLHMTAVHGRFTRSQTLIQNGGEIDCVDKDGNTPLHVAARYGHELLINTLITSGADTAKCGIHSMFPLHLAALNAHSDCCRKLLSSGFEIDTPDKFGRTCLHAAAAGGNVECIKLLQSSGADFHKKDKCGRTPLHYAAANCHFHCIETLVTTGANVNETDDWGRTALHYAAASDMDRNKTILGNAHDNSEELERARELKEKEATLCLEFLLQNDANPSIRDKEGYNSIHYAAAYGHRQCLELLLERTNSGFEESDSGATKSPLHLAAYNGHHQALEVLLQSLVDLDIRDEKGRTALDLAAFKGHTECVEALINQGASIFVKDNVTKRTPLHASVINGHTLCLRLLLEIADNPEAVDVKDAKGQTPLMLAVAYGHIDAVSLLLEKEANVDTVDILGCTALHRGIMTGHEECVQMLLEQEVSILCKDSRGRTPLHYAAARGHATWLSELLQMALSEEDCCFKDNQGYTPLHWACYNGNENCIEVLLEQKCFRKFIGNPFTPLHCAIINDHGNCASLLLGAIDSSIVSCRDDKGRTPLHAAAFADHVECLQLLLRHSAPVNAVDNSGKTALMMAAENGQAGAVDILVNSAQADLTVKDKDLNTPLHLACSKGHEKCALLILDKIQDESLINEKNNALQTPLHVAARNGLKVVVEELLAKGACVLAVDENASRSNGPRSTPGTAVQKEE

SEQ ID NO: 2712 - protein, 593 aa, Homo sapiens
MLRTSVLRLLGRTGASRLSLLEDFGPRYYSSGSLSAGDDACDVRAYFTTPIFYVNAAPHIGHLYSALLADALCRHRRLRGPSTAATRFSTGTDEHGLKIQQAAATAGLAPTELCDRVSEQFQQLFQEAGISCTDFIRTTEARHRVAVQHFWGVLKSRGLLYKGVYEGWYCASDECFLPEAKVTQQPGPSGDSFPVSLESGHPVSWTKEENYIFRLSQFRKPLQRWLRGNPQAITPEPFHHVVLQWLDEELPDLSVSRRSSHLHWGIPVPGDDSQTIYVWLDALVNYLTVIGYPNAEFKSWWPATSHIIGKDILKFHAIYWPAFLLGAGMSPPQRICVHSHWTVCGQKMSKSLGNVVDPRTCLNRYTVDGFRYFLLRQGVPNWDCDYYDEKVVKLLNSELADALGGLLNRCTAKRINPSETYPAFCTTCFPSEPGLVGPSVRAQAEDYALVSAVATLPKQVADHYDNFRIYKALEAVSSCVRQTNGFVQRHAPWKLNWESPVDAPWLGTVLHVALECLRVFGTLLQPVTPSLADKLLSRLGVSASERSLGELYFLPRFYGHPCPFEGRRLGPETGLLFPRLDQSRTWLVKAHRT

SEQ ID NO: 2713 - protein, 402 aa, Homo sapiens
MAEMNPAQGHVVFEDVAIYFSQEEWGHLDEAQRLLYRDVMLENLALLSSLGCCHGAEDEEAPLEPGVSVGVSQVMAPKPCLSTQNTQPCETCSSLLKDILRLAEHDGTHPEQGLYTCPAHLHQHQKEQIREKLSRGDGGRPTFVKNHRVHMAGKTFLCSECGKAFSHKHKLSDHQKIHTGERTYKCSKCGILFMERSTLNRHQRTHTGERPYECNECGKAFLCKSHLVRHQTIHSGERPYECSECGKLFMWSSTLITHQRVHTGKRPYGCSECGKFFKCNSNLFRHYRIHTGKRSYGCSECGKFFMERSTLSRHQRVHTGERPYECNECGKFFSLKSVLIQHQRVHTGERPYECSECGKAFLTKSHLICHQTVHTAAKQCSECGKFFRYNSTLLRHQKVHTG

SEQ ID NO: 2714 - protein, 659 aa, Homo sapiens
MAAAVLMDRVQSCVTFEDVFVYFSREEWELLEEAQRFLYRDVMLENFALVATLGFWCEAEHEAPSEQSVSVEGVSQVRTAESGLFQKAHPCEMCDPLLKDILHLAEHQGSHLTQKLCTRGLCRRRFSFSANFYQHQKQHNGENCFRGDDGGASFVKSCTVHMLGRSFTCREEGMDLPDSSGLFQHQTTYNRVSPCRRTECMESFPHSSSLRQHQGDYDGQMLFSCGDEGKAFLDTFTLLDSQMTHAEVRPFRCLPCGNVFKEKSALINHRKIHSGEISHVCKECGKAFIHLHHLKMHQKFHTGKRHYTCSECGKAFSRKDTLVQHQRVHTGERSYDCSECGKAYSRSSHLVQHQRIHTGERPYKCNKCGKAFSRKDTLVQHQRFHTGERPYECSECGKFFSQSSHLIEHWRIHTGARPYECIECGKFFSHNSSLIKHRRVHTGARSYVCSKCGKAFGCKDTLVQHQIIHTGARPYECSECGKAFSRKDTLVQHQKIHTGERPYECGECGKFFSHSSNLIVHQRIHTGAKPYECNECGKCFSHNSSLILHQRVHTGARPYVCSECGKAYISSSHLVQHKKVHTGARPYECSECGKFFSRNSGLILHQRVHTGEKPYVCSECGKAYSRSSHLVRHQKAHTGERAHECNSFGGPLAASLKLV

SEQ ID NO: 2715 - protein, 442 aa, Homo sapiens
MAAATLRDPAQQGYVTFEDVAVYFSQEEWRLLDDAQRLLYRNVMLENFTLLASLGLASSKTHEITQLESWEEPFMPAWEVVTSAILRGSWQGAKAEAAAEQSASVEVPSSNVQQHQKQHCGEKPLKRQEGRVPVLRSCRVHLSEKSLQSREVGKDLLTSSGVLKHQVTHTGEKSHRSSKSREAFHAGKRHYKCSECGKAFGQKYLLVQHQRLHTGEKPYECSECGKLFSHKSNLFIHQIVHTGERPYGCSDCGKSFSRNADLIQHQRVHTGEKPFTCSECGKAFRHNSTLVQHHRIHTGVRPYECSECGKLFSFNSSLMKHQRVHTGERPYKCSECGKFYSHKSSLINHWRVHTGERPYECSECGKFFSQSSSLMQHRKVHTGEKPFKCNECGRFFSENSSLVKHQRVHTGAKPYECRECGKFFRHSSSLVKHRRIHTGEIQ

SEQ ID NO: 2716 - protein, 627 aa, Homo sapiens
MAAAELTAPAQGIVTFEDVAVYFSWKEWGLLDEAQKCLYHDVMLENLTLTTSLGGSGAGDEEAPYQQSTSPQRVSQVRIPKALPSPQKTNPCEICGPVLRQILHLVEHQGTHHGQKLYTDGACRKQLQFTAYLHQHQKQHVGQKHFRSNGGRDMFLSSCTFEVSGKPFTCKEVGKDFLVRSRFLQQQAAHTRKKSNRTKSAVAFHSVKNHYNWGECVKAFSYKHVRVQHQGDLIRERSYMCSECGKSFSTSCSLSDHLRVHTSEKPYTCGECGKSYRQSSSLITHRRIHTGVRPHQCDECGKLFNRKYDLLIHQRVHTGERPYKCSECGKSFSHSSSLITHQRIHTGMRPYECSECGKSFIHSSSLITHQRVHTGTRPYMCSECGKSFSQSCHLIKHRRLHIGEGPYECSECGKLFTYRSRFFQHQRVHTGVRSHECHECGKLFSRKFDLIVHERVHTGERPYECSECGKSFTCKSYLISHWKVHTGARPYECGECGKSFTHSSTLLQHQRVHTGERPYECNECGKFFSQSSSLIRHRRSHTGERPYECSECWKSFSNHSSLVKHRRVHTGERPYECSECGKSFSQSSNLTNHQRIHSGERPYECSDCGKFFTFNSNLLKHQNVHKG

SEQ ID NO: 2717 - protein, 408 aa, Homo sapiens
MLPRPKAPASPRRPQTPTPSEQDADPGPASPRDTEAQRLRFRQFQYHVASGPHLALGQLWTLCRQWLRPEARSKEQMLELLVLEQFLGALPSKMRTWVQSQGPRSCREAASLVEDLTQMCQQEVLVSLDSVEPQDWSFGEEEDGKSPRSQKEPSQASELILDAVAAAPALPEESEWLETTQLQQSLHTRAEAEAPRAPGLLGSRARLPLKPSIWDEPEDLLAGPSSDLRAEGTVISSPKGPSAQRISPRRRNRNTDQSGRHQPSLKHTKGGTQEAVAGISVVPRGPRGGRPFQCADCGMVFTWVTHFIEHQKTHREEGPFPCPECGKVFLHNSVLTEHGKIHLLEPPRKKAPRSKGPRESVPPRDGAQGPVAPRSPKRPFQCSVCGKAFPWMVHLIDHQKLHTAHGHM

SEQ ID NO: 2718 - protein, 632 aa, Homo sapiens
MNQGSGLDLLKISYGKGARRKNRFKGSDGSTSSDTTSNSFVRQGSADSYTSRPSDSDVSLEEDREAVRREAERQAQAQLEKAKTKPVAFAVRTNVSYSAAHEDDVPVPGMAISFEAKDFLHVKEKFNNDWWIGRLVKEGCEIGFIPSPVKLENMRLQHEQRAKQGKFYSSKSGGNSSSSLGDIVPSSRKSTPPSSAIDIDATGLDAEENDIPANHRSPKPSANSVTSPHSKEKRMPFFKKTEHTPPYDVVPSMRPVVLVGPSLKGYEVTDMMQKALFDFLKHRFEGRISITRVTADISLAKRSVLNNPSKHAIIERSNTRSSLAEVQSEIERIFELARTLQLVVLDADTINHPAQLSKTSLAPIIVYVKISSPKVLQRLIKSRGKSQAKHLNVQMVAADKLAQCPPELFDVILDENQLEDACEHLADYLEAYWKATHPPSSSLPNPLLSRTLATSSLPLSPTLASNSQGSQGDQRTDRSAPIRSASQAEEEPSVEPVKKSQHRSSSSAPHHNHRSGTSRGLSRQETFDSETQESRDSAYVEPKEDYSHDHVDHYASHRDHNHRDETHGSSDHRHRESRHRSRDVDREQDHNECNKQRSRHKSKDRYCEKDGEVISKKRNEAGEWNRDVYIRQ

SEQ ID NO: 2719 - protein, 473 aa, Homo sapiens
MLKVTVPSCSASSCSSVTASAAPGTASLVPDYWIDGSNRDALSDFFEVESELGRGATSIVYRCKQKGTQKPYALKVLKKTVDKKIVRTEIGVLLRLSHPNIIKLKEIFETPTEISLVLELVTGGELFDRIVEKGYYSERDAADAVKQILEAVAYLHENGIVHRDLKPENLLYATPAPDAPLKIADFGLSKIVEHQVLMKTVCGTPGYCAPEILRGCAYGPEVDMWSVGIITYILLCGFEPFYDERGDQFMFRRILNCEYYFISPWWDEVSLNAKDLVRKLIVLDPKKRLTTFQALQHPWVTGKAANFVHMDTAQKKLQEFNARRKLKAAVKAVVASSRLGSASSSHGSIQESHKASRDPSPIQDGNEDMKAIPEGEKIQGDGAQAAVKGAQAELMKVQALEKVKGADINAEEAPKMVPKAVEDGIKVADLELEEGLAEEKLKTVEEAAAPREGQGSSAVGFEVPQQDVILPEY

SEQ ID NO: 2720 - protein, 728 aa, Homo sapiens
MSESGEMSEFGYIMELIAKGKVTIKNIERELICPACKELFTHPLILPCQHSICHKCVKELLLTLDDSFNDVGSDNSNQSSPRLRLPSPSMDKIDRINRPGWKRNSLTPRTTVFPCPGCEHDVDLGERGINGLFRNFTLETIVERYRQAARAATAIMCDLCKPPPQESTKSCMDCSASYCNECFKIHHPWGTIKAQHEYVGPTTNFRPKILMCPEHETERINMYCELCRRPVCHLCKLGGNHANHRVTTMSSAYKTLKEKLSKDIDYLIGKESQVKSQISELNLLMKETECNGERAKEEAITHFEKLFEVLEERKSSVLKAIDSSKKLRLDKFQTQMEEYQGLLENNGLVGYAQEVLKETDQSCFVQTAKQLHLRIQKATESLKSFRPAAQTSFEDYVVNTSKQTELLGELSFFSSGIDVPEINEEQSKVYNNALINWHHPEKDKADSYVLEYRKINRDDEMSWNEIEVCGTSKIIQDLENSSTYAFRVRAYKGSICSPCSRELILHTPPAPVFSFLFDEKCGYNNEHLLLNLKRDRVESRAGFNLLLAAERIQVGYYTSLDYIIGDTGITKGKHFWAFRVEPYSYLVKVGVASSDKLQEWLRSPRDAVSPRYEQDSGHDSGSEDACFDSSQPFTLVTIGMQKFFIPKSPTSSNEPENRVLPMPTSIGIFLDCDKGKVDFYDMDQMKCLYERQVDCSHTLYPAFALMGSGGIQLEEPITAKYLEYQEDM

SEQ ID NO: 2721 - protein, 494 aa, Homo sapiens
MSTTLLSAFYDVDFLCKTEKSLANLNLNNMLDKKAVGTPVAAAPSSGFAPGFLRRHSASNLHALAHPAPSPGSCSPKFPGAANGSSCGSAAAGGPTSYGTLKEPSGGGGTALLNKENKFRDRSFSENGDRSQHLLHLQQQQKGGGGSQINSTRYKTELCRPFEESGTCKYGEKCQFAHGFHELRSLTRHPKYKTELCRTFHTIGFCPYGPRCHFIHNADERRPAPSGGASGDLRAFGTRDALHLGFPREPRPKLHHSLSFSGFPSGHHQPPGGLESPLLLDSPTSRTPPPPSCSSASSCSSSASSCSSASAASTPSGAPTCCASAAAAAAAALLYGTGGAEDLLAPGAPCAACSSASCANNAFAFGPELSSLITPLAIQTHNFAAVAAAAYYRSQQQQQQQGLAPPAQPPAPPSATLPAGAAAPPSPPFSFQLPRRLSDSPVFDAPPSPPDSLSDRDSYLSGSLSSGSLSGSESPSLDPGRRLPIFSRLSISDD

SEQ ID NO: 2722 - protein, 1338 aa, Homo sapiens
MVSYWDTGVLLCALLSCLLLTGSSSGSKLKDPELSLKGTQHIMQAGQTLHLQCRGEAAHKWSLPEMVSKESERLSITKSACGRNGKQFCSTLTLNTAQANHTGFYSCKYLAVPTSKKKETESAIYIFISDTGRPFVEMYSEIPEIIHMTEGRELVIPCRVTSPNITVTLKKFPLDTLIPDGKRIIWDSRKGFIISNATYKEIGLLTCEATVNGHLYKTNYLTHRQTNTIIDVQISTPRPVKLLRGHTLVLNCTATTPLNTRVQMTWSYPDEKNKRASVRRRIDQSNSHANIFYSVLTIDKMQNKDKGLYTCRVRSGPSFKSVNTSVHIYDKAFITVKHRKQQVLETVAGKRSYRLSMKVKAFPSPEVVWLKDGLPATEKSARYLTRGYSLIIKDVTEEDAGNYTILLSIKQSNVFKNLTATLIVNVKPQIYEKAVSSFPDPALYPLGSRQILTCTAYGIPQPTIKWFWHPCNHNHSEARCDFCSNNEESFILDADSNMGNRIESITQRMAIIEGKNKMASTLVVADSRISGIYICIASNKVGTVGRNISFYITDVPNGFHVNLEKMPTEGEDLKLSCTVNKFLYRDVTWILLRTVNNRTMHYSISKQKMAITKEHSITLNLTIMNVSLQDSGTYACRARNVYTGEEILQKKEITIRDQEAPYLLRNLSDHTVAISSSTTLDCHANGVPEPQITWFKNNHKIQQEPGIILGPGSSTLFIERVTEEDEGVYHCKATNQKGSVESSAYLTVQGTSDKSNLELITLTCTCVAATLFWLLLTLFIRKMKRSSSEIKTDYLSIIMDPDEVPLDEQCERLPYDASKWEFARERLKLGKSLGRGAFGKVVQASAFGIKKSPTCRTVAVKMLKEGATASEYKALMTELKILTHIGHHLNVVNLLGACTKQGGPLMVIVEYCKYGNLSNYLKSKRDLFFLNKDAALHMEPKKEKMEPGLEQGKKPRLDSVTSSESFASSGFQEDKSLSDVEEEEDSDGFYKEPITMEDLISYSFQVARGMEFLSSRKCIHRDLAARNILLSENNVVKICDFGLARDIYKNPDYVRKGDTRLPLKWMAPESIFDKIYSTKSDVWSYGVLLWEIFSLGGSPYPGVQMDEDFCSRLREGMRMRAPEYSTPEIYQIMLDCWHRDPKERPRFAELVEKLGDLLQANVQQDGKDYIPINAILTGNSGFTYSTPAFSEDFFKESISAPKFNSGSSDDVRYVNAFKFMSLERIKTFEELLPNATSMFDDYQGDSSTLLASPMLKRFTWTDSKPKASLKIDLRVTSKSKESGLSDVSRPSFCHSSCGHVSEGKRRFTYDHAELERKIACCSPPPDYNSVVLYSTPPI

SEQ ID NO: 2723 - protein, 1493 aa, Homo sapiens
MAELSEPEGPVDWKERCVALESQLMKFRVQASKIRELLAEKMQQLERQVIDAERQAEKAFQQVQVMEDKLKAANIQTSESETRLYNKCQDLESLIQEKDDVIQNLELQLEEQKQIRIQEAKIIEEKAAKIKEWVTVKLNELELENQNLRLINQNQTEEIRTMQSKLQEVQGKKSSTVSTLKLSEGQRLSSLTFGCFLSRARSPPQVVKSEEMSKISSKEPEFTEGKDMEEMEIPEKSVDNQVLENNRGQRTLHQTPCGSEQNRKTRTSFATDGGISQNSGAPVSDWSSDEEDGSKGRSKSRCTSTLSSHTSEEGVQCSRMGSEMYLTASDDSSSIFEEETFGIKRPEHKKLYSWQQEAQWKALNSPLGKGNSELSKKEQDSSSDELNKKFQSQRLDYSSSSSEANTPSPILTPALMPKHPNSLSGKGTQLVPSSHLPPPKLRIPNVFSISVALAKRHLSQPQLSSDRMFGTNRNAISMIRPLRPQETDLDLVDGDSTEVLENMDTSCDDGLFSYDSLDSPNSDDQEHCDSAKKVAYSKPPTPPLHRFPSWESRIYAVAKSGIRMSEAFNMESVNKNSAATLSYTTSGLYTSLIYKNMTTPVYTTLKGKATQISSSPFLDDSSGSEEEDSSRSSSRTSESDSRSRSGPGSPRAMKRGVSLSSVASESDYAIPPDAYSTDTEYSQPEQKLPKTCSSSSDNGKNEPLEKSGYLLKMSGKVKSWKRRWFVLKGGELLYYKSPSDVIRKPQGHIELSASCSILRGDNKQTVQLTTEKHTYYLTADSPNILEEWIKVLQNVLRVQAANPLSLQPEGKPTMKGLLTKVKHGYSKRVWCTLIGKTLYYFRSQEDKFPLGQIKLWEAKVEEVDRSCDSDEDYEASGRSLLSTHYTIVIHPKDQGPTYLLIGSKHEKDTWLYHLTVAAGSNNVNVGSEFEQLVCKLLNIDGEPSSQIWRHPTLCHSKEGIISPLTTLPSEALQTEAIKLFKTCQLFINAAVDSPAIDYHISLAQSALQICLTHPELQNEICCQLIKQTRRRQPQNQPGPLQGWQLLALCVGLFLPHHPFLWLLRLHLKRNADSRTEFGKYAIYCQRCVERTQQNGDREARPSRMEILSTLLRNPYHHSLPFSIPVHFMNGIYQVVGFDASTTVEEFLNTLNQDTGMRKPAQSGFALFTDDPSGRDLEHCLQGNIKICDIISKWEQASKEQQPGKCEGTRTVRLTYKNRLYFSVQARGETDREKLLLMYQTNDQIINGLFPLNKDLALEMAALLSQVEIGDFERPFSTPAGHVTNQCKVNQTLKQVIEKFYPKRYRDGCSEEQLRQLCQRLSTRWMALRGHSAADCVRIYLTVARKWPFFGAKLFLAKPITPSSLGSTFLWLAVHEDGLSLLEYNSMRLIVSYVYKSLMTFGGYQDDFMVVINNTHSKDKPTEKLLFAMAKPKILEITLLIASYINNFHQQKAAFHHLSAPALLSAQTRGPQARMMGSQPLLSSSRPTKGPTLL

SEQ ID NO: 2724 - protein, 479 aa, Homo sapiens
MGAFLDKPKTEKHNAHGAGNGLRYGLSSMQGWRVEMEDAHTAVVGIPHGLEDWSFFAVYDGHAGSRVANYCSTHLLEHITTNEDFRAAGKSGSALELSVENVKNGIRTGFLKIDEYMRNFSDLRNGMDRSGSTAVGVMISPKHIYFINCGDSRAVLYRNGQVCFSTQDHKPCNPREKERIQNAGGSVMIQRVNGSLAVSRALGDYDYKCVDGKGPTEQLVSPEPEVYEILRAEEDEFIILACDGIWDVMSNEELCEYVKSRLEVSDDLENVCNWVVDTCLHKGSRDNMSIVLVCFSNAPKVSDEAVKKDSELDKHLESRVEEIMEKSGEEGMPDLAHVMRILSAENIPNLPPGGGLAGKRNVIEAVYSRLNPHRESDGASDEAEESGSQGKLVEALRQMRINHRGNYRQLLEEMLTSYRLAKVEGEESPAEPAATATSSNSDAGNPVTMQESHTESESGLAELDSSNEDAGTKMSGEKI

SEQ ID NO: 2725 - protein, 504 aa, Homo sapiens
MDPGQQPPPQPAPQGQGQPPSQPPQGQGPPSGPGQPAPAATQAAPQAPPAGHQIVHVRGDSETDLEALFNAVMNPKTANVPQTVPMRLRKLPDSFFKPPEPKSHSRQASTDAGTAGALTPQHVRAHSSPASLQLGAVSPGTLTPTGVVSGPAATPTAQHLRQSSFEIPDDVPLPAGWEMAKTSSGQRYFLNHIDQTTTWQDPRKAMLSQMNVTAPTSPPVQQNMMNSASGPLPDGWEQAMTQDGEIYYINHKNKTTSWLDPRLDPRFAMNQRISQSAPVKQPPPLAPQSPQGGVMGGSNSNQQQQMRLQQLQMEKERLRLKQQELLRQAMRNINPSTANSPKCQELALRSQLPTLEQDGGTQNPVSSPGMSQELRTMTTNSSDPFLNSGTYHSRDESTDSGLSMSSYSVPRTPDDFLNSVDEMDTGDTINQSTLPSQQNRFPDYLEAIPGTNVDLGTLEGDGMNIEGEELMPSLQEALSSDILNDMESVLAATKLDKESFLTWL

SEQ ID NO: 2726 - protein, 2623 aa, Homo sapiens
MKVKGRGITCLLVSFAVICLVATPGGKACPRRCACYMPTEVHCTFRYLTSIPDSIPPNVERINLGYNSLVRLMETDFSGLTKLELLMLHSNGIHTIPDKTFSDLQALQVLKMSYNKVRKLQKDTFYGLRSLTRLHMDHNNIEFINPEVFYGLNFLRLVHLEGNQLTKLHPDTFVSLSYLQIFKISFIKFLYLSDNFLTSLPQEMVSYMPDLDSLYLHGNPWTCDCHLKWLSDWIQEKPDVIKCKKDRSPSSAQQCPLCMNPRTSKGKPLAMVSAAAFQCAKPTIDSSLKSKSLTILEDSSSAFISPQGFMAPFGSLTLNMTDQSGNEANMVCSIQKPSRTSPIAFTEENDYIVLNTSFSTFLVCNIDYGHIQPVWQILALYSDSPLILERSHLLSETPQLYYKYKQVAPKPEDIFTNIEADLRADPSWLMQDQISLQLNRTATTFSTLQIQYSSDAQITLPRAEMRPVKHKWTMISRDNNTKLEHTVLVGGTVGLNCPGQGDPTPHVDWLLADGSKVRAPYVSEDGRILIDKSGKLELQMADSFDTGVYHCISSNYDDADILTYRITVVEPLVEAYQENGIHHTVFIGETLDLPCHSTGIPDASISWVIPGNNVLYQSSRDKKVLNNGTLRILQVTPKDQGYYRCVAANPSGVDFLIFQVSVKMKGQRPLEHDGETEGSGLDESNPIAHLKEPPGAQLRTSALMEAEVGKHTSSTSKRHNYRELTLQRRGDSTHRRFRENRRHFPPSARRIDPQHWAALLEKAKKNAMPDKRENTTVSPPPVVTQLPNIPGEEDDSSGMLALHEEFMVPATKALNLPARTVTADSRTISDSPMTNINYGTEFSPVVNSQILPPEEPTDFKLSTAIKTTAMSKNINPTMSSQIQGTTNQHSSTVFPLLLGATEFQDSDQMGRGREHFQSRPPITVRTMIKDVNVKMLSSTTNKLLLESVNTTNSHQTSVREVSEPRHNHFYSHTTQILSTSTFPSDPHTAAHSQFPIPRNSTVNIPLFRRFGRQRKIGGRGRIISPYRTPVLRRHRYSIFRSTTRGSSEKSTTAFSATVLNVTCLSCLPRERLTTATAALSFPSAAPITFPKADIARVPSEESTTLVQNPLLLLENKPSVEKTTPTIKYFRTEISQVTPTGAVMTYAPTSIPMEKTHKVNASYPRVSSTNEAKRDSVITSSLSGAITKPPMTIIAITRFSRRKIPWQQNFVNNHNPKGRLRNQHKVSLQKSTAVMLPKTSPALPRDKVSPFHFTTLSTSVMQIPSNTLTTAHHTTTKTHNPGSLPTKKELPFPPLNPMLPSIISKDSSTKSIISTQTAIPATTPTFPASVITYETQTERSRAQTIQREQEPQKKNRTDPNISPDQSSGFTTPTAMTPPVLTTAETSVKPSVSAFTHSPPENTTGISSTISFHSRTLNLTDVIEELAQASTQTLKSTIASETTLSSKSHQSTTTRKAIIRHSTIPPFLSSSATLMPVPISPPFTQRAVTDNVATPISGLMTNTVVKLHESSRHNAKPQQLVAEVATSPKVHPNAKFTIGTTHFIYSNLLHSTPMPALTTVKSQNSKLTPSPWAENQFWHKPYSEIAEKGKKPEVSMLATTGLSEATTLVSDWDGQKNTKKSDFDKKPVQEATTSKLLPFDSLSRYIFEKPRIVGGKAASFTIPANSDAFLPCEAVGNPLPTIHWTRVPSGLDLSKRKQNSRVQVLPNGTLSIQRVEIQDRGQYLCSASNLFGTDHLHVTLSVVSYPPRILERRTKEITVHSGSTVELKCRAEGRPSPTVTWILANQTVVSESSQGSRQAVVTVDGTLVLHNLSIYDRGFYKCVASNPGGQDSLLVKIQVIAAPPVILEQRRQVIVGTWGESLKLPCTAKGTPQPSVYWVLSDGTEVKPLQFTNSKLFLFSNGTLYIRNLASSDRGTYECIATSSTGSERRVVMLTMEERVTSPRIEAASQKRTEVNFGDKLLLNCSATGEPKPQIMWRLPSKAVVDQQHRVGSWIHVYPNGSLFIGSVTEKDSGVYLCVARNKMGDDLILMHVSLRLKPAKIDHKQYFRKQVLHGKDFQVDCKASGSPVPEISWSLPDGTMINNAMQADDSGHRTRRYTLFNNGTLYFNKVGVAEEGDYTCYAQNTLGKDEMKVHLTVITAAPRIRQSNKTNKRIKAGDTAVLDCEVTGDPKPKIFWLLPSNDMISFSIDRYTFHANGSLTINKVKLLDSGEYVCVARNPSGDDTKMYKLDVVSKPPLINGLYTNRTVIKATAVRHSKKHFDCRAEGTPSPEVMWIMPDNIFLTAPYYGSRITVHKNGTLEIRNVRLSDSADFICVARNEGGESVLVVQLEVLEMLRRPTFRNPFNEKIVAQLGKSTALNCSVDGNPPPEIIWILPNGTRFSNGPQSYQYLIASNGSFIISKTTREDAGKYRCAARNKVGYIEKLVILEIGQKPVILTYAPGTVKGISGESLSLHCVSDGIPKPNIKWTMPSGYVVDRPQINGKYILHDNGTLVIKEATAYDRGNYICKAQNSVGHTLITVPVMIVAYPPRITNRPPRSIVTRTGAAFQLHCVALGVPKPEITWEMPDHSLLSTASKERTHGSEQLHLQGTLVIQNPQTSDSGIYKCTAKNPLGSDYAATYIQVI

SEQ ID NO: 2727 - protein, 514 aa, Homo sapiens
MSEILCQWLNKELKVSRTVSPKSFAKAFSSGYLLGEVLHKFELQDDFSEFLDSRVSSAKLNNFSRLEPTLNLLGVQFDQNVAHGIITEKPGVATKLLYQLYIALQKKKKSGLTGVEMQTMQRLTNLRLQNMKSDTFQERLRHMIPRQTDFNLMRITYRFQEKYKHVKEDLAHLHFEKLERFQKLKEEQRCFDIEKQYLNRRRQNEIMAKIQAAIIQIPKPASNRTLKALEAQKMMKKKKEAEDVADEIKKFEALIKKDLQAKESASKTSLDTAGQTTTDLLNTYSDDEYIKKIQKRLEEDAFAREQREKRRRKLLMDQLIAHEAQEEAYREEQLINRLMRQSQQERRIAVQLMHVRHEKEVLWQNRIFREKQHEERRLKDFQDALDREAALAKQAKIDFEEQFLKEKRFHDQIAVERAQARYEKHYSVCAEILDQIVDLSTKVADYRMLTNNLIPYKLMHDWKELFFNAKPIYEQASVKTLPANPSREQLTELEKRDLLDTNDYEEYKVPTDMK

SEQ ID NO: 2728 - protein, 497 aa, Homo sapiens
MKISILLMFLWGLSCALPVTRYQNNESEDSEEWKGHLAQAPTPPLANEDPSDSTQSEEGLGSDDHQYIYRLAGGFSRSTGKGGDDKDDDEDDSGDDTFGDDDSGPGPKDRQEGGNSRLGSDEDSDDTIQASEESAPQGQDSAQDTTSESRELDNEDRVDSKPEGGDSTQESESEEHWVGGGSDGESSHGDGSELDDEGMQSDDPESIRSERGNSRMNSAGMKSKESGENSEQANTQDSGGSQLLEHPSRKIFRKSRISEEDDRSELDDNNTMEEVKSDSTENSNSRDTGLSQPRRDSKGDSQEDSKENLSQEESQNVDGPSSESSQEANLSSQENSSESQEEVVSESRGDNPDPTTSYVEDQEDSDSSEEDSSHTLSHSKSESREEQADSESSESLNFSEESPESPEDENSSSQEGLQSHSSSAESQSEESHSEEDDSDSQDSSRSKEDSNSTESKSSSEEDGQLKNIEIESRKLTVDAYHNKPIGDQDDNDCQDGY

SEQ ID NO: 2729 - protein, 902 aa, Homo sapiens
MRIISRQIVLLFSGFWGLAMGAFPSSVQIGGLFIRNTDQEYTAFRLAIFLHNTSPNASEAPFNLVPHVDNIETANSFAVTNAFCSQYSRGVFAIFGLYDKRSVHTLTSFCSALHISLITPSFPTEGESQFVLQLRPSLRGALLSLLDHYEWNCFVFLYDTDRGYSILQAIMEKAGQNGWHVSAICVENFNDVSYRQLLEELDRRQEKKFVIDCEIERLQNILEQIVSVGKHVKGYHYIIANLGFKDISLERFIHGGANVTGFQLVDFNTPMVIKLMDRWKKLDQREYPGSETPPKYTSALTYDGVLVMAETFRSLRRQKIDISRRGNAGDCLANPAAPWGQGIDMERTLKQVRIQGLTGNVQFDHYGRRVNYTMDVFELKSTGPRKVGYWNDMDKLVLIQDVPTLGNDTAAIENRTVVVTTIMESPYVMYKKNHEMFEGNDKYEGYCVDLASEIAKHIGIKYKIAIVPDGKYGARDADTKIWNGMVGELVYGKAEIAIAPLTITLVREEVIDFSKPFMSLGISIMIKKPQKSKPGVFSFLDPLAYEIWMCIVFAYIGVSVVLFLVSRFSPYEWHTEEPEDGKEGPSDQPPNEFGIFNSLWFSLGAFMQQGCDISPRSLSGRIVGGVWWFFTLIIISSYTANLAAFLTVERMVSPIESAEDLAKQTEIAYGTLDSGSTKEFFRRSKIAVYEKMWTYMRSAEPSVFTRTTAEGVARVRKSKGKFAFLLESTMNEYIEQRKPCDTMKVGGNLDSKGYGVATPKGSSLRTPVNLAVLKLSEAGVLDKLKNKWWYDKGECGPKDSGSKDKTSALSLSNVAGVFYILVGGLGLAMLVALIEFCYKSRAEAKRMKLTFSEAIRNKARLSITGSVGENGRVLTPDCPKAVHTGTAIRQSSGLAVIASDLP

SEQ ID NO: 2730 - protein, 523 aa, Homo sapiens
MAGQRVLLLVGFLLPGVLLSEAAKILTISTVGGSHYLLMDRVSQILQDHGHNVTMLNHKRGPFMPDFKKEEKSYQVISWLAPEDHQREFKKSFDFFLEETLGGRGKFENLLNVLEYLALQCSHFLNRKDIMDSLKNENFDMVIVETFDYCPFLIAEKLGKPFVAILSTSFGSLEFGLPIPLSYVPVFRSLLTDHMDFWGRVKNFLMFFSFCRRQQHMQSTFDNTIKEHFTEGSRPVLSHLLLKAELWFINSDFAFDFARPLLPNTVYVGGLMEKPIKPVPQDLENFIAKFGDSGFVLVTLGSMVNTCQNPEIFKEMNNAFAHLPQGVIWKCQCSHWPKDVHLAANVKIVDWLPQSDLLAHPSIRLFVTHGGQNSIMEAIQHGVPMVGIPLFGDQPENMVRVEAKKFGVSIQLKKLKAETLALKMKQIMEDKRYKSAAVAASVILRSHPLSPTQRLVGWIDHVLQTGGATHLKPYVFQQPWHEQYLLDVFVFLLGLTLGTLWLCGKLLGMAVWWLRGARKVKET

SEQ ID NO: 2731 - protein, 2804 aa, Homo sapiens
MNGDMPHVPITTLAGIASLTDLLNQLPLPSPLPATTTKSLLFNARIAEEVNCLLACRDDNLVSQLVHSLNQVSTDHIELKDNLGSDDPEGDIPVLLQAVLARSPNVFREKSMQNRYVQSGMMMSQYKLSQNSMHSSPASSNYQQTTISHSPSSRFVPPQTSSGNRFMPQQNSPVPSPYAPQSPAGYMPYSHPSSYTTHPQMQQASVSSPIVAGGLRNIHDNKVSGPLSGNSANHHADNPRHGSSEDYLHMVHRLSSDDGDSSTMRNAASFPLRSPQPVCSPAGSEGTPKGSRPPLILQSQSLPCSSPRDVPPDILLDSPERKQKKQKKMKLGKDEKEQSEKAAMYDIISSPSKDSTKLTLRLSRVRSSDMDQQEDMISGVENSNVSENDIPFNVQYPGQTSKTPITPQDINRPLNAAQCLSQQEQTAFLPANQVPVLQQNTSVAAKQPQTSVVQNQQQISQQGPIYDEVELDALAEIERIERESAIERERFSKEVQDKDKPLKKRKQDSYPQEAGGATGGNRPASQETGSTGNGSRPALMVSIDLHQAGRVDSQASITQDSDSIKKPEEIKQCNDAPVSVLQEDIVGSLKSTPENHPETPKKKSDPELSKSEMKQSESRLAESKPNENRLVETKSSENKLETKVETQTEELKQNESRTTECKQNESTIVEPKQNENRLSDTKPNDNKQNNGRSETTKSRPETPKQKGESRPETPKQKSDGHPETPKQKGDGRPETPKQKGESRPETPKQKNEGRPETPKHRHDNRRDSGKPSTEKKPEVSKHKQDTKSDSPRLKSERAEALKQRPDGRSVSESLRRDHDNKQKSDDRGESERHRGDQSRVRRPETLRSSSRNEHGIKSDSSKTDKLERKHRHESGDSRERPSSGEQKSRPDSPRVKQGDSNKSRSDKLGFKSPTSKDDKRTEGNKSKVDTNKAHPDNKAEFPSYLLGGRSGALKNFVIPKIKRDKDGNVTQETKKMEMKGEPKDKVEKIGLVEDLNKGAKPVVVLQKLSLDDVQKLIKDREDKSRSSLKPIKNKPSKSNKGSIDQSVLKELPPELLAEIESTMPLCERVKMNKRKRSTVNEKPKYAEISSDEDNDSDEAFESSRKRHKKDDDKAWEYEERDRRSSGDHRRSGHSHEGRRSSGGGRYRNRSPSDSDMEDYSPPPSLSEVARKMKKKEKQKKRKAYEPKLTPEEMMDSSTFKRFTASIENILDNLEDMDFTAFGDDDEIPQELLLGKHQLNELGSESAKIKAMGIMDKLSTDKTVKVLNILEKNIQDGSKLSTLLNHNNDTEEEERLWRDLIMERVTKSADACLTTINIMTSPNMPKAVYIEDVIERVIQYTKFHLQNTLYPQYDPVYRLDPHGGGLLSSKAKRAKCSTHKQRVIVMLYNKVCDIVSSLSELLEIQLLTDTTILQVSSMGITPFFVENVSELQLCAIKLVTAVFSRYEKHRQLILEEIFTSLARLPTSKRSLRNFRLNSSDMDGEPMYIQMVTALVLQLIQCVVHLPSSEKDSNAEEDSNKKIDQDVVITNSYETAMRTAQNFLSIFLKKCGSKQGEEDYRPLFENFVQDLLSTVNKPEWPAAELLLSLLGRLLVHQFSNKSTEMALRVASLDYLGTVAARLRKDAVTSKMDQGSIERILKQVSGGEDEIQQLQKALLDYLDENTETDPSLVFSRKFYIAQWFRDTTLETEKAMKSQKDEESSEGTHHAKEIETTGQIMHRAENRKKFLRSIIKTTPSQFSTLKMNSDTVDYDDACLIVRYLASMRPFAQSFDIYLTQILRVLGENAIAVRTKAMKCLSEVVAVDPSILARLDMQRGVHGRLMDNSTSVREAAVELLGRFVLCRPQLAEQYYDMLIERILDTGISVRKRVIKILRDICIEQPTFPKITEMCVKMIRRVNDEEGIKKLVNETFQKLWFTPTPHNDKEAMTRKILNITDVVAACRDTGYDWFEQLLQNLLKSEEDSSYKPVKKACTQLVDNLVEHILKYEESLADSDNKGVNSGRLVACITTLFLFSKIRPQLMVKHAMTMQPYLTTKCSTQNDFMVICNVAKILELVVPLMEHPSETFLATIEEDLMKLIIKYGMTVVQHCVSCLGAVVNKVTQNFKFVWACFNRYYGAISKLKSQHQEDPNNTSLLTNKPALLRSLFTVGALCRHFDFDLEDFKGNSKVNIKDKVLELLMYFTKHSDEEVQTKAIIGLGFAFIQHPSLMFEQEVKNLYNNILSDKNSSVNLKIQVLKNLQTYLQEEDTRMQQADRDWKKVAKQEDLKEMGDVSSGMSSSIMQLYLKQVLEAFFHTQSSVRHFALNVIALTLNQGLIHPVQCVPYLIAMGTDPEPAMRNKADQQLVEIDKKYAGFIHMKAVAGMKMSYQVQQAINTCLKDPVRGFRQDESSSALCSHLYSMIRGNRQHRRAFLISLLNLFDDTAKTDVTMLLYIADNLACFPYQTQEEPLFIMHHIDITLSVSGSNLLQSFKESMVKDKRKERKSSPSKENESSDSEEEVSRPRKSRKRVDSDSDSDSEDDINSVMKCLPENSAPLIEFANVSQGILLLLMLKQHLKNLCGFSDSKIQKYSPSESAKVYDKAINRKTGVHFHPKQTLDFLRSDMANSKITEEVKRSIVKQYLDFKLLMEHLDPDEEEEEGEVSASTNARNKAITSLLGGGSPKNNTAAETEDDESDGEDRGGGTSGSLRRSKRNSDSTELAAQMNESVDVMDVIAICCPKYKDRPQIARVVQKTSSGFSVQWMAGSYSGSWTEAKRRDGRKLVPWVDTIKESDIIYKKIALTSANKLTNKVVQTLRSLYAAKDGTSS

SEQ ID NO: 2732 - protein, 354 aa, Homo sapiens
MMSYLKQPPYGMNGLGLAGPAMDLLHPSVGYPATPRKQRRERTTFTRSQLDVLEALFAKTRYPDIFMREEVALKINLPESRVQVWFKNRRAKCRQQQQSGSGTKSRPAKKKSSPVRESSGSESSGQFTPPAVSSSASSSSSASSSSANPAAAAAAGLGGNPVAAASSLSTPAASSIWSPASISPGSAPASVSVPEPLAAPSNTSCMQRSVAAGAATAAASYPMSYGQGGSYGQGYPTPSSSYFGGVDCSSYLAPMHSHHHPHQLSPMAPSSMAGHHHHHPHAHHPLSQSSGHHHHHHHHHHQGYGGSGLAFNSADCLDYKEPGAAAASSAWKLNFNSPDCLDYKDQASWRFQVL

SEQ ID NO: 2733 - protein, 382 aa, Homo sapiens
MGDWSALGKLLDKVQAYSTAGGKVWLSVLFIFRILLLGTAVESAWGDEQSAFRCNTQQPGCENVCYDKSFPISHVRFWVLQIIFVSVPTLLYLAHVFYVMRKEEKLNKKEEELKVAQTDGVNVDMHLKQIEIKKFKYGIEEHGKVKMRGGLLRTYIISILFKSIFEVAFLLIQWYIYGFSLSAVYTCKRDPCPHQVDCFLSRPTEKTIFIIFMLVVSLVSLALNIIELFYVFFKGVKDRVKGKSDPYHATSGALSPAKDCGSQKYAYFNGCSSPTAPLSPMSPPGYKLVTGDRNNSSCRNYNKQASEQNWANYSAEQNRMGQAGSTISNSHAQPFDFPDDNQNSKKLAAGHELQPLAIVDQRPSSRASSRASSRPRPDDLEI

SEQ ID NO: 2734 - protein, 461 aa, Homo sapiens
MGTIHLFRKPQRSFFGKLLREFRLVAADRRSWKILLFGVINLICTGFLLMWCSSTNSIALTAYTYLTIFDLFSLMTCLISYWVTLRKPSPVYSFGFERLEVLAVFASTVLAQLGALFILKESAERFLEQPEIHTGRLLVGTFVALCFNLFTMLSIRNKPFAYVSEAASTSWLQEHVADLSRSLCGIIPGLSSIFLPRMNPFVLIDLAGAFALCITYMLIEINNYFAVDTASAIAIALMTFGTMYPMSVYSGKVLLQTTPPHVIGQLDKLIREVSTLDGVLEVRNEHFWTLGFGSLAGSVHVRIRRDANEQMVLAHVTNRLYTLVSTLTVQIFKDDWIRPALLSGPVAANVLNFSDHHVIPMPLLKGTDDLNPVTSTPAKPSSPPPEFSFNTPGKNVNPVILLNTQTRPYGFGLNHGHTPYSSMLNQGLGVPGIGATQGLRTGFTNIPSRYGTNNRIGQPRP

SEQ ID NO: 2735 - protein, 1179 aa, Homo sapiens
MAPRPRARPGVAVACCWLLTVVLRCCVSFNVDVKNSMTFSGPVEDMFGYTVQQYENEEGKWVLIGSPLVGQPKNRTGDVYKCPVGRGESLPCVKLDLPVNTSIPNVTEVKENMTFGSTLVTNPNGGFLACGPLYAYRCGHLHYTTGICSDVSPTFQVVNSIAPVQECSTQLDIVIVLDGSNSIYPWDSVTAFLNDLLERMDIGPKQTQVGIVQYGENVTHEFNLNKYSSTEEVLVAAKKIVQRGGRQTMTALGIDTARKEAFTEARGARRGVKKVMVIVTDGESHDNHRLKKVIQDCEDENIQRFSIAILGSYNRGNLSTEKFVEEIKSIASEPTEKHFFNVSDELALVTIVKTLGERIFALEATADQSAASFEMEMSQTGFSAHYSQDWVMLGAVGAYDWNGTVVMQKASQIIIPRNTTFNVESTKKNEPLASYLGYTVNSATASSGDVLYIAGQPRYNHTGQVIIYRMEDGNIKILQTLSGEQIGSYFGSILTTTDIDKDSNTDILLVGAPMYMGTEKEEQGKVYVYALNQTRFEYQMSLEPIKQTCCSSRQHNSCTTENKNEPCGARFGTAIAAVKDLNLDGFNDIVIGAPLEDDHGGAVYIYHGSGKTIRKEYAQRIPSGGDGKTLKFFGQSIHGEMDLNGDGLTDVTIGGLGGAALFWSRDVAVVKVTMNFEPNKVNIQKKNCHMEGKETVCINATVCFDVKLKSKEDTIYEADLQYRVTLDSLRQISRSFFSGTQERKVQRNITVRKSECTKHSFYMLDKHDFQDSVRITLDFNLTDPENGPVLDDSLPNSVHEYIPFAKDCGNKEKCISDLSLHVATTEKDLLIVRSQNDKFNVSLTVKNTKDSAYNTRTIVHYSPNLVFSGIEAIQKDSCESNHNITCKVGYPFLRRGEMVTFKILFQFNTSYLMENVTIYLSATSDSEEPPETLSDNVVNISIPVKYEVGLQFYSSASEYHISIAANETVPEVINSTEDIGNEINIFYLIRKSGSFPMPELKLSISFPNMTSNGYPVLYPTGLSSSENANCRPHIFEDPFSINSGKKMTTSTDHLKRGTILDCNTCKFATITCNLTSSDISQVNVSLILWKPTFIKSYFSSLNLTIRGELRSENASLVLSSSNQKRELAIQISKDGLPGRVPLWVILLSAFAGLLLLMLLILALWKIGFFKRPLKKKMEK

SEQ ID NO: 2736 - protein, 834 aa, Homo sapiens
MEEKRRKYSISSDNSDTTDSHATSTSASRCSKLPSSTKSGWPRQNEKKPSEVFRTDLITAMKIPDSYQLSPDDYYILADPWRQEWEKGVQVPAGAEAIPEPVVRILPPLEGPPAQASPSSTMLGEGSQPDWPGGSRYDLDEIDAYWLELINSELKEMERPELDELTLERVLEELETLCHQNMARAIETQEGLGIEYDEDVVCDVCRSPEGEDGNEMVFCDKCNVCVHQACYGILKVPTGSWLCRTCALGVQPKCLLCPKRGGALKPTRSGTKWVHVSCALWIPEVSIGCPEKMEPITKISHIPASRWALSCSLCKECTGTCIQCSMPSCVTAFHVTCAFDHGLEMRTILADNDEVKFKSFCQEHSDGGPRNEPTSEPTEPSQAGEDLEKVTLRKQRLQQLEEDFYELVEPAEVAERLDLAEALVDFIYQYWKLKRKANANQPLLTPKTDEVDNLAQQEQDVLYRRLKLFTHLRQDLERVRNLCYMVTRRERTKHAICKLQEQIFHLQMKLIEQDLCRERSGRRAKGKKSDSKRKGCEGSKGSTEKKEKVKAGPDSVLGQLAGLSTSFPIDGTFFNSWLAQSVQITAENMAMSEWPLNNGHREDPAPGLLSEELLQDEETLLSFMRDPSLRPGDPARKARGRTRLPAKKKPPPPPPQDGPGSRTTPDKAPKKTWGQDAGSGKGGQGPPTRKPPRRTSSHLPSSPAAGDCPILATPESPPPLAPETPDEAASVAADSDVQVPGPAASPKPLGRLRPPRESKVTRRLPGARPDAGMGPPSAVAERPKVSLHFDTETDGYFSDGEMSDSDVEAEDGGVQRGPREAGAEEVVRMGVLAS

SEQ ID NO: 2737 - protein, 398 aa, Homo sapiens
MSQHRHQRHSRVISSSPVDTTSVGFCPTFKKFKRNDDECRAFVKRVIMSRFFKIIMISTVTSNAFFMALWTSYDIRYRLFRLLEFSEIFFVSICTSELSMKVYVDPINYWKNGYNLLDVIIIIVMFLPYALRQLMGKQFTYLYIADGMQSLRILKLIGYSQGIRTLITAVGQTVYTVASVLLLLFLLMYIFAILGFCLFGSPDNGDHDNWGNLAAAFFTLFSLATVDGWTDLQKQLDNREFALSRAFTIIFILLASFIFLNMFVGVMIMHTEDSIRKFERELMLEQQEMLMGEKQVILQRQQEEISRLMHIQKNADCTSFSELVENFKKTLSHTDPMVLDDFGTSLPFIDIYFSTLDYQDTTVHKLQELYYEIVHVLSLMLEDLPQEKPQSLEKVDEK

SEQ ID NO: 2738 - protein, 1341 aa, Homo sapiens
MMNRTTPDQELAPASEPVWERPWSVEEIRRSSQSWSLAADAGLLQFLQEFSQQTISRTHEIKKQVDGLIRETKATDCRLHNVFNDFLMLSNTQFIENRVYDEEVEEPVLKAEAEKTEQEKTREQKEVDLIPKVQEAVNYGLQVLDSAFEQLDIKAGNSDSEEDDANGRVELILEPKDLYIDRPLPYLIGSKLFMEQEDVGLGELSSEEGSVGSDRGSIVDTEEEKEEEESDEDFAHHSDNEQNRHTTQMSDEEEDDDGCDLFADSEKEEEDIEDIEENTRPKRSRPTSFADELAARIKGDAVGRVDEEPTTLPSGEAKPRKTLKEKKERRTPSDDEEDNLFAPPKLTDEDFSPFGSGGGLFSGGKGLFDDEDEESDLFTEAPQDRQAGASVKEESSSSKPGKKIPAGAVSVFLGDTDVFGAASVPSMKEPQKPEQPTPRKSPYGPPPTGLFDDDDGDDDDDFFSAPHSKPSKTGKVQSTADIFGDEEGDLFKEKAVASPEATVSQTDENKARAEKKVTLSSSKNLKPSSETKTQKGLFSDEEDSEDLFSSQSASKLKGASLLPGKLPTLVSLFDDEDEEDNLFGGTAAKKQTLCLQAQREEKAKASELSKKKASALLFSSDEEDQWNIPASQTHLASDSRSKGEPRDSGTLQSQEAKAVKKTSLFEEDEEDDLFAIAKDSQKKTQRVSLLFEDDVDSGGSLFGSPPTSVPPATKKKETVSEAPPLLFSDEEEKEAQLGVKSVDKKVESAKESLKFGRTDVAESEKEGLLTRSAQETVKHSDLFSSSSPWDKGTKPRTKTVLSLFDEEEDKMEDQNIIQAPQKEVGKGRDPDAHPKSTGVFQDEELLFSHKLQKDNDPDVDLFAGTKKTKLLEPSVGSLFGDDEDDDLFSSAKSQPLVQEKKRVVKKDHSVDSFKNQKHPESIQGSKEKGIWKPETPQDSSGLAPFKTKEPSTRIGKIQANLAINPAALLPTAASQISEVKPVLPELAFPSSEHRRSHGLESVPVLPGSGEAGVSFDLPAQADTLHSANKSRVKMRGKRRPQTRAARRLAAQESSETEDMSVPRGPIAQWADGAISPNGHRPQLRAASGEDSTEEALAAAAAPWEGGPVPGVDRSPFAKSLGHSRGEADLFDSGDIFSTGTGSQSVERTKPKAKIAENPANPPVGGKAKSPMFPALGEASSDDDLFQSAKPKPAKKTNPFPLLEDEDDLFTDQKVKKNETKSNSQQDVILTTQDIFEDDIFATEAIKPSQKTREKEKTLESNLFDDNIDIFADLTVKPKEKSKKKVEAKSIFDDDMDDIFSSGIQAKTTKPKSRSAQAAPEPRFEHKVSNIFDDPLNAFGGQ

SEQ ID NO: 2739 - protein, 586 aa, Homo sapiens
MESNHKSGDGLSGTQKEAALRALVQRTGYSLVQENGQRKYGGPPPGWDAAPPERGCEIFIGKLPRDLFEDELIPLCEKIGKIYEMRMMMDFNGNNRGYAFVTFSNKVEAKNAIKQLNNYEIRNGRLLGVCASVDNCRLFVGGIPKTKKREEILSEMKKVTEGVVDVIVYPSAADKTKNRGFAFVEYESHRAAAMARRKLLPGRIQLWGHGIAVDWAEPEVEVDEDTMSSVKILYVRNLMLSTSEEMIEKEFNNIKPGAVERVKKIRDYAFVHFSNREDAVEAMKALNGKVLDGSPIEVTLAKPVDKDSYVRYTRGTGGRGTMLQGEYTYSLGQVYDPTTTYLGAPVFYAPQTYAAIPSLHFPATKGHLSNRAIIRAPSVRGAAGVRGLGGRGYLAYTGLGRGYQVKGDKREDKLYDILPGMELTPMNPVTLKPQGIKLAPQILEEICQKNNWGQPVYQLHSAIGQDQRQLFLYKITIPALASQNPAIHPFTPPKLSAFVDEAKTYAAEYTLQTLGIPTDGGDGTMATAAAAATAFPGYAVPNATAPVSAAQLKQAVTLGQDLAAYTTYEVYPTFAVTARGDGYGTF

SEQ ID NO: 2740 - protein, 179 aa, Homo sapiens
MMMSDNAKGRAAHSWKKRGSISSLSNHEFWRKEIHGRIKDSMSTVSYMEEPSQRDDISRLTVQMENTYQLGPPKHFPVVTVNHILKDVVTSYLQVEEYEPELCRQMTKTISEVIKAQVKDLMIPRYKLIVIVHIGQLNRQSILIGSRCLWDPKSDTFSSYVFRNSSLFALANVYAVYLE

SEQ ID NO: 2741 - protein, 472 aa, Homo sapiens
MAGASRLLFLWLGCFCVSLAQGERPKPPFPELRKAVPGDRTAGGGPDSELQPQDKVSEHMLRLYDRYSTVQAARTPGSLEGGSQPWRPRLLREGNTVRSFRAAAAETLERKGLYIFNLTSLTKSENILSATLYFCIGELGNISLSCPVSGGCSHHAQRKHIQIDLSAWTLKFSRNQSQLLGHLSVDMAKSHRDIMSWLSKDITQLLRKAKENEEFLIGFNITSKGRQLPKRRLPFPEPYILVYANDAAISEPESVVSSLQGHRNFPTGTVPKWDSHIRAALSIERRKKRSTGVLLPLQNNELPGAEYQYKKDEVWEERKPYKTLQAQAPEKSKNKKKQRKGPHRKSQTLQFDEQTLKKARRKQWIEPRNCARRYLKVDFADIGWSEWIISPKSFDAYYCSGACQFPMPKSLKPSNHATIQSIVRAVGVVPGIPEPCCVPEKMSSLSILFFDENKNVVLKVYPNMTVESCACR

SEQ ID NO: 2742 - protein, 270 aa, Homo sapiens
MQYPHPGPAAGAVGVPLYAPTPLLQPAHPTPFYIEDILGRGPAAPTPAPTLPSPNSSFTSLVSPYRTPVYEPTPIHPAFSHHSAAALAAAYGPGGFGGPLYPFPRTVNDYTHALLRHDPLGKPLLWSPFLQRPLHKRKGGQVRFSNDQTIELEKKFETQKYLSPPERKRLAKMLQLSERQVKTWFQNRRAKWRRLKQENPQSNKKEELESLDSSCDQRQDLPSEQNKGASLDSSQCSPSPASQEDLESEISEDSDQEVDIEGDKSYFNAG

SEQ ID NO: 2743 - protein, 1194 aa, Homo sapiens
MVGLLLFFFPAIFLEVSLLPRSPGRKVLLAGASSQRSVARMDGDVIIGALFSVHHQPPAEKVPERKCGEIREQYGIQRVEAMFHTLDKINADPVLLPNITLGSEIRDSCWHSSVALEQSIEFIRDSLISIRDEKDGINRCLPDGQSLPPGRTKKPIAGVIGPGSSSVAIQVQNLLQLFDIPQIAYSATSIDLSDKTLYKYFLRVVPSDTLQARAMLDIVKRYNWTYVSAVHTEGNYGESGMDAFKELAAQEGLCIAHSDKIYSNAGEKSFDRLLRKLRERLPKARVVVCFCEGMTVRGLLSAMRRLGVVGEFSLIGSDGWADRDEVIEGYEVEANGGITIKLQSPEVRSFDDYFLKLRLDTNTRNPWFPEFWQHRFQCRLPGHLLENPNFKRICTGNESLEENYVQDSKMGFVINAIYAMAHGLQNMHHALCPGHVGLCDAMKPIDGSKLLDFLIKSSFIGVSGEEVWFDEKGDAPGRYDIMNLQYTEANRYDYVHVGTWHEGVLNIDDYKIQMNKSGVVRSVCSEPCLKGQIKVIRKGEVSCCWICTACKENEYVQDEFTCKACDLGWWPNADLTGCEPIPVRYLEWSNIESIIAIAFSCLGILVTLFVTLIFVLYRDTPVVKSSSRELCYIILAGIFLGYVCPFTLIAKPTTTSCYLQRLLVGLSSAMCYSALVTKTNRIARILAGSKKKICTRKPRFMSAWAQVIIASILISVQLTLVVTLIIMEPPMPILSYPSIKEVYLICNTSNLGVVAPLGYNGLLIMSCTYYAFKTRNVPANFNEAKYIAFTMYTTCIIWLAFVPIYFGSNYKIITTCFAVSLSVTVALGCMFTPKMYIIIAKPERNVRSAFTTSDVVRMHVGDGKLPCRSNTFLNIFRRKKAGAGNANSNGKSVSWSEPGGGQVPKGQHMWHRLSVHVKTNETACNQTAVIKPLTKSYQGSGKSLTFSDTSTKTLYNVEEEEDAQPIRFSPPGSPSMVVHRRVPSAATTPPLPSHLTAEETPLFLAEPALPKGLPPPLQQQQQPPPQQKSLMDQLQGVVSNFSTAIPDFHAVLAGPGGPGNGLRSLYPPPPPPQHLQMLPLQLSTFGEELVSPPADDDDDSERFKLLQEYVYEHEREGNTEEDELEEEEEDLQAASKLTPDDSPALTPPSPFRDSVASGSSVPSSPVSESVLCTPPNVSYASVILRDYKQSSSTL

SEQ ID NO: 2744 - protein, 1221 aa, Homo sapiens
MECALLLACAFPAAGSGPPRGLAGLGRVAKALQLCCLCCASVAAALASDSSSGASGLNDDYVFVTPVEVDSAGSYISHDILHNGRKKRSAQNARSSLHYRFSAFGQELHLELKPSAILSSHFIVQVLGKDGASETQKPEVQQCFYQGFIRNDSSSSVAVSTCAGLSGLIRTRKNEFLISPLPQLLAQEHNYSSPAGHHPHVLYKRTAEEKIQRYRGYPGSGRNYPGYSPSHIPHASQSRETEYHHRRLQKQHFCGRRKKYAPKPPTEDTYLRFDEYGSSGRPRRSAGKSQKGLNVETLVVADKKMVEKHGKGNVTTYILTVMNMVSGLFKDGTIGSDINVVVVSLILLEQEPGGLLINHHADQSLNSFCQWQSALIGKNGKRHDHAILLTGFDICSWKNEPCDTLGFAPISGMCSKYRSCTINEDTGLGLAFTIAHESGHNFGMIHDGEGNPCRKAEGNIMSPTLTGNNGVFSWSSCSRQYLKKFLSTPQAGCLVDEPKQAGQYKYPDKLPGQIYDADTQCKWQFGAKAKLCSLGFVKDICKSLWCHRVGHRCETKFMPAAEGTVCGLSMWCRQGQCVKFGELGPRPIHGQWSAWSKWSECSRTCGGGVKFQERHCNNPKPQYGGLFCPGSSRIYQLCNINPCNENSLDFRAQQCAEYNSKPFRGWFYQWKPYTKVEEEDRCKLYCKAENFEFFFAMSGKVKDGTPCSPNKNDVCIDGVCELVGCDHELGSKAVSDACGVCKGDNSTCKFYKGLYLNQHKANEYYPVVLIPAGARSIEIQELQVSSSYLAVRSLSQKYYLTGGWSIDWPGEFPFAGTTFEYQRSFNRPERLYAPGPTNETLVFEILMQGKNPGIAWKYALPKVMNGTPPATKRPAYTWSIVQSECSVSCGGGYINVKAICLRDQNTQVNSSFCSAKTKPVTEPKICNAFSCPAYWMPGEWSTCSKACAGGQQSRKIQCVQKKPFQKEEAVLHSLCPVSTPTQVQACNSHACPPQWSLGPWSQCSKTCGRGVRKRELLCKGSAAETLPESQCTSLPRPELQEGCVLGRCPKNSRLQWVASSWSECSATCGLGVRKREMKCSEKGFQGKLITFPERRCRNIKKPNLDLEETCNRRACPAHPVYNMVAGWYSLPWQQCTVTCGGGVQTRSVHCVQQGRPSSSCLLHQKPPVLRACNTNFCPAPEKREDPSCVDFFNWCHLVPQHGVCNHKFYGKQCCKSCTRKI

SEQ ID NO: 2745 - protein, 483 aa, Homo sapiens
MKRHEMVAKHLVMFYYFAQHLWPEQNIRDSFQKVTLRRYRKCGYENLQLRKGCKSVVECKQHKGDYSGLNQCLKTTLSKIFQCNKYVEVFHKISNSNRHKMRHTENKHFKCKECRKTFCMLSHLTQHKRIQTRVNFYKCEAYGRAFNWSSTLNKHKRIHTGEKPYKCKECGKAFNQTSHLIRHKRIHTEEKPYKCEECGKAFNQSSTLTTHNIIHTGEIPYKCEKCVRAFNQASKLTEHKLIHTGEKRYECEECGKAFNRSSKLTEHKYIHTGEKLYKCEECGKAFNQSSTLTTHKRIHSGEKPYKCEECGKAFKQFSNLTDHKKIHTGEKPYKCEECGKAFNQLSNLTRHKVIHTGEKPYKCGECGKAFNQSSALNTHKIIHTGENPHKCRESGKVFHLSSKLSTCKKIHTGEKLYKCEECGKAFNRSSTLIGHKRIHTGEKPYKCEECGKAFNQSSTLTTHKIIHTEEKQYKCDECGKAST

SEQ ID NO: 2746 - protein, 227 aa, Homo sapiens
MRHEAPMQMASAQDARYGQKDSSDQNFDYMFKLLIIGNSSVGKTSFLFRYADDSFTSAFVSTVGIDFKVKTVFKNEKRIKLQIWDTAGQERYRTITTAYYRGAMGFILMYDITNEESFNAVQDWSTQIKTYSWDNAQVILVGNKCDMEDERVISTERGQHLGEQLGFEFFETSAKDNINVKQTFERLVDIICDKMSESLETDPAITAAKQNTRLKETPPPPQPNCAC

SEQ ID NO: 2747 - protein, 758 aa, Homo sapiens
MGGCTVKPQLLLLALVLHPWNPCLGADSEKPSSIPTDKLLVITVATKESDGFHRFMQSAKYFNYTVKVLGQGEEWRGGDGINSIGGGQKVRLMKEVMEHYADQDDLVVMFTECFDVIFAGGPEEVLKKFQKANHKVVFAADGILWPDKRLADKYPVVHIGKRYLNSGGFIGYAPYVNRIVQQWNLQDNDDDQLFYTKVYIDPLKREAINITLDHKCKIFQTLNGAVDEVVLKFENGKARAKNTFYETLPVAINGNGPTKILLNYFGNYVPNSWTQDNGCTLCEFDTVDLSAVDVHPNVSIGVFIEQPTPFLPRFLDILLTLDYPKEALKLFIHNKEVYHEKDIKVFFDKAKHEIKTIKIVGPEENLSQAEARNMGMDFCRQDEKCDYYFSVDADVVLTNPRTLKILIEQNRKIIAPLVTRHGKLWSNFWGALSPDGYYARSEDYVDIVQGNRVGVWNVPYMANVYLIKGKTLRSEMNERNYFVRDKLDPDMALCRNAREMTLQREKDSPTPETFQMLSPPKGVFMYISNRHEFGRLLSTANYNTSHYNNDLWQIFENPVDWKEKYINRDYSKIFTENIVEQPCPDVFWFPIFSEKACDELVEEMEHYGKWSGGKHHDSRISGGYENVPTDDIHMKQVDLENVWLHFIREFIAPVTLKVFAGYYTKGFALLNFVVKYSPERQRSLRPHHDASTFTINIALNNVGEDFQGGGCKFLRYNCSIESPRKGWSFMHPGRLTHLHEGLPVKNGTRYIAVSFIDP

SEQ ID NO: 2748 - protein, 414 aa, Homo sapiens
MGGNHSHKPPVFDENEEVNFDHFQILRAIGKGSFGKVCIVQKRDTKKMYAMKYMNKQKCIERDEVRNVFRELQIMQGLEHPFLVNLWYSFQDEEDMFMVVDLLLGGDLRYHLQQNVHFTEGTVKLYICELALALEYLQRYHIIHRDIKPDNILLDEHGHVHITDFNIATVVKGAERASSMAGTKPYMAPEVFQVYMDRGPGYSYPVDWWSLGITAYELLRGWRPYEIHSVTPIDEILNMFKVERVHYSSTWCKGMVALLRKLLTKDPESRVSSLHDIQSVPYLADMNWDAVFKKALMPGFVPNKGRLNCDPTFELEEMILESKPLHKKKKRLAKNRSRDGTKDSCPLNGHLQHCLETVREEFIIFNREKLRRQQGQGSQLLDTDSRGGGQAQSKLQDGCNNNLLTHTCTRGCSS

SEQ ID NO: 2749 - protein, 626 aa, Homo sapiens
MSKKGRSKGEKPEMETDAVQMANEELRAKLTSIQIEFQQEKSKVGKLRERLQEAKLEREQEQRRHTAYISELKAKLHEEKTKELQALREGLIRQHEQEAARTAKIKEGELQRLQATLNVLRDGAADKVKTALLTEAREEARRAFDGERLRLQQEILELKAARKQAEEALSNCMQADKTKAADLRAAYQAHQDEVHRIKRECERDIRRLMDEIKGKDRVILALEKELGVQAGQTQKLLLQKEALDEQLVQVKEAERHHSSPKRELPPGIGDMVELMGVQDQHMDERDVRRFQLKIAELNSVIRKLEDRNTLLADERNELLKRSRETEVQLKPLVEKNKRMNKKNEDLLQSIQRMEEKIKNLTRENVEMKEKLSAQASLKRHTSLNDLSLTRDEQEIEFLRLQVLEQQHVIDDLSLERERLLRSKRHRGKSLKPPKKHVVETFFGFDEESVDSETLSETSYNTDRTDRTPATPEEDLDDATAREEADLRFCQLTREYQALQRAYALLQEQVGGTLDAEREARTREQLQADLLRCQAKIEDLEKLLVEKGQDSKWVEEKQLLIRTNQDLLEKIYRLEMEENQLKNEMQDAKDQNELLEFRVLELEVRDSICCKLSNGADILFEPKLKFM

SEQ ID NO: 2750 - protein, 447 aa, Homo sapiens
MLLDAGPQYPAIGVTTFGASRHHSAGDVAERDVGLGINPFADGMGAFKLNPSSHELASAGQTAFTSQAPGYAAAAALGHHHHPGHVGSYSSAAFNSTRDFLFRNRGFGDAAAAASAQHSLFAASAGGFGGPHGHTDAAGHLLFPGLHEQAAGHASPNVVNGQMRLGFSGDMYPRPEQYGQVTSPRSEHYAAPQLHGYGPMNVNMAAHHGAGAFFRYMRQPIKQELICKWIEPEQLANPKKSCNKTFSTMHELVTHVTVEHVGGPEQSNHICFWEECPREGKPFKAKYKLVNHIRVHTGEKPFPCPFPGCGKVFARSENLKIHKRTHTGEKPFKCEFEGCDRRFANSSDRKKHMHVHTSDKPYLCKMCDKSYTHPSSLRKHMKVHESSSQGSQPSPAASSGYESSTPPTIVSPSTDNPTTSSLSPSSSAVHHTAGHSALSSNFNEWYV

SEQ ID NO: 2751 - protein, 249 aa, Homo sapiens
MGELMAFLLPLIIVLMVKHSDSRTHSLRYFRLGVSDPIHGVPEFISVGYVDSHPITTYDSVTRQKEPRAPWMAENLAPDHWERYTQLLRGWQQMFKVELKRLQRHYNHSGSHTYQRMIGCELLEDGSTTGFLQYAYDGQDFLIFNKDTLSWLAVDNVAHTIKQAWEANQHELLYQKNWLEEECIAWLKRFLEYGKDTLQRTESETIPLVMKAVSGSIVLVIVLAGVGVLVWRRRPREQNGAIYLPTPDR

SEQ ID NO: 2752 - protein, 887 aa, Homo sapiens
MAGRVPSLLVLLVFPSSCLAFRSPLSVFKRFKETTRPFSNECLGTTRPVVPIDSSDFALDIRMPGVTPKQSDTYFCMSMRIPVDEEAFVIDFKPRASMDTVHHMLLFGCNMPSSTGSYWFCDEGTCTDKANILYAWARNAPPTRLPKGVGFRVGGETGSKYFVLQVHYGDISAFRDNNKDCSGVSLHLTRLPQPLIAGMYLMMSVDTVIPAGEKVVNSDISCHYKNYPMHVFAYRVHTHHLGKVVSGYRVRNGQWTLIGRQSPQLPQAFYPVGHPVDVSFGDLLAARCVFTGEGRTEATHIGGTSSDEMCNLYIMYYMEAKHAVSFMTCTQNVAPDMFRTIPPEANIPIPVKSDMVMMHEHHKETEYKDKIPLLQQPKREEEEVLDQGDFYSLLSKLLGEREDVVHVHKYNPTEKAESESDLVAEIANVVQKKDLGRSDAREGAEHERGNAILVRDRIHKFHRLVSTLRPPESRVFSLQQPPPGEGTWEPEHTGDFHMEEALDWPGVYLLPGQVSGVALDPKNNLVIFHRGDHVWDGNSFDSKFVYQQIGLGPIEEDTILVIDPNNAAVLQSSGKNLFYLPHGLSIDKDGNYWVTDVALHQVFKLDPNNKEGPVLILGRSMQPGSDQNHFCQPTDVAVDPGTGAIYVSDGYCNSRIVQFSPSGKFITQWGEESSGSSPLPGQFTVPHSLALVPLLGQLCVADRENGRIQCFKTDTKEFVREIKHSSFGRNVFAISYIPGLLFAVNGKPHFGDQEPVQGFVMNFSNGEIIDIFKPVRKHFDMPHDIVASEDGTVYIGDAHTNTVWKFTLTEKLEHRSVKKAGIEVQEIKGKGSGGLNLGNFFASRKGYSRKGFDRLSTEGSDQEKEDDGSESEEEYSAPLPALAPSSS

SEQ ID NO: 2753 - protein, 485 aa, Homo sapiens
MEFLGTTQTASYCGPKKCCGLTSLPAVQAPVIQECYQPYYLPGYRYLNSWRPSLFYKIANVQTCPDESTSTLRPPTILPTLRSALFSRYSPHDWDQSNQLQVRGAEASRLWASRLTDDSMRLLQDKDQLTHQMQEGTCRNLGQRLSDIGFWKSELSYELDRLLTENQNLETVKRRLECAANEVNCPLQVALECLYHREKRIGIDLVHDNVEKNLIREVDLLKCCQEQMRKLAQRIDIQMRDNRDAQHVLERDLEDKSSAQCIDEKCFNLRNTSDCISFFHGMEKIDGTISVPETWAKFSNDNIKHSQNMRANSIQLREEAEHLFETLSDQMWRQFTDTNLAFNARISEVTDVKNKLQTQLAKTLQEIFQAENTIMLLERSIMAKEGPLKVAQTRLECRTRRPNMELCRDIPQLKLVNEVFTIDDTLQTLKLRLRETQDTLQLLVMTKCRLEHELAIKANTLCIDKEKCMGMRKTFPCTPRLVGHT

SEQ ID NO: 2754 - protein, 167 aa, Homo sapiens
MSLALRSELVVDKTKRKKRRELSEEQKQEIKDAFELFDTDKDEAIDYHELKVAMRALGFDVKKADVLKILKDYDREATGKITFEDFNEVVTDWILERDPHEEILKAFKLFDDDDSGKISLRNLRRVARELGENMSDEELRAMIEEFDKDGDGEINQEEFIAIMTGDI

SEQ ID NO: 2755 - protein, 1052 aa, Homo sapiens
MSSAAEPPPPPPPESAPSKPAASIASGGSNSSNKGGPEGVAAQAVASAASAGPADAEMEEIFDDASPGKQKEIQEPDPTYEEKMQTDRANRFEYLLKQTELFAHFIQPAAQKTPTSPLKMKPGRPRIKKDEKQNLLSVGDYRHRRTEQEEDEELLTESSKATNVCTRFEDSPSYVKWGKLRDYQVRGLNWLISLYENGINGILADEMGLGKTLQTISLLGYMKHYRNIPGPHMVLVPKSTLHNWMSEFKRWVPTLRSVCLIGDKEQRAAFVRDVLLPGEWDVCVTSYEMLIKEKSVFKKFNWRYLVIDEAHRIKNEKSKLSEIVREFKTTNRLLLTGTPLQNNLHELWSLLNFLLPDVFNSADDFDSWFDTNNCLGDQKLVERLHMVLRPFLLRRIKADVEKSLPPKKEVKIYVGLSKMQREWYTRILMKDIDILNSAGKMDKMRLLNILMQLRKCCNHPYLFDGAEPGPPYTTDMHLVTNSGKMVVLDKLLPKLKEQGSRVLIFSQMTRVLDILEDYCMWRNYEYCRLDGQTPHDERQDSINAYNEPNSTKFVFMLSTRAGGLGINLATADVVILYDSDWNPQVDLQAMDRAHRIGQTKTVRVFRFITDNTVEERIVERAEMKLRLDSIVIQQGRLVDQNLNKIGKDEMLQMIRHGATHVFASKESEITDEDIDGILERGAKKTAEMNEKLSKMGESSLRNFTMDTESSVYNFEGEDYREKQKIAFTEWIEPPKRERKANYAVDAYFREALRVSEPKAPKAPRPPKQPNVQDFQFFPPRLFELLEKEILFYRKTIGYKVPRNPELPNAAQAQKEEQLKIDEAESLNDEELEEKEKLLTQGFTNWNKRDFNQFIKANEKWGRDDIENIAREVEGKTPEEVIEYSAVFWERCNELQDIEKIMAQIERGEARIQRRISIKKALDTKIGRYKAPFHQLRISYGTNKGKNYTEEEDRFLICMLHKLGFDKENVYDELRQCIRNSPQFRFDWFLKSRTAMELQRRCNTLITLIERENMELEEKEKAEKKKRGPKPSTQKRKMDGAPDGRGRKKKLKL

SEQ ID NO: 2756 - protein, 812 aa, Homo sapiens [sequence omitted]

SEQ ID NO: 2757 - protein, 425 aa, Homo sapiens
MVSKALLRLVSAVNRRRMKLLLGIALLAYVASVWGNFVNMSFLLNRSIQENGELKIESKIEEMVEPLREKIRDLEKSFTQKYPPVKFLSEKDRKRILITGGAGFVGSHLTDKLMMDGHEVTVVDNFFTGRKRNVEHWIGHENFELINHDVVEPLYIEVDQIYHLASPASPPNYMYNPIKTLKTNTIGTLNMLGLAKRVGARLLLASTSEVYGDPEVHPQSEDYWGHVNPIGPRACYDEGKRVAETMCYAYMKQEGVEVRVARIFNTFGPRMHMNDGRVVSNFILQALQGEPLTVYGSGSQTRAFQYVSDLVNGLVALMNSNVSSPVNLGNPEEHTILEFAQLIKNLVGSGSEIQFLSEAQDDPQKRKPDIKKAKLMLGWEPVVPLEEGLNKAIHYFRKELEYQANNQYIPKPKPARIKKGRTRHS

SEQ ID NO: 2758 - protein, 3224 aa, Homo sapiens
MRRSKADVERYIASVQGSTPSPRQKSMKGFYFAKLYYEAKEYDLAKKYICTYINVQERDPKAHRFLGLLYELEENTDKAVECYRRSVELNPTQKDLVLKIAELLCKNDVTDGRAKYWLERAAKLFPGSPAIYKLKEQLLDCEGEDGWNKLFDLIQSELYVRPDDVHVNIRLVEVYRSTKRLKDAVAHCHEAERNIALRSSLEWNSCVVQTLKEYLESLQCLESDKSDWRATNTDLLLAYANLMLLTLSTRDVQESRELLQSFDSALQSVKSLGGNDELSATFLEMKGHFYMHAGSLLLKMGQHSSNVQWRALSELAALCYLIAFQVPRPKIKLIKGEAGQNLLEMMACDRLSQSGHMLLNLSRGKQDFLKEIVETFANKSGQSALYDALFSSQSPKDTSFLGSDDIGNIDVREPELEDLTRYDVGAIRAHNGSLQHLTWLGLQWNSLPALPGIRKWLKQLFHHLPHETSRLETNAPESICILDLEVFLLGVVYTSHLQLKEKCNSHHSSYQPLCLPLPVCKQLCTERQKSWWDAVCTLIHRKAVPGNVAKLRLLVQHEINTLRAQEKHGLQPALLVHWAECLQKTGSGLNSFYDQREYIGRSVHYWKKVLPLLKIIKKKNSIPEPIDPLFKHFHSVDIQASEIVEYEEDAHITFAILDAVNGNIEDAVTAFESIKSVVSYWNLALIFHRKAEDIENDALSPEEQEECKNYLRKTRDYLIKIIDDSDSNLSVVKKLPVPLESVKEMLNSVMQELEDYSEGGPLYKNGSLRNADSEIKHSTPSPTRYSLSPSKSYKYSPKTPPRWAEDQNSLLKMICQQVEAIKKEMQELKLNSSNSASPHRWPTENYGPDSVPDGYQGSQTFHGAPLTVATTGPSVYYSQSPAYNSQYLLRPAANVTPTKGPVYGMNRLPPQQHIYAYPQQMHTPPVQSSSACMFSQEMYGPPALRFESPATGILSPRGDDYFNYNVQQTSTNPPLPEPGYFTKPPIAAHASRSAESKTIEFGKTNFVQPMPGEGLRPSLPTQAHTTQPTPFKFNSNFKSNDGDFTFSSPQVVTQPPPAAYSNSESLLGLLTSDKPLQGDGYSGAKPIPGGQTIGPRNTFNFGSKNVSGISFTENMGSSQQKNSGFRRSDDMFTFHGPGKSVFGTPTLETANKNHETDGGSAHGDDDDDGPHFEPVVPLPDKIEVKTGEEDEEEFFCNRAKLFRFDVESKEWKERGIGNVKILRHKTSGKIRLLMRREQVLKICANHYISPDMKLTPNAGSDRSFVWHALDYADELPKPEQLAIRFKTPEEAALFKCKFEEAQSILKAPGTNVAMASNQAVRIVKEPTSHDNKDICKSDAGNLNFEFQVAKKEGSWWHCNSCSLKNASTAKKCVSCQNLNPSNKELVGPPLAETVFTPKTSPENVQDRFALVTPKKEGHWDCSICLVRNEPTVSRCIACQNTKSANKSGSSFVHQASFKFGQGDLPKPINSDFRSVFSTKEGQWDCSACLVQNEGSSTKCAACQNPRKQSLPATSIPTPASFKFGTSETSKTLKSGFEDMFAKKEGQWDCSSCLVRNEANATRCVACQNPDKPSPSTSVPAPASFKFGTSETSKAPKSGFEGMFTKKEGQWDCSVCLVRNEASATKCIACQNPGKQNQTTSAVSTPASSETSKAPKSGFEGMFTKKEGQWDCSVCLVRNEASATKCIACQNPGKQNQTTSAVSTPASSETSKAPKSGFEGMFTKKEGQWDCSVCLVRNEASATKCIACQCPSKQNQTTAISTPASSEISKAPKSGFEGMFIRKGQWDCSVCCVQNESSSLKCVACDASKPTHKPIAEAPSAFTLGSEMKLHDSSGSQVGTGFKSNFSEKASKFGNTEQGFKFGHVDQENSPSFMFQGSSNTEFKSTKEGFSIPVSADGFKFGISEPGNQEKKSEKPLENGTGFQAQDISGQKNGRGVIFGQTSSTFTFADLAKSTSGEGFQFGKKDPNFKGFSGAGEKLFSSQYGKMANKANTSGDFEKDDDAYKTEDSDDIHFEPVVQMPEKVELVTGEEDEKVLYSQRVKLFRFDAEVSQWKERGLGNLKILKNEVNGKLRMLMRREQVLKVCANHWITTTMNLKPLSGSDRAWMWLASDFSDGDAKLEQLAAKFKTPELAEEFKQKFEECQRLLLDIPLQTPHKLVDTGRAAKLIQRAEEMKSGLKDFKTFLTNDQTKVTEEENKGSGTGAAGASDTTIKPNPENTGPTLEWDNYDLREDALDDSVSSSSVHASPLASSPVRKNLFRFGESTTGFNFSFKSALSPSKSPAKLNQSGTSVGTDEESDVTQEEERDGQYFEPVVPLPDLVEVSSGEENEQVVFSHRAKLYRYDKDVGQWKERGIGDIKILQNYDNKQVRIVMRRDQVLKLCANHRITPDMTLQNMKGTERVWLWTACDFADGERKVEHLAVRFKLQDVADSFKKIFDEAKTAQEKDSLITPHVSRSSTPRESPCGKIAVAVLEETTRERTDVIQGDDVADATSEVEVSSTSETTPKAVVSPPKFVFGSESVKSIFSSEKSKPFAFGNSSATGSLFGFSFNAPLKSNNSETSSVAQSGSESKVEPKKCELSKNSDIEQSSDSKVKNLFASFPTEESSINYTFKTPEKAKEKKKPEDSPSDDDVLIVYELTPTAEQKALATKLKLPPTFFCYKNRPDYVSEEEEDDEDFETAVKKLNGKLYLDGSEKCRPLEENTADNEKECIIVWEKKPTVEEKAKADTLKLPPTFFCGVCSDTDEDNGNGEDFQSELQKVQEAQKSQTEEITSTTDSVYTGGTEVMVPSFCKSEEPDSITKSISSPSVSSETMDKPVDLSTRKEIDTDSTSQGESKIVSFGFGSSTGLSFADLASSNSGDFAFGSKDKNFQWANTGAAVFGTQSVGTQSAGKVGEDEDGSDEEVVHNEDIHFEPIVSLPEVEVKSGEEDEEILFKERAKLYRWDRDVSQWKERGVGDIKILWHTMKNYYRILMRRDQVFKVCANHVITKTMELKPLNVSNNALVWTASDYADGEAKVEQLAVRFKTKEVADCFKKTFEECQQNLMKLQKGHVSLAAELSKETNPVVFFDVCADGEPLGRITMELFSNIVPRTAENFRALCTGEKGFGFKNSIFHRVIPDFVCQGGDITKHDGTGGQSIYGDKFEDENFDVKHTGPGLLSMANQGQNTNNSQFVITLKKAEHLDFKHVVFGFVKDGMDTVKKIESFGSPKGSVCRRITITECGQI

SEQ ID NO: 2759 - protein, 555 aa, Homo sapiens
MVAACRSVAGLLPRRRRCFPARAPLLRVALCLLCWTPAAVRAVPELGLWLETVNDKSGPLIFRKTMFNSTDIKLSVKSFHCSGPVKFTIVWHLKYHTCHNEHSNLEELFQKHKLSVDEDFCHYLKNDNCWTTKNENLDCNSDSQVFPSLNNKELINIRNVSNQERSMDVVARTQKDGFHIFIVSIKTENTDASWNLNVSLSMIGPHGYISASDWPLMIFYMVMCIVYILYGILWLTWSACYWKDILRIQFWIAAVIFLGMLEKAVFYSEYQNISNTGLSTQGLLIFAELISAIKRTLARLLVIIVSLGYGIVKPRLGTVMHRVIGLGLLYLIFAAVEGVMRVIGGSNHLAVVLDDIILAVIDSIFVWFIFISLAQTMKTLRLRKNTVKFSLYRHFKNTLIFAVLASIVFMGWTTKTFRIAKCQSDWMERWVDDAFWSFLFSLILIVIMFLWRPSANNQRYAFMPLIDDSDDEIEEFMVTSENLTEGIKLRASKSVSNGTAKPATSENFDEDLKWVEENIPSSFTDVALPVLVDSDEEIMTRSEMAEKMFSSEKIM

SEQ ID NO: 2760 - protein, 314 aa, Homo sapiens
MTNQTQMMEFLLVRFTENWVLLRLHALLFSLIYLTAVLMNLVIILLMILDHRLHMAMYFFLRHLSFLDLCLISATVPKSILNSVASTDSISFLGCVLQLFLVVLLAGSEIGILTAMSYDRYAAICCPLHCEAVMSRGLCVQLMALSWLNRGALGLLYTAGTFSLNFYGSDELHQFFCDVPALLKLTCSKEHAIISVSVAIGVCYAFSCLVCIVVSYVYIFSAVLRISQRQRQSKAFSNCVPHLIVVTVFLVTGAVAYLKPGSDAPSILDLLVSVFYSVAPPTLNPVIYCLKNKDIKSALSKVLWNVRSSGVMKR

SEQ ID NO: 2761 - protein, 657 aa, Homo sapiens
MRRAVCFPALCLLLNLHAAGCFSGNNDHFLAINQKKSGKPVFIYKHSQDIEKSLDIAPQKIYRHSYHSSSEAQVSKRHQIVNSAFPRPAYDPSLNLLAMDGQDLEVENLPIPAANVIVVTLQMDVNKLNITLLRIFRQGVAAALGLLPQQVHINRLIGKKNSIELFVSPINRKTGISDALPSEEVLRSLNINVLHQSLSQFGITEVSPEKNVLQGQHEADKIWSKEGFYAVVIFLSIFVIIVTCLMILYRLKERFQLSLRQDKEKNQEIHLSPITLQPALSEAKTVHSMVQPEQAPKVLNVVVDPQGRGAPEIKATTATSVCPSPFKMKPIGLQERRGSNVSLTLDMSSLGNIEPFVSIPTPREKVAMEYLQSASRILTRSQLRDVVASSHLLQSEFMEIPMNFVDPKEIDIPRHGTKNRYKTILPNPLSRVCLRPKNVTDSLSTYINANYIRGYSGKEKAFIATQGPMINTVDDFWQMVWQEDSPVIVMITKLKEKNEKCVLYWPEKRGIYGKVEVLVISVNECDNYTIRNLVLKQGSHTQHVKHYWYTSWPDHKTPDSAQPLLQLMLDVEEDRLASQGRGPVVVHCSAGIGRTGCFIATSIGCQQLKEEGVVDALSIVCQLRMDRGGMVQTSEQYEFVHHALCLYESRLSAETVQ

SEQ ID NO: 2762 - protein, 591 aa, Homo sapiens
MCAASASPDNLVFHMKNEMRNIKYKPVDYQQLRALTEAKKLASASAKLKIRKAMLTSKLSKEQTLIKQHKQVWWQEYQRLNEVRCKMESEIKSLLNEENIGNECLCDLTNFEQELSEQQCTYLKNVINPIQQLRADLKYRQHHTLQHSHPHIEFNSMKVLEEVDFVKKQLKTVFERLRLEQQRIENDLSDWSIKILDHSLEEKTNPLSELPIELESLECPYPDLKSSILSEFYKFTQKYQKKLQDFNLQLEDIYRNCQLSEEDHWIYQAILDQYPGDLFGRRTLYLDMLQRYFPHKSRHDLVEHEKYCDQYRFAIEQQNILISNWNKNKKDFIQKAVLTLTEACATHEMESMLAKDKKKQQELCADLKAKVRQWRAHQEEVARLEMEISARRREKEEEKEKLWKKKELLQRAEKKKKIKKYWAKKKQKWQEMEMRDLQRLEELKKLIAEQSLKDRERVKYRQELLERRLMEKKEVALQEAHEDKERARRLEALRKQVAVVAQFDPVRMMSDTMASKARMGIEIEEEFILQKPLFTLNTYNEQQIISDPRLRFELALREAGLHRTLYAKEILPKISPQKPPRKDMESTVFKI

SEQ ID NO: 2763 - protein, 1463 aa, Homo sapiens
MLLSPSLLLLLLLGAPRGCAEGVAAALTPERLLEWQDKGIFVIQSESLKKCIQAGKSVLTLENCKQANKHMLWKWVSNHGLFNIGGSGCLGLNFSAPEQPLSLYECDSTLVSLRWRCNRKMITGPLQYSVQVAHDNTVVASRKYIHKWISYGSGGGDICEYLHKDLHTIKGNTHGMPCMFPFQYNHQWHHECTREGREDDLLWCATTSRYERDEKWGFCPDPTSAEVGCDTIWEKDLNSHICYQFNLLSSLSWSEAHSSCQMQGGTLLSITDETEENFIREHMSSKTVEVWMGLNQLDEHAGWQWSDGTPLNYLNWSPEVNFEPFVEDHCGTFSSFMPSAWRSRDCESTLPYICKKYLNHIDHEIVEKDAWKYYATHCEPGWNPYNRNCYKLQKEEKTWHEALRSCQADNSALIDITSLAEVEFLVTLLGDENASETWIGLSSNKIPVSFEWSNDSSVIFTNWHTLEPHIFPNRSQLCVSAEQSEGHWKVKNCEERLFYICKKAGHVLSDAESGCQEGWERHGGFCYKIDTVLRSFDQASSGYYCPPALVTITNRFEQAFITSLISSVVKMKDSYFWIALQDQNDTGEYTWKPVGQKPEPVQYTHWNTHQPRYSGGCVAMRGRHPLGRWEVKHCRHFKAMSLCKQPVENQEKAEYEERWPFHPCYLDWESEPGLASCFKVFHSEKVLMKRTWREAEAFCEEFGAHLASFAHIEEENFVNELLHSKFNWTEERQFWIGFNKRNPLNAGSWEWSDRTPVVSSFLDNTYFGEDARNCAVYKANKTLLPLHCGSKREWICKIPRDVKPKIPFWYQYDVPWLFYQDAEYLFHTFASEWLNFEFVCSWLHSDLLTIHSAHEQEFIHSKIKALSKYGASWWIGLQEERANDEFRWRDGTPVIYQNWDTGRERTVNNQSQRCGFISSITGLWGSEECSVSMPSICKRKKVWLIEKKKDTPKQHGTCPKGWLYFNYKCLLLNIPKDPSSWKNWTHAQHFCAEEGGTLVAIESEVEQAFITMNLFGQTTSVWIGLQNDDYETWLNGKPVVYSNWSPFDIINIPSHNTTEVQKHIPLCALLSSNPNFHFTGKWYFEDCGKEGYGFVCEKMQDTSGHGVNTSDMYPMPNTLEYGNRTYKIINANMTWYAAIKTCLMHKAQLVSITDQYHQSFLTVVLNRLGYAHWIGLFTTDNGLNFDWSDGTKSSFTFWKDEESSLLGDCVFADSNGRWHSTACESFLQGAICHVPPETRQSEHPELCSETSIPWIKFKSNCYSFSTVLDSMSFEAAHEFCKKEGSNLLTIKDEAENAFLLEELFAFGSSVQMVWLNAQFDGNNETIKWFDGTPTDQSNWGIRKPDTDYFKPHHCVALRIPEGLWQLSPCQEKKGFICKMEADIHTAEALPEKGPSHSIIPLAVVLTLIVIVAICTLSFCIYKHNGGFFRRLAGFRNPYYPATNFSTVYLEENILISDLEKSDQ

SEQ ID NO: 2764 - protein, 788 aa, Homo sapiens
MGIELLCLFFLFLGRNDHVQGGCALGGAETCEDCLLIGPQCAWCAQENFTHPSGVGERCDTPANLLAKGCQLNFIENPVSQVEILKNKPLSVGRQKNSSDIVQIAPQSLILKLRPGGAQTLQVHVRQTEDYPVDLYYLMDLSASMDDDLNTIKELGSRLSKEMSKLTSNFRLGFGSFVEKPVSPFVKTTPEEIANPCSSIPYFCLPTFGFKHILPLTNDAERFNEIVKNQKISANIDTPEGGFDAIMQAAVCKEKIGWRNDSLHLLVFVSDADSHFGMDSKLAGIVIPNDGLCHLDSKNEYSMSTVLEYPTIGQLIDKLVQNNVLLIFAVTQEQVHLYENYAKLIPGATVGLLQKDSGNILQLIISAYEELRSEVELEVLGDTEGLNLSFTAICNNGTLFQHQKKCSHMKVGDTASFSVTVNIPHCERRSRHIIIKPVGLGDALELLVSPECNCDCQKEVEVNSSKCHHGNGSFQCGVCACHPGHMGPRCECGEDMLSTDSCKEAPDHPSCSGRGDCYCGQCICHLSPYGNIYGPYCQCDNFSCVRHKGLLCGGNGDCDCGECVCRSGWTGEYCNCTTSTDSCVSEDGVLCSGRGDCVCGKCVCTNPGASGPTCERCPTCGDPCNSKRSCIECHLSAAGQAREECVDKCKLAGATISEEEDFSKDGSVSCSLQGENECLITFLITTDNEGKTIIHSINEKDCPKPPNIPMIMLGVSLAILLIGVVLLCIWKLLVSFHDRKEVAKFEAERSKAKWQTGTNPLYRGSTSTFKNVTYKHREKQKVDLSTDC

SEQ ID NO: 2765 - protein, 2000 aa, Homo sapiens
MAQALLVPPGPESFRLFTRESLAAIEKRAAEEKAKKPKKEQDNDDENKPKPNSDLEAGKNLPFIYGDIPPEMVSEPLEDLDPYYINKKTFIVMNKGKAIFRFSATSALYILTPLNPVRKIAIKILVHSLFSMLIMCTILTNCVFMTLSNPPDWTKNVEYTFTGIYTFESLIKILARGFCLEDFTFLRDPWNWLDFSVIVMAYVTEFVDLGNVSALRTFRVLRALKTISVIPGLKTIVGALIQSVKKLSDVMILTVFCLSVFALIGLQLFMGNLRNKCLQWPPSDSAFETNTTSYFNGTMDSNGTFVNVTMSTFNWKDYIGDDSHFYVLDGQKDPLLCGNGSDAGQCPEGYICVKAGRNPNYGYTSFDTFSWAFLSLFRLMTQDYWENLYQLTLRAAGKTYMIFFVLVIFLGSFYLVNLILAVVAMAYEEQNQATLEEAEQKEAEFQQMLEQLKKQQEEAQAVAAASAASRDFSGIGGLGELLESSSEASKLSSKSAKEWRNRRKKRRQREHLEGNNKGERDSFPKSESEDSVKRSSFLFSMDGNRLTSDKKFCSPHQSLLSIRGSLFSPRRNSKTSIFSFRGRAKDVGSENDFADDEHSTFEDSESRRDSLFVPHRHGERRNSNVSQASMSSRMVPGLPANGKMHSTVDCNGVVSLVGGPSALTSPTGQLPPEGTTTETEVRKRRLSSYQISMEMLEDSSGRQRAVSIASILTNTMEELEESRQKCPPCWYRFANVFLIWDCCDAWLKVKHLVNLIVMDPFVDLAITICIVLNTLFMAMEHYPMTEQFSSVLTVGNLVFTGIFTAEMVLKIIAMDPYYYFQEGWNIFDGIIVSLSLMELGLSNVEGLSVLRSFRLLRVFKLAKSWPTLNMLIKIIGNSVGALGNLTLVLAIIVFIFAVVGMQLFGKSYKECVCKINDDCTLPRWHMNDFFHSFLIVFRVLCGEWIETMWDCMEVAGQTMCLIVFMLVMVIGNLVVLNLFLALLLSSFSSDNLAATDDDNEMNNLQIAVGRMQKGIDYVKNKMRECFQKAFFRKPKVIEIHEGNKIDSCMSNNTGIEISKELNYLRDGNGTTSGVGTGSSVEKYVIDENDYMSFINNPSLTVTVPIAVGESDFENLNTEEFSSESELEESKEKLNATSSSEGSTVDVVLPREGEQAETEPEEDLKPEACFTEGCIKKFPFCQVSTEEGKGKIWWNLRKTCYSIVEHNWFETFIVFMILLSSGALAFEDIYIEQRKTIKTMLEYADKVFTYIFILEMLLKWVAYGFQTYFTNAWCWLDFLIVDVSLVSLVANALGYSELGAIKSLRTLRALRPLRALSRFEGMRVVVNALVGAIPSIMNVLLVCLIFWLIFSIMGVNLFAGKFYHCVNMTTGNMFDISDVNNLSDCQALGKQARWKNVKVNFDNVGAGYLALLQVATFKGWMDIMYAAVDSRDVKLQPVYEENLYMYLYFVIFIIFGSFFTLNLFIGVIIDNFNQQKKKFGGQDIFMTEEQKKYYNAMKKLGSKKPQKPIPRPANKFQGMVFDFVTRQVFDISIMILICLNMVTMMVETDDQGKYMTLVLSRINLVFIVLFTGEFVLKLVSLRHYYFTIGWNIFDFVVVILSIVGMFLAEMIEKYFVSPTLFRVIRLARIGRILRLIKGAKGIRTLLFALMMSLPALFNIGLLLFLVMFIYAIFGMSNFAYVKKEAGIDDMFNFETFGNSMICLFQITTSAGWDGLLAPILNSAPPDCDPDTIHPGSSVKGDCGNPSVGIFFFVSYIIISFLVVVNMYIAVILENFSVATEESAEPLSEDDFEMFYEVWEKFDPDATQFIEFSKLSDFAAALDPPLLIAKPNKVQLIAMDLPMVSGDRIHCLDILFAFTKRVLGESGEMDALRIQMEDRFMASNPSKVSYEPITTTLKRKQEEVSAAIIQRNFRCYLLKQRLKNISSNYNKEAIKGRIDLPIKQDMIIDKLNGNSTPEKTDGSSSTTSPPSYDSVTKPDKEKFEKDKPEKESKGKEVRENQK

SEQ ID NO: 2766 - protein, 2005 aa, Homo sapiens
MAQSVLVPPGPDSFRFFTRESLAAIEQRIAEEKAKRPKQERKDEDDENGPKPNSDLEAGKSLPFIYGDIPPEMVSVPLEDLDPYYINKKTFIVLNKGKAISRFSATPALYILTPFNPIRKLAIKILVHSLFNMLIMCTILTNCVFMTMSNPPDWTKNVEYTFTGIYTFESLIKILARGFCLEDFTFLRDPWNWLDFTVITFAYVTEFVDLGNVSALRTFRVLRALKTISVIPGLKTIVGALIQSVKKLSDVMILTVFCLSVFALIGLQLFMGNLRNKCLQWPPDNSSFEINITSFFNNSLDGNGTTFNRTVSIFNWDEYIEDKSHFYFLEGQNDALLCGNSSDAGQCPEGYICVKAGRNPNYGYTSFDTFSWAFLSLFRLMTQDFWENLYQLTLRAAGKTYMIFFVLVIFLGSFYLINLILAVVAMAYEEQNQATLEEAEQKEAEFQQMLEQLKKQQEEAQAAAAAASAESRDFSGAGGIGVFSESSSVASKLSSKSEKELKNRRKKKKQKEQSGEEEKNDRVRKSESEDSIRRKGFRFSLEGSRLTYEKRFSSPHQSLLSIRGSLFSPRRNSRASLFSFRGRAKDIGSENDFADDEHSTFEDNDSRRDSLFVPHRHGERRHSNVSQASRASRVLPILPMNGKMHSAVDCNGVVSLVGGPSTLTSAGQLLPEGTTTETEIRKRRSSSYHVSMDLLEDPTSRQRAMSIASILTNTMEELEESRQKCPPCWYKFANMCLIWDCCKPWLKVKHLVNLVVMDPFVDLAITICIVLNTLFMAMEHYPMTEQFSSVLSVGNLVFTGIFTAEMFLKIIAMDPYYYFQEGWNIFDGFIVSLSLMELGLANVEGLSVLRSFRLLRVFKLAKSWPTLNMLIKIIGNSVGALGNLTLVLAIIVFIFAVVGMQLFGKSYKECVCKISNDCELPRWHMHDFFHSFLIVFRVLCGEWIETMWDCMEVAGQTMCLTVFMMVMVIGNLVVLNLFLALLLSSFSSDNLAATDDDNEMNNLQIAVGRMQKGIDFVKRKIREFIQKAFVRKQKALDEIKPLEDLNNKKDSCISNHTTIEIGKDLNYLKDGNGTTSGIGSSVEKYVVDESDYMSFINNPSLTVTVPIAVGESDFENLNTEEFSSESDMEESKEKLNATSSSEGSTVDIGAPAEGEQPEVEPEESLEPEACFTEDCVRKFKCCQISIEEGKGKLWWNLRKTCYKIVEHNWFETFIVFMILLSSGALAFEDIYIEQRKTIKTMLEYADKVFTYIFILEMLLKWVAYGFQVYFTNAWCWLDFLIVDVSLVSLTANALGYSELGAIKSLRTLRALRPLRALSRFEGMRVVVNALLGAIPSIMNVLLVCLIFWLIFSIMGVNLFAGKFYHCINYTTGEMFDVSVVNNYSECKALIESNQTARWKNVKVNFDNVGLGYLSLLQVATFKGWMDIMYAAVDSRNVELQPKYEDNLYMYLYFVIFIIFGSFFTLNLFIGVIIDNFNQQKKKFGGQDIFMTEEQKKYYNAMKKLGSKKPQKPIPRPANKFQGMVFDFVTKQVFDISIMILICLNMVTMMVETDDQSQEMTNILYWINLVFIVLFTGECVLKLISLRYYYFTIGWNIFDFVVVILSIVGMFLAELIEKYFVSPTLFRVIRLARIGRILRLIKGAKGIRTLLFALMMSLPALFNIGLLLFLVMFIYAIFGMSNFAYVKREVGIDDMFNFETFGNSMICLFQITTSAGWDGLLAPILNSGPPDCDPDKDHPGSSVKGDCGNPSVGIFFFVSYIIISFLVVVNMYIAVILENFSVATEESAEPLSEDDFEMFYEVWEKFDPDATQFIEFAKLSDFADALDPPLLIAKPNKVQLIAMDLPMVSGDRIHCLDILFAFTKRVLGESGEMDALRIQMEERFMASNPSKVSYEPITTTLKRKQEEVSAIIIQRAYRRYLLKQKVKKVSSIYKKDKGKECDGTPIKEDTLIDKLNENSTPEKTDMTPSTTSPPSYDSVTKPEKEKFEKDKSEKEDKGKDIRESKK

SEQ ID NO: 2767 - protein, 459 aa, Homo sapiens
MASSASLETMVPPACPRAGASPATSKTLAFSIERIMAKTSEPRAPFEPRPGALEADGSQGKKLLNLCSPLPCMIPLQPLGYEVPSKTLLSYSELWKSSLRAGGGGGGGGGGGGGGGGAPVCGASGLCKTNCGVCCKAELGLAPSALPAGRVIKPQVINQAVGLPASGSLYYFNYLDSTAYPPSELLSGHLFPSGLLNAQAPAALAAHPKLFLLENAKLAGLAADKFPHPAPYPHKERLPAPLEQVLKENSALTAERGGVKGHSKLPGGSADGKPKNFTCEVCGKVFNAHYNLTRHMPVHTGARPFVCKVCGKGFRQASTLCRHKIIHTQEKPHKCNQCGKAFNRSSTLNTHIRIHAGYKPFVCEFCGKGFHQKGNYKNHKLTHSGEKQYKCTICNKAFHQVYNLTFHMHTHNDKKPFTCATCGKGFCRNFDLKKHVRKLHDSVGPAAPSAKDLTRTVQS

SEQ ID NO: 2768 - protein, 1314 aa, Homo sapiens
MLDPSSSEEESDEIVEEESGKEVLGSAPSGARLSPSRTSEGSAGSAGLGGGGAGAGAGVGAGGGGGSGASSGGGAGGLQPSSRAGGGRPSSPSPSVVSEKEKEELERLQKEEEERKKRLQLYVFVMRCIAYPFNAKQPTDMARRQQKISKQQLQTVKDRFQAFLNGETQIMADEAFMNAVQSYYEVFLKSDRVARMVQSGGCSANDSREVFKKHIEKRVRSLPEIDGLSKETVLSSWMAKFDAIYRGEEDPRKQQARMTASAASELILSKEQLYEMFQNILGIKKFEHQLLYNACQLDNPDEQAAQIRRELDGRLQMADQIARERKFPKFVSKEMENMYIEELKSSVNLLMANLESMPVSKGGEFKLQKLKRSHNASIIDMGEESENQLSKSDVVLSFSLEVVIMEVQGLKSLAPNRIVYCTMEVEGGEKLQTDQAEASKPTWGTQGDFSTTHALPAVKVKLFTESTGVLALEDKELGRVILHPTPNSPKQSEWHKMTVSKNCPDQDLKIKLAVRMDKPQNMKHSGYLWAIGKNVWKRWKKRFFVLVQVSQYTFAMCSYREKKAEPQELLQLDGYTVDYTDPQPGLEGGRAFFNAVKEGDTVIFASDDEQDRILWVQAMYRATGQSHKPVPPTQVQKLNAKGGNVPQLDAPISQFYADRAQKHGMDEFISSNPCNFDHASLFEMVQRLTLDHRLNDSYSCLGWFSPGQVFVLDEYCARNGVRGCHRHLCYLRDLLERAENGAMIDPTLLHYSFAFCASHVHGNRPDGIGTVTVEEKERFEEIKERLRVLLENQITHFRYCFPFGRPEGALKATLSLLERVLMKDIVTPVPQEEVKTVIRKCLEQAALVNYSRLSEYAKIEGKKREMYEHPVFCLASQVMDLTIQNVGRLITPAKKLEDTIRLAELVIEVLQQNEEHHAEAFAWWSDLMVEHAETFLSLFAVDMDAALEVQPPDTWDSFPLFQLLNDFLRTDYNLCNGKFHKHLQDLFAPLVVRYVDLMESSIAQSIHRGFERESWEPVNNGSGTSEDLFWKLDALQTFIRDLHWPEEEFGKHLEQRLKLMASDMIESCVKRTRIAFEVKLQKTSRSTDFRVPQSICTMFNVMVDAKAQSTKLCSMEMGQEHQYHSKIDELIEETVKEMITLLVAKFVTILEGVLAKLSRYDEGTLFSSFLSFTVKAASKYVDVPKPGMDVADAYVTFVRHSQDVLRDKVNEEMYIERLFDQWYNSSMNVICTWLTDRMDLQLHIYQLKTLIRMVKKTYRDFRLQGVLDSTLNSKTYETIRNRLTVEEATASVSEGGGLQGISMKDSDEEDEEDD

SEQ ID NO: 2769 - protein, 585 aa, Homo sapiens
MEKKWKYCAVYYIIQIHFVKGVWEKTVNTEENVYATLGSDVNLTCQTQTVGFFVQMQWSKVTNKIDLIAVYHPQYGFYCAYGRPCESLVTFTETPENGSKWTLHLRNMSCSVSGRYECMLVLYPEGIQTKIYNLLIQTHVTADEWNSNHTIEIEINQTLEIPCFQNSSSKISSEFTYAWSVENSSTDSWVLLSKGIKEDNGTQETLISQNHLISNSTLLKDRVKLGTDYRLHLSPVQIFDDGRKFSCHIRVGPNKILRSSTTVKVFAKPEIPVIVENNSTDVLVERRFTCLLKNVFPKANITWFIDGSFLHDEKEGIYITNEERKGKDGFLELKSVLTRVHSNKPAQSDNLTIWCMALSPVPGNKVWNISSEKITFLLGSEISSTDPPLSVTESTLDTQPSPASSVSPARYPATSSVTLVDVSALRPNTTPQPSNSSMTTRGFNYPWTSSGTDTKKSVSRIPSETYSSSPSGAGSTLHDNVFTSTARAFSEVPTTANGSTKTNHVHITGIVVNKPKDGMSWPVIVAALLFCCMILFGLGVRKWCQYQKEIMERPPPFKPPPPPIKYTCIQEPNESDLPYHEMETL

SEQ ID NO: 2770 - protein, 713 aa, Homo sapiens
MDISIQRNGSIVAGYEVVGSSSASELLSAIEHVAEKAKTALHKLFPLEDGSFRVFGKAQCNDIVFGFGSKDDEYTLPCSSGYRGNITAKCESSGWQVIRETCVLSLLEELNKNFSMIVGNATEAAVSSFVQNLSVIIRQNPSTTVGNLASVVSILSNISSLSLASHFRVSNSTMEDVISIADNILNSASVTNWTVLLREEKYASSRLLETLENISTLVPPTALPLNFSRKFIDWKGIPVNKSQLKRGYSYQIKMCPQNTSIPIRGRVLIGSDQFQRSLPETIISMASLTLGNILPVSKNGNAQVNGPVISTVIQNYSINEVFLFFSKIESNLSQPHCVFWDFSHLQWNDAGCHLVNETQDIVTCQCTHLTSFSILMSPFVPSTIFPVVKWITYVGLGISIGSLILCLIIEALFWKQIKKSQTSHTRRICMVNIALSLLIADVWFIVGATVDTTVNPSGVCTAAVFFTHFFYLSLFFWMLMLGILLAYRIILVFHHMAQHLMMAVGFCLGYGCPLIISVITIAVTQPSNTYKRKDVCWLNWSNGSKPLLAFVVPALAIVAVNFVVVLLVLTKLWRPTVGERLSRDDKATIIRVGKSLLILTPLLGLTWGFGIGTIVDSQNLAWHVIFALLNAFQGFFILCFGILLDSKLRQLLFNKLSALSSWKQTEKQNSSDLSAKPKFSKPFNPLQNKGHYAFSHTGDSSDNIMLTQFVSNE

SEQ ID NO: 2771 - protein, 695 aa, Homo sapiens
MKMKSQATMICCLVFFLSTECSHYRSKIHLKAGDKLQSPEGKPKTGRIQEKCEGPCISSSNCSQPCAKDFHGEIGFTCNQKKWQKSAETCTSLSVEKLFKDSTGASRLSVAAPSIPLHILDFRAPETIESVAQGIRKNCPFDYACITDMVKSSETTSGNIAFIVELLKNISTDLSDNVTREKMKSYSEVANHILDTAAISNWAFIPNKNASSDLLQSVNLFARQLHIHNNSENIVNELFIQTKGFHINHNTSEKSLNFSMSMNNTTEDILGMVQIPRQELRKLWPNASQAISIAFPTLGAILREAHLQNVSLPRQVNGLVLSVVLPERLQEIILTFEKINKTRNARAQCVGWHSKKRRWDEKACQMMLDIRNEVKCRCNYTSVVMSFSILMSSKSMTDKVLDYITCIGLSVSILSLVLCLIIEATVWSRVVVTEISYMRHVCIVNIAVSLLTANVWFIIGSHFNIKAQDYNMCVAVTFFSHFFYLSLFFWMLFKALLIIYGILVIFRRMMKSRMMVIGFAIGYGCPLIIAVTTVAITEPEKGYMRPEACWLNWDNTKALLAFAIPAFVIVAVNLIVVLVVAVNTQRPSIGSSKSQDVVIIMRISKNVAILTPLLGLTWGFGIATLIEGTSLTFHIIFALLNAFQGFFILLFGTIMDHKIRDALRMRMSSLKGKSRAAENASLGPTNGSKLMNRQG

SEQ ID NO: 2772 - protein, 1435 aa, Homo sapiens
MAQCVQSVQELIPDSFVPCVAALCSDEAERLTRLNHLSFAELLKPFSRLTSEVHMRDPNNQLHVIKNLKIAVSNIVTQPPQPGAIRKLLNDVVSGSQPAEGLVANVITAGDYDLNISATTPWFESYRETFLQSMPALDHEFLNHYLACMLVASSSEAEPVEQFSKLSQEQHRIQHNSDYSYPKWFIPNTLKYYVLLHDVSAGDEQRAESIYEEMKQKYGTQGCYLLKINSRTSNRASDEQIPDPWSQYLQKNSIQNQESYEDGPCTITSNKNSDNNLLSLDGLDNEVKDGLPNNFRAHPLQLEQSSDPSNSIDGPDHLRSASSLHETKKGNTGIIHGACLTLTDHDRIRQFIQEFTFRGLLPHIEKTIRQLNDQLISRKGLSRSLFSATKKWFSGSKVPEKSINDLKNTSGLLYPPEAPELQIRKMADLCFLVQHYDLAYSCYHTAKKDFLNDQAMLYAAGALEMAAVSAFLQPGAPRPYPAHYMDTAIQTYRDICKNMVLAERCVLLSAELLKSQSKYSEAAALLIRLTSEDSDLRSALLLEQAAHCFINMKSPMVRKYAFHMILAGHRFSKAGQKKHALRCYCQAMQVYKGKGWSLAEDHINFTIGRQSYTLRQLDNAVSAFRHILINESKQSAAQQGAFLREYLYVYKNVSQLSPDGPLPQLPLPYINSSATRVFFGHDRRPADGEKQAATHVSLDQEYDSESSQQWRELEEQVVSVVNKGVIPSNFHPTQYCLNSYSDNSRFPLAVVEEPITVEVAFRNPLKVLLLLTDLSLLWKFHPKDFSGKDNEEVKQLVTSEPEMIGAEVISEFLINGEESKVARLKLFPHHIGELHILGVVYNLGTIQGSMTVDGIGALPGCHTGKYSLSMSVRGKQDLEIQGPRLNNTKEEKTSVKYGPDRRLDPIITEEMPLLEVFFIHFPTGLLCGEIRKAYVEFVNVSKCPLTGLKVVSKRPEFFTFGGNTAVLTPLSPSASENCSAYKTVVTDATSVCTALISSASSVDFGIGTGSQPEVIPVPLPDTVLLPGASVQLPMWLRGPDEEGVHEINFLFYYESVKKQPKIRHRILRHTAIICTSRSLNVRATVCRSNSLENEEGRGGNMLVFVDVENTNTSEAGVKEFHIVQVSSSSKHWKLQKSVNLSENKDTKLASREKGKFCFKAIRCEKEEAATQSSEKYTFADIIFGNEQIISSASPCADFFYRSLSSELKKPQAHLPVHTEKQSTEDAVRLIQKCSEVDLNIVILWKAYVVEDSKQLILEGQHHVILRTIGKEAFSYPQKQEPPEMELLKFFRPENITVSSRPSVEQLSSLIKTSLHYPESFNHPFHQKSLCLVPVTLLLSNCSKADVDVIVDLRHKTTSPEALEIHGSFTWLGQTQYKLQLKSQEIHSLQLKACFVHTGVYNLGTPRVFAKLSDQVTVFETSQQNSMPALIIISNV

SEQ ID NO: 2773 - protein, 452 aa, Homo sapiens
MQLQFLGTLASSEKRKKSQRLFFKNIKSTKNKAGKASIMSSDTNVNKSASPTATAEEQPVEPDGPLPGSDNNQEKKVRLSPAKMSTKNSTDLVEYVDKSHAFLPIIPNTQRGQLEDRLNNQARTIAFLLEQAFRIKEDISACLQGTHGFRKEESLARKLLESHIQTITSIVKKLSQNIEILEDQIRARDQAATGTNFAVHEINIKHLQGVGDLRGRVARCDSSIVKLSGDIHLFRQEHRQIEKAIQEFVPALETLSKNLDMKVMQLLGKIETASSEQTSNLKMVQGDYRHEMNLLEFKFHSLSSNLYEEVENNKKWTENQFLKYRKDHLGHINECLKVLQEKLEKSENKMEEKLLQLSSKVENFINTQKQETQLSKVKHMENKLSKKMEQMEKQIWGELETMQNEYQSGFKSIHDSLSSLQQIQKTKMDLEKYKVQKDLKKLQRKIVELQEV

SEQ ID NO: 2774 - protein, 686 aa, Homo sapiens
MIEDSGKRGNTMAERRQLFAEMRAQDLDRIRLSTYRTACKLRFVQKKCNLHLVDIWNVIEALRENALNNLDPNTELNVSRLEAVLSTIFYQLNKRMPTTHQIHVEQSISLLLNFLLAAFDPEGHGKISVFAVKMALATLCGGKIMDKLRYIFSMISDSSGVMVYGRYDQFLREVLKLPTAVFEGPSFGYTEQSARSCFSQQKKVTLNGFLDTLMSDPPPQCLVWLPLLHRLANVENVFHPVECSYCHSESMMGFRYRCQQCHNYQLCQDCFWRGHAGGSHSNQHQMKEYTSWKSPAKKLTNALSKSLSCASSREPLHPMFPDQPEKPLNLAHIVDTWPPRPVTSMNDTLFSHSVPSSGSPFITRSMLESSNRLDEEHRLIARYAARLAAESSSSQPPQQRSAPDISFTIDANKQQRQLIAELENKNREILQEIQRLRLEHEQASQPTPEKAQQNPTLLAELRLLRQRKDELEQRMSALQESRRELMVQLEGLMKLLKTQGAGSPRSSPSHTISRPIPMPIRSASACSTPTHTPQDSLTGVGGDVQEAFAQSSRRNLRNDLLVAADSITNTMSSLVKELNSEVGSETESNVDSEFARTQFEDLVPSPTSEKAFLAQIHARKPGYIHSGATTSTMRGDMVTEDADPYVQPEDENYENDSVRQLENELQMEEYLKQKLQDEAYQVSLQG

SEQ ID NO: 2775 - protein, 534 aa, Homo sapiens
MRLRGCGPRAAPASSAGASDARLLAPPGRNPFVHELRLSALQKAQVALMTLTLFPVRLLVAAAMMLLAWPLALVASLGSAEKEPEQPPALWRKVVDFLLKAIMRTMWFAGGFHRVAVKGRQALPTEAAILTLAPHSSYFDAIPVTMTMSSIVMKAESRDIPIWGTLIQYIRPVFVSRSDQDSRRKTVEEIKRRAQSNGKWPQIMIFPEGTCTNRTCLITFKPGAFIPGAPVQPVVLRYPNKLDTITWTWQGPGALEILWLTLCQFHNQVEIEFLPVYSPSEEEKRNPALYASNVRRVMAEALGVSVTDYTFEDCQLALAEGQLRLPADTCLLEFARLVRGLGLKPEKLEKDLDRYSERARMKGGEKIGIAEFAASLEVPVSDLLEDMFSLFDESGSGEVDLRECVVALSVVCRPARTLDTIQLAFKMYGAQEDGSVGEGDLSCILKTALGVAELTVTDLFRAIDQEEKGKITFADFHRFAEMYPAFAEEYLYPDQTHFESCAETSPAPIPNGFCADFSPENSDAGRKPVRKKLD

SEQ ID NO: 2776 - protein, 1271 aa, Homo sapiens
MEALRNPMPLGSSEEALGDLACSSLTGASRDLGTGAVASGTQEETSGPRGDPQQTPSLEKERHTPSRTGPGAAGRTLPRRSRSWERAPRSSRGAQAAACHTSHHSAGSRPGGHLGGQAVGTPNCVPVEGPGCTKEEDVLASSACVSTDGGSLHCHNPSGPSDVPARQPHPEQEGWPPGTGDFPSQVPKQVLDVSQELLQSGVVTLPGTRDRHGRAVVQVRTRSLLWTREHSSCAELTRLLLYFHSIPRKEVRDLGLVVLVDARRSPAAPAVSQALSGLQNNTSPIIHSILLLVDKESAFRPDKDAIIQCEVVSSLKAVHKFVDSCQLTADLDGSFPYSHGDWICFRQRLEHFAANCEEAIIFLQNSFCSLNTHRTPRTAQEVAELIDQHETMMKLVLEDPLLVSLRLEGGTVLARLRREELGTEDSRDTLEAATSLYDRVDEEVHRLVLTSNNRLQQLEHLRELASLLEGNDQQSCQKGLQLAKENPQRTEEMVQDFRRGLSAVVSQAECREGELARWTRSSELCETVSSWMGPLDPEACPSSPVAECLRSCHQEATSVAAEAFPGAGVAVLKPHALGKPWASQQDLWLQYPQTRLRLEEALSEAAPDPSLPPLAQSPPKHERAQEAMRRHQKPPSFPSTDSGGGAWEPAQPLSGLPGRALLCGQDGETLRPGLCALWDPLSLLRGLPGAGATTAHLEDSSACSSEPTQTLASRPRKHPQKKMIKKTQSFEIPQPDSGPRDSCQPDHTSVFSKGLEVTSTVATEKKLPLWQHARSPPVTQSRSLSSPSGLHPAEEDGRQQVGSSRLRHIMAEMIATEREYIRCLGYVIDNYFPEMERMDLPQGLRGKHHVIFGNLEKLHDFHQQHFLRELERCQHCPLAVGRSFLRHEEQFGMYVIYSKNKPQSDALLSSHGNAFFKDKQRELGDKMDLASYLLRPVQRVAKYALLLQDLLKEASCGLAQGQELGELRAAEVVVCFQLRHGNDLLAMDAIRGCDVNLKEQGQLRCRDEFIVCCGRKKYLRHVFLFEDLILFSKTQKVEGSHDVYLYKQSFKTAEIGMTENVGDSGLRFEIWFRRRRKSQDTYILQASSAEVKSAWTDVIGRILWRQALKSRELRIQEMASMGIGNQPFMDVKPRDRTPDCAVISDRAPKCAVMSDRVPDSIVKGTESQMRGSTAVSSSDHAAPFKRPHSTISDSSTSSSSSQSSSILGSLGLLVSSSPAHPGLWSPAHSPWSSDIRACVEEDEPEPELETGTQAAVCEGAPAVLLSRTRQA

SEQ ID NO: 2777 - protein, 311 aa, Homo sapiens
MQRPGPFSTLYGRVLAPLPGRAGGAASGGGGNSWDLPGSHVRLPGRAQSGTRGGAGNTSTSCGDSNSICPAPSTMSKAEEAKKLAGRAAVENHVRNNQVLGIGSGSTIVHAVQRIAERVKQENLNLVCIPTSFQARQLILQYGLTLSDLDRHPEIDLAIDGADEVDADLNLIKGGGGCLTQEKIVAGYASRFIVIADFRKDSKNLGDQWHKGIPIEVIPMAYVPVSRAVSQKFGGVVELRMAVNKAGPVVTDNGNFILDWKFDRVHKWSEVNTAIKMIPGVVDTGLFINMAERVYFGMQDGSVNMREKPFC

SEQ ID NO: 2778 - protein, 856 aa, Homo sapiens
MDISKGLPGMQGGLHIWISENRKMVPVPEGAYGNFFEEHCYVILHVPQSPKATQGASSDLHYWVGKQAGAEAQGAAEAFQQRLQDELGGQTVLHREAQGHESDCFCSYFRPGIIYRKGGLASDLKHVETNLFNIQRLLHIKGRKHVSATEVELSWNSFNKGDIFLLDLGKMMIQWNGPKTSISEKARGLALTYSLRDRERGGGRAQIGVVDDEAKAPDLMQIMEAVLGRRVGSLRAATPSKDINQLQKANVRLYHVYEKGKDLVVLELATPPLTQDLLQEEDFYILDQGGFKIYVWQGRMSSLQERKAAFSRAVGFIQAKGYPTYTNVEVVNDGAESAAFKQLFRTWSEKRRRNQKLGGRDKSIHVKLDVGKLHTQPKLAAQLRMVDDGSGKVEVWCIQDLHRQPVDPKRHGQLCAGNCYLVLYTYQRLGRVQYILYLWQGHQATADEIEALNSNAEELDVMYGGVLVQEHVTMGSEPPHFLAIFQGQLVIFQERAGHHGKGQSASTTRLFQVQGTDSHNTRTMEVPARASSLNSSDIFLLVTASVCYLWFGKGCNGDQREMARVVVTVISRKNEETVLEGQEPPHFWEALGGRAPYPSNKRLPEEVPSFQPRLFECSSHMGCLVLAEVGFFSQEDLDKYDIMLLDTWQEIFLWLGEAASEWKEAVAWGQEYLKTHPAGRSPATPIVLVKQGHEPPTFIGWFFTWDPYKWTSHPSHKEVVDGSPAAASTISEITAEVNNLRLSRWPGNGRAGAVALQALKGSQDSSENDLVRSPKSAGSRTSSSVSSTSATINGGLRREQLMHQAVEDLPEGVDPARREFYLSDSDFQDIFGKSKEEFYSMATWRQRQEKKQLGFF

SEQ ID NO: 2779 - protein, 390 aa, Homo sapiens
MNSLSEANTKFMFDLFQQFRKSKENNIFYSPISITSALGMVLLGAKDNTAQQIKKVLHFDQVTENTTGKAATYHVDRSGNVHHQFQKLLTEFNKSTDAYELKIANKLFGEKTYLFLQEYLDAIKKFYQTSVESVDFANAPEESRKKINSWVESQTNEKIKNLIPEGNIGSNTTLVLVNAIYFKGQWEKKFNKEDTKEEKFWPNKNTYKSIQMMRQYTSFHFASLEDVQAKVLEIPYKGKDLSMIVLLPNEIDGLQKLEEKLTAEKLMEWTSLQNMRETRVDLHLPRFKVEESYDLKDTLRTMGMVDIFNGDADLSGMTGSRGLVLSGVLHKAFVEVTEEGAEAAAATAVVGFGSSPTSTNEEFHCNHPFLFFIRQNKTNSILFYGRFSSP

SEQ ID NO: 2780 - protein, 445 aa, Homo sapiens
MAELKYISGFGNECSSEDPRCPGSLPEGQNNPQVCPYNLYAEQLSGSAFTCPRSTNKRSWLYRILPSVSHKPFESIDEGQVTHNWDEVDPDPNQLRWKPFEIPKASQKKVDFVSGLHTLCGAGDIKSNNGLAIHIFLCNTSMENRCFYNSDGDFLIVPQKGNLLIYTEFGKMLVQPNEICVIQRGMRFSIDVFEETRGYILEVYGVHFELPDLGPIGANGLANPRDFLIPIAWYEDRQVPGGYTVINKYQGKLFAAKQDVSPFNVVAWHGNYTPYKYNLKNFMVINSVAFDHADPSIFTVLTAKSVRPGVAIADFVIFPPRWGVADKTFRPPYYHRNCMSEFMGLIRGHYEAKQGGFLPGGGSLHSTMTPHGPDADCFEKASKVKLAPERIADGTMAFMFESSLSLAVTKWGLKASRCLDENYHKCWEPLKSHFTPNSRNPAEPN

SEQ ID NO: 2781 - protein, 439 aa, Homo sapiens
MADPDVLTEVPAALKRLAKYVIRGFYGIEHALALDILIRNSCVKEEDMLELLKFDRKQLRSVLNNLKGDKFIKCRMRVETAADGKTTRHNYYFINYRTLVNVVKYKLDHMRRRIETDERDSTNRASFKCPVCSSTFTDLEANQLFDPMTGTFRCTFCHTEVEEDESAMPKKDARTLLARFNEQIEPIYALLRETEDVNLAYEILEPEPTEIPALKQSKDHAATTAGAASLAGGHHREAWATKGPSYEDLYTQNVVINMDDQEDLHRASLEGKSAKERPIWLRESTVQGAYGSEDMKEGGIDMDAFQEREEGHAGPDDNEEVMRALLIHEKKTSSAMAGSVGAAAPVTAANGSDSESETSESDDDSPPRPAAVAVHKREEDEEEDDEFEEVADDPIVMVAGRPFSYSEVSQRPELVAQMTPEEKEAYIAMGQRMFEDLFE

SEQ ID NO: 2782 - protein, 590 aa, Homo sapiens
MEVIHGRPYCCRELEGADILSNTFYSNELHNPLQTVTRPTASEDRYQELRESLQQCRLPWGAEREYGGIIPISLPEDHRPKYEPPRVMGKGHQHYGFGGETWPRKLPVEQFYYLTQNKKSDVYGNDSLIPKPPNSTVGEICLPYPIEHPYHTHICRGAMFPTFTSPEDLYTGIKARTQQPFPPTVPTKAYDSTVLKTRGNPYRYELIDIPMDSKKKALTWPGQGVYYDFPRGVEKNKPVFYPKPPKTFAPNTSLNSWDPICSAKEANIQRNLERSHWLTSYTHDFTGLGPMDPLELDDYHEKMVAELTRKIGFDPEPQEKFHPVFKPPRPLEGRIARLIQNRRSLEAIVQQRPRSCPDCTPRVLCNFHTFVPSSKEMVALSDNIPAGVTHKNQDIEEKIIEEQSLLSTYELPSCYPTKDLTSIYDIKPFPKITDTKKTEDLYWRQQSLKTQPTPYCKPDHWIHYENLKSPLRDQYNMCPDPVSLSKPSVLQNKQDTEAFTLEHFLSKPEEELFLNMENNEETRPVLGWIPRAGVTKPQTNLLELKNSFSKTGAQKRFHKSILEDHKDLRDNEHSGMKHQFYGHNSYYFYN

SEQ ID NO: 2783 - protein, 250 aa, Homo sapiens
MFSLPLSLPLCEDTAFLPSKCCSSHKTIKQARTLIMIFLASGTHFQTMLKSKLNVLTLKKEPLPAVIFHEPEAIELCTTTPLMKTRTHSGCKVTYLGKVSTTGMQFLSGCTEKPVIELWKKHTLAREDVFPANALLEIRPFQVWLHHLDHKGEATVHMDTFQVARIAYCTADHNVSPNIFAWVYREINDDLSYQMDCHAVECESKLEAKKLAHAMMEAFRKTFHSMKSDGRIHSNSSSEEVSQELESDDG

SEQ ID NO: 2784 - protein, 1992 aa, Homo sapiens
MSNRPNNNPGGSLRRSQRNTAGAQPQDDSIGGRSCSSSSAVIVPQPEDPDRANTSERQKTGQVPKKDNSRGVKRSASPDYNRTNSPSSAKKPKALQHTESPSETNKPHSKSKKRHLDQEQQLKSAQSPSTSKAHTRKSGATGGSRSQKRKRTESSCVKSGSGSESTGAEERSAKPTKLASKSATSAKAGCSTITDSSSAASTSSSSSAVASASSTVPPGARVKQGKDQNKARRSRSASSPSPRRSSREKEQSKTGGSSKFDWAARFSPKVSLPKTKLSLPGSSKSETSKPGPSGLQAKLASLRKSTKKRSESPPAELPSLRRSTRQKTTGSCASTSRRGSGLGKRGAAEARRQEKMADPESNQEAVNSSAARTDEAPQGAAGAVGMTTSGESESDDSEMGRLQALLEARGLPPHLFGPLGPRMSQLFHRTIGSGASSKAQQLLQGLQASDESQQLQAVIEMCQLLVMGNEETLGGFPVKSVVPALITLLQMEHNFDIMNHACRALTYMMEALPRSSAVVVDAIPVFLEKLQVIQCIDVAEQALTALEMLSRRHSKAILQAGGLADCLLYLEFFSINAQRNALAIAANCCQSITPDEFHFVADSLPLLTQRLTHQDKKSVESTCLCFARLVDNFQHEENLLQQVASKDLLTNVQQLLVVTPPILSSGMFIMVVRMFSLMCSNCPTLAVQLMKQNIAETLHFLLCGASNGSCQEQIDLVPRSPQELYELTSLICELMPCLPKEGIFAVDTMLKKGNAQNTDGAIWQWRDDRGLWHPYNRIDSRIIEQINEDTGTARAIQRKPNPLANSNTSGYSESKKDDARAQLMKEDPELAKSFIKTLFGVLYEVYSSSAGPAVRHKCLRAILRIIYFADAELLKDVLKNHAVSSHIASMLSSQDLKIVVGALQMAEILMQKLPDIFSVYFRREGVMHQVKHLAESESLLTSPPKACTNGSGSMGSTTSVSSGTATAATHAAADLGSPSLQHSRDDSLDLSPQGRLSDVLKRKRLPKRGPRRPKYSPPRDDDKVDNQAKSPTTTQSPKSSFLASLNPKTWGRLSTQSNSNNIEPARTAGGSGLARAASKDTISNNREKIKGWIKEQAHKFVERYFSSENMDGSNPALNVLQRLCAATEQLNLQVDGGAECLVEIRSIVSESDVSSFEIQHSGFVKQLLLYLTSKSEKDAVSREIRLKRFLHVFFSSPLPGEEPIGRVEPVGNAPLLALVHKMNNCLSQMEQFPVKVHDFPSGNGTGGSFSLNRGSQALKFFNTHQLKCQLQRHPDCANVKQWKGGPVKIDPLALVQAIERYLVVRGYGRVREDDEDSDDDGSDEEIDESLAAQFLNSGNVRHRLQFYIGEHLLPYNMTVYQAVRQFSIQAEDERESTDDESNPLGRAGIWTKTHTIWYKPVREDEESNKDCVGGKRGRAQTAPTKTSPRNAKKHDELWHDGVCPSVSNPLEVYLIPTPPENITFEDPSLDVILLLRVLHAISRYWYYLYDNAMCKEIIPTSEFINSKLTAKANRQLQDPLVIMTGNIPTWLTELGKTCPFFFPFDTRQMLFYVTAFDRDRAMQRLLDTNPEINQSDSQDSRVAPRLDRKKRTVNREELLKQAESVMQDLGSSRAMLEIQYENEVGTGLGPTLEFYALVSQELQRADLGLWRGEEVTLSNPKGSQEGTKYIQNLQGLFALPFGRTAKPAHIAKVKMKFRFLGKLMAKAIMDFRLVDLPLGLPFYKWMLRQETSLTSHDLFDIDPVVARSVYHLEDIVRQKKRLEQDKSQTKESLQYALETLTMNGCSVEDLGLDFTLPGFPNIELKKGGKDIPVTIHNLEEYLRLVIFWALNEGVSRQFDSFRDGFESVFPLSHLQYFYPEELDQLLCGSKADTWDAKTLMECCRPDHGYTHDSRAVKFLFEILSSFDNEQQRLFLQFVTGSPRLPVGGFRSLNPPLTIVRKTFESTENPDDFLPSVMTCVNYLKLPDYSSIEIMREKLLIAAREGQQSFHLS

SEQ ID NO: 2785 - protein, 538 aa, Homo sapiens
MAHRDSEMKEECLREDLKFYFMSPCEKYRARRQIPWKLGLQILKIVMVTTQLVRFGLSNQLVVAFKEDNTVAFKHLFLKGYSGTDEDDYSCSVYTQEDAYESIFFAINQYHQLKDITLGTLGYGENEDNRIGLKVCKQHYKKGTMFPSNETLNIDNDVELDCVQLDLQDLSKKPPDWKNSSFFRLEFYRLLQVEISFHLKGIDLQTIHSRELPDCYVFQNTIIFDNKAHSGKIKIYFDSDAKIEECKDLNIFGSTQKNAQYVLVFDAFVIVICLASLILCTRSIVLALRLRKRFLNFFLEKYKRPVCDTDQWEFINGWYVLVIISDLMTIIGSILKMEIKAKNLTNYDLCSIFLGTSTLLVWVGVIRYLGYFQAYNVLILTMQASLPKVLRFCACAGMIYLGYTFCGWIVLGPYHDKFENLNTVAECLFSLVNGDDMFATFAQIQQKSILVWLFSRLYLYSFISLFIYMILSLFIALITDSYDTIKKFQQNGFPETDLQEFLKECSSKEEYQKESSAFLSCICCRRRKRSDDHLIPIS

SEQ ID NO: 2786 - protein, 1412 aa, Homo sapiens
MTTKRSLFVRLVPCRCLRGEEETVTTLDYSHCSLEQVPKEIFTFEKTLEELYLDANQIEELPKQLFNCQSLHKLSLPDNDLTTLPASIANLINLRELDVSKNGIQEFPENIKNCKVLTIVEASVNPISKLPDGFSQLLNLTQLYLNDAFLEFLPANFGRLTKLQILELRENQLKMLPKTMNRLTQLERLDLGSNEFTEVPEVLEQLSGLKEFWMDANRLTFIPGFIGSLKQLTYLDVSKNNIEMVEEGISTCENLQDLLLSSNSLQQLPETIGSLKNITTLKIDENQLMYLPDSIGGLISVEELDCSFNEVEALPSSIGQLTNLRTFAADHNYLQQLPPEIGSWKNITVLFLHSNKLETLPEEMGDMQKLKVINLSDNRLKNLPFSFTKLQQLTAMWLSDNQSKPLIPLQKETDSETQKMVLTNYMFPQQPRTEDVMFISDNESFNPSLWEEQRKQRAQVAFECDEDKDEREAPPREGNLKRYPTPYPDELKNMVKTVQTIVHRLKDEETNEDSGRDLKPHEDQQDINKDVGVKTSESTTTVKSKVDEREKYMIGNSVQKISEPEAEISPGSLPVTANMKASENLKHIVNHDDVFEESEELSSDEEMKMAEMRPPLIETSINQPKVVALSNNKKDDTKETDSLSDEVTHNSNQNNSNCSSPSRMSDSVSLNTDSSQDTSLCSPVKQTHIDINSKIRQEDENFNSLLQNGDILNSSTEEKFKAHDKKDFNLPEYDLNVEERLVLIEKSVDSTATADDTHKLDHINMNLNKLITNDTFQPEIMERSKTQDIVLGTSFLSINSKEETEHLENGNKYPNLESVNKVNGHSEETSQSPNRTEPHDSDCSVDLGISKSTEDLSPQKSGPVGSVVKSHSITNMEIGGLKIYDILSDNGPQQPSTTVKITSAVDGKNIVRSKSATLLYDQPLQVFTGSSSSSDLISGTKAIFKFDSNHNPEEPNIIRGPTSGPQSAPQIYGPPQYNIQYSSSAAVKDTLWHSKQNPQIDHASFPPQLLPRSESTENQSYAKHSANMNFSNHNNVRANTAYHLHQRLGPARHGEMWAISPNDRLIPAVTRSTIQRQSSVSSTASVNLGDPGSTRRAQIPEGDYLSYREFHSAGRTPPMMPGSQRPLSARTYSIDGPNASRPQSARPSINEIPERTMSVSDFNYSRTSPSKRPNARVGSEHSLLDPPGKSKVPRDWREQVLRHIEAKKLEKKHPQTSSSGDPCQDGIFISGQQNYSSATLSHKDVPPDSLMKMPLSNGQMGQPLRPQANYSQIHHPPQASVARHPSREQLIDYLMLKVAHQPPYTQPHCSPRQGHELAKQEIRVRVEKDPELGFSISGGVGGRGNPFRPDDDGIFVTRVQPEGPASKLLQPGDKIIQANGYSFINIEHGQAVSLLKTFQNTVELIIVREVSS

SEQ ID NO: 2787 - protein, 1710 aa, Homo sapiens
MNGHSDEESVRNSSGESSQSDDDSGSASGSGSGSSSGSSSDGSSSQSGSSDSDSGSESGSQSESESDTSRENKVQAKPPKVDGAEFWKSSPSILAVQRSAILKKQQQQQQQQQHQASSNSGSEEDSSSSEDSDDSSSEVKRKKHKDEDWQMSGSGSPSQSGSDSESEEEREKSSCDETESDYEPKNKVKSRKPQNRSKSKNGKKILGQKKRQIDSSEEDDDEEDYDNDKRSSRRQATVNVSYKEDEEMKTDSDDLLEVCGEDVPQPEEEEFETIERFMDCRIGRKGATGATTTIYAVEADGDPNAGFEKNKEPGEIQYLIKWKGWSHIHNTWETEETLKQQNVRGMKKLDNYKKKDQETKRWLKNASPEDVEYYNCQQELTDDLHKQYQIVERIIAHSNQKSAAGYPDYYCKWQGLPYSECSWEDGALISKKFQACIDEYFSRNQSKTTPFKDCKVLKQRPRFVALKKQPSYIGGHEGLELRDYQLNGLNWLAHSWCKGNSCILADEMGLGKTIQTISFLNYLFHEHQLYGPFLLVVPLSTLTSWQREIQTWASQMNAVVYLGDINSRNMIRTHEWTHHQTKRLKFNILLTTYEILLKDKAFLGGLNWAFIGVDEAHRLKNDDSLLYKTLIDFKSNHRLLITGTPLQNSLKELWSLLHFIMPEKFSSWEDFEEEHGKGREYGYASLHKELEPFLLRRVKKDVEKSLPAKVEQILRMEMSALQKQYYKWILTRNYKALSKGSKGSTSGFLNIMMELKKCCNHCYLIKPPDNNEFYNKQEALQHLIRSSGKLILLDKLLIRLRERGNRVLIFSQMVRMLDILAEYLKYRQFPFQRLDGSIKGELRKQALDHFNAEGSEDFCFLLSTRAGGLGINLASADTVVIFDSDWNPQNDLQAQARAHRIGQKKQVNIYRLVTKGSVEEDILERAKKKMVLDHLVIQRMDTTGKTVLHTGSAPSSSTPFNKEELSAILKFGAEELFKEPEGEEQEPQEMDIDEILKRAETHENEPGPLTVGDELLSQFKVANFSNMDEDDIELEPERNSKNWEEIIPEDQRRRLEEEERQKELEEIYMLPRMRNCAKQISFNGSEGRRSRSRRYSGSDSDSISEGKRPKKRGRPRTIPRENIKGFSDAEIRRFIKSYKKFGGPLERLDAIARDAELVDKSETDLRRLGELVHNGCIKALKDSSSGTERTGGRLGKVKGPTFRISGVQVNAKLVISHEEELIPLHKSIPSDPEERKQYTIPCHTKAAHFDIDWGKEDDSNLLIGIYEYGYGSWEMIKMDPDLSLTHKILPDDPDKKPQAKQLQTRADYLIKLLSRDLAKKEALSGAGSSKRRKARAKKNKAMKSIKVKEEIKSDSSPLPSEKSDEDDDKLSESKSDGRERSKKSSVSDAPVHITASGEPVPISEESEELDQKTFSICKERMRPVKAALKQLDRPEKGLSEREQLEHTRQCLIKIGDHITECLKEYTNPEQIKQWRKNLWIFVSKFTEFDARKLHKLYKHAIKKRQESQQNSDQNSNLNPHVIRNPDVERLKENTNHDDSSRDSYSSDRHLTQYHDHHKDRHQGDSYKKSDSRKRPYSSFSNGKDHRDWDHYKQDSRYYSDREKHRKLDDHRSRDHRSNLEGSLKDRSHSDHRSHSDHRLHSDHRSSSEYTHHKSSRDYRYHSDWQMDHRASSSGPRSPLDQRSPYGSRSPFEHSVEHKSTPEHTWSSRKT

SEQ ID NO: 2788 - protein, 567 aa, Homo sapiens
MEAERRPAPGSPSEGLFADGHLILWTLCSVLLPVFITFWCSLQRSRRQLHRRDIFRKSKHGWRDTDLFSQPTYCCVCAQHILQGAFCDCCGLRVDEGCLRKADKRFQCKEIMLKNDTKVLDAMPHHWIRGNVPLCSYCMVCKQQCGCQPKLCDYRCIWCQKTVHDECMKNSLKNEKCDFGEFKNLIIPPSYLTSINQMRKDKKTDYEVLASKLGKQWTPLIILANSRSGTNMGEGLLGEFRILLNPVQVFDVTKTPPIKALQLCTLLPYYSARVLVCGGDGTVGWVLDAVDDMKIKGQEKYIPQVAVLPLGTGNDLSNTLGWGTGYAGEIPVAQVLRNVMEADGIKLDRWKVQVTNKGYYNLRKPKEFTMNNYFSVGPDALMALNFHAHREKAPSLFSSRILNKAVYLFYGTKDCLVQECKDLNKKVELELDGERVALPSLEGIIVLNIGYWGGGCRLWEGMGDETYPLARHDDGLLEVVGVYGSFHCAQIQVKLANPFRIGQAHTVRLILKCSMMPMQVDGEPWAQGPCTVTITHKTHAMMLYFSGEQTDDDISSTSDQEDIKATE

SEQ ID NO: 2789 - protein, 777 aa, Homo sapiens
MNANKDERLKARSQDFHLFPALMMLSMTMLFLPVTGTLKQNIPRLKLTYKDLLLSNSCIPFLGSSEGLDFQTLLLDEERGRLLLGAKDHIFLLSLVDLNKNFKKIYWPAAKERVELCKLAGKDANTECANFIRVLQPYNKTHIYVCGTGAFHPICGYIDLGVYKEDIIFKLDTHNLESGRLKCPFDPQQPFASVMTDEYLYSGTASDFLGKDTAFTRSLGPTHDHHYIRTDISEHYWLNGAKFIGTFFIPDTYNPDDDKIYFFFRESSQEGSTSDKTILSRVGRVCKNDVGGQRSLINKWTTFLKARLICSIPGSDGADTYFDELQDIYLLPTRDERNPVVYGVFTTTSSIFKGSAVCVYSMADIRAVFNGPYAHKESADHRWVQYDGRIPYPRPGTCPSKTYDPLIKSTRDFPDDVISFIKRHSVMYKSVYPVAGGPTFKRINVDYRLTQIVVDHVIAEDGQYDVMFLGTDIGTVLKVVSISKEKWNMEEVVLEELQIFKHSSIILNMELSLKQQQLYIGSRDGLVQLSLHRCDTYGKACADCCLARDPYCAWDGNACSRYAPTSKRRARRQDVKYGDPITQCWDIEDSISHETADEKVIFGIEFNSTFLECIPKSQQATIKWYIQRSGDEHREELKPDERIIKTEYGLLIRSLQKKDSGMYYCKAQEHTFIHTIVKLTLNVIENEQMENTQRAEHEEGKVKDLLAESRLRYKDYIQILSSPNFSLDQYCEQMWHREKRRQRNKGGPKWKHMQEMKKKRNRRHHRDLDELPRAVAT

SEQ ID NO: 2790 - protein, 295 aa, Homo sapiens
MSKSTKLCGKTSCPRSNIFCNLLDKIVKRPSLQFLGQWGYHCYEPRIYRSLAKILRYVDLDGFDALLTDYIAFVEKSGYRFEVSFNLDFTEICVNTILYWVFARKGNPDFVELLLKKTKDYVQDRSCNLALIWRTFTPVYCPSPLSGITPLFYVAQTRQSNIFKILLQYGILEREKNPINIVLTIVLYPSRVRVMVDRELADIHEDAKTCLVLCSRVLSVISVKEIKTQLSLGRHPIISNWFDYIPSTRYKDPCELLHLCRLTIRNQLLTNNMLPDGIFSLLIPARLQNYLNLEI

SEQ ID NO: 2791 - protein, 320 aa, Homo sapiens
MAEGDAGSDQRQNEEIEAMAAIYGEEWCVIDDCAKIFCIRISDDIDDPKWTLCLQVMLPNEYPGTAPPIYQLNAPWLKGQERADLSNSLEEIYIQNIGESILYLWVEKIRDVLIQKSQMTEPGPDVKKKTEEEDVECEDDLILACQPESSLKALDFDISETRTEVEVEELPPIDHGIPITDRRSTFQAHLAPVVCPKQVKMVLSKLYENKKIASATHNIYAYRIYCEDKQTFLQDCEDDGETAAGGRLLHLMEILNVKNVMVVVSRWYGGILLGPDRFKHINNCARNILVEKNYTNSPEESSKALGKNKKVRKDKKRNEH

SEQ ID NO: 2792 - protein, 748 aa, Homo sapiens
MSSGGRFNFDDGGSYCGGWEDGKAHGHGVCTGPKGQGEYTGSWSHGFEVLGVYTWPSGNTYQGTWAQGKRHGIGLESKGKWVYKGEWTHGFKGRYGVRECAGNGAKYEGTWSNGLQDGYGTETYSDGGTYQGQWVGGMRQGYGVRQSVPYGMAAVIRSPLRTSINSLRSEHTNGTALHPDASPAVAGSPAVSRGGFVLVAHSDSEILKSKKKGLFRRSLLSGLKLRKSESKSSLASQRSKQSSFRSEAGMSTVSSTASDIHSTISLGEAEAELAVIEDDIDATTTETYVGEWKNDKRSGFGVSQRSDGLKYEGEWASNRRHGYGCMTFPDGTKEEGKYKQNILVGGKRKNLIPLRASKIREKVDRAVEAAERAATIAKQKAEIAASRTSHSRAKAEAALTAAQKAQEEARIARITAKEFSPSFQHRENGLEYQRPKRQTSCDDIEVLSTGTPLQQESPELYRKGTTPSDLTPDDSPLQSFPTSPAATPPPAPAARNKVAHFSRQVSVDEERGGDIQMLLEGRAGDCARSSWGEEQAGGSRGVRSGALRGGLLVDDFRTRGSGRKQPGNPKPRERRTESPPVFTWTSHHRASNHSPGGSRLLELQEEKLSNYRMEMKPLLRMETHPQKRRYSKGGACRGLGDDHRPEDRGFGVQRLRSKAQNKENFRPASSAEPAVQKLASLRLGGAEPRLLRWDLTFSPPQKSLPVALESDEENGDELKSSTGSAPILVVMVILLNIGVAILFINFFI

SEQ ID NO: 2793 - protein, 492 aa, Homo sapiens
MVKFPALTHYWPLIRFLVPLGITNIAIDFGEQALNRGIAAVKEDAVEMLASYGLAYSLMKFFTGPMSDFKNVGLVFVNSKRDRTKAVLCMVVAGAIAAVFHTLIAYSDLGYYIINKLHHVDESVGSKTRRAFLYLAAFPFMDAMAWTHAGILLKHKYSFLVGCASISDVIAQVVFVAILLHSHLECREPLLIPILSLYMGALVRCTTLCLGYYKNIHDIIPDRSGPELGGDATIRKMLSFWWPLALILATQRISRPIVNLFVSRDLGGSSAATEAVAILTATYPVGHMPYGWLTEIRAVYPAFDKNNPSNKLVSTSNTVTAAHIKKFTFVCMALSLTLCFVMFWTPNVSEKILIDIIGVDFAFAELCVVPLRIFSFFPVPVTVRAHLTGWLMTLKKTFVLAPSSVLRIIVLIASLVVLPYLGVHGATLGVGSLLAGFVGESTMVAIAACYVYRKQKKKMENESATEGEDSAMTDMPPTEEVTDIVEMREENE

SEQ ID NO: 2794 - protein, 352 aa, Homo sapiens
MSRGTMPQPEAWPGASCAETPAREAAATARDGGKAAASGQPRPEMQCPAEHEEDMYRAADEIEKEKELLIHERGASEPRLSVAPEMDIMDYCKKEWRGNTQKATCMKMGYEEVSQKFTSIRRVRGDNYCALRATLFQAMSQAVGLPPWLQDPELMLLPEKLISKYNWIKQWKLGLKFDGKNEDLVDKIKESLTLLRKKWAGLAEMRTAEARQIACDELFTNEAEEYSLYEAVKFLMLNRAIELYNDKEKGKEVPFFSVLLFARDTSNDPGQLLRNHLNQVGHTGGLEQVEMFLLAYAVRHTIQVYRLSKYNTEEFITVYPTDPPKDWPVVTLIAEDDRHYNIPVRVCEETSL

SEQ ID NO: 2795 - protein, 392 aa, Homo sapiens
MSLAHTAAEYMLSDALLPDRRGPRLKGLRLELPLDRIVKFVAVGSPLLLMSLAFAQEFSSGSPISCFSPSNFSIRQAAYVDSSCWDSLLHHKQDGPGQDKMKSLWPHKALPYSLLALALLMYLPVLLWQYAAVPALSSDLLFIISELDKSYNRSIRLVQHMLKIRQKSSDPYVFWNELEKARKERYFEFPLLERYLACKQRSHSLVATYLLRNSLLLIFTSATYLYLGHFHLDVFFQEEFSCSIKTGLLSDETHVPNLITCRLTSLSIFQIVSLSSVAIYTILVPVIIYNLTRLCRWDKRLLSVYEMLPAFDLLSRKMLGCPINDLNVILLFLRANISELISFSWLSVLCVLKDTTTQKHNIDTVVDFMTLLAGLEPSKPKHLTNSACDEHP

SEQ ID NO: 2796 - protein, 360 aa, Homo sapiens
MDPEETSVYLDYYYATSPNSDIRETHSHVPYTSVFLPVFYTAVFLTGVLGNLVLMGALHFKPGSRRLIDIFIINLAASDFIFLVTLPLWVDKEASLGLWRTGSFLCKGSSYMISVNMHCSVLLLTCMSVDRYLAIVWPVVSRKFRRTDCAYVVCASIWFISCLLGLPTLLSRELTLIDDKPYCAEKKATPIKLIWSLVALIFTFFVPLLSIVTCYCCIARKLCAHYQQSGKHNKKLKKSIKIIFIVVAAFLVSWLPFNTFKFLAIVSGLRQEHYLPSAILQLGMEVSGPLAFANSCVNPFIYYIFDSYIRRAIVHCLCPCLKNYDFGSSTETSDSHLTKALSTFIHAEDFARRRKRSVSL

SEQ ID NO: 2797 - protein, 608 aa, Homo sapiens
MAASKPVEAAVVAAAVPSSGSGVGGGGTAGPGTGGLPRWQLALAVGAPLLLGAGAIYLWSRQQRRREARGRGDASGLKRNSERKTPEGRASPAPGSGHPEGPGAHLDMNSLDRAQAAKNKGNKYFKAGKYEQAIQCYTEAISLCPTEKNVDLSTFYQNRAAAFEQLQKWKEVAQDCTKAVELNPKYVKALFRRAKAHEKLDNKKECLEDVTAVCILEGFQNQQSMLLADKVLKLLGKEKAKEKYKNREPLMPSPQFIKSYFSSFTDDIISQPMLKGEKSDEDKDKEGEALEVKENSGYLKAKQYMEEENYDKIISECSKEIDAEGKYMAEALLLRATFYLLIGNANAAKPDLDKVISLKEANVKLRANALIKRGSMYMQQQQPLLSTQDFNMAADIDPQNADVYHHRGQLKILLDQVEEAVADFDECIRLRPESALAQAQKCFALYRQAYTGNNSSQIQAAMKGFEEVIKKFPRCAEGYALYAQALTDQQQFGKADEMYDKCIDLEPDNATTYVHKGLLQLQWKQDLDRGLELISKAIEIDNKCDFAYETMGTIEVQRGNMEKAIDMFNKAINLAKSEMEMAHLYSLCDAAHAQTEVAKKYGLKPPTL

SEQ ID NO: 2798 - protein, 1075 aa, Homo sapiens
MRGGKCNMLSSLGCLLLCGSITLALGNAQKLPKGKRPNLKVHINTTSDSILLKFLRPSPNVKLEGLLLGYGSNVSPNQYFPLPAEGKFTEAIVDAEPKYLIVVRPAPPPSQKKSCSGKTRSRKPLQLVVGTLTPSSVFLSWGFLINPHHDWTLPSHCPNDRFYTIRYREKDKEKKWIFQICPATETIVENLKPNTVYEFGVKDNVEGGIWSKIFNHKTVVGSKKVNGKIQSTYDQDHTVPAYVPRKLIPITIIKQVIQNVTHKDSAKSPEKAPLGGVILVHLIIPGLNETTVKLPASLMFEISDALKTQLAKNETLALPAESKTPEVEKISARPTTVTPETVPRSTKPTTSSALDVSETTLASSEKPWIVPTAKISEDSKVLQPQTATYDVFSSPTTSDEPEISDSYTATSDRILDSIPPKTSRTLEQPRATLAPSETPFVPQKLEIFTSPEMQPTTPAPQQTTSIPSTPKRRPRPKPPRTKPERTTSAGTITPKISKSPEPTWTTPAPGKTQFISLKPKIPLSPEVTHTKPAPKQTPRAPPKPKTSPRPRIPQTQPVPKVPQRVTAKPKTSPSPEVSYTTPAPKDVLLPHKPYPEVSQSEPAPLETRGIPFIPMISPSPSQEELQTTLEETDQSTQEPFTTKIPRTTELAKTTQAPHRFYTTVRPRTSDKPHIRPGVKQAPRPSGADRNVSVDSTHPTKKPGTRRPPLPPRPTHPRRKPLPPNNVTGKPGSAGIISSGPITTPPLRSTPRPTGTPLERIETDIKQPTVPASGEELENITDFSSSPTRETDPLGKPRFKGPHVRYIQKPDNSPCSITDSVKRFPKEEATEGNATSPPQNPPTNLTVVTVEGCPSFVILDWEKPLNDTVTEYEVISRENGSFSGKNKSIQMTNQTFSTVENLKPNTSYEFQVKPKNPLGEGPVSNTVAFSTESADPRVSEPVSAGRDAIWTERPFNSDSYSECKGKQYVKRTWYKKFVGVQLCNSLRYKIYLSDSLTGKFYNIGDQRGHGEDHCQFVDSFLDGRTGQQLTSDQLPIKEGYFRAVRQEPVQFGEIGGHTQINYVQWYECGTTIPGKW

SEQ ID NO: 2799 - protein, 852 aa, Homo sapiens
MMPGPRPRKGPQARGQGVAAAKQMGLFMEFGPEDMLLGMDEAEDDEDLEAELLALTGEAQTTGKKPAPKGQAPLPMAHIEKLAADCMRDVEEEEEEEGLEEDAELLTELQEVLGVDEETEPLDGDEVADPGGSEEENGLEDTEPPVQTAVLTASAPAAQAGASQGLHALLEERIHNYREAAASAKEAGEAAKARRCERGLKTLESQLASVRRGRKINEDEIPPPVALGKRPLAPQEPANRSPETDPPAPPALESDNPSQPETSLPGISAQPVSDLDPDPRALLSSRQREYKVAALSAKRAGELDRARELMRIGKRFGAVLEALEKGQPVDLSAMPPAPEDLKPQQASQAPTAPSVIPPAVERVQPVMAPDVPATPVAPTESQTVLDALQQRLNKYREAGIQARSGGDERKARMHERIAKQYQDAIRAHRAGRKVNFAELPVPPGFPPIPGLESTMGVEEDAVAATLAAAEKLASAEDSAPADKDEDEGEPPAQAPVAKKPARPTVPSSQRLPEPRASSSKESPSPSVREQLALLEARKLQYQRAALQAKRSQDLEQAKAYLRVAKWLEAQIIQARSGRPVDLSKVPSPLTDEEGDFILIHHEDLRLSQKAEEVYAQLQKMLLEQQEKCLLFSKQFMHQGNVAETTRFEKLAQDRKKQLEILQLAQAQGLDPPTHHFELKTFQTVRIFSELNSTEMHLIIVRGMNLPAPPGVTPDDLDAFVRFEFHYPNSDQAQKSKTAVVKNTNSPEFDQLFKLNINRNHRGFKRVIQSKGIKFEIFHKGSFFRSDKLVGTAHLKLERLENECEIREIVEVLDGRKPTGGKLEVKVRLREPLSGQDVQMVTENWLVLEPRGL

SEQ ID NO: 2800 - protein, 383 aa, Homo sapiens
MFWTFKEWFWLERFWLPPTIKWSDLEDHDGLVFVKPSHLYVTIPYAFLLLIIRRVFEKFVASPLAKSFGIKETVRKVTPNTVLENFFKHSTRQPLQTDIYGLAKKCNLTERQVERWFRSRRNQERPSRLKKFQEACWRFAFYLMITVAGIAFLYDKPWLYDLWEVWNGYPKQPLLPSQYWYYILEMSFYWSLLFRLGFDVKRKDFLAHIIHHLAAISLMSFSWCANYIRSGTLVMIVHDVADIWLESAKMFSYAGWTQTCNTLFFIFSTIFFISRLIVFPFWILYCTLILPMYHLEPFFSYIFLNLQLMILQVLHLYWGYYILKMLNRCIFMKSIQDVRSDDEDYEEEEEEEEEEATKGKEMDCLKNGLRAERHLIPNGQHGH

SEQ ID NO: 2801 - protein, 1617 aa, Homo sapiens
MNMKQKSVYQQTKALLCKNFLKKWRMKRESLLEWGLSILLGLCIALFSSSMRNVQFPGMAPQNLGRVDKFNSSSLMVVYTPISNLTQQIMNKTALAPLLKGTSVIGAPNKTHMDEILLENLPYAMGIIFNETFSYKLIFFQGYNSPLWKEDFSAHCWDGYGEFSCTLTKYWNRGFVALQTAINTAIIEITTNHPVMEELMSVTAITMKTLPFITKNLLHNEMFILFFLLHFSPLVYFISLNVTKERKKSKNLMKMMGLQDSAFWLSWGLIYAGFIFIISIFVTIIITFTQIIVMTGFMVIFILFFLYGLSLVALVFLMSVLLKKAVLTNLVVFLLTLFWGCLGFTVFYEQLPSSLEWILNICSPFAFTTGMIQIIKLDYNLNGVIFPDPSGDSYTMIATFSMLLLDGLIYLLLALYFDKILPYGDERHYSPLFFLNSSSCFQHQRTNAKVIEKEIDAEHPSDDYFEPVAPEFQGKEAIRIRNVKKEYKGKSGKVEALKGLLFDIYEGQITAILGHSGAGKSSLLNILNGLSVPTEGSVTIYNKNLSEMQDLEEIRKITGVCPQFNVQFDILTVKENLSLFAKIKGIHLKEVEQEVQRILLELDMQNIQDNLAKHLSEGQKRKLTFGITILGDPQILLLDEPTTGLDPFSRDQVWSLLRERRADHVILFSTQSMDEADILADRKVIMSNGRLKCAGSSMFLKRRWGLGYHLSLHRNEICNPEQITSFITHHIPDAKLKTENKEKLVYTLPLERTNTFPDLFSDLDKCSDQGVTGYDISMSTLNEVFMKLEGQSTIEQDFEQVEMIRDSESLNEMELAHSSFSEMQTAVSDMGLWRMQVFAMARLRFLKLKRQTKVLLTLLLVFGIAIFPLIVENIMYAMLNEKIDWEFKNELYFLSPGQLPQEPRTSLLIINNTESNIEDFIKSLKHQNILLEVDDFENRNGTDGLSYNGAIIVSGKQKDYRFSVVCNTKRLHCFPILMNIISNGLLQMFNHTQHIRIESSPFPLSHIGLWTGLPDGSFFLFLVLCSISPYITMGSISDYKKNAKSQLWISGLYTSAYWCGQALVDVSFFILILLLMYLIFYIENMQYLLITSQIVFALVIVTPGYAASLVFFIYMISFIFRKRRKNSGLWSFYFFFASTIMFSITLINHFDLSILITTMVLVPSYTLLGFKTFLEVRDQEHYREFPEANFELSATDFLVCFIPYFQTLLFVFVLRCMELKCGKKRMRKDPVFRISPQSRDAKPNPEEPIDEDEDIQTERIRTATALTTSILDEKPVIIASCLHKEYAGQKKSCFSKRKKKIAARNISFCVQEGEILGLLGPNGAGKSSSIRMISGITKPTAGEVELKGCSSVLGHLGYCPQENVLWPMLTLREHLEVYAAVKGLRKADARLAIARLVSAFKLHEQLNVPVQKLTAGITRKLCFVLSLLGNSPVLLLDEPSTGIDPTGQQQMWQAIQAVVKNTERGVLLTTHNLAEAEALCDRVAIMVSGRLRCIGSIQHLKNKLGKDYILELKVKETSQVTLVHTEILKLFPQAAGQERYSSLLTYKLPVADVYPLSQTFHKLEAVKHNFNLEEYSLSQCTLEKVFLELSKEQEVGNFDEEIDTTMRWKLLPHSDEP

SEQ ID NO: 2802 - protein, 1524 aa, Homo sapiens
MAMSNGNNDFVVLSNSSIATSAANPSPLTPCDGDHAAQQLTPKEATRTKVSPNGCLQLNGTVKSSFLPLDNQRMPQMLPQCCHPCPYHHPLTSHSSHQECHPEAGPAAPSALASCCMQPHSEYSASLCPNHSPVYQTTCCLQPSPSFCLHHPWPDHFQHQPVQQHIANIRPSRPFKLPKSYAALIADWPVVVLGMCTMFIVVCALVGVLVPELPDFSDPLLGFEPRGTAIGQRLVTWNNMVKNTGYKATLANYPFKYADEQAKSHRDDRWSDDHYEREKREVDWNFHKDSFFCDVPSDRYSRVVFTSSGGETLWNLPAIKSMCNVDNSRIRSHPQFGDLCQRTTAASCCPSWTLGNYIAILNNRSSCQKIVERDVSHTLKLLRTCAKHYQNGTLGPDCWDMAARRKDQLKCTNVPRKCTKYNAVYQILHYLVDKDFMTPKTADYATPALKYSMLFSPTEKGESMMNIYLDNFENWNSSDGVTTITGIEFGIKHSLFQDYLLMDTVYPAIAIVIVLLVMCVYTKSMFITLMTMFAIISSLIVSYFLYRVVFHFEFFPFMNLTALIILVGIGADDAFVLCDVWNYTKFDKPHAETSETVSITLQHAALSMFVTSFTTAAAFYANYVSNITAIRCFGVYAGTAILVNYVLMVTWLPAVVVLHERYLLNIFTCFKKPQQQIYDNKSCWTVACQKCHKVLFAISEASRIFFEKVLPCIVIKFRYLWLFWFLALTVGGAYIVCINPKMKLPSLELSEFQVFRSSHPFERYDAEYKKLFMFERVHHGEELHMPITVIWGVSPEDNGNPLNPKSKGKLTLDSSFNIASPASQAWILHFCQKLRNQTFFYQTDEQDFTSCFIETFKQWMENQDCDEPALYPCCSHWSFPYKQEIFELCIKRAIMELERSTGYHLDSKTPGPRFDINDTIRAVVLEFQSTYLFTLAYEKMHQFYKEVDSWISSELSSAPEGLSNGWFVSNLEFYDLQDSLSDGTLIAMGLSVAVAFSVMLLTTWNIIISLYAIISIAGTIFVTVGSLVLLGWELNVLESVTISVAVGLSVDFAVHYGVAYRLAPDPDREGKVIFSLSRVGSAMAMAALTTFVAGAMMMPSTVLAYTQLGTFMMLIMCISWAFATFFFQCMCRCLGPQGTCGQIPLPKKLQCSAFSHALSTSPSDKGQSKTHTINAYHLDPRGPKSELEHEFYELEPLASHSCTAPEKTTYEETHICSEFFNSQAKNLGMPVHAAYNSELSKSTESDAGSALLQPPLEQHTVCHFFSLNQRCSCPDAYKHLNYGPHSCQQMGDCLCHQCSPTTSSFVQIQNGVAPLKATHQAVEGFVHPITHIHHCPCLQGRVKPAGMQNSLPRNFFLHPVQHIQAQEKIGKTNVHSLQRSIEEHLPKMAEPSSFVCRSTGSLLKTCCDPENKQRELCKNRDVSNLESSGGTENKAGGKVELSLSQTDASVNSEHFNQNEPKVLFNHLMGEAGCRSCPNNSQSCGRIVRVKCNSVDCQMPNMEANVPAVLTHSELSGESLLIKTL

SEQ ID NO: 2803 - protein, 1352 aa, Homo sapiens
MASDSPARSLDEIDLSALRDPAGIFELVELVGNGTYGQVYKGRHVKTGQLAAIKVMDVTGDEEEEIKQEINMLKKYSHHRNIATYYGAFIKKNPPGMDDQLWLVMEFCGAGSVTDLIKNTKGNTLKEEWIAYICREILRGLSHLHQHKVIHRDIKGQNVLLTENAEVKLVDFGVSAQLDRTVGRRNTFIGTPYWMAPEVIACDENPDATYDFKSDLWSLGITAIEMAEGAPPLCDMHPMRALFLIPRNPAPRLKSKKWSKKFQSFIESCLVKNHSQRPATEQLMKHPFIRDQPNERQVRIQLKDHIDRTKKKRGEKDETEYEYSGSEEEEEENDSGEPSSILNLPGESTLRRDFLRLQLANKERSEALRRQQLEQQQRENEEHKRQLLAERQKRIEEQKEQRRRLEEQQRREKELRKQQEREQRRHYEEQMRREEERRRAEHEQEYIRRQLEEEQRQLEILQQQLLHEQALLLEYKRKQLEEQRQAERLQRQLKQERDYLVSLQHQRQEQRPVEKKPLYHYKEGMSPSEKPAWAKEVEERSRLNRQSSPAMPHKVANRISDPNLPPRSESFSISGVQPARTPPMLRPVDPQIPHLVAVKSQGPALTASQSVHEQPTKGLSGFQEALNVTSHRVEMPRQNSDPTSENPPLPTRIEKFDRSSWLRQEEDIPPKVPQRTTSISPALARKNSPGNGSALGPRLGSQPIRASNPDLRRTEPILESPLQRTSSGSSSSSSTPSSQPSSQGGSQPGSQAGSSERTRVRANSKSEGSPVLPHEPAKVKPEESRDITRPSRPADLTALAKELRELRIEETNRPMKKVTDYSSSSEESESSEEEEEDGESETHDGTVAVSDIPRLIPTGAPGSNEQYNVGMVGTHGLETSHADSFSGSISREGTLMIRETSGEKKRSGHSDSNGFAGHINLPDLVQQSHSPAGTPTEGLGRVSTHSQEMDSGTEYGMGSSTKASFTPFVDPRVYQTSPTDEDEEDEESSAAALFTSELLRQEQAKLNEARKISVVNVNPTNIRPHSDTPEIRKYKKRFNSEILCAALWGVNLLVGTENGLMLLDRSGQGKVYNLINRRRFQQMDVLEGLNVLVTISGKKNKLRVYYLSWLRNRILHNDPEVEKKQGWITVGDLEGCIHYKVVKYERIKFLVIALKNAVEIYAWAPKPYHKFMAFKSFADLQHKPLLVDLTVEEGQRLKVIFGSHTGFHVIDVDSGNSYDIYIPSHIQGNITPHAIVILPKTDGMEMLVCYEDEGVYVNTYGRITKDVVLQWGEMPTSVAYIHSNQIMGWGEKAIEIRSVETGHLDGVFMHKRAQRLKFLCERNDKVFFASVRSGGSSQVFFMTLNRNSMMNW

SEQ ID NO: 2804 - protein, 1192 aa, Homo sapiens
MFCSEKKLREVERIVKANDREYNEKFQYADNRIHTSKYNILTFLPINLFEQFQRVANAYFLCLLILQLIPEISSLTWFTTIVPLVLVITMTAVKDATDDYFRHKSDNQVNNRQSEVLINSKLQNEKWMNVKVGDIIKLENNQFVAADLLLLSSSEPHGLCYVETAELDGETNLKVRHALSVTSELGADISRLAGFDGIVVCEVPNNKLDKFMGILSWKDSKHSLNNEKIILRGCILRNTSWCFGMVIFAGPDTKLMQNSGKTKFKRTSIDRLMNTLVLWIFGFLICLGIILAIGNSIWESQTGDQFRTFLFWNEGEKSSVFSGFLTFWSYIIILNTVVPISLYVSVEVIRLGHSYFINWDRKMYYSRKAIPAVARTTTLNEELGQIEYIFSDKTGTLTQNIMTFKRCSINGRIYGEVHDDLDQKTEITQEKEPVDFSVKSQADREFQFFDHHLMESIKMGDPKVHEFLRLLALCHTVMSEENSAGELIYQVQSPDEGALVTAARNFGFIFKSRTPETITIEELGTLVTYQLLAFLDFNNTRKRMSVIVRNPEGQIKLYSKGADTILFEKLHPSNEVLLSLTSDHLSEFAGEGLRTLAIAYRDLDDKYFKEWHKMLEDANAATEERDERIAGLYEEIERDLMLLGATAVEDKLQEGVIETVTSLSLANIKIWVLTGDKQETAINIGYACNMLTDDMNDVFVIAGNNAVEVREELRKAKQNLFGQNRNFSNGHVVCEKKQQLELDSIVEETITGDYALIINGHSLAHALESDVKNDLLELACMCKTVICCRVTPLQKAQVVELVKKYRNAVTLAIGDGANDVSMIKSAHIGVGISGQEGLQAVLASDYSFAQFRYLQRLLLVHGRWSYFRMCKFLCYFFYKNFAFTLVHFWFGFFCGFSAQTVYDQWFITLFNIVYTSLPVLAMGIFDQDVSDQNSVDCPQLYKPGQLNLLFNKRKFFICVLHGIYTSLVLFFIPYGAFYNVAGEDGQHIADYQSFAVTMATSLVIVVSVQIALDTSYWTFINHVFIWGSIAIYFSILFTMHSNGIFGIFPNQFPFVGNARHSLTQKCIWLVILLTTVASVMPVVAFRFLKVDLYPTLSDQIRRWQKAQKKARPPSSRRPRTRRSSSRRSGYAFAHQEGYGELITSGKNMRAKNPPPTSGLEKTHYNSTSWIENLCKKTTDTVSSFSQDKTVKL

SEQ ID NO: 2805 - protein, 6620 aa, Homo sapiens
MDQPQFSGAPRFLTRPKAFVVSVGKDATLSCQIVGNPTPQVSWEKDQQPVAAGARFRLAQDGDLYRLTILDLALGDSGQYVCRARNAIGEAFAAVGLQVDAEAACAEQAPHFLLRPTSIRVREGSEATFRCRVGGSPRPAVSWSKDGRRLGEPDGPRVRVEELGEASALRIRAARPRDGGTYEVRAENPLGAASAAAALVVDSDAADTASRPGTSTAALLAHLQRRREAMRAEGAPASPPSTGTRTCTVTEGKHARLSCYVTGEPKPETVWKKDGQLVTEGRRHVVYEDAQENFVLKILFCKQSDRGLYTCTASNLVGQTYSSVLVVVREPAVPFKKRLQDLEVREKESATFLCEVPQPSTEAAWFKEETRLWASAKYGIEEEGTERRLTVRNVSADDDAVYICETPEGSRTVAELAVQGNLLRKLPRKTAVRVGDTAMFCVELAVPVGPVHWLRNQEEVVAGGRVAISAEGTRHTLTISQCCLEDVGQVAFMAGDCQTSTQFCVSAPRKPPLQPPVDPVVKARMESSVILSWSPPPHGERPVTIDGYLVEKKKLGTYTWIRCHEAEWVATPELTVADVAEEGNFQFRVSALNSFGQSPYLEFPGTVHLAPKLAVRTPLKAVQAVEGGEVTFSVDLTVASAGEWFLDGQALKASSVYEIHCDRTRHTLTIREVPASLHGAQLKFVANGIESSIRMEVRAAPGLTANKPPAAAAREVLARLHEEAQLLAELSDQAAAVTWLKDGRTLSPGPKYEVQASAGRRVLLVRDVARDDAGLYECVSRGGRIAYQLSVQGLARFLHKDMAGSCVDAVAGGPAQFECETSEAHVHVHWYKDGMELGHSGERFLQEDVGTRHRLVAATVTRQDEGTYSCRVGEDSVDFRLRVSEPKVVFAKEQLARRKLQAEAGASATLSCEVAQAQTEVTWYKDGKKLSSSSKVCMEATGCTRRLVVQQAGQADAGEYSCEAGGQRLSFHLDVKEPKVVFAKDQVAHSEVQAEAGASATLSCEVAQAQTEVMWYKDGKKLSSSLKVHVEAKGCRRRLVVQQAGKTDAGDYSCEARGQRVSFRLHITEPKMMFAKEQSVHNEVQAEAGASAMLSCEVAQAQTEVTWYKDGKKLSSSSKVGMEVKGCTRRLVLPQAGKADAGEYSCEAGGQRVSFHLHITEPKGVFAKEQSVHNEVQAEAGTTAMLSCEVAQPQTEVTWYKDGKKLSSSSKVRMEVKGCTRRLVVQQVGKADAGEYSCEAGGQRVSFQLHITEPKAVFAKEQLVHNEVRTEAGASATLSCEVAQAQTEVTWYKDGKKLSSSSKVRIEAAGCMRQLVVQQAGQADAGEYTCEAGGQRLSFHLDVSEPKAVFAKEQLAHRKVQAEAGAIATLSCEVAQAQTEVTWYKDGKKLSSSSKVRMEAVGCTRRLVVQQACQADTGEYSCEAGGQRLSFSLDVAEPKVVFAKEQPVHREVQAQAGASTTLSCEVAQAQTEVMWYKDGKKLSFSSKVRMEAVGCTRRLVVQQAGQAVAGEYSCEAGSQRLSFHLHVAEPKAVFAKEQPASREVQAEAGTSATLSCEVAQAQTEVTWYKDGKKLSSSSKVRMEAVGCTRRLVVQEAGQADAGEYSCKAGDQRLSFHLHVAEPKVVFAKEQPAHREVQAEAGASATLSCEVAQAQTEVTWYKDGKKLSSSSKVRVEAVGCTRRLVVQQAGQAEAGEYSCEAGGQQLSFRLQVAELEPQISERPCRREPLVVKEHEDIILTATLATPSAATVTWLKDGVEIRRSKRHETASQGDTHTLTVHGAQVLDSAIYSCRVGAEGQDFPVQVEEVAAKFCRLLEPVCGELGGTVTLACELSPACAEVVWRCGNTQLRVGKRFQMVAEGPVRSLTVLGLRAEDAGEYVCESRDDHTSAQLTVSVPRVVKFMSGLSTVVAEEGGEATFQCVVSPSDVAVVWFRDGALLQPSEKFAISQSGASHSLTISDLVLEDAGQITVEAEGASSSAALRVREAPVLFKKKLEPQTVEERSSVTLEVELTRPWPELRWTRNATALAPGKNVEIHAEGARHRLVLHNVGFADRGFFGCETPDDKTQAKLTVEMRQVRLVRGLQAVEAREQGTATMEVQLSHADVDGSWTRDGLRFQQGPTCHLAVRGPMHTLTLSGLRPEDSGLMVFKAEGVHTSARLVVTELPVSFSRPLQDVVTTEKEKVTLECELSRPNVDVRWLKDGVELRAGKTMAIAAQGACRSLTIYRCEFADQGVYVCDAHDAQSSASVKVQGRTYTLIYRRVLAEDAGEIQFVAENAESRAQLRVKELPVTLVRPLRDKIAMEKHRGVLECQVSRASAQVRWFKGSQELQPGPKYELVSDGLYRKLIISDVHAEDEDTYTCDAGDVKTSAQFFVEEQSITIVRGLQDVTVMEPAPAWFECETSIPSVRPPKWLLGKTVLQAGGNVGLEQEGTVHRLMLRRTCSTMTGPVHFTVGKSRSSARLVVSDIPVVLTRPLEPKTGRELQSVVLSCDFRPAPKAVQWYKDDTPLSPSEKFKMSLEGQMAELRILRLMPADAGVYRCQAGSAHSSTEVTVEAREVTVTGPLQDAEATEEGWASFSCELSHEDEEVEWSLNGMPLYNDSFHEISHKGRRHTLVLKSIQRADAGIVRASSLKVSTSARLEVRVKPVVFLKALDDLSAEERGTLALQCEVSDPEAHVVWRKDGVQLGPSDKYDFLHTAGTRGLVVHDVSPEDAGLYTCHVGSEETRARVRVHDLHVGITKRLKTMEVLEGESCSFECVLSHESASDPAMWTVGGKTVGSSSRFQATRQGRKYILVVREAAPSDAGEVVFSVRGLTSKASLIVRERPAAIIKPLEDQWVAPGEDVELRCELSRAGTPVHWLKDRKAIRKSQKYDVVCEGTMAMLVIRGASLKDAGEYTCEVEASKSTASLHVEEKANCFTEELTNLQVEEKGTAVFTCKTEHPAATVTWRKGLLELRASGKHQPSQEGLTLRLTISALEKADSDTYTCDIGQAQSRAQLLVQGRRVHIIEDLEDVDVQEGSSATFRCRISPANYEPVHWFLDKTPLHANELNEIDAQPGGYHVLTLRQLALKDSGTIYFEAGDQRASAALRVTEKPSVFSRELTDATITEGEDLTLVCETSTCDIPVCWTKDGKTLRGSARCQLSHEGHRAQLLITGATLQDSGRYKCEAGGACSSSIVRVHARPVRFQEALKDLEVLEGGAATLRCVLSSVAAPVKWCYGNNVLRPGDKYSLRQEGAMLELVVRNLRPQDSGRYSCSFGDQTTSATLTVTALPAQFIGKLRNKEATEGATATLRCELSKAAPVEWRKGSETLRDGDRYCLRQDGAMCELQIRGLAMVDAAEYSCVCGEERTSASLTIRPMPAHFIGRLRHQESIEGATATLRCELSKAAPVEWRKGRESLRDGDRHSLRQDGAVCELQICGLAVADAGEYSCVCGEERTSATLTVKALPAKFTEGLRNEEAVEGATAMLWCELSKVAPVEWRKGPENLRDGDRYILRQEGTRCELQICGLAMADAGEYLCVCGQERTSATLTIRALPARFIEDVKNQEAREGATAVLQCELNSAAPVEWRKGSETLRDGDRYSLRQDGTKCELQIRGLAMADTGEYSCVCGQERTSAMLTVRALPIKFTEGLRNEEATEGATAVLRCELSKMAPVEWWKGHETLRDGDRHSLRQDGARCELQIRGLVAEDAGEYLCMCGKERTSAMLTVRAMPSKFIEGLRNEEATEGDTATLWCELSKAAPVEWRKGHETLRDGDRHSLRQDGSRCELQIRGLAVVDAGEYSCVCGQERTSATLTVRALPARFIEDVKNQEAREGATAVLQCELSKAAPVEWRKGSETLRGGDRYSLRQDGTRCELQIHGLSVADTGEYSCVCGQERTSATLTVRAPQPVFREPLQSLQAEEGSTATLQCELSEPTATVVWSKGGLQLQANGRREPRLQGCTAELVLQDLQREDTGEYTCTCGSQATSATLTVTAAPVRFLRELQHQEVDEGGTAHLCCELSRAGASVEWRKGSLQLFPCAKYQMVQDGAAAELLVRGVEQEDAGDYTCDTGHTQSMASLSVRVPRPKFKTRLQSLEQETGDIARLCCQLSDAESGAVVQWLKEGVELHAGPKYEMRSQGATRELLIHQLEAKDTGEYACVTGGQKTAASLRVTEPEVTIVRGLVDAEVTADEDVEFSCEVSRAGATGVQWCLQGLPLQSNEVTEVAVRDGRIHTLRLKGVTPEDAGTVSFHLGNHASSAQLTVRAPEVTILEPLQDVQLSEGQDASFQCRLSRASGQEARWALGGVPLQANEMNDITVEQGTLHLLTLHKVTLEDAGTVSFHVGTCSSEAQLKVTAKNTVVRGLENVEALEGGEALFECQLSQPEVAAHTWLLDDEPVHTSENAEVVFFENGLRHLLLLKNLRPQDSCRVTFLAGDMVTSAFLTVRGWRLEILEPLKNAAVRAGAQACFTCTLSEAVPVGEASWYINGAAVQPDDSDWTVTADGSHHALLLRSAQPHHAGEVTFACRDAVASARLTVLGLPDPPEDAEVVARSSHTVTLSWAAPMSDGGGGLCGYRVEVKEGATGQWRLCHELVPGPECVVDGLAPGETYRFRVAAVGPVGAGEPVHLPQTVRLAEPPKPVPPQPSAPESRQVAAGEDVSLELEVVAEAGEVIWHKGMERIQPGGRFEVVSQGRQQMLVIKGFTAEDQGEYHCGLAQGSICPAAATFQVALSPASVDEAPQPSLPPEAAQEGDLHLLWEALARKRRMSREPTLDSISELPEEDGRSQRLPQEAEEVAPDLSEGYSTADELARTGDADLSHTSSDDESRAGTPSLVTYLKKAGRPGTSPLASKVGAPAAPSVKPQQQQEPLAAVRPPLGDLSTKDLGDPSMDKAAVKIQAAFKGYKVRKEMKQQEGPMFSHTFGDTEAQVGDALRLECVVASKADVRARWLKDGVELTDGRHHHIDQLGDGTCSLLITGLDRADAGCYTCQVSNKFGQVTHSACVVVSGSESEAESSSGGELDDAFRRAARRLHRLFRTKSPAEVSDEELFLSADEGPAEPEEPADWQTYREDEHFICIRFEALTEARQAVTRFQEMFATLGIGVEIKLVEQGPRRVEMCISKETPAPVVPPEPLPSLLTSDAAPVFLTELQNQEVQDGYPVSFDCVVTGQPMPSVRWFKDGKLLEEDDHYMINEDQQGGHQLIITAVVPADMGVYRCLAENSMGVSSTKAELRVDLTSTDYDTAADATESSSYFSAQGYLSSREQEGTESTTDEGQLPQVVEELRDLQVAPGTRLAKFQLKVKGYPAPRLYWFKDGQPLTASAHIRMTDKKILHTLEIISVTREDSGQYAAYISNAMGAAYSSARLLVRGPDEPEEKPASDVHEQLVPPRMLERFTPKKVKKGSSITFSVKVEGRPVPTVHWLREEAERGVLWIGPDTPGYTVASSAQQHSLVLLDVGRQHQGTYTCIASNAAGQALCSASLHVSGLPKVEEQEKVKEALISTFLQGTTQAISAQGLETASFADLGGQRKEEPLAAKEALGHLSLAEVGTEEFLQKLTSQITEMVSAKITQAKLQVPGGDSDEDSKTPSASPRHGRSRPSSSIQESSSESEDGDARGEIFDIYVVTADYLPLGAEQDAITLREGQYVEVLDAAHPLRWLVRTKPTKSSPSRQGWVSPAYLDRRLKLSPEWGAAEAPEFPGEAVSEDEYKARLSSVIQELLSSEQAFVEELQFLQSHHLQHLERCPHVPIAVAGQKAVIFRNVRDIGRFHSSFLQELQQCDTDDDVAMCFIKNQAAFEQYLEFLVGRVQAESVVVSTAIQEFYKKYAEEALLAGDPSQPPPPPLQHYLEQPVERVQRYQALLKELIRNKARNRQNCALLEQAYAVVSALPQRAENKLHVSLMENYPGTLQALGEPIRQGHFIVWEGAPGARMPWKGHNRHVFLFRNHLVICKPRRDSRTDTVSYVFRNMMKLSSIDLNDQVEGDDRAFEVWQEREDSVRKYLLQARTAIIKSSWVKEICGIQQRLALPVWRPPDFEEELADCTAELGETVKLACRVTGTPKPVISWYKDGKAVQVDPHHILIEDPDGSCALILDSLTGVDSGQYMCFAASAAGNCSTLGKILVQVPPRFVNKVRASPFVEGEDAQFTCTIEGAPYPQIRWYKDGALLTTGNKFQTLSEPRSGLLVLVIRAASKEDLGLYECELVNRLGSARASAELRIQSPMLQAQEQCHREQLVAAVEVTEQETKVPKKTVIIEETITTVVKSPRGQRRSPSKSPSRSPSRCSASPLRPGLLAPDLLYLPGAGQPRRPEAEPGQKPVVPTLYVTEAEAHSPALPGLSGPQPKWVEVEETIEVRVKKMGPQGVSPTTEVPRSSSGHLFTLPGATPGGDPNSNNSNNKLLAQEAWAQGTAMVGVREPLVFRVDARGSVDWAASGMGSLEEEGTMEEAGEEEGEDGDAFVTEESQDTHSLGDRDPKILTHNGRMLTLADLEDYVPGEGETFHCGGPGPGAPDDPPCEVSVIQREIGEPTVGQPVLLSVGHALGPRGPLGLFRPEPRGASPPGPQVRSLEGTSFLLREAPARPVGSAPWTQSFCTRIRRSADSGQSSFTTELSTQTVNFGTVGETVTLHICPDRDGDEAAQP

SEQ ID NO: 2806 - protein, 222 aa, Homo sapiens
MAEKPKLHYSNARGSMESIRWLLAAAGVELEEKFLESAEDLDKLRNDGSLLFQQVPMVEIDGMKLVQTRAILNYIASKYNLYGKDMKERALIDMYTEGIVDLTEMILLLLICQPEERDAKTALVKEKIKNRYFPAFEKVLKSHRQDYLVGNKLSWADIHLVELFYYVEELDSSLISSFPLLKALKTRISNLPTVKKFLQPGSQRKPPMDEKSLEEARKIFRF

SEQ ID NO: 2807 - protein, 1122 aa, Homo sapiens
MEPSEVPSQISKDNFLEVPNLSDSLCEDEEVTFQPGFSPQPSRRGSDSSEDIYLDTPSSGTRRVSFADSFGFNLVSVKEFDCWELPSASTTFDLGTDIFHTEEYVLAPLFDLPSSKEDLMQQLQIQKAILESTESLLGSTSIKGIIRVLNVSFEKLVYVRMSLDDWQTHYDILAEYVPNSCDGETDQFSFKIVLVPPYQKDGSKVEFCIRYETSVGTFWSNNNGTNYTFICQKKEQEPEPVKPWKEVPNRQIKGCLKVKSSKEESSVTSEENNFENPKNTDTYIPTIICSHEDKEDLEASNRNVKDVNREHDEHNEKELELMINQHLIRTRSTASRDERNTFSTDPVNFPNKAEGLEKKQIHGEICTDLFQRSLSPSSSAESSVKGDFYCNEKYSSGDDCTHQPSEETTSNMGEIKPSLGDTSSDELVQLHTGSKEVLDDNANPAHGNGTVQIPCPSSDQLMAGNLNKKHEGGAKNIEVKDLGCLRRDFHSDTSACLKESTEEGSSKEDYYGNGKDDEEQRIYLGVNEKQRKNFQTILHDQERKMGNPKISVAGIGASNRDLATLLSEHTAIPTRAITADVSHSPRTNLSWEEAVLTPEHHHLTSEGSALGGITGQVCSSRTGNVLRNDYLFQVEEKSGGINSEDQDNSPQHKQSWNVLESQGKSRENKTNITEHIKGQTDCEDVWGKRDNTRSLKATTEELFTCQETVCCELSSLADHGITEKAEAGTAYIIKTTSESTPESMSAREKAIIAKLPQETARSDRPIEVKETAFDPHEGRNDDSHYTLCQRDTVGVIYDNDFEKESRLGICNVRVDEMEKEETMSMYNPRKTHDREKCGTGNITSVEESSWVITEYQKATSKLDLQLGMLPTDKTVFSENRDLRQVQELSKKTDSDAIVHSAFNSDTNRAPQNSSPFSKHHTEISVSTNEQAIAVENAVTTMASQPISTKSENICNSTREIQGIEKHPYPESKPEEVSRSSGIVTSGSRKERCIGQIFQTEEYSVEKSLGPMILINKPLENMEEARHENEGLVSSGQSLYTSGEKESDSSASTSLPVEESQAQGNESLFSKYTNSKIPYFLLFLIFLITVYHYDLMIGLTFYVLSLSWLSWEEGRQKESVKKK

SEQ ID NO: 2808 - protein, 475 aa, Homo sapiens
MAASALRGLPVAGGGESSESEDDGWEIGYLDRTSQKLKRLLPIEEKKEKFKKAMTIGDVSLVQELLDSGISVDSNFQYGWTPLMYAASVANAELVRVLLDRGANASFEKDKQSILITACSAHGSEEQILKCVELLLSRNADPNVACRRLMTPIMYAARDGHTQVVALLVAHGAEVNTQDENGYTALTWAARQGHKNIVLKLLELGANKMLQTKDGKMPSEIAKRNKHHEIFNLLSFTLNPLEGKLQQLTKEDTICKILTTDSDREKDHIFSSYTAFGDLEVFLHGLGLEHMTDLLKERDITLRHLLTMREDEFTKNGITSKDQQKILAALKELQVEEIQFGELSEETKLEISGDEFLNFLLKLNKQCGHLITAVQNVITELPVNSQKITLEWASPQNFTSVCEELVNNVEDLSEKVCKLKDLIQKLQNERENDPTHIQLREEVSTWNSRILKRTAITICGFGFLLFICKLTFQRK

SEQ ID NO: 2809 - protein, 606 aa, Homo sapiens
MDSQRELAEELRLYQSTLLQDGLKDLLDEKKFIDCTLKAGDKSLPCHRLILSACSPYFREYFLSEIDEAKKKEVVLDNVDPAILDLIIKYLYSASIDLNDGNVQDIFALASRFQIPSVFTVCVSYLQKRLAPGNCLAILRLGLLLDCPRLAISAREFVSDRFVQICKEEDFMQLSPQELISVISNDSLNVEKEEAVFEAVMKWVRTDKENRVKNLSEVFDCIRFRLMTEKYFKDHVEKDDIIKSNPDLQKKIKVLKDAFAGKLPEPSKNAAKTGAGEVNGDVGDEDLLPGYLNDIPRHGMFVKDLILLVNDTAAVAYDPTENECYLTALAEQIPRNHSSIVTQQNQIYVVGGLYVDEENKDQPLQSYFFQLDSIASEWVGLPPLPSARCLFGLGEVDDKIYVVAGKDLQTEASLDSVLCYDPVAAKWNEVKKLPIKVYGHNVISHKGMIYCLGGKTDDKKCTNRVFIFNPKKGDWKDLAPMKIPRSMFGVAVHKGKIVIAGGVTEDGLSASVEAFDLTTNKWDVMTEFPQERSSISLVSLAGSLYAIGGFAMIQLESKEFAPTEVNDIWKYEDDKKEWAGMLKEIRYASGASCLATRLNLFKLSKL

SEQ ID NO: 2810 - protein, 337 aa, Homo sapiens
MNSWDAGLAGLLVGTMGVSLLSNALVLLCLLHSADIRRQAPALFTLNLTCGNLLCTVVNMPLTLAGVVAQRQPAGDRLCRLAAFLDTFLAANSMLSMAALSIDRWVAVVFPLSYRAKMRLRDAALMVAYTWLHALTFPAAALALSWLGFHQLYASCTLCSRRPDERLRFAVFTGAFHALSFLLSFVVLCCTYLKVLKVARFHCKRIDVITMQTLVLLVDLHPSVRERCLEEQKRRRQRATKKISTFIGTFLVCFAPYVITRLVELFSTVPIGSHWGVLSKCLAYSKAASDPFVYSLLRHQYRKSCKEILNRLLHRRSIHSSGLTGDSHSQNILPVSE

SEQ ID NO: 2811 - protein, 699 aa, Homo sapiens
MLKLSGEGLRDSYHSRRDQIALKNLQSDVTEAKSDFTKETLASQNTKMISSIVISQMIDENKSRENRASLPLPCAIAQSRAHHAKQSLANRSGVNIHRAFALLPGRLGIPAPSDERGPEAELPPKEERPCGGPRRGFASITITARRVGPPARALVWGTAGDSLCPKCRAEDTLFQAPPALANGAHPGRHQRSFACTEFSRNSSVVRLKVPEAHTGLCERRKYWVTHADDKETSFSPDTPLSGKSPLVFSSCVHLRVSQQCPDSIYYVDKSLSVPIEPPQIASPKMHRSVLSLNLNCSSHRLTADGVDGLVNREPISEALKQELLEGDQDLVGQRWNPGLQESHLKETPSLRRVHLGTGACPWSGSFPLENTELANVGANQVTVRKGEKDHTTHCHASDHANQLSIHIPGWSYRAVHTKVFSGSSKRQQGEVCMTVSAPPVEQKPTRHFLPIGDSSPSDDCLSRDLSEPTERRHQSFLKPRILFPGFLCPLQDVCASLQEDNGVQIESKFPKGDYTCCDLVVKIKECKKSEDPTTPEPSPAAPSPAPRDGAGSPGLSEDCSESQQTPARSLTLQEALEVRKPQFISRSQERLKKLEHMVQQRKAQRKEDLRQKQSLLPIRTSKKQFTIPHPLSDNLFKPKERCISEKEMHMRSKRIYDNLPEVKKKKEEQRKRVILQSNRLRAEVFKKQLLDQLLQRNAV

SEQ ID NO: 2812 - protein, 1100 aa, Homo sapiens
MSYYQRPFSPSAYSLPASLNSSIVMQHGTSLDSTDTYPQHAQSLDGTTSSSIPLYRSSEEEKRVTVIKAPHYPGIGPVDESGIPTAIRTTVDRPKDWYKTMFKQIHMVHKPDDDTDMYNTPYTYNAGLYNPPYSAQSHPAAKTQTYRPLSKSHSDNSPNAFKDASSPVPPPHVPPPVPPLRPRDRSSTEKHDWDPPDRKVDTRKFRSEPRSIFEYEPGKSSILQHERPASLYQSSIDRSLERPMSSASMASDFRKRRKSEPAVGPPRGLGDQSASRTSPGRVDLPGSSTTLTKSFTSSSPSSPSRAKGGDDSKICPSLCSYSGLNGNPSSELDYCSTYRQHLDVPRDSPRAISFKNGWQMARQNAEIWSSTEETVSPKIKSRSCDDLLNDDCDSFPDPKVKSESMGSLLCEEDSKESCPMAWGSPYVPEVRSNGRSRIRHRSARNAPGFLKMYKKMHRINRKDLMNSEVICSVKSRILQYESEQQHKDLLRAWSQCSTEEVPRDMVPTRISEFEKLIQKSKSMPNLGDDMLSPVTLEPPQNGLCPKRRFSIEYLLEEENQSGPPARGRRGCQSNALVPIHIEVTSDEQPRAHVEFSDSDQDGVVSDHSDYIHLEGSSFCSESDFDHFSFTSSESFYGSSHHHHHHHHHHHRHLISSCKGRCPASYTRFTTMLKHERARHENTEEPRRQEMDPGLSKLAFLVSPVPFRRKKNSAPKKQTEKAKCKASVFEALDSALKDICDQIKAEKKRGSLPDNSILHRLISELLPDVPERNSSLRALRRSPLHQPLHPLPPDGAIHCPPYQNDCGRMPRSASFQDVDTANSSCHHQDRGGALQDRESPRSYSSTLTDMGRSAPRERRGTPEKEKLPAKAVYDFKAQTSKELSFKKGDTVYILRKIDQNWYEGEHHGRVGIFPISYVEKLTPPEKAQPARPPPPAQPGEIGEAIAKYNFNADTNVELSLRKGDRVILLKRVDQNWYEGKIPGTNRQGIFPVSYVEVVKKNTKGAEDYPDPPIPHSYSSDRIHSLSSNKPQRPVFTHENIQGGGEPFQALYNYTPRNEDELELRESDVIDVMEKCDDGWFVGTSRRTKFFGTFPGNYVKRL

SEQ ID NO: 2813 - protein, 1019 aa, Homo sapiens
MGSKRGISSRHHSLSSYEIMFAALFAILVVLCAGLIAVSCLTIKESQRGAALGQSHEARATFKITSGVTYNPNLQDKLSVDFKVLAFDLQQMIDEIFLSSNLKNEYKNSRVLQFENGSIIVVFDLFFAQWVSDENVKEELIQGLEANKSSQLVTFHIDLNSVDILDKLTTTSHLATPGNVSIECLPGSSPCTDALTCIKADLFCDGEVNCPDGSDEDNKMCATVCDGRFLLTGSSGSFQATHYPKPSETSVVCQWIIRVNQGLSIKLSFDDFNTYYTDILDIYEGVGSSKILRASIWETNPGTIRIFSNQVTATFLIESDESDYVGFNATYTAFNSSELNNYEKINCNFEDGFCFWVQDLNDDNEWERIQGSTFSPFTGPNFDHTFGNASGFYISTPTGPGGRQERVGLLSLPLDPTLEPACLSFWYHMYGENVHKLSINISNDQNMEKTVFQKEGNYGDNWNYGQVTLNETVKFKVAFNAFKNKILSDIALDDISLTYGICNGSLYPEPTLVPTPPPELPTDCGGPFELWEPNTTFSSTNFPNSYPNLAFCVWILNAQKGKNIQLHFQEFDLENINDVVEIRDGEEADSLLLAVYTGPGPVKDVFSTTNRMTVLLITNDVLARGGFKANFTTGYHLGIPEPCKADHFQCKNGECVPLVNLCDGHLHCEDGSDEADCVRFFNGTTNNNGLVRFRIQSIWHTACAENWTTQISNDVCQLLGLGSGNSSKPIFPTDGGPFVKLNTAPDGHLILTPSQQCLQDSLIRLQCNHKSCGKKLAAQDITPKIVGGSNAKEGAWPWVVGLYYGGRLLCGASLVSSDWLVSAAHCVYGRNLEPSKWTAILGLHMKSNLTSPQTVPRLIDEIVINPHYNRRRKDNDIAMMHLEFKVNYTDYIQPICLPEENQVFPPGRNCSIAGWGTVVYQGTTANILQEADVPLLSNERCQQQMPEYNITENMICAGYEEGGIDSCQGDSGGPLMCQENNRWFLAGVTSFGYKCALPNRPGVYARVSRFTEWIQSFLH

SEQ ID NO: 2814 - protein, 819 aa, Homo sapiens
ALLQVTISLSKVELSVGESKFFTCTAIGEPESIDWYNPQGEKIISTQRVVVQKEGVRSRLTIYNANIEDAGIYRCQATDAKGQTQEATVVLEIYQKLTFREVVSPQEFKQGEDAEVVCRVSSSPAPAVSWLYHNEEVTTISDNRFAMLANNNLQILNINKSDEGIYRCEGRVEARGEIDFRDIIVIVNVPPAISMPQKSFNATAERGEEMTFSCRASGSPEPAISWFRNGKLIEENEKYILKGSNTELTVRNIINSDGGPYVCRATNKAGEDEKQAFLQVFVQPHIIQLKNETTYENGQVTLVCDAEGEPIPEITWKRAVDGFTFTEGDKSLDGRIEVKGQHGSSSLHIKDVKLSDSGRYDCEAASRIGGHQKSMYLDIEYAPKFISNQTIYYSWEGNPINISCDVKSNPPASIHWRRDKLVLPAKNTTNLKTYSTGRKMILEIAPTSDNDFGRYNCTATNHIGTRFQEYILALADVPSSPYGVKIIELSQTTAKVSFNKPDSHGGVPIHHYQVDVKEVASEIWKIVRSHGVQTMVVLNNLEPNTTYEIRVAAVNGKGQGDYSKIEIFQTLPVREPSPPSIHGQPSSGKSFKLSITKQDDGGAPILEYIVKYRSKDKEDQWLEKKVQGNKDHIILEHLQWTMGYEVQITAANRLGYSEPTVYEFSMPPKPNIIKDTLFNGLGLGAVIGLGVAALLLILVVTDVSCFFIRQCGLLMCITRRMCGKKSGSSGKSKELEEGKAAYLKDGSKEPIVEMRTEDERVTNHEDGSPVNEPNETTPLTEPEKLPLKEEDGKEALNPETIEIKVSNDIIQSKEDDSKA

SEQ ID NO: 2815 - protein, 688 aa, Homo sapiens
MKPLSLLIEILIILGVTIKTIKAEEHNKRQKERNVTTQVSVNEIKQYLSHILEQRTSSNVINKRENLLEKKKNQRKIRIKGIQNKDILKRNKNHLQKQAEKNFTDEGDQLFKMGIKVLQQSKSQKQKEEAYLLFAKAADMGNLKAMEKMADALLFGNFGVQNITAAIQLYESLAKEGSCKAQNALGFLSSYGIGMEYDQAKALIYYTFGSAGGNMMSQMILGYRYLSGINVLQNCEVALSYYKKVADYIADTFEKSEGVPVEKVRLTERPENLSSNSEILDWDIYQYYKFLAERGDVQIQVSLGQLHLIGRKGLDQDYYKALHYFLKAAKAGSANAMAFIGKMYLEGNAAVPQNNATAFKYFSMAASKGNAIGLHGLGLLYFHGKGVPLNYAEALKYFQKAAEKGWPDAQFQLGFMYYSGSGIWKDYKLAFKYFYLASQSGQPLAIYYLAKMYATGTGVVRSCRTAVELYKGVCELGHWAEKFLTAYFAYKDGDIDSSLVQYALLAEMGYEVAQSNSAFILESKKANILEKEKMYPMALLLWNRAAIQGNAFARVKIGDYHYYGYGTKKDYQTAATHYSIAANKYHNAQAMFNLAYMYEHGLGITKDIHLARRLYDMAAQTSPDAHIPVLFAVMKLETTHLLRDILFFNFTTRWNWLKLDNTIGPHWDLFVIGLIVPGLILLLRNHHG

SEQ ID NO: 2816 - protein, 770 aa, Homo sapiens
MLPGLALLLLAAWTARALEVPTDGNAGLLAEPQIAMFCGRLNMHMNVQNGKWDSDPSGTKTCIDTKEGILQYCQEVYPELQITNVVEANQPVTIQNWCKRGRKQCKTHPHFVIPYRCLVGEFVSDALLVPDKCKFLHQERMDVCETHLHWHTVAKETCSEKSTNLHDYGMLLPCGIDKFRGVEFVCCPLAEESDNVDSADAEEDDSDVWWGGADTDYADGSEDKVVEVAEEEEVAEVEEEEADDDEDDEDGDEVEEEAEEPYEEATERTTSIATTTTTTTESVEEVVREVCSEQAETGPCRAMISRWYFDVTEGKCAPFFYGGCGGNRNNFDTEEYCMAVCGSAMSQSLLKTTQEPLARDPVKLPTTAASTPDAVDKYLETPGDENEHAHFQKAKERLEAKHRERMSQVMREWEEAERQAKNLPKADKKAVIQHFQEKVESLEQEAANERQQLVETHMARVEAMLNDRRRLALENYITALQAVPPRPRHVFNMLKKYVRAEQKDRQHTLKHFEHVRMVDPKKAAQIRSQVMTHLRVIYERMNQSLSLLYNVPAVAEEIQDEVDELLQKEQNYSDDVLANMISEPRISYGNDALMPSLTETKTTVELLPVNGEFSLDDLQPWHSFGADSVPANTENEVEPVDARPAADRGLTTRPGSGLTNIKTEEISEVKMDAEFRHDSGYEVHHQKLVFFAEDVGSNKGAIIGLMVGGVVIATVIVITLVMLKKKQYTSIHHGVVEVDAAVTPEERHLSKMQQNGYENPTYKFFEQMQN

SEQ ID NO: 2817 - protein, 967 aa, Homo sapiens
MQRAVPEGFGRRKLGSDMGNAERAPGSRSFGPVPTLLLLAAALLAVSDALGRPSEEDEELVVPELERAPGHGTTRLRLHAFDQQLDLELRPDSSFLAPGFTLQNVGRKSGSETPLPETDLAHCFYSGTVNGDPSSAAALSLCEGVRGAFYLLGEAYFIQPLPAASERLATAAPGEKPPAPLQFHLLRRNRQGDVGGTCGVVDDEPRPTGKAETEDEDEGTEGEDEGAQWSPQDPALQGVGQPTGTGSIRKKRFVSSHRYVETMLVADQSMAEFHGSGLKHYLLTLFSVAARLYKHPSIRNSVSLVVVKILVIHDEQKGPEVTSNAALTLRNFCNWQKQHNPPSDRDAEHYDTAILFTRQDLCGSQTCDTLGMADVGTVCDPSRSCSVIEDDGLQAAFTTAHELGHVFNMPHDDAKQCASLNGVNQDSHMMASMLSNLDHSQPWSPCSAYMITSFLDNGHGECLMDKPQNPIQLPGDLPGTSYDANRQCQFTFGEDSKHCPDAASTCSTLWCTGTSGGVLVCQTKHFPWADGTSCGEGKWCINGKCVNKTDRKHFDTPFHGSWGMWGPWGDCSRTCGGGVQYTMRECDNPVPKNGGKYCEGKRVRYRSCNLEDCPDNNGKTFREEQCEAHNEFSKASFGSGPAVEWIPKYAGVSPKDRCKLICQAKGIGYFFVLQPKVVDGTPCSPDSTSVCVQGQCVKAGCDRIIDSKKKFDKCGVCGGNGSTCKKISGSVTSAKPGYHDIITIPTGATNIEVKQRNQRGSRNNGSFLAIKAADGTYILNGDYTLSTLEQDIMYKGVVLRYSGSSAALERIRSFSPLKEPLTIQVLTVGNALRPKIKYTYFVKKKKESFNAIPTFSAWVIEEWGECSKSCELGWQRRLVECRDINGQPASECAKEVKPASTRPCADHPCPQWQLGEWSSCSKTCGKGYKKRSLKCLSHDGGVLSHESCDPLKKPKHFIDFCTMAECS

SEQ ID NO: 2818 - protein, 930 aa, Homo sapiens
MLLGWASLLLCAFRLPLAAVGPAATPAQDKAGQPPTAAAAAQPRRRQGEEVQERAEPPGHPHPLAQRRRSKGLVQNIDQLYSGGGKVGYLVYAGGRRFLLDLERDGSVGIAGFVPAGGGTSAPWRHRSHCFYRGTVDGSPRSLAVFDLCGGLDGFFAVKHARYTLKPLLRGPWAEEEKGRVYGDGSARILHVYTREGFSFEALPPRASCETPASTPEAHEHAPAHSNPSGRAALASQLLDQSALSPAGGSGPQTWWRRRRRSISRARQVELLLVADASMARLYGRGLQHYLLTLASIANRLYSHASIENHIRLAVVKVVVLGDKDKSLEVSKNAATTLKNFCKWQHQHNQLGDDHEEHYDAAILFTREDLCGHHSCDTLGMADVGTICSPERSCAVIEDDGLHAAFTVAHEIGHLLGLSHDDSKFCEETFGSTEDKRLMSSILTSIDASKPWSKCTSATITEFLDDGHGNCLLDLPRKQILGPEELPGQTYDATQQCNLTFGPEYSVCPGMDVCARLWCAVVRQGQMVCLTKKLPAVEGTPCGKGRICLQGKCVDKTKKKYYSTSSHGNWGSWGSWGQCSRSCGGGVQFAYRHCNNPAPRNNGRYCTGKRAIYRSCSLMPCPPNGKSFRHEQCEAKNGYQSDAKGVKTFVEWVPKYAGVLPADVCKLTCRAKGTGYYVVFSPKVTDGTECRLYSNSVCVRGKCVRTGCDGIIGSKLQYDKCGVCGGDNSSCTKIVGTFNKKSKGYTDVVRIPEGATHIKVRQFKAKDQTRFTAYLALKKKNGEYLINGKYMISTSETIIDINGTVMNYSGWSHRDDFLHGMGYSATKEILIVQILATDPTKPLDVRYSFFVPKKSTPKVNSVTSHGSNKVGSHTSQPQWVTGPWLACSRTCDTGWHTRTVQCQDGNRKLAKGCPLSQRPSAFKQCLLKKC

SEQ ID NO: 2819 - protein, 897 aa, Homo sapiens
MEANHCSLGVYPSYPDLVIDVGEVTLGEENRKKLQKTQRDQERARVIRAACALLNSGGGVIQMEMANRDERPTEMGLDLEESLRKLIQYPYLQAFFETKQHGRCFYIFVKSWSGDPFLKDGSFNSRICSLSSSLYCRSGTSVLHMNSRQAFDFLKTKERQSKYNLINEGSPPSKIMKAVYQNISESNPAYEVFQTDTIEYGEILSFPESPSIEFKQFSTKHIQQYVENIIPEYISAFANTEGGYLFIGVDDKSRKVLGCAKEQVDPDSLKNVIARAISKLPIVHFCSSKPRVEYSTKIVEVFCGKELYGYLCVIKVKAFCCVVFSEAPKSWMVREKYIRPLTTEEWVEKMMDADPEFPPDFAEAFESQLSLSDSPSLCRPVYSKKGLEHKADLQQHLFPVPPGHLECTPESLWKELSLQHEGLKELIHKQMRPFSQGIVILSRSWAVDLNLQEKPGVICDALLIAQNSTPILYTILREQDAEGQDYCTRTAFTLKQKLVNMGGYTGKVCVRAKVLCLSPESSAEALEAAVSPMDYPASYSLAGTQHMEALLQSLVIVLLGFRSLLSDQLGCEVLNLLTAQQYEIFSRSLRKNRELFVHGLPGSGKTIMAMKIMEKIRNVFHCEAHRILYVCENQPLRNFISDRNICRAETRETFLREKFEHIQHIVIDEAQNFRTEDGDWYRKAKTITQREKDCPGVLWIFLDYFQTSHLGHSGLPPLSAQYPREELTRVVRNADEIAEYIQQEMQLIIENPPINIPHGYLAILSEAKWVPGVPGNTKIIKNFTLEQIVTYVADTCRCFFERGYSPKDVAVLVSTVTEVEQYQSKLLKAMRKKMVVQLSDACDMLGVHIVLDSVRRFSGLERSIVFGIHPRTADPAILPNILICLASRAKQHLYIFL

SEQ ID NO: 2820 - protein, 349 aa, Homo sapiens
MNRKARRCLGHLFLSLGMVYLRIGGFSSVVALGASIICNKIPGLAPRQRAICQSRPDAIIVIGEGSQMGLDECQFQFRNGRWNCSALGERTVFGKELKVGSREAAFTYAIIAAGVAHAITAACTQGNLSDCGCDKEKQGQYHRDEGWKWGGCSADIRYGIGFAKVFVDAREIKQNARTLMNLHNNEAGRKILEENMKLECKCHGVSGSCTTKTCWTTLPQFRELGYVLKDKYNEAVHVEPVRASRNKRPTFLKIKKPLSYRKPMDTDLVYIEKSPNYCEEDPVTGSVGTQGRACNKTAPQASGCDLMCCGRGYNTHQYARVWQCNCKFHWCCYVKCNTCSERTEMYTCK

SEQ ID NO: 2821 - protein, 940 aa, Homo sapiens
MARKRAAGGEPRGRELRSQKSKAKSKARREEEEEDAFEDEKPPKKSLLSKVSQGKRKRGCSHPGGSADGPAKKKVAKVTVKSENLKVIKDEALSDGDDLRDFPSDLKKAHHLKRGATMNEDSNEEEEESENDWEEVEELSEPVLGDVRESTAFSRSLLPVKPVEIEIETPEQAKTRERSEKIKLEFETYLRRAMKRFNKGVHEDTHKVHLLCLLANGFYRNNICSQPDLHAIGLSIIPARFTRVLPRDVDTYYLSNLVKWFIGTFTVNAELSASEQDNLQTTLERRFAIYSARDDEELVHIFLLILRALQLLTRLVLSLQPIPLKSATAKGKKPSKERLTADPGGSSETSSQVLENHTKPKTSKGTKQEETFAKGTCRPSAKGKRNKGGRKKRSKPSSSEEDEGPGDKQEKATQRRPHGRERRVASRVSYKEESGSDEAGSGSDFELSSGEASDPSDEDSEPGPPKQRKAPAPQRTKAGSKSASRTHRGSHRKDPSLPAASSSSSSSKRGKKMCSDGEKAEKRSIAGIDQWLEVFCEQEEKWVCVDCVHGVVGQPLTCYKYATKPMTYVVGIDSDGWVRDVTQRYDPVWMTVTRKCRVDAEWWAETLRPYQSPFMDREKKEDLEFQAKHMDQPLPTAIGLYKNHPLYALKRHLLKYEAIYPETAAILGYCRGEAVYSRDCVHTLHSRDTWLKKARVVRLGEVPYKMVKGFSNRARKARLAEPQLREENDLGLFGYWQTEEYQPPVAVDGKVPRNEFGNVYLFLPSMMPIGCVQLNLPNLHRVARKLDIDCVQAITGFDFHGGYSHPVTDGYIVCEEFKDVLLTAWENEQAVIERKEKEKKEKRALGNWKLLAKGLLIRERLKRRYGPKSEAAAPHTDAGGGLSSDEEEGTSSQAEAARILAASWPQNREDEEKQKLKGGPKKTKREKKAAASHLFPFEQL

SEQ ID NO: 2822 - protein, 1848 aa, Homo sapiens
MSVGELYSQCTRVWIPDPDEVWRSAELTKDYKEGDKSLQLRLEDETILEYPIDVQRNQLPFLRNPDILVGENDLTALSYLHEPAVLHNLKVRFLESNHIYTYCGIVLVAINPYEQLPIYGQDVIYTYSGQNMGDMDPHIFAVAEEAYKQMARDEKNQSIIVSGESGAGKTVSAKYAMRYFATVGGSASETNIEEKVLASSPIMEAIGNAKTTRNDNSSRFGKYIQIGFDKRYHIIGANMRTYLLEKSRVVFQADDERNYHIFYQLCAAAGLPEFKELALTSAEDFFYTSQGGDTSIEGVDDAEDFEKTRQAFTLLGVKESHQMSIFKIIASILHLGSVAIQAERDGDSCSISPQDVYLSNFCRLLGVEHSQMEHWLCHRKLVTTSETYVKTMSLQQVINARNALAKHIYAQLFGWIVEHINKALHTSLKQHSFIGVLDIYGFETFEVNSFEQFCINYANEKLQQQFNSHVFKLEQEEYMKEQIPWTLIDFYDNQPCIDLIEAKLGILDLLDEECKVPKGTDQNWAQKLYDRHSSSQHFQKPRMSNTAFIIVHFADKVEYLSDGFLEKNRDTVYEEQINILKASKFPLVADLFHDDKDPVPATTPGKGSSSKISVRSARPPMKVSNKEHKKTVGHQFRTSLHLLMETLNATTPHYVRCIKPNDEKLPFHFDPKRAVQQLRACGVLETIRISAAGYPSRWAYHDFFNRYRVLVKKRELANTDKKAICRSVLENLIKDPDKFQFGRTKIFFRAGQVAYLEKLRADKFRTATIMIQKTVRGWLQKVKYHRLKGATLTLQRYCRGHLARRLAEHLRRIRAAVVLQKHYRMQRARQAYQRVRRAAVVIQAFTRAMFVRRTYRQVLMEHKATTIQKHVRGWMARRHFQRLRDAAIVIQCAFRMLKARRELKALRIEARSAEHLKRLNVGMENKVVQLQRKIDEQNKEFKTLSEQLSVTTSTYTMEVERLKKELVHYQQSPGEDTSLRLQEEVESLRTELQRAHSERKILEDAHSREKDELRKRVADLEQENALLKDEKEQLNNQILCQSKDEFAQNSVKENLMKKELEEERSRYQNLVKEYSQLEQRYDNLRDEMTIIKQTPGHRRNPSNQSSLESDSNYPSISTSEIGDTEDALQQVEEIGLEKAAMDMTVFLKLQKRVRELEQERKKLQVQLEKREQQDSKKVQAEPPQTDIDLDPNADLAYNSLKRQELESENKKLKNDLNELRKAVADQATQNNSSHGSPDSYSLLLNQLKLAHEELEVRKEEVLILRTQIVSADQRRLAGRNAEPNINARSSWPNSEKHVDQEDAIEAYHGVCQTNSKTEDWGYLNEDGELGLAYQGLKQVARLLEAQLQAQSLEHEEEVEHLKAQLEALKEEMDKQQQTFCQTLLLSPEAQVEFGVQQEISRLTNENLDLKELVEKLEKNERKLKKQLKIYMKKAQDLEAAQALAQSERKRHELNRQVTVQRKEKDFQGMLEYHKEDEALLIRNLVTDLKPQMLSGTVPCLPAYILYMCIRHADYTNDDLKVHSLLTSTINGIKKVLKKHNDDFEMTSFWLSNTCRLLHCLKQYSGDEGFMTQNTAKQNEHCLKNFDLTEYRQVLSDLSIQIYQQLIKIAEGVLQPMIVSAMLENESIQGLSGVKPTGYRKRSSSMADGDNSYCLEAIIRQMNAFHTVMCDQGLDPEIILQVFKQLFYMINAVTLNNLLLRKDVCSWSTGMQLRYNISQLEEWLRGRNLHQSGAVQTMEPLIQAAQLLQLKKKTQEDAEAICSLCTSLSTQQIVKILNLYTPLNEFEERVTVAFIRTIQAQLQERNDPQQLLLDAKHMFPVLFPFNPSSLTMDSIHIPACLNLEFLNEV

SEQ ID NO: 2823 - protein, 1462 aa, Homo sapiens
MFRGPKPPIAPKPRLTAPNEWRASVYLNDSLNKCSNGRLPCVDRGLDEGPRSIPKCSESETDEDYIVVPRVPLREDEPKDEGSVGNKALVSPESSAEEEEEREEGGEACGLEGTGAGEDSVAPAAPGAGALSREGEEGTDLALEDEGEGCADEPGTLEQVSRSEEEEKLVQPHRECSLEDSGPWAGEGVFQSDLLLPHIHGEDQEPPDTPGEAEEDDEEGCASTDPAGADEGSGPDRPTEDMGQDAEDTSEEPPEKEELAGVQEAETATDCPEVLEEGCEEATGVTGGEQVDLSEPPDHEKKTNQEVAAATLEDHAQDESAEESCQIVPFENDCMEDFVTSLTGSPYEFFPTESTSFCSESCSPLSESAKGLESEQAPKLGLRAEENPMVGALCGQCGSLQGGAAEGPAAPDVVVVLEEEALDDALANPYVMGVGLPGQAAPGEGGQAASDALGGYGSKEELNCEAEGGLVPADRKNTSTRVRPHSGKVAGYVPETVPEETGPEAGSSAPGIGGAAEEVGKTLLSLEGKPLEASRALPAKPRAFTLYPRSFSVEGREIPVSVYQEPEGSGLDDHRIKRKEDNLSLSCVIGSSGSFSQRNHLPSSGTSTPSSMVDIPPPFDLACITKKPITKSSPSLLIESDSPDKYKKKKSSFKRFLALTFKKKTENKLHVDVNVSSSRSSSESSYHGPSRILEVDRRSLSNSPQLKSRTGKLRASESPSSLIFYRDGKRKGVPFSRTVSRVESFEDRSRPPFLPLPLTKPRSISFPSADTSDYENIPAMNSDYENIQIPPRRPARAGAFTKLFEDQSRALSTANENDGYVDMSSFNAFESKQQSADQDAESAYTEPYKVCPISSAAPKEDLTSDEEQRSSEEEDSASRDPSVTHKVEGQSRALVIAQELLSSEKAYVEMLQHLNLDFHGAVMRALDDMDHEGRDTLAREELRQGLSELPAIHDLHQGILEELEERLSNWESQQKVADVFLAREQGFDHHATHILQFDRYLGLLSENCLHSPRLAAAVREFEQSVQGGSQTAKHRLLRVVQRLFQYQVLLTDYLNNLCPDSAEYDNTQGALSLISKVTDRANDSMEQGENLQKLVHIEHSVRGQGDLLQPGREFLKEGTLMKVTGKNRRPRHLFLMNDVLLYTYPQKDGKYRLKNTLAVANMKVSRPVMEKVPYALKIETSESCLMLSASSCAERDEWYGCLSRALPEDYKAQALAAFHHSVEIRERLGVSLGERPPTLVPVTHVMMCMNCGCDFSLTLRRHHCHACGKIVCRNCSRNKYPLKYLKDRMAKVCDGCFGELKKRGRAVPGLMRERPVSMSFPLSSPRFSGSAFSSVFQSINPSTFKKQKKVPSALTEVAASGEGSAISGYLSRCKRGKRHWKKLWFVIKGKVLYTYMASEDKVALESMPLLGFTIAPEKEEGSSEVGPIFHLYHKKTLFYSFKAEDTNSAQRWIEAMEDASVL

SEQ ID NO: 2824 - protein, 579 aa, Homo sapiens
MNAIVALCHFCELHGPRTLFCTEVLHAPLPQGDGNEDSPGQGEQAEEEEGGIQMNSRMRAHSPAEGASVESSSPGPKKSDMCEGCRSLAAGHPGYISHDKETSIKYVSHQHPSHPQLFSIVRQACVRSLSCEVCPGREGPIFFGDEQHGFVFSHTFFIKDSLARGFQRWYSIITIMMDRIYLINSWPFLLGKVRGIIDELQGKALKVFEAEQFGCPQRAQRMNTAFTPFLHQRNGNAARSLTSLTSDDNLWACLHTSFAWLLKACGSRLTEKLLEGAPTEDTLVQMEKLADLEEESESWDNSEAEEEEKAPVLPESTEGRELTQGPAESSSLSGCGSWQPRKLPVFKSLRHMRQVLGAPSFRMLAWHVLMGNQVIWKSRDVDLVQSAFEVLRTMLPVGCVRIIPYSSQYEEAYRCNFLGLSPHVQIPPHVLSSEFAVIVEVHAAARSTLHPVGCEDDQSLSKYEFVVTSGSPVAADRVGPTILNKIEAALTNQNLSVDVVDQCLVCLKEEWMNKVKVLFKFTKVDSRPKEDTQKLLSILGASEEDNVKLLKFWMTGLSKTYKSHLMSTVRSPTASESRN

SEQ ID NO: 2825 - protein, 312 aa, Homo sapiens
MACAAVMIPGLLRCSVGAIRIEAASLRLTLSTLRHLTLTSIMKSKRKTDHMERTASVLRREIVSAAKVCGAASESPSVKSLRLLVADQDFSFKAGQWVDFFIPGVSVVGGFSICSSPRLLEQERVIELAVKYTNHPPALWVHNTCTLDCEVAVRVGGEFFFDPQPADASRNLVLIAGGVGINPLLSILRHAADLLREQANKRNGYEIGTIKLFYSAKNTSELLFKKNILDLVNEFPEKIACSLHVTKQTTQINAELKPYITEGRITEKEIRDHISKETLFYICGPPPMTDFFSKQLENNHVPKEHICFEKWW

SEQ ID NO: 2826 - protein, 656 aa, Homo sapiens
MEGDGSDPEPPDAGEDSKSENGENAPIYCICRKPDINCFMIGCDNCNEWFHGDCIRITEKMAKAIREWYCRECREKDPKLEIRYRHKKSRERDGNERDSSEPRDEGGGRKRPVPDPDLQRRAGSGTGVGAMLARGSASPHKSSPQPLVATPSQHHQQQQQQIKRSARMCGECEACRRTEDCGHCDFCRDMKKFGGPNKIRQKCRLRQCQLRARESYKYFPSSLSPVTPSESLPRPRRPLPTQQQPQPSQKLGRIREDEGAVASSTVKEPPEATATPEPLSDEDLPLDPDLYQDFCAGAFDDHGLPWMSDTEESPFLDPALRKRAVKVKHVKRREKKSEKKKEERYKRHRQKQKHKDKWKHPERADAKDPASLPQCLGPGCVRPAQPSSKYCSDDCGMKLAANRIYEILPQRIQQWQQSPCIAEEHGKKLLERIRREQQSARTRLQEMERRFHELEAIILRAKQQAVREDEESNEGDSDDTDLQIFCVSCGHPINPRVALRHMERCYAKYESQTSFGSMYPTRIEGATRLFCDVYNPQSKTYCKRLQVLCPEHSRDPKVPADEVCGCPLVRDVFELTGDFCRLPKRQCNRHYCWEKLRRAEVDLERVRVWYKLDELFEQERNVRTAMTNRAGLLALMLHQTIQHDPLTTDLRSSADR

SEQ ID NO: 2827 - protein, 255 aa, Homo sapiens
MASSDLEQLCSHVNEKIGNIKKTLSLRNCGQEPTLKTVLNKIGDEIIVINELLNKLELEIQYQEQTNNSLKELCESLEEDYKDIEHLKENVPSHLPQVTVTQSCVKGSDLDPEEPIKVEEPEPVKKPPKEQRSIKEMPFITCDEFNGVPSYMKSRLTYNQINDVIKEINKAVISKYKILHQPKKSMNSVTRNLYHRFIDEETKDTKGRYFIVEADIKEFTTLKADKKFHVLLNILRHCRRLSEVRGGGLTRYVIT

SEQ ID NO: 2828 - protein, 1123 aa, Homo sapiens
MDLGPGDAAGGGPLAPRPRRRRSLRRLFSRFLLALGSRSRPGDSPPRPQPGHCDGDGEGGFACAPGPVPAAPGSPGEERPPGPQPQLQLPAGDGARPPGAQGLKNHGNTCFMNAVVQCLSNTDLLAEFLALGRYRAAPGRAEVTEQLAALVRALWTREYTPQLSAEFKNAVSKYGSQFQGNSQHDALEFLLWLLDRVHEDLEGSSRGPVSEKLPPEATKTSENCLSPSAQLPLGQSFVQSHFQAQYRSSLTCPHCLKQSNTFDPFLCVSLPIPLRQTRFLSVTLVFPSKSQRFLRVGLAVPILSTVAALRKMVAEEGGVPADEVILVELYPSGFQRSFFDEEDLNTIAEGDNVYAFQVPPSPSQGTLSAHPLGLSASPRLAAREGQRFSLSLHSESKVLILFCNLVGSGQQASRFGPPFLIREDRAVSWAQLQQSILSKVRHLMKSEAPVQNLGSLFSIRVVGLSVACSYLSPKDSRPLCHWAVDRVLHLRRPGGPPHVKLAVEWDSSVKERLFGSLQEERAQDADSVWQQQQAHQQHSCTLDECFQFYTKEEQLAQDDAWKCPHCQVLQQGMVKLSLWTLPDILIIHLKRFCQVGERRNKLSTLVKFPLSGLNMAPHVAQRSTSPEAGLGPWPSWKQPDCLPTSYPLDFLYDLYAVCNHHGNLQGGHYTAYCRNSLDGQWYSYDDSTVEPLREDEVNTRGAYILFYQKRNSIPPWSASSSMRGSTSSSLSDHWLLRLGSHAGSTRGSLLSWSSAPCPSLPQVPDSPIFTNSLCNQEKGGLEPRRLVRGVKGRSISMKAPTTSRAKQGPFKTMPLRWSFGSKEKPPGASVELVEYLESRRRPRSTSQSIVSLLTGTAGEDEKSASPRSNVALPANSEDGGRAIERGPAGVPCPSAQPNHCLAPGNSDGPNTARKLKENAGQDIKLPRKFDLPLTVMPSVEHEKPARPEGQKAMNWKESFQMGSKSSPPSPYMGFSGNSKDSRRGTSELDRPLQGTLTLLRSVFRKKENRRNERAEVSPQVPPVSLVSGGLSPAMDGQAPGSPPALRIPEGLARGLGSRLERDVWSAPSSLRLPRKASRAPRGSALGMSQRTVPGEQASYGTFQRVKYHTLSLGRKKTLPESSF

SEQ ID NO: 2829 - protein, 208 aa, Homo sapiens
MSAGGDFGNPLRKFKLVFLGEQSVGKTSLITRFMYDSFDNTYQATIGIDFLSKTMYLEDRTVRLQLWDTAGQERFRSLIPSYIRDSTVAVVVYDITNLNSFQQTSKWIDDVRTERGSDVIIMLVGNKTDLADKRQITIEEGEQRAKELSVMFIETSAKTGYNVKQLFRRVASALPGMENVQEKSKEGMIDIKLDKPQEPPASEGGCSC

SEQ ID NO: 2830 - protein, 1527 aa, Homo sapiens
MDALCGSGELGSKFWDSNLSVHTENPDLTPCFQNSLLAWVPCIYLWVALPCYLLYLRHHCRGYIILSHLSKLKMVLGVLLWCVSWADLFYSFHGLVHGRAPAPVFFVTPLVVGVTMLLATLLIQYERLQGVQSSGVLIIFWFLCVVCAIVPFRSKILLAKAEGEISDPFRFTTFYIHFALVLSALILACFREKPPFFSAKNVDPNPYPETSAGFLSRLFFWWFTKMAIYGYRHPLEEKDLWSLKEEDRSQMVVQQLLEAWRKQEKQTARHKASAAPGKNASGEDEVLLGARPRPRKPSFLKALLATFGSSFLISACFKLIQDLLSFINPQLLSILIRFISNPMAPSWWGFLVAGLMFLCSMMQSLILQHYYHYIFVTGVKFRTGIMGVIYRKALVITNSVKRASTVGEIVNLMSVDAQRFMDLAPFLNLLWSAPLQIILAIYFLWQNLGPSVLAGVAFMVLLIPLNGAVAVKMRAFQVKQMKLKDSRIKLMSEILNGIKVLKLYAWEPSFLKQVEGIRQGELQLLRTAAYLHTTTTFTWMCSPFLVTLITLWVYVYVDPNNVLDAEKAFVSVSLFNILRLPLNMLPQLISNLTQASVSLKRIQQFLSQEELDPQSVERKTISPGYAITIHSGTFTWAQDLPPTLHSLDIQVPKGALVAVVGPVGCGKSSLVSALLGEMEKLEGKVHMKGSVAYVPQQAWIQNCTLQENVLFGKALNPKRYQQTLEACALLADLEMLPGGDQTEIGEKGINLSGGQRQRVSLARAVYSDADIFLLDDPLSAVDSHVAKHIFDHVIGPEGVLAGKTRVLVTHGISFLPQTDFIIVLADGQVSEMGPYPALLQRNGSFANFLCNYAPDEDQGHLEDSWTALEGAEDKEALLIEDTLSNHTDLTDNDPVTYVVQKQFMRQLSALSSDGEGQGRPVPRRHLGPSEKVQVTEAKADGALTQEEKAAIGTVELSVFWDYAKAVGLCTTLAICLLYVGQSAAAIGANVWLSAWTNDAMADSRQNNTSLRLGVYAALGILQGFLVMLAAMAMAAGGIQAARVLHQALLHNKIRSPQSFFDTTPSGRILNCFSKDIYVVDEVLAPVILMLLNSFFNAISTLVVIMASTPLFTVVILPLAVLYTLVQRFYAATSRQLKRLESVSRSPIYSHFSETVTGASVIRAYNRSRDFEIISDTKVDANQRSCYPYIISNRWLSIGVEFVGNCVVLFAALFAVIGRSSLNPGLVGLSVSYSLQVTFALNWMIRMMSDLESNIVAVERVKEYSKTETEAPWVVEGSRPPEGWPPRGEVEFRNYSVRYRPGLDLVLRDLSLHVHGGEKVGIVGRTGAGKSSMTLCLFRILEAAKGEIRIDGLNVADIGLHDLRSQLTIIPQDPILFSGTLRMNLDPFGSYSEEDIWWALELSHLHTFVSSQPAGLDFQCSEGGENLSVGQRQLVCLARALLRKSRILVLDEATAAIDLETDNLIQATIRTQFDTCTVLTIAHRLNTIMDYTRVLVLDKGVVAEFDSPANLIAARGIFYGMARDAGLA

SEQ ID NO: 2831 - protein, 259 aa, Homo sapiens
MAALMRSKDSSCCLLLLAAVLMVESSQIGSSRAKLNSIKSSLGGETPGQAANRSAGMYQGLAFGGSKKGKNLGQAYPCSSDKECEVGRYCHSPHQGSSACMVCRRKKKRCHRDGMCCPSTRCNNGICIPVTESILTPHIPALDGTRHRDRNHGHYSNHDLGWQNLGRPHTKMSHIKGHEGDPCLRSSDCIEGFCCARHFWTKICKPVLHQGEVCTKQRKKGSHGLEIFQRCDCAKGLSCKVWKDATYSSKARLHVCQKI

SEQ ID NO: 2832 - protein, 350 aa, Homo sapiens
MLEGAELYFNVDHGYLEGLVRGCKASLLTQQDYINLVQCETLEDLKIHLQTTDYGNFLANHTNPLTVSKIDTEMRKRLCGEFEYFRNHSLEPLSTFLTYMTCSYMIDNVILLMNGALQKKSVKEILGKCHPLGRFTEMEAVNIAETPSDLFNAILIETPLAPFFQDCMSENALDELNIELLRNKLYKSYLEAFYKFCKNHGDVTAEVMCPILEFEADRRAFIITLNSFGTELSKEDRETLYPTFGKLYPEGLRLLAQAEDFDQMKNVADHYGVYKPLFEAVGGSGGKTLEDVFYEREVQMNVLAFNRQFHYGVFYAYVKLKEQEIRNIVWIAECISQRHRTKINSYIPIL

SEQ ID NO: 2833 - protein, 421 aa, Homo sapiens
MTSQEKTEEYPFADIFDEDETERNFLLSKPVCFVVFGKPGVGKTTLARYITQAWKCIRVEALPILEEQIAAETESGVMLQSMLISGQSIPDELVIKLMLEKLNSPEVCHFGYIITEIPSLSQDAMTTLQQIELIKNLNLKPDVIINIKCPDYDLCQRISGQRQHNNTGYIYSRDQWDPEVIENHRKKKKEAQKDGKGEEEEEEEEQEEEEAFIAEMQMVAEILHHLVQRPEDYLENVENIVKLYKETILQTLEEVMAEHNPQYLIELNGNKPAEELFMIVMDRLKYLNLKRAAILTKLQGAEEEINDTMENDELFRTLASYKLIAPRYRWQRSKWGRTCPVNLKDGNIYSGLPDYSVSFLGKIYCLSSEEALKPFLLNPRPYLLPPMPGPPCKVFILGPQYSGKTTLCNMLAENYKGKVTN

SEQ ID NO: 2834 - protein, 257 aa, Homo sapiens
MAADGVDERSPLLSASHSGNVTPTAPPYLQESSPRAELPPPYTAIASPDASGIPVINCRVCQSLINLDGKLHQHVVKCTVCNEATPIKNPPTGKKYVRCPCNCLLICKDTSRRIGCPRPNCRRIINLGPVMLISEEQPAQPALPIQPEGTRVVCGHCGNTFLWMELRFNTLAKCPHCKKISSVGSALPRRRCCAYITIGMICIFIGVGLTVGTPDFARRFRATYVSWAIAYLLGLICLIRACYWGAIRVSYPEHSFA

SEQ ID NO: 2835 - protein, 1009 aa, Homo sapiens
MGQLCWLPLLAPLLLLRPPGVQSAGPIRAFVVPHSHMDVGWVYTVQESMRAYAANVYTSVVEELARGQQRRFIAVEQEFFRLWWDGVASDQQKYQVRQLLEEGRLEFVIGGQVMHDEAVTHLDDQILQLTEGHGFLYETFGIRPQFSWHVDPFGASATTPTLFALAGFNAHLGSRIDYDLKAAMQEARGLQFVWRGSPSLSERQEIFTHIMDQYSYCTPSHIPFSNRSGFYWNGVAVFPKPPQDGVYPNMSEPVTPANINLYAEALVANVKQRAAWFRTPHVLWPWGCDKQFFNASVQFANMDPLLDHINSHAAELGVSVQYATLGDYFRALHALNVTWRVRDHHDFLPYSTEPFQAWTGFYTSRSSLKGLARRASALLYAGESMFTRYLWPAPRGHLDPTWALQQLQQLRWAVSEVQHHDAITGTESPKVRDMYATHLASGMLGMRKLMASIVLDELQPQAPMAASSDAGPAGHFASVYNPLAWTVTTIVTLTVGFPGVRVTDEAGHPVPSQIQNSTETPSAYDLLILTTIPGLSYRHYNIRPTAGAQEGTQEPAATVASTLQFGRRLRRRTSHAGRYLVPVANDCYIVLLDQDTNLMHSIWERQSNRTVRVTQEFLEYHVNGDVKQGPISDNYLFTPGKAAVPAWEAVEMEIVAGQLVTEIRQYFYRNMTAQNYTYAIRSRLTHVPQGHDGELLCHRIEQEYQAGPLELNREAVLRTSTNLNSQQVIYSDNNGYQMQRRPYVSYVNNSIARNYYPMVQSAFMEDGKSRLVLLSERAHGISSQGNGQVEVMLHRRLWNNFDWDLGYNLTLNDTSVVHPVLWLLLGSWSLTTALRQRSALALQHRPVVLFGDLAGTAPKLPGPQQQEAVTLPPNLHLQILSIPGWRYSSNHTEHSQNLRKGHRGEAQADLRRVLLRLYHLYEVGEDPVLSQPVTVNLEAVLQALGSVVAVEERSLTGTWDLSMLHRWSWRTGPGRHRGDTTSPSRPPGGPIITVHPKEIRTFFIHFQQQ

SEQ ID NO: 2836 - protein, 311 aa, Homo sapiens
MAHTNESMVSEFVLLGLSNSWGLQLFFFAIFSIVYVTSVLGNVLIIVIISFDSHLNSPMYFLLSNLSFIDICQSNFATPKMLVDFFIERKTISFEGCMAQIFVLHSFVGSEMMLLVAMAYDRFIAICKPLHYSTIMNRRLCVIFVSISWAVGVLHSVSHLAFTVDLPFCGPNEVDSFFCDLPLVIELACMDTYEMEIMTLTNSGLISLSCFLALIISYTIILIGVRCRSSSGSSKALSTLTAHITVVILFFGPCIYFYIWPFSRLPVDKFLSVFYTVCTPLLNPIIYSLRNEDVKAAMWKLRNRHVNSWKN

SEQ ID NO: 2837 - protein, 441 aa, Homo sapiens
MEIRLDTLSASLGRSSTLNNCNLEDKLAWYEGEAYMWHHWKPFPENPLWTCLDFQIAQVGPWDHCSSCIRHTRLKSSCSDMDLLHSWRSSSFGNFDRFRNNSLSKPDDSTEAHEGDPTNGSGEQSKTSNNGGGLGKKMRAISWTMKKKVGKKYIKALSEEKDEEDGENAHPYRNSDPVIGTHTEKVSLKASDSMDSLYSGQSSSSGITSCSDGTSNRDSFRLDDDGPYSGPFCGRARVHTDFTPSPYDTDSLKIKKGDIIDIICKTPMGMWTGMLNNKVGNFKFIYVDVISEEEAAPKKIKANRRSNSKKSKTLQEFLERIHLQEYTSTLLLNGYETLEDLKDIKESHLIELNIENPDDRRRLLSAAENFLEEEIIQEQENEPEPLSLSSDISLNKSQLDDCPRDSGCYISSGNSDNGKEDLESENLSDMVHKIIITEPSD

SEQ ID NO: 2838 - protein, 1055 aa, Homo sapiens
MTVEQNVLQQSAAQKHQQTFLNQLREITGINDTQILQQALKDSNGNLELAVAFLTAKNAKTPQQEETTYYQTALPGNDRYISVGSQADTNVIDLTGDDKDDLQRAIALSLAESNRAFRETGITDEEQAISRVLEASIAENKACLKRTPTEVWRDSRNPYDRKRQDKAPVGLKNVGNTCWFSAVIQSLFNLLEFRRLVLNYKPPSNAQDLPRNQKEHRNLPFMRELRYLFALLVGTKRKYVDPSRAVEILKDAFKSNDSQQQDVSEFTHKLLDWLEDAFQMKAEEETDEEKPKNPMVELFYGRFLAVGVLEGKKFENTEMFGQYPLQVNGFKDLHECLEAAMIEGEIESLHSENSGKSGQEHWFTELPPVLTFELSRFEFNQALGRPEKIHNKLEFPQVLYLDRYMHRNREITRIKREEIKRLKDYLTVLQQRLERYLSYGSGPKRFPLVDVLQYALEFASSKPVCTSPVDDIDASSPPSGSIPSQTLPSTTEQQGALSSELPSTSPSSVAAISSRSVIHKPFTQSRIPPDLPMHPAPRHITEEELSVLESCLHRWRTEIENDTRDLQESISRIHRTIELMYSDKSMIQVPYRLHAVLVHEGQANAGHYWAYIFDHRESRWMKYNDIAVTKSSWEELVRDSFGGYRNASAYCLMYINDKAQFLIQEEFNKETGQPLVGIETLPPDLRDFVEEDNQRFEKELEEWDAQLAQKALQEKLLASQKLRESETSVTTAQAAGDPEYLEQPSRSDFSKHLKEETIQIITKASHEHEDKSPETVLQSAIKLEYARLVKLAQEDTPPETDYRLHHVVVYFIQNQAPKKIIEKTLLEQFGDRNLSFDERCHNIMKVAQAKLEMIKPEEVNLEEYEEWHQDYRKFRETTMYLIIGLENFQRESYIDSLLFLICAYQNNKELLSKGLYRGHDEELISHYRRECLLKLNEQAAELFESGEDREVNNGLIIMNEFIVPFLPLLLVDEMEEKDILAVEDMRNRWCSYLGQEMEPHLQEKLTDFLPKLLDCSMEIKSFHEPPKLPSYSTHELCERFARIMLSLSRTPADGR

SEQ ID NO: 2839 - protein, 1087 aa, Homo sapiens
MTVEQNVLQQSAAQKHQQTFLNQLREITGINDTQILQQALKDSNGNLELAVAFLTAKNAKTPQQEETTYYQTALPGNDRYISVGSQADTNVIDLTGDDKDDLQRAIALSLAESNRAFRETGITDEEQAISRVLEASIAENKACLKRTPTEVWRDSRNPYDRKRQDKAPVGLKNVGNTCWFSAVIQSLFNLLEFRRLVLNYKPPSNAQDLPRNQKEHRNLPFMRELRYLFALLVGTKRKYVDPSRAVEILKDAFKSNDSQQQDVSEFTHKLLDWLEDAFQMKAEEETDEEKPKNPMVELFYGRFLAVGVLEGKKFENTEMFGQYPLQVNGFKDLHECLEAAMIEGEIESLHSENSGKSGQEHWFTELPPVLTFELSRFEFNQALGRPEKIHNKLEFPQVLYLDRYMHRNREITRIKREEIKRLKDYLTVLQQRLERYLSYGSGPKRFPLVDVLQYALEFASSKPVCTSPVDDIDASSPPSGSIPSQTLPSTTEQQGALSSELPSTSPSSVAAISSRSVIHKPFTQSRIPPDLPMHPAPRHITEEELSVLESCLHRWRTEIENDTRDLQESISRIHRTIELMYSDKSMIQVPYRLHAVLVHEGQANAGHYWAYIFDHRESRWMKYNDIAVTKSSWEELVRDSFGGYRNASAYCLMYINDKAQFLIQEEFNKETGQPLVGIETLPPDLRDFVEEDNQRFEKELEEWDAQLAQKALQEKLLASQKLRESETSVTTAQAAGDPEYLEQPSRSDFSKHLKEETIQIITKASHEHEDKSPETVLQSIMMTPNMQGIIMAIGKSRSVYDRCGPEAGFFKAIKLEYARLVKLAQEDTPPETDYRLHHVVVYFIQNQAPKKIIEKTLLEQFGDRNLSFDERCHNIMKVAQAKLEMIKPEEVNLEEYEEWHQDYRKFRETTMYLIIGLENFQRESYIDSLLFLICAYQNNKELLSKGLYRGHDEELISHYRRECLLKLNEQAAELFESGEDREVNNGLIIMNEFIVPFLPLLLVDEMEEKDILAVEDMRNRWCSYLGQEMEPHLQEKLTDFLPKLLDCSMEIKSFHEPPKLPSYSTHELCERFARIMLSLSRTPADGR

SEQ ID NO: 2840 - protein, 852 aa, Homo sapiens
MSSVSPIQIPSRLPLLLTHEGVLLPGSTMRTSVDSARNLQLVRSRLLKGTSLQSTILGVIPNTPDPASDAQDLPPLHRIGTAALAVQVVGSNWPKPHYTLLITGLCRFQIVQVLKEKPYPIAEVEQLDRLEEFPNTCKMREELGELSEQFYKYAVQLVEMLDMSVPAVAKLRRLLDSLPREALPDILTSIIRTSNKEKLQILDAVSLEERFKMTIPLLVRQIEGLKLLQKTRKPKQDDDKRVIAIRPIRRITHISGTLEDEDEDEDNDDIVMLEKKIRTSSMPEQAHKVCVKEIKRLKKMPQSMPEYALTRNYLELMVELPWNKSTTDRLDIRAARILLDNDHYAMEKLKKRVLEYLAVRQLKNNLKGPILCFVGPPGVGKTSVGRSVAKTLGREFHRIALGGVCDQSDIRGHRRTYVGSMPGRIINGLKTVGVNNPVFLLDEVDKLGKSLQGDPAAALLEVLDPEQNHNFTDHYLNVAFDLSQVLFIATANTTATIPAALLDRMEIIQVPGYTQEEKIEIAHRHLIPKQLEQHGLTPQQIQIPQVTTLDIITRYTREAGVRSLDRKLGAICRAVAVKVAEGQHKEAKLDRSDVTEREGCREHILEDEKPESISDTTDLALPPEMPILIDFHALKDILGPPMYEMEVSQRLSQPGVAIGLAWTPLGGEIMFVEASRMDGEGQLTLTGQLGDVMKESAHLAISWLRSNAKKYQLTNAFGSFDLLDNTDIHLHFPAGAVTKDGPSAGVTIVTCLASLFSGRLVRSDVAMTGEITLRGLVLPVGGIKDKVLAAHRAGLKQVIIPRRNEKDLEGIPGNVRQDLSFVTASCLDEVLNAAFDGGFTVKTRPGLLNSKL

SEQ ID NO: 2841 - protein, 955 aa, Homo sapiens
MEDSSTDTEKEEEEEKDEKDQEPIYAIVPTINIQDERFVDLSETPAFIFLHELHAMGKLPGTRMAALKAKYTLLHDAVMSTQESEVQLLQNAKRFTEQIQQQQFHLQQADNFPEAFSTEVSKMREQLLKYQNEYNAVKEREFHNQYRLNSLKEEKIIIVKEFEKITKPGEMEKKMKILRESTEELRKEIMQKKLEIKNLREDLASKQKQLLKEQKELEELLGHQVVLKDEVAHHQTIPVQIGKEIEKITRKKVEMEKKKIVLEQEVKTLNDSLKKVENKVSAIVDEKENVIKEVEGKRALLEIKEREHNQLVKLLELARENEATSLTERGILDLNLRNSLIDKQNYHDELSRKQREKERDFRNLRKMELLLKVSWDALRQTQALHQRLLLEMEAIPKDDSTLSERRRELHKEVEVAKRNLAQQKIISEMESKLVEQQLAEENKLLKEQENMKELVVNLLRMTQIKIDEKEQKSKDFLKAQQKYTNIVKEMKAKDLEIRIHKKKKCEIYRRLREFAKLYDTIRNERNKFVNLLHKAHQKVNEIKERHKMSLNELEILRNSAVSQERKLQNSMLKHANNVTIRESMQNDVRKIVSKLQEMKEKKEAQLNNIDRLANTITMIEEEMVQLRKRYEKAVQHRNESGVQLIEREEEICIFYEKINIQEKMKLNGEIEIHLLEEKIQFLKMKIAEKQRQICVTQKLLPAKRSLDADLAVLQIQFSQCTDRIKDLEKQFVKPDGENRARFLPGKDLTEKEMIQKLDKLELQLAKKEEKLLEKDFIYEQVSRLTDRLCSKTQGCKQDTLLLAKKMNGYQRRIKNATEKMMALVAELSMKQALTIELQKEVREKEDFIFTCNSRIEKGLPLNKEIEKEWLKVLRDEEMHALAIAEKSQEFLEADNRQLPNGVYTTAEQRPNAYIPEADATLPLPKPYGALAPFKPSEPGANMRHIRKPVIKPVEI

SEQ ID NO: 2842 - protein, 1508 aa, Homo sapiens
MGQEPRTLPPSPNWYCARCSDAVPGGLFGFAARTSVFLVRVGPGAGESPGTPPFRVIGELVGHTERVSGFTFSHHPGQYNLCATSSDDGTVKIWDVETKTVVTEHALHQHTISTLHWSPRVKDLIVSGDEKGVVFCYWFNRNDSQHLFIEPRTIFCLTCSPHHEDLVAIGYKDGIVVIIDISKKGEVIHRLRGHDDEIHSIAWCPLPGEDCLSINQEETSEEAEITNGNAVAQAPVTKGCYLATGSKDQTIRIWSCSRGRGVMILKLPFLKRRGGGIDPTVKERLWLTLHWPSNQPTQLVSSCFGGELLQWDLTQSWRRKYTLFSASSEGQNHSRIVFNLCPLQTEDDKQLLLSTSMDRDVKCWDIATLECSWTLPSLGGFAYSLAFSSVDIGSLAIGVGDGMIRVWNTLSIKNNYDVKNFWQGVKSKVTALCWHPTKEGCLAFGTDDGKVGLYDTYSNKPPQISSTYHKKTVYTLAWGPPVPPMSLGGEGDRPSLALYSCGGEGIVLQHNPWKLSGEAFDINKLIRDTNSIKYKLPVHTEISWKADGKIMALGNEDGSIEIFQIPNLKLICTIQQHHKLVNTISWHHEHGSQPELSYLMASGSNNAVIYVHNLKTVIESSPESPVTITEPYRTLSGHTAKITSVAWSPHHDGRLVSASYDGTAQVWDALREEPLCNFRGHRGRLLCVAWSPLDPDCIYSGADDFCVHKWLTSMQDHSRPPQGKKSIELEKKRLSQPKAKPKKKKKPTLRTPVKLESIDGNEEESMKENSGPVENGVSDQEGEEQAREPELPCGLAPAVSREPVICTPVSSGFEKSKVTINNKVILLKKEPPKEKPETLIKKRKARSLLPLSTSLDHRSKEELHQDCLVLATAKHSRELNEDVSADVEERFHLGLFTDRATLYRMIDIEGKGHLENGHPELFHQLMLWKGDLKGVLQTAAERGELTDNLVAMAPAAGYHVWLWAVEAFAKQLCFQDQYVKAASHLLSIHKVYEAVELLKSNHFYREAIAIAKARLRPEDPVLKDLYLSWGTVLERDGHYAVAAKCYLGATCAYDAAKVLAKKGDAASLRTAAELAAIVGEDELSASLALRCAQELLLANNWVGAQEALQLHESLQGQRLVFCLLELLSRHLEEKQLSEGKSSSSYHTWNTGTEGPFVERVTAVWKSIFSLDTPEQYQEAFQKLQNIKYPSATNNTPAKQLLLHICHDLTLAVLSQQMASWDEAVQALLRAVVRSYDSGSFTIMQEVYSAFLPDGCDHLRDKLGDHQSPATPAFKSLEAFFLYGRLYEFWWSLSRPCPNSSVWVRAGHRTLSVEPSQQLDTASTEETDPETSQPEPNRPSELDLRLTEEGERMLSTFKELFSEKHASLQNSQRTVAEVQETLAEMIRQHQKSQLCKSTANGPDKNEPEVEAEQPLCSSQSQCKEEKNEPLSLPELTKRLTEANQRMAKFPESIKAWPFPDVLECCLVLLLIRSHFPGCLAQEMQQQAQELLQKYGNTKTYRRHCQTFCM

SEQ ID NO: 2843 - protein, 1142 aa, Homo sapiens
MGDKDMPTAGMPSLLQSSSESPQSCPEGEDSQSPLQIPQSSPESDDTLYPLQSPQSRSEGEDSSDPLQRPPEGKDSQSPLQIPQSSPEGDDTQSPLQNSQSSPEGKDSLSPLEISQSPPEGEDVQSPLQNPASSFFSSALLSIFQSSPESTQSPFEGFPQSVLQIPVSAASSSTLVSIFQSSPESTQSPFEGFPQSPLQIPVSRSFSSTLLSIFQSSPERTQSTFEGFAQSPLQIPVSPSSSSTLLSLFQSFSERTQSTFEGFAQSSLQIPVSPSFSSTLVSLFQSSPERTQSTFEGFPQSPLQIPVSSSSSSTLLSLFQSSPERTHSTFEGFPQSLLQIPMTSSFSSTLLSIFQSSPESAQSTFEGFPQSPLQIPGSPSFSSTLLSLFQSSPERTHSTFEGFPQSPLQIPMTSSFSSTLLSILQSSPESAQSAFEGFPQSPLQIPVSSSFSYTLLSLFQSSPERTHSTFEGFPQSPLQIPVSSSSSSSTLLSLFQSSPECTQSTFEGFPQSPLQIPQSPPEGENTHSPLQIVPSLPEWEDSLSPHYFPQSPPQGEDSLSPHYFPQSPPQGEDSLSPHYFPQSPQGEDSLSPHYFPQSPPQGEDSMSPLYFPQSPLQGEEFQSSLQSPVSICSSSTPSSLPQSFPESSQSPPEGPVQSPLHSPQSPPEGMHSQSPLQSPESAPEGEDSLSPLQIPQSPLEGEDSLSSLHFPQSPPEWEDSLSPLHFPQFPPQGEDFQSSLQSPVSICSSSTSLSLPQSFPESPQSPPEGPAQSPLQRPVSSFFSYTLASLLQSSHESPQSPPEGPAQSPLQSPVSSFPSSTSSSLSQSSPVSSFPSSTSSSLSKSSPESPLQSPVISFSSSTSLSPFSEESSSPVDEYTSSSDTLLESDSLTDSESLIESEPLFTYTLDEKVDELARFLLLKYQVKQPITKAEMLTNVISRYTGYFPVIFRKAREFIEILFGISLREVDPDDSYVFVNTLDLTSEGCLSDEQGMSQNRLLILILSIIFIKGTYASEEVIWDVLSGIGVRAGREHFAFGEPRELLTKVWVQEHYLEYREVPNSSPPRYEFLWGPRAHSEVIKRKVVEFLAMLKNTVPITFPSSYKDALKDVEERAQAIIDTTDDSTATESASSSVMSPSFSSE

SEQ ID NO: 2844 - protein, 906 aa, Homo sapiens
MQHIFAFFCTGFLGAVVGANFPNNIQIGGLFPNQQSQEHAAFRFALSQLTEPPKLLPQIDIVNISDSFEMTYRFCSQFSKGVYAIFGFYERRTVNMLTSFCGALHVCFITPSFPVDTSNQFVLQLRPELQDALISIIDHYKWQKFVYIYDADRGLSVLQKVLDTAAEKNWQVTAVNILTTTEEGYRMLFQDLEKKKERLVVVDCESERLNAILGQIIKLEKNGIGYHYILANLGFMDIDLNKFKESGANVTGFQLVNYTDTIPAKIMQQWKNSDARDHTRVDWKRPKYTSALTYDGVKVMAEAFQSLRRQRIDISRRGNAGDCLANPAVPWGQGIDIQRALQQVRFEGLTGNVQFNEKGRRTNYTLHVIEMKHDGIRKIGYWNEDDKFVPAATDAQAGGDNSSVQNRTYIVTTILEDPYVMLKKNANQFEGNDRYEGYCVELAAEIAKHVGYSYRLEIVSDGKYGARDPDTKAWNGMVGELVYGRADVAVAPLTITLVREEVIDFSKPFMSLGISIMIKKPQKSKPGVFSFLDPLAYEIWMCIVFAYIGVSVVLFLVSRFSPYEWHSEEFEEGRDQTTSDQSNEFGIFNSLWFSLGAFMQQGCDISPRSLSGRIVGGVWWFFTLIIISSYTANLAAFLTVERMVSPIESAEDLAKQTEIAYGTLEAGSTKEFFRRSKIAVFEKMWTYMKSAEPSVFVRTTEEGMIRVRKSKGKYAYLLESTMNEYIEQRKPCDTMKVGGNLDSKGYGIATPKGSALRNPVNLAVLKLNEQGLLDKLKNKWWYDKGECGSGGGDSKDKTSALSLSNVAGVFYILIGGLGLAMLVALIEFCYKSRSESKRMKGFCLIPQQSINEAIRTSTLPRNSGAGASSGGSGENGRVVSHDFPKSMQSIPCMSHSSGMPLGATGL

SEQ ID NO: 2845 - protein, 825 aa, Homo sapiens
MATSERALLRTRAASLLRGLGRSRTGARSLQFRAEKERQPCWSFPMGQKTKGSSNIASSYLLQQLMHRYQELDSDGDEDQGEGEAGSEESSESEMLNLEEEFDGVLREEAVAKALHHLGRSGSGTEQVYLNLTLSGCNLIDVSILCGYVHLQKLDLSANKIEDLSCVSCMPYLLELNASQNNLTTFFNFKPPKNLKKADFSHNQISEICDLSAYHALTKLILDGNEIEEISGLEMCNNLIHLSLANNKITTINGLNKLPIKILCLSNNQIEMITGLEDLKALQNLDLSHNQISSLQGLENHDLLEVINLEDNKIAELREIEYIKNLPILRVLNLLENPIQEKSEYWFFVIFMLLRLTELDQKKIKVEEKVSAVNKYDPPPEVVAAQDHLTHVVNSVMQPQRIFDSTLPSLDAPYPMLILAGPEACGKRELAHRLCRQFSTYFRYGACHTTRPPYFGEGDRVDYHFISQDVFDEMVNMGKFILTFSYGNHKYGLNRDTVEGIARDGLASCIHMEIEGVRSLKYSYFEPRYILVVPMNKEKYEGYLRRKGLFSRAEIEFAVSRVDLYIKINQNFPGYFDEVINADDLDVAYQKLSQLIREYLGLTEEPAKSLATTADVKTSHLKPEAHPTKYISSNMGDFLHSTDRNYLIKFWAKLSAKKTPAERDSIHRQHEAARQALMGRIRPDHTLLFQRGPVPAPLTSGLHYYTTLEELWKSFDLCEDYFKPPFGPYPEKSGKDSLVSMKCSLFRFCPWSKELPFQPPEGSISSHLGSGASDSETEETRKALPIQSFSHEKESHQHRQHSVPVISRPGSNVKPTLPPIPQGRR

SEQ ID NO: 2846 - protein, 2012 aa, Homo sapiens
MATPLAVNSAASLWGPYKDIWHKVGNALWRRQPEAVHLLDKILKKHKPDFISLFKNPPKNVQQHEKVQKASTEGVAIQGQQGTRLLPEQLIKEAFILSDLFDIGELAAVELLLAGEHQQPHFPGLTRGLVAVLLYWDGKRCIANSLKALIQSRRGKTWTLELSPELASMTTRFTDELMEQGLTYKVLTLVSQIDVNNEFEKLQRERGLGSEKHRKEVSDLIKECRQSLAESLFAWACQSPLGKEDTLLLIGHLERVTVEANGSLDAVNLALLMALLYCFDISFIEQSTEERDDMIHQLPLLTEKQYIATIHSRLQDSQLWKLPGLQATVRLAWALALRGISQLPDVTALAEFTEADEAMAELAIADNVFLFLMESVVVSEYFYQEEFYIRRVHNLITDFLALMPMKVKQLRNRADEDARMIHMSMQMGNEPPISLRRDLEHLMLLIGELYKKNPFHLELALEYWCPTEPLQTPTIMGSYLGVAHQRPPQRQVVLSKFVRQMGDLLPPTIYIPYLKMLQGLANGPQCAHYCFSLLKVNGSSHVENIQGAGGSPVSWEHFFHSLMLYHEHLRKDLPSADSVQYRHLPSRGITQKEQDGLIAFLQLTSTIITWSENARLALCEHPQWTPVVVILGLLQCSIPPVLKAELLKTLAAFGKSPEIAASLWQSLEYTQILQTVRIPSQRQAIGIEVELNEIESRCEEYPLTRAFCQLISTLVESSFPSNLGAGLRPPGFDPYLQFLRDSVFLRFRTRAYRRAAEKWEVAEVVLEVFYKLLRDYEPQLEDFVDQFVELQGEEIIAYKPPGFSLMYHLLNESPMLELALSLLEEGVKQLDTYAPFPGKKHLEKAVQHCLALLNLTLQKENLFMDLLRESQLALIVCPLEQLLQGINPRTKKADNVVNIARYLYHGNTNPELAFESAKILCCISCNSNIQIKLVGDFTHDQSISQKLMAGFVECLDCEDAEEFVRLEEGSELEKKLVAIRHETRIHILNLLITSLECNPPNLALYLLGFELKKPVSTTNLQDPGVLGCPRTCLHAILNILEKGTEGRTGPVAVRESPQLAELCYQVIYQLCACSDTSGPTMRYLRTSQDFLFSQLQYLPFSNKEYEISMLNQMSWLMKTASIELRVTSLNRQRSHTQRLLHLLLDDMPVKPYSDGEGGIEDENRSVSGFLHFDTATKVRRKILNILDSIDFSQEIPEPLQLDFFDRAQIEQVIANCEHKNLRGQTVCNVKLLHRVLVAEVNALQGMAAIGQRPLLMEEISTVLQYVVGRNKLLQCLHAKRHALESWRQLVEIILTACPQDLIQAEDRQLIIRDILQDVHDKILDDEAAQELMPVVAGAVFTLTAHLSQAVLTEQKETSVLGPAEAHYAFMLDSCFTSPPPEENPLVGFASIGDSSLYIILKKLLDFILKTGGGFQRVRTHLYGSLLYYLQIAQRPDEPDTLEAAKKTMWERLTAPEDVFSKLQRENIAIIESYGAALMEVVCRDACDGHEIGRMLALALLDRIVSVDKQQQWLLYLSNSGYLKVLVDSLVEDDRTLQSLLTPQPPLLKALYTYESKMAFLTRVAKIQQGALELLRSGVIVRLAQCQVYDMRPETDPQSMFGMRDPPMFIPTPVDRYRQILLPALQLCQVILTSSMAQHLQAAGQVLQFLISHSDTIQAILRCQDVSAGSLQELALLTGIISKAALPGILSELDVDVNEGSLMELQGHIGRFQRQCLGLLSRFGGSDRLRQFKFQDDNVEGDKVSKKDEIELAMQQICANVMEYCQSLMLQSSPTFQHAVCLFTPSLSETVNRDGPRQDTQAPVVPYWRLPGLGIIIYLLKQSANDFFSYYDSHRQSVSKLQNVEQLPPDEIKELCQSVMPAGVDKISTAQKYVLARRRLVKVINNRAKLLSLCSFIIETCLFILWRHLEYYLLHCMPTDSQDSLFASRTLFKSRRLQDSFASETNLDFRSGLAIVSQHDLDQLQADAINAFGESLQKKLLDIEGLYSKVRSRYSFIQALVRRIRGLLRISRN

SEQ ID NO: 2847 - protein, 490 aa, Homo sapiens
MDPAVALVLCLSCLFLLSLWRQSSGRGRLPSGPTPLPIIGNILQLDVKDMSKSLTNFSKVYGPVFTVYFGLKPIVVLHGYEAVKEALIDHGEEFSGRGSFPVAEKVNKGLGILFSNGKRWKEIRRFCLMTLRNFGMGKRSIEDRVQEEARCLVEELRKTNASPCDPTFILGCAPCNVICSVIFHDRFDYKDQRFLNLMEKFNENLRILSSPWIQVCNNFPALIDYLPGSHNKIAENFAYIKSYVLERIKEHQESLDMNSARDFIDCFLIKMEQEKHNQQSEFTVESLIATVTDMFGAGTETTSTTLRYGLLLLLKYPEVTAKVQEEIECVVGRNRSPCMQDRSHMPYTDAVVHEIQRYIDLLPTNLPHAVTCDVKFKNYLIPKGTTIITSLTSVLHNDKEFPNPEMFDPGHFLDKSGNFKKSDYFMPFSAGKRMCMGEGLARMELFLFLTTILQNFNLKSQVDPKDIDITPIANAFGRVPPLYQLCFIPV

SEQ ID NO: 2848 - protein, 853 aa, Homo sapiens
MFLPHMNHLTLEQTFFSQVLPKTVKLFDDMMYELTSQARGLSSQNLEIQTTLRNILQTMVQLLGALTGCVQHICATQESIILENIQSLPSSVLHIIKSTFVHCKNSESVYSGCLHLVSDLLQALFKEAYSLQKQLMELLDMVCMDPLVDDNDDILNMVIVIHSLLDICSVISSMDHAFHANTWKFIIKQSLKHQSIIKSQLKHKDIITSLCEDILFSFHSCLQLAEQMTQSDAQDNADYRLFQKTLKLCRFFANSLLHYAKEFLPFLSDSCCTLHQLYLQIHSKFPPSLYATRISKAHQEEIAGAFLVTLDPLISQLLTFQPFMQVVLDSKLDLPCELQFPQCLLLVVVMDKLPSQPKEVQTLWCTDSQVSETTTRISLLKAVFYSFEQCSGELSLPVHLQGLKSKGKAEVAVTLYQHVCVHLCTFITSFHPSLFAELDAALLNAVLSANMITSLLAMDAWCFLARYGTAELCAHHVTIVAHLIKSCPGECYQLINLSILLKRLFFFMAPPHQLEFIQKFSPKEAENLPLWQHISFQALPPELREQTVHEVTTVGTAECRKWLSRSRTLGELESLNTVLSALLAVCNSAGEALDTGKQTAIIEVVSQLWAFLNIKQVADQPYVQQTFSLLLPLLGFFIQTLDPKLILQAVTLQTSLLKLELPDYVRLAMLDFVSSLGKLFIPEAIQDRILPNLSCMFALLLADRSWLLEQHTLEAFTQFAEGTNHEEIVPQCLSSEETKNKVVSFLEKTGFVDETEAAKVERVKQEKGIFWEPFANVTVEEAKRSSLQPYAKRARQEFPWEEEYRSALHTIAGALEATESLLQKGPAPAWLSMEMEALQERMDKLKRYIHTLG

SEQ ID NO: 2849 - protein, 933 aa, Homo sapiens
MAASRLDFGEVETFLDRHPELFEDYLMRKGKQEMVEKWLQRHSQGQGALGPRPSLAGTSSLAHSTCRGGSSVGGGTGPNGSAHSQPLPGGGDCGGVPLSPSWAGGSRGDGNLQRRASQKELRKSFARSKAIHVNRTYDEQVTSRAQEPLSSVRRRALLRKASSLPPTTAHILSALLESRVNLPRYPPTAIDYKCHLKKHNERQFFLELVKDISNDLDLTSLSYKILIFVCLMVDADRCSLFLVEGAAAGKKTLVSKFFDVHAGTPLLPCSSTENSNEVQVPWGKGIIGYVGEHGETVNIPDAYQDRRFNDEIDKLTGYKTKSLLCMPIRSSDGEIIGVAQAINKIPEGAPFTEDDEKVMQMYLPFCGIAISNAQLFAASRKEYERSRALLEVVNDLFEEQTDLEKIVKKIMHRAQTLLKCERCSVLLLEDIESPVVKFTKSFELMSPKCSADAENSFKESMEKSSYSDWLINNSIAELVASTGLPVNISDAYQDPRFDAEADQISGFHIRSVLCVPIWNSNHQIIGVAQVLNRLDGKPFDDADQRLFEAFVIFCGLGINNTIMYDQVKKSWAKQSVALDVLSYHATCSKAEVDKFKAANIPLVSELAIDDIHFDDFSLDVDAMITAALRMFMELGMVQKFKIDYETLCRWLLTVRKNYRMVLYHNWRHAFNVCQLMFAMLTTAGFQDILTEVEILAVIVGCLCHDLDHRGTNNAFQAKSGSALAQLYGTSATLEHHHFNHAVMILQSEGHNIFANLSSKEYSDLMQLLKQSILATDLTLYFERRTEFFELVSKGEYDWNIKNHRDIFRSMLMTACDLGAVTKPWEISRQVAELVTSEFFEQGDRERLELKLTPSAIFDRNRKDELPRLQLEWIDSICMPLYQALVKVNVKLKPMLDSVATNRSKWEELHQKRLLASTASSSPASVMVAKEDRN

SEQ ID NO: 2850 - protein, 1247 aa, Homo sapiens
MQSSALVESLITVKMAAENSEEGNTCIIPQRNLFKALSEEAWNSGFMGNSSRTADKENTLQCPKTPLRQDLEANEQDARPKQENHLHSLGRNKVGYHLHPSDKGQFDHSKDGWLGPGPMPAVHKAANGHSRTKMISTSIKTARKSKRASGLRINDYDNQCDVVYISQPITECHFENQKSILSSRKTARKSTRGYFFNGDCCELPTVRTLARNLHSQEKASCSALASEAVFTPKQTLTIPAPRHTVDVQLPREDNPEEPSKEITSHEEGGGDVSPRKEPQEPEVCPTKIKPNLSSSPRSEETTASSLVWPLPAHLPEEDLPEGGSTVSAPTASGMSSPEHNQPPVALLDTEEMSVPQDCHLLPSTESFSGGVSEDVISRPHSPPEIVSREESPQCSENQSSPMGLEPPMSLGKAEDNQSISAEVESGDTQELNVDPLLKESSTFTDENPSETEESEAAGGIGKLEGEDGDVKCLSEKDTYDTSIDSLEENLDKKKKGKKFPEASDRCLRSQLSDSSSADRCLRNQSSDSSSACLEIKVPKNPSAKRSKKEGHPGGTTPKGLLPDSFHTETLEDTEKPSVNERPSEKDAEQEGEGGGIITRQTLKNMLDKEVKELRGEIFPSRDPITTAGQPLPGERLEIYVQSKMDEKNAHIPSESIACKRDPEQAKEEPGHIPTQHVEEAVNEVDNENTQQKDDESDAPCSSLGLSSSGSGDAARAPKSVPRPKRLTSSTYNLRHAHSLGSLDASKVTSEKEAAQVNPIMPKENGASESGDPLDEDDVDTVVDEQPKFMEWCAEEENQELIANFNAQYMKVQKGWIQLEKEGQPTPRARNKSDKLKEIWKSKKRSRKCRSSLESQKCSPVQMLFMTNFKLSNVCKWFLETTETRSLVIVKKLNTRLPGDVPPVKHPLQKYAPSSLYPSSLQAERLKKHLKKFPGATPAKNNWKMQKLWAKFRENPDQVEPEDGSDVSPGPNSEDSIEEVKEDRNSHPPANLPTPASTRILRKYSNIRGKLRAQQRLIKNEKMECPDALAVESKPSRKSVCINPLMSPKLALQVDADGFPVKPKSTEGMKGRKGKQVSEILPKAEVQSKRKRTEGSSPPDSKNKGPTVKASKEKHADGATKTPAAKRPAARDRSSQPPKKTSLKENKVKIPKKSAGKSCPPSRKEKENTNKRPSQSIASETLTKPAKQKGAGESSSRPQKATNRKQSSGKTRARPSTKTPESSAAQRKRKLKAKLDCSHSKRRRLDAK

SEQ ID NO: 2851 - protein, 474 aa, Homo sapiens
MDEAGSSASGGGFRPGVDSLDEPPNSRIFLVISKYTPESVLRERFSPFGDIQDIWVVRDKHTKESKGIAFVKFARSSQACRAMEEMHGQCLGPNDTKPIKVFIAQSRSSGSHRDVEDEELTRIFVMIPKSYTEEDLREKFKVYGDIEYCSIIKNKVTGESKGLGYVRYLKPSQAAQAIENCDRSFRAILAEPKNKASESSEQDYYSNMRQEALGHEPRVNMFPFEQQSEFSSFDKNDSRGQEAISKRLSVVSRVPFTEEQLFSIFDIVPGLEYCEVQRDPYSNYGHGVVQYFNVASAIYAKYKLHGFQYPPGNRIGVSFIDDGSNATDLLRKMATQMVAAQLASMVWNNPSQQQFMQFGGSSGSQLPQIQTDVVLPSCKKKAPAETPVKERLFIVFNPHPLPLDVLEDIFCRFGNLIEVYLVSGKNVGYAKYADRISANDAIATLHGKILNGVRLKVMLADSPREESNKRQRTY

SEQ ID NO: 2852 - protein, 519 aa, Homo sapiens
MMSEHDLADVVQIAVEDLSPDHPVVLENHVVTDEDEPALKRQRLEINCQDPSIKTICLRLDSIEAKLQALEATCKSLEEKLDLVTNKQHSPIQVPMVAGSPLGATQTCNKVRCVVPQTTVILNNDRQNAIVAKMEDPLSNRAPDSLENVISNAVPGRRQNTIVVKVPGQEDSHHEDGESGSEASDSVSSCGQAGSQSIGSNVTLITLNSEEDYPNGTWLGDENNPEMRVRCAIIPSDMLHISTNCRTAEKMALTLLDYLFHREVQAVSNLSGQGKHGKKQLDPLTIYGIRCHLFYKFGITESDWYRIKQSIDSKCRTAWRRKQRGQSLAVKSFSRRTPNSSSYCPSEPMMSTPPPASELPQPQPQPQALHYALANAQQVQIHQIGEDGQVQVGHLHIAQVPQGEQVQITQDSEGNLQIHHVGQDGQLLEATRIPCLLAPSVFKASSGQVLQGAQLIAVASSDPAAAGVDGSPLQGSDIQVQYVQLAPVSDHTAGAQTAEALQPTLQPEMQLEHGAIQIQ

SEQ ID NO: 2853 - protein, 522 aa, Homo sapiens
MKSQGQHWYSSSDKNCKVSFREKLLIIDSNLGVQDVENLKFLCIGLVPNKKLEKSSSASDVFEHLLAEDLLSEEDPFFLAELLYIIRQKKLLQHLNCTKEEVERLLPTRQRVSLFRNLLYELSEGIDSENLKDMIFLLKDSLPKTEMTSLSFLAFLEKQGKIDEDNLTCLEDLCKTVVPKLLRNIEKYKREKAIQIVTPPVDKEAESYQGEEELVSQTDVKTFLEALPQESWQNKHAGSNGNRATNGAPSLVSRGMQGASANTLNSETSTKRAAVYRMNRNHRGLCVIVNNHSFTSLKDRQGTHKDAEILSHVFQWLGFTVHIHNNVTKVEMEMVLQKQKCNPAHADGDCFVFCILTHGRFGAVYSSDEALIPIREIMSHFTALQCPRLAEKPKLFFIQACQGEEIQPSVSIEADALNPEQAPTSLQDSIPAEADFLLGLATVPGYVSFRHVEEGSWYIQSLCNHLKKLVPRHEDILSILTAVNDDVSRRVDKQGTKKQMPQPAFTLRKKLVFPVPLDALSL

SEQ ID NO: 2854 - protein, 445 aa, Homo sapiens
MYPNPLIYCTCWDPWNLGPRKLIKTPQLPRKNSTGSSKLTPLVPAPKNHNYLQPTKPVVSPKMKIHSARQEETNKSFYEVINVSPGYQLVRNREQISVTLGDEMFDRKKRWESEIPDKGRFSRTNIISDLEEQISELTAIIEQMNRDHQSAQKLLSSEMDLRCAEMKQNFENKNRELKEAHEAELSELENNYKAALKAEKLAAQEKLEEMGKEYKYLKNMFRTYQDSIYDEMEEKWSKQKAKWKKDEKFERENILLQQKKKMTKKFEMESGEEDKKINESCSAVFENFIQEKEELLKQHQSDTLQLEELRKTKEVPWRRDQINRHWHDVLQQLLLMQVMQEELHAQALILESLNTNLYYTQLELQKEKAIVGNLEKMLQTKFAETEEKYKHTIQILTEENIHLKQKIISKNEEICEGCSGRLASITVSKDDSDTVQDGSKKGQES

SEQ ID NO: 2855 - protein, 409 aa, Homo sapiens
MEEGGSTGSAGSDSSTSGSGGAQQRELERMAEVLVTGEQLRLRLHEEKVIKDRRHHLKTYPNCFVAKELIDWLIEHKEASDRETAIKLMQKLADRGIIHHVCDEHKEFKDVKLFYRFRKDDGTFPLDNEVKAFMRGQRLYEKLMSPENTLLQPREEEGVKYERTFMASEFLDWLVQEGEATTRKEAEQLCHRLMEHGIIQHVSNKHPFVDSNLLYQFRMNFRRRRRLMELLNEKSPSSQETHDSPFCLRKQSHDNRKSTSFMSVSPSKEIKIVSAVRRSSMSSCGSSGYFSSSPTLSSSPPVLCNPKSVLKRPVTSEELLTPGAPYARKTFTIVGDAVGWGFVVRGSKPCHIQAVDPSGPAAAAGMKVCQFVVSVNGLNVLHVDYRTVSNLILTGPRTIVMEVMEELEC

SEQ ID NO: 2856 - protein, 739 aa, Homo sapiens
MSSESKEQHNVSPRDSAEGNDSYPSGIHLELQRESSTDFKQFETNDQCRPYHRILIERQEKSDTNFKEFVIKKLQKNCQCSPAKAKNMILGFLPVLQWLPKYDLKKNILGDVMSGLIVGILLVPQSIAYSLLAGQEPVYGLYTSFFASIIYFLLGTSRHISVGIFGVLCLMIGETVDRELQKAGYDNAHSAPSLGMVSNGSTLLNHTSDRICDKSCYAIMVGSTVTFIAGVYQVAMGFFQVGFVSVYLSDALLSGFVTGASFTILTSQAKYLLGLNLPRTNGVGSLITTWIHVFRNIHKTNLCDLITSLLCLLVLLPTKELNEHFKSKLKAPIPIELVVVVAATLASHFGKLHENYNSSIAGHIPTGFMPPKVPEWNLIPSVAVDAIAISIIGFAITVSLSEMFAKKHGYTVKANQEMYAIGFCNIIPSFFHCFTTSAALAKTLVKESTGCHTQLSGVVTALVLLLVLLVIAPLFYSLQKSVLGVITIVNLRGALRKFRDLPKMWSISRMDTVIWFVTMLSSALLSTEIGLLVGVCFSIFCVILRTQKPKSSLLGLVEESEVFESVSAYKNLQIKPGIKIFRFVAPLYYINKECFKSALYKQTVNPILIKVAWKKAAKRKIKEKVVTLGGIQDEMSVQLSHDPLELHTIVIDCSAIQFLDTAGIHTLKEVRRDYEAIGIQVLLAQCNPTVRDSLTNGEYCKKEEENLLFYSVYEAMAFAEVSKNQKGVCVPNGLSLSSD

SEQ ID NO: 2857 - protein, 972 aa, Homo sapiens
MGPGVLLLLLVATAWHGQGIPVIEPSVPELVVKPGATVTLRCVGNGSVEWDGPPSPHWTLYSDGSSSILSTNNATFQNTGTYRCTEPGDPLGGSAAIHLYVKDPARPWNVLAQEVVVFEDQDALLPCLLTDPVLEAGVSLVRVRGRPLMRHTNYSFSPWHGFTIHRAKFIQSQDYQCSALMGGRKVMSISIRLKVQKVIPGPPALTLVPAELVRIRGEAAQIVCSASSVDVNFDVFLQHNNTKLAIPQQSDFHNNRYQKVLTLNLDQVDFQHAGNYSCVASNVQGKHSTSMFFRVVESAYLNLSSEQNLIQEVTVGEGLNLKVMVEAYPGLQGFNWTYLGPFSDHQPEPKLANATTKDTYRHTFTLSLPRLKPSEAGRYSFLARNPGGWRALTFELTLRYPPEVSVIWTFINGSGTLLCAASGYPQPNVTWLQCSGHTDRCDEAQVLQVWDDPYPEVLSQEPFHKVTVQSLLTVETLEHNQTYECRAHNSVGSGSWAFIPISAGAHTHPPDEFLFTPVVVACMSIMALLLLLLLLLLYKYKQKPKYQVRWKIIESYEGNSYTFIDPTQLPYNEKWEFPRNNLQFGKTLGAGAFGKVVEATAFGLGKEDAVLKVAVKMLKSTAHADEKEALMSELKIMSHLGQHENIVNLLGACTHGGPVLVITEYCCYGDLLNFLRRKAEAMLGPSLSPGQDPEGGVDYKNIHLEKKYVRRDSGFSSQGVDTYVEMRPVSTSSNDSFSEQDLDKEDGRPLELRDLLHFSSQVAQGMAFLASKNCIHRDVAARNVLLTNGHVAKIGDFGLARDIMNDSNYIVKGNARLPVKWMAPESIFDCVYTVQSDVWSYGILLWEIFSLGLNPYPGILVNSKFYKLVKDGYQMAQPAFAPKNIYSIMQACWALEPTHRPTFQQICSFLQEQAQEDRRERDYTNLPSSSRSGGSGSSSSELEEESSSEHLTCCEQGDIAQPLLQPNNYQFC

SEQ ID NO: 2858 - protein, 644 aa, Homo sapiens
MDLQQSTTITSLEKWCLDESLSGCRRHYSVKKKLKLIRVLGLFMGLVAISTVSFSISAFSETDTQSTGEASVVSGPRVAQGYHQRTLLDLNDKILDYTPQPPLSKEGESENSTDHAQGDYPKDIFSLEERRKGAIILHVIGMIYMFIALAIVCDEFFVPSLTVITEKLGISDDVAGATFMAAGGSAPELFTSLIGVFIAHSNVGIGTIVGSAVFNILFVIGMCALFSREILNLTWWPLFRDVSFYIVDLIMLIIFFLDNVIMWWESLLLLTAYFCYVVFMKFNVQVEKWVKQMINRNKVVKVTAPEAQAKPSAARDKDEPTLPAKPRLQRGGSSASLHNSLMRNSIFQLMIHTLDPLAEGRFREKASILHKIAKKKCHVDENERQNGAANHVEKIELPNSTSTDVEMTPSSDASEPVQNGNLSHNIEGAEAQTADEEEDQPLSLAWPSETRKQVTFLIVFPIVFPLWITLPDVRKPSSRKFFPITFFGSITWIAVFSYLMVWWAHQVGETIGISEEIMGLTILAAGTSIPDLITSVIVARKGLGDMAVSSSVGSNIFDITVGLPLPWLLYTVIHRFQPVAVSSNGLFCAIVLLFIMLLFVILSIALCKWRMNKILGFIMFGLYFVFLVVSVLLEDRILTCPVSI

SEQ ID NO: 2859 - protein, 723 aa, Homo sapiens
METAMCVCCPCCTWQRCCPQLCSCLCCKFIFTSERNCTCFPCPYKDERNCQFCHCTCSESPNCHWCCCSWANDPNCKCCCTASSNLNCYYYESRCCRNTIITFHKGRLRSIHTSSKTALRTGSSDTQVDEVKSIPANSHLVNHLNCPMCSRLRLHSFMLPCNHSLCEKCLRQLQKHAEVTENFFILICPVCDRSHCMPYSNKMQLPENYLHGRLTKRYMQEHGYLKWRFDRSSGPILCQVCRNKRIAYKRCITCRLNLCNDCLKAFHSDVAMQDHVFVDTSAEEQDEKICIHHPSSRIIEYCRNDNKLLCTFCKFSFHNGHDTISLIDACSERAASLFSAIAKFKAVRYEIDNDLMEFNILKNSFKADKEAKRKEIRNGFLKLRSILQEKEKIIMEQIENLEVSRQKEIEKYVYVTTMKVNEMDGLIAYSKEALKETGQVAFLQSAKILVDQIEDGIQTTYRPDPQLRLHSINYVPLDFVELSSAIHELFPTGPKKVRSSGDSLPSPYPVHSETMIARKVTFSTHSLGNQHIYQRSSSMLSFSNTDKKAKVGLEACGRAQSATPAKPTDGLYTYWSAGADSQSVQNSSSFHNWYSFNDGSVKTPGPIVIYQTLVYPRAAKVYWTCPAEDVDSFEMEFYEVITSPPNNVQMELCGQIRDIMQQNLELHNLTPNTEYVFKVRAINDNGPGQWSDICKVVTPDGHGKNRAKWGLLKNIQSALQKHF

SEQ ID NO: 2860 - protein, 1251 aa, Homo sapiens
MELSDVRCLTGSEELYTIHPTPPAGDGRSASRPQRLLWQTAVRHITEQRFIHGHRGGSGSGSGGSGKASDPAGGGPNHHAPQLSGDSALPLYSLGPGERAHSTCGTKVFPERSGSGSASGSGGGGDLGFLHLDCAPSNSDFFLNGGYSYRGVIFPTLRNSFKSRDLERLYQRYFLGQRRKSEVVMNVLDVLTKLTLLVLHLSLASAPMDPLKGILLGFFTGIEVVICALVVVRKDTTSHTYLQYSGVVTWVAMTTQILAAGLGYGLLGDGIGYVLFTLFATYSMLPLPLTWAILAGLGTSLLQVILQVVIPRLAVISINQVVAQAVLFMCMNTAGIFISYLSDRAQRQAFLETRRCVEARLRLETENQRQERLVLSVLPRFVVLEMINDMTNVEDEHLQHQFHRIYIHRYENVSILFADVKGFTNLSTTLSAQELVRMLNELFARFDRLAHEHHCLRIKILGDCYYCVSGLPEPRQDHAHCCVEMGLSMIKTIRYVRSRTKHDVDMRIGIHSGSVLCGVLGLRKWQFDVWSWDVDIANKLESGGIPGRIHISKATLDCLNGDYNVEEGHGKERNEFLRKHNIETYLIKQPEDSLLSLPEDIVKESVSSSDRRNSGATFTEGSWSPELPFDNIVGKQNTLAALTRNSINLLPNHLAQALHVQSGPEEINKRIEHTIDLRSGDKLRREHIKPFSLMFKDSSLEHKYSQMRDEVFKSNLVCAFIVLLFITAIQSLLPSSRVMPMTIQFSILIMLHSALVLITTAEDYKCLPLILRKTCCWINETYLARNVIIFASILINFLGAILNILWCDFDKSIPLKNLTFNSSAVFTDICSYPEYFVFTGVLAMVTCAVFLRLNSVLKLAVLLIMIAIYALLTETVYAGLFLRYDNLNHSGEDFLGTKEVSLLLMAMFLLAVFYHGQQLEYTARLDFLWRVQAKEEINEMKELREHNENMLRNILPSHVARHFLEKDRDNEELYSQSYDAVGVMFASIPGFADFYSQTEMNNQGVECLRLLNEIIADFDELLGEDRFQDIEKIKTIGSTYMAVSGLSPEKQQCEDKWGHLCALADFSLALTESIQEINKHSFNNFELRIGISHGSVVAGVIGAKKPQYDIWGKTVNLASRMDSTGVSGRIQVPEETYLILKDQGFAFDYRGEIYVKGISEQEGKIKTYFLLGRVQPNPFILPPRRLPGQYSLAAVVLGLVQSLNRQRQKQLLNENNNTGIIKGHYNRRTLLSPSGTEPGAQAEGTDKSDLP

SEQ ID NO: 2861 - protein, 849 aa, Homo sapiens
MAAAAPAAAAASSEAPAASATAEPEAGDQDSREVRVLQSLRGKICEAKNLLPYLGPHKMRDCFCTINLDQEEVYRTQVVEKSLSPFFSEEFYFEIPRTFQYLSFYVYDKNVLQRDLRIGKVAIKKEDLCNHSGKETWFSLQPVDSNSEVQGKVHLELKLNELITENGTVCQQLVVHIKACHGLPLINGQSCDPYATVSLVGPSRNDQKKTKVKKKTSNPQFNEIFYFEVTRSSSYTRKSQFQVEEEDIEKLEIRIDLWNNGNLVQDVFLGEIKVPVNVLRTDSSHQAWYLLQPRDNGNKSSKTDDLGSLRLNICYTEDYVLPSEYYGPLKTLLLKSPDVQPISASAAYILSEICRDKNDAVLPLVRLLLHHDKLVPFATAVAELDLKDTQDANTIFRGNSLATRCLDEMMKIVGGHYLKVTLKPILDEICDSSKSCEIDPIKLKEGDNVENNKENLRYYVDKLFNTIVKSSMSCPTVMCDIFYSLRQMATQRFPNDPHVQYSAVSSFVFLRFFAVAVVSPHTFHLRPHHPDAQTIRTLTLISKTIQTLGSWGSLSKSKSSFKETFMCEFFKMFQEEGYIIAVKKFLDEISSTETKESSGTSEPVHLKEGEMYKRAQGRTRIGKKNFKKRWFCLTSRELTYHKQPGKDAIYTIPVKNILAVEKLEESSFNKKNMFQVIHTEKPLYVQANNCVEANEWIDVLCRVSRCNQNRLSFYHPSVYLNGNWLCCQETGENTLGCKPCTAGVPADIQIDIDEDRETERIYSLFTLSLLKLQKMEEACGTIAVYQGPQKEPDDYSNFVIEDSVTTFKTIQQIKSIIEKLDEPHEKYRKKRSSSAKYGSKENPIVGKAS

SEQ ID NO: 2862 - protein, 1197 aa, Homo sapiens
MHIKSIILEGFKSYAQRTEVNGFDPLFNAITGLNGSGKSNILDSICFLLGISNLSQVRASNLQDLVYKNGQAGITKASVSITFDNSDKKQSPLGFEVHDEITVTRQVVIGGRNKYLINGVNANNTRVQDLFCSVGLNVNNPHFLIMQGRITKVLNMKPPEILSMIEEAAGTRMYEYKKIAAQKTIEKKEAKLKEIKTILEEEITPTIQKLKEERSSYLEYQKVMREIEHLSRLYIAYQFLLAEDTKVRSAEELKEMQDKVIKLQEELSENDKKIKALNHEIEELEKRKDKETGGILRSLEDALAEAQRVNTKSQSAFDLKKKNLACEESKRKELEKNMVEDSKTLAAKEKEVKKITDGLHALQEASNKDAEALAAAQQHFNAVSAGLSSNEDGAEATLAGQMMACKNDISKAQTEAKQAQMKLKHAQQELKNKQAEVKKMDSGYRKDQEALEAVKRLKEKLEAEMKKLNYEENKEESLLEKRRQLSRDIGRLKETYEALLARFPNLRFAYKDPEKNWNRNCVKGLVASLISVKDTSATTALELVAGERLYNVVVDTEVTGKKLLERGELKRRYTIIPLNKISARCIAPETLRVAQNLVGPDNVHVALSLVEYKPELQKAMEFVFGTTFVCDNMDNAKKVAFDKRIMTRTVTLGGDVFDPHGTLSGGARSQAASILTKFQELKDVQDELRIKENELRALEEELAGLKNTAEKYRQLKQQWEMKTEEADLLQTKLQQSSYHKQQEELDALKKTIEESEETLKNTKEIQRKAEEKYEVLENKMKNAEAERERELKDAQKKLDCAKTKADASSKKMKEKQQEVEAITLELEELKREHTSYKQQLEAVNEAIKSYESQIEVMAAEVAKNKESVNKAQEEVTKQKEVITAQDTVIKAKYAEVAKHKEQNNDSQLKIKELDHNISKHKREAEDGAAKVSKMLKDYDWINAERHLFGQPNSAYDFKTNNPKEAGQRLQKLQEMKEKLGRNVNMRAMNVLTEAEERYNDLMKKKRIVENDKSKILTTIEDLDQKKNQALNIAWQKVNKDFGSIFSTLLPGANAMLAPPEGQTVLDGLEFKVALGNTWKENLTELSGGQRSLVALSLILSMLLFKPAPIYILDEVDAALDLSHTQNIGQMLRTHFTHSQFIVVSLKEGMFNNANVLFKTKFVDGVSTVARFTQCQNGKISKEAKSKAKPPKGAHVEV

SEQ ID NO: 2863 - protein, 952 aa, Homo sapiens
MKFKRRHQAFPSFFKMKVSLPSDPSCVEEILRESQHLTPGFTLQKWNDPTTRASTKSVSFKSMLEDDLKLSSDEDDLEPVKTLTTQCTATELYQAVEKAKPRNNPVNPPLATPQPPPAVQASGGSGSSSESESSSESDSDTESSTTDSESNEAPRVATPEPEPPSTNKWQLDKWLNKVTSQNKSFICGQNETPMETISLPPPIIQPMEVQMKVKTNASQVPAEPKERPLLSLIREKARPRPTQKIPETKALKHKLSTTSETVSQRTIGKKQPKKVEKNTSTDEFTWPKPNITSSTPKEKESVELHDPPRGRNKATAHKPAPRKEPRPNIPLAPEKKKYRGPGKIVPKSREFIETDSSTSDSNTDQEETLQIKVLPPCIISGGNTAKSKEICGASLTLSTLMSSSGSNNNLSISNEEPTFSPIPVMQTEILSPLRDHENLKNLWVKIDLDLLSRVPGHSSLHAAPAKPDHKETATKPKRQTAVTAVEKPAPKGKRKHKPIEVAEKIPEKKQRLEEATTICLLPPCISPAPPHKPPNTRENNSSRRANRRKEEKLFPPPLSPLPEDPPRRRNVSGNNGPFGQDKNIAMTGQITSTKPKRTEGKFCATFKGISVNEGDTPKKASSATITVTNTAIATATVTATAIVTTTVTATATATATTTTTTTTISTITSTITTGLMDSSHLEMTSWAALPLLSSSSTNVRRPKLTFDDSVHNADYYMQEAKKLKHKADALFEKFGKAVNYADAALSFTECGNAMERDPLEAKSPYTMYSETVELLRYAMRLKNFASPLASDGDKKLAVLCYRCLSLLYLRMFKLKKDHAMKYSRSLMEYFKQNASKVAQIPSPWVSNGKNTPSPVSLNNVSPINAMGNCNNGPVTIPQRIHHMAASHVNITSNVLRGYEHWDMADKLTRENKEFFGDLDTLMGPLTQHSSMTNLVRYVRQGLCWLRIDAHLL

SEQ ID NO: 2864 - protein, 943 aa, Homo sapiens
MAETNNECSIKVLCRFRPLNQAEILRGDKFIPIFQGDDSVVIGVSYFEIYLDKIRDLLDVTKTNLSVHEDKNRVPFVKGCTERFVSSPEEILDVIDEGKSNRHVAVTNMNEHSSRSHSIFLINIKQENMETEQKLSGKLYLVDLAGSEKVSKTGAEGAVLDEAKNINKSLSALGNVISALAEGTKSYVPYRDSKMTRILQDSLGGNCRTTMFICCSPSSYNDAETKSTLMFGQRAKTIKNTASVNLELTAEQWKKKYEKEKEKTKAQKETIAKLEAELSRWRNGENVPETERLAGEEAALGAELCEETPVNDNSSIVVRIAPEERQKYEEEIRRLYKQLDDKDDEINQQSQLIEKLKQQMLDQEELLVSTRGDNEKVQRELSHLQSENDAAKDEVKEVLQALEELAVNYDQKSQEVEEKSQQNQLLVDELSQKVATMLSLESELQRLQEVSGHQRKRIAEVLNGLMKDLSEFSVIVGNGEIKLPVEISGAIEEEFTVARLYISKIKSEVKSVVKRCRQLENLQVECHRKMEVTGRELSSCQLLISQHEAKIRSLTEYMQSVELKKRHLEESYDSLSDELAKLQAQETVHEVALKDKEPDTQDADEVKKALELQMESHREAHHRQLARLRDEINEKQKTIDELKDLNQKLQLELEKLQADYEKLKSEEHEKSTKLQELTFLYERHEQSKQDLKGLEETVARELQTLHNLRKLFVQDVTTRVKKSAEMEPEDSGGIHSQKQKISFLENNLEQLTKVHKQLVRDNADLRCELPKLEKRLRATAERVKALEGALKEAKEGAMKDKRRYQQEVDRIKEAVRYKSSGKRGHSAQIAKPVRPGHYPASSPTNPYGTRSPECISYTNSLFQNYQNLYLQATPSSTSDMYFANSCTSSGATSSGGPLASYQKANMDNGNATDINDNRSDLPCGYEAEDQAKLFPLHQETAAS

SEQ ID NO: 2865 - protein, 290 aa, Homo sapiens
MDIEAYFERIGYKNSRNKLDLETLTDILEHQIRAVPFENLNMHCGQAMELGLEAIFDHIVRRNRGGWCLQVNQLLYWALTTIGFQTTMLGGYFYIPPVNKYSTGMVHLLLQVTIDGRNYIVDAGSGSSSQMWQPLELISGKDQPQVPCIFCLTEERGIWYLDQIRREQYITNKEFLNSHLLPKKKHQKIYLFTLEPRTIEDFESMNTYLQTSPTSSFITTSFCSLQTPEGVYCLVGFILTYRKFNYKDNTDLVEFKTLTEEEVEEVLRNIFKISLGRNLVPKPGDGSLTI

SEQ ID NO: 2866 - protein, 513 aa, Homo sapiens
MGSSWCLYGCCNAGVKTTRLEAHSEMGSTEILEKETPENLSNGTSSNVEAAKRLAKRLYQLDRFKRSDVAKHLGKNNEFSKLVAEEYLKFFDFTGMTLDQSLRYFFKAFSLVGETQERERVLIHFSNRYFYCNPDTIASQDGVHCLTCAIMLLNTDLHGHNIGKKMTCQEFIANLQGVNEGVDFSKDLLKALYNSIKNEKLEWAVDDEEKKKSPSESTEEKANGTHPKTISRIGSTTNPFLDIPHDPNAAVYKSGFLARKIHADMDGKKTPRGKRGWKTFYAVLKGTVLYLQKDEYKPEKALSEEDLKNAVSVHHALASKATDYEKKPNVFKLKTADWRVLLFQTQSPEEMQGWINKINCVAAVFSAPPFPAAIGSQKKFSRPLLPATTTKLSQEEQLKSHESKLKQITTELAEHRSYPPDKKVKAKDVDEYKLKDHYLEFEKTRYEMYVSILKEGGKELLSNDESEAAGLKKSHSSPSLNPDTSPITAKVKRNVSERKDHRPETPSIKQKVT

SEQ ID NO: 2867 - protein, 1045 aa, Homo sapiens
MNLQAQPKAQNKRKRCLFGGQEPAPKEQPPPLQPPQQSIRVKEEQYLGHEGPGGAVSTSQPVELPPPSSLALLNSVVYGPERTSAAMLSQQVASVKWPNSVMAPGRGPERGGGGGVSDSSWQQQPGQPPPHSTWNCHSLSLYSATKGSPHPGVGVPTYYNHPEALKREKAGGPQLDRYVRPMMPQKVQLEVGRPQAPLNSFHAAKKPPNQSLPLQPFQLAFGHQVNRQVFRQGPPPPNPVAAFPPQKQQQQQQPQQQQQQQQAALPQMPLFENFYSMPQQPSQQPQDFGLQPAGPLGQSHLAHHSMAPYPFPPNPDMNPELRKALLQDSAPQPALPQVQIPFPRRSRRLSKEGILPPSALDGAGTQPGQEATGNLFLHHWPLQQPPPGSLGQPHPEALGFPLELRESQLLPDGERLAPNGREREAPAMGSEEGMRAVSTGDCGQVLRGGVIQSTRRRRRASQEANLLTLAQKAVELASLQNAKDGSGSEEKRKSVLASTTKCGVEFSEPSLATKRAREDSGMVPLIIPVSVPVRTVDPTEAAQAGGLDEDGKGPEQNPAEHKPSVIVTRRRSTRIPGTDAQAQAEDMNVKLEGEPSVRKPKQRPRPEPLIIPTKAGTFIAPPVYSNITPYQSHLRSPVRLADHPSERSFELPPYTPPPILSPVREGSGLYFNAIISTSTIPAPPPITPKSAHRTLLRTNSAEVTPPVLSVMGEATPVSIEPRINVGSRFQAEIPLMRDRALAAADPHKADLVWQPWEDLESSREKQRQVEDLLTAACSSIFPGAGTNQELALHCLHESRGDILETLNKLLLKKPLRPHNHPLATYHYTGSDQWKMAERKLFNKGIAIYKKDFFLVQKLIQTKTVAQCVEFYYTYKKQVKIGRNGTLTFGDVDTSDEKSAQEEVEVDIKTSQKFPRVPLPRRESPSEERLEPKREVKEPRKEGEEEVPEIQEKEEQEEGRERSRRAAAVKATQTLQANESASDILILRSHESNAPGSAGGQASEKPREGTGKSRRALPFSEKKKKTETFSKTQNQENTFPCKKCGR

SEQ ID NO: 2868 - protein, 647 aa, Homo sapiens
MTVGRPEGAPGGAEGSRQIFPPESFADTEAGEELSGDGLVLPRASKLDEFLSPEEEIDSTSDSTGSIYQNLQELKQKGRWCLLESLFQSDPESDENLSEDEEDLESFFQDKDRGMVQVQCPQALRCGSTRRCSSLNNLPSNIPRPQTQPPSGSRPPSQHRSVSSWASSITVPRPFRMTLREARKKAEWLGSPASFEQERQRAQRQGEEEAECHRQFRAQPVPAHVYLPLYQEIMERSEARRQAGIQKRKELLLSSLKPFSFLEKEEQLKEAARQRDLAATAEAKISKQKATRRIPKSILEPALGDKLQEAELFRKIRIQMRALDMLQMASSPIASSSNRANPQPRTATRTQQEKLGFLHTNFRFQPRVNPVVPDYEGLYKAFQRRAAKRRETQEATRNKPFLLRTANLRHPQRPCDAATTGRRQDSPQPPATPLPRSRSLSGLASLSANTLPVHITDATRKRESAVRSALEKKNKADESIQWLEIHKKKSQAMSKSVTLRAKAMDPHKSLEEVFKAKLKENRNNDRKRAKEYKKELEEMKQRIQTRPYLFEQVAKDLAKKEAEQWYLDTLKQAGLEEDFVRNKGQGTRAVQEKETKIKDFPRFQETTKLSIRDPEQGLEGSLEQPASPRKVLEELSHQSPENLVSLA

SEQ ID NO: 2869 - protein, 379 aa, Homo sapiens
MARRSAFPAAALWLWSILLCLLALRAEAGPPQEESLYLWIDAHQARVLIGFEEDILIVSEGKMAPFTHDFRKAQQRMPAIPVNIHSMNFTWQAAGQAEYFYEFLSLRSLDKGIMADPTVNVPLLGTVPHKASVVQVGFPCLGKQDGVAAFEVDVIVMNSEGNTILQTPQNAIFFKTCQQAECPGGCRNGGFCNERRICECPDGFHGPHCEKALCTPRCMNGGLCVTPGFCICPPGFYGVNCDKANCSTTCFNGGTCFYPGKCICPPGLEGEQCEISKCPQPCRNGGKCIGKSKCKCSKGYQGDLCSKPVCEPGCGAHGTCHEPNKCQCQEGWHGRHCNKRYEASLIHALRPAGAQLRQHTPSLKKAEERRDPPESNYIW

SEQ ID NO: 2870 - protein, 527 aa, Homo sapiens
MLNNLLLFSLQISLIGTTLGGNVLIWPMEGSHWLNVKIIIDELIKKEHNVTVLVASGALFITPTSNPSLTFEIYKVPFGKERIEGVIKDFVLTWLENRPSPSTIWRFYQEMAKVIKDFHMVSQEICDGVLKNQQLMAKLKKSKFEVLVSDPVFPCGDIVALKLGIPFMYSLRFSPASTVEKHCGKVPYPPSYVPAVLSELTDQMSFTDRIRNFISYHLQDYMFETLWKSWDSYYSKALGGLLLCCPGWSAVADLGSLQPLLPGFKRFSRLSLHCSWDYRLPAGRPTTLCETMGKAEIWLIRTYWDFEFPRPYLPNFEFVGGLHCKPAKPLPKVLWRYKGKKPATLGNNTQLFDWIPQNDLLGHPKTKAFITHGGTNGIYEAIYHGVPMVGVPMFADQPDNIAHMKAKGAAVEVNLNTMTSVDLLSALRTVINEPSYKENAMRLSRIHHDQPVKPLDRAVFWIEFVMRHKGAKHLRVAAHDLTWFQYHSLDVIGFLLVCVTTAIFLVIQCCLFSCQKFGKIGKKKKRE

SEQ ID NO: 2871 - protein, 607 aa, Homo sapiens
MILLTFSTGRRLDFVHHSGVFFLQTLLWILCATVCGTEQYFNVEVWLQKYGYLPPTDPRMSVLRSAETMQSALAAMQQFYGINMTGKVDRNTIDWMKKPRCGVPDQTRGSSKFHIRRKRYALTGQKWQHKHITYSIKNVTPKVGDPETRKAIRRAFDVWQNVTPLTFEEVPYSELENGKRDVDITIIFASGFHGDSSPFDGEGGFLAHAYFPGPGIGGDTHFDSDEPWTLGNPNHDGNDLFLVAVHELGHALGLEHSNDPTAIMAPFYQYMETDNFKLPNDDLQGIQKIYGPPDKIPPPTRPLPTVPPHRSIPPADPRKNDRPKPPRPPTGRPSYPGAKPNICDGNFNTLAILRREMFVFKDQWFWRVRNNRVMDGYPMQITYFWRGLPPSIDAVYENSDGNFVFFKGNKYWVFKDTTLQPGYPHDLITLGSGIPPHGIDSAIWWEDVGKTYFFKGDRYWRYSEEMKTMDPGYPKPITVWKGIPESPQGAFVHKENGFTYFYKGKEYWKFNNQILKVEPGYPRSILKDFMGCDGPTDRVKEGHSPPDDVDIVIKLDNTASTVKAIAIVIPCILALCLLVLVYTVFQFKRKGTPRHILYCKRSMQEWV

SEQ ID NO: 2872 - protein, 1178 aa, Homo sapiens
MANGGGGGGGSSGGGGGGGGSSLRMSSNIHANHLSLDASSSSSSSSSSSSSSSSSSSSSSVHEPKMDALIIPVTMEVPCDSRGQRMWWAFLASSMVTFFGGLFIILLWRTLKYLWTVCCHCGGKTKEAQKINNGSSQADGTLKPVDEKEEAVAAEVGWMTSVKDWAGVMISAQTLTGRVLVVLVFALSIGALVIYFIDSSNPIESCQNFYKDFTLQIDMAFNVFFLLYFGLRFIAANDKLWFWLEVNSVVDFFTVPPVFVSVYLNRSWLGLRFLRALRLIQFSEILQFLNILKTSNSIKLVNLLSIFISTWLTAAGFIHLVENSGDPWENFQNNQALTYWECVYLLMVTMSTVGYGDVYAKTTLGRLFMVFFILGGLAMFASYVPEIIELIGNRKKYGGSYSAVSGRKHIVVCGHITLESVSNFLKDFLHKDRDDVNVEIVFLHNISPNLELEALFKRHFTQVEFYQGSVLNPHDLARVKIESADACLILANKYCADPDAEDASNIMRVISIKNYHPKIRIITQMLQYHNKAHLLNIPSWNWKEGDDAICLAELKLGFIAQSCLAQGLSTMLANLFSMRSFIKIEEDTWQKYYLEGVSNEMYTEYLSSAFVGLSFPTVCELCFVKLKLLMIAIEYKSANRESRILINPGNHLKIQEGTLGFFIASDAKEVKRAFFYCKACHDDITDPKRIKKCGCKRLEDEQPSTLSPKKKQRNGGMRNSPNTSPKLMRHDPLLIPGNDQIDNMDSNVKKYDSTGMFHWCAPKEIEKVILTRSEAAMTVLSGHVVVCIFGDVSSALIGLRNLVMPLRASNFHYHELKHIVFVGSIEYLKREWETLHNFPKVSILPGTPLSRADLRAVNINLCDMCVILSANQNNIDDTSLQDKECILASLNIKSMQFDDSIGVLQANSQGFTPPGMDRSSPDNSPVHGMLRQPSITTGVNIPIITELVNDTNVQFLDQDDDDDPDTELYLTQPFACGTAFAVSVLDSLMSATYFNDNILTLIRTLVTGGATPELEALIAEENALRGGYSTPQTLANRDRCRVAQLALLDGPFADLGDGGCYGDLFCKALKTYNMLCFGIYRLRDAHLSTPSQCTKRYVITNPPYEFELVPTDLIFCLMQFDHNAGQSRASLSHSSHSSQSSSKKSSSVHSIPSTANRQNRPKSRESRDKQKYVQEERL

SEQ ID NO: 2873 - protein, 1236 aa, Homo sapiens
MANGGGGGGGSSGGGGGGGGSSLRMSSNIHANHLSLDASSSSSSSSSSSSSSSSSSSSSSVHEPKMDALIIPVTMEVPCDSRGQRMWWAFLASSMVTFFGGLFIILLWRTLKYLWTVCCHCGGKTKEAQKINNGSSQADGTLKPVDEKEEAVAAEVGWMTSVKDWAGVMISAQTLTGRVLVVLVFALSIGALVIYFIDSSNPIESCQNFYKDFTLQIDMAFNVFFLLYFGLRFIAANDKLWFWLEVNSVVDFFTVPPVFVSVYLNRSWLGLRFLRALRLIQFSEILQFLNILKTSNSIKLVNLLSIFISTWLTAAGFIHLVENSGDPWENFQNNQALTYWECVYLLMVTMSTVGYGDVYAKTTLGRLFMVFFILGGLAMFASYVPEIIELIGNRKKYGGSYSAVSGRKHIVVCGHITLESVSNFLKDFLHKDRDDVNVEIVFLHNISPNLELEALFKRHFTQVEFYQGSVLNPHDLARVKIESADACLILANKYCADPDAEDASNIMRVISIKNYHPKIRIITQMLQYHNKAHLLNIPSWNWKEGDDAICLAELKLGFIAQSCLAQGLSTMLANLFSMRSFIKIEEDTWQKYYLEGVSNEMYTEYLSSAFVGLSFPTVCELCFVKLKLLMIAIEYKSANRESRILINPGNHLKIQEGTLGFFIASDAKEVKRAFFYCKACHDDITDPKRIKKCGCKRPKMSIYKRMRRACCFDCGRSERDCSCMSGRVRGNVDTLERAFPLSSVSVNDCSTSFRAFEDEQPSTLSPKKKQRNGGMRNSPNTSPKLMRHDPLLIPGNDQIDNMDSNVKKYDSTGMFHWCAPKEIEKVILTRSEAAMTVLSGHVVVCIFGDVSSALIGLRNLVMPLRASNFHYHELKHIVFVGSIEYLKREWETLHNFPKVSILPGTPLSRADLRAVNINLCDMCVILSANQNNIDDTSLQDKECILASLNIKSMQFDDSIGVLQANSQGFTPPGMDRSSPDNSPVHGMLRQPSITTGVNIPIITELVNDTNVQFLDQDDDDDPDTELYLTQPFACGTAFAVSVLDSLMSATYFNDNILTLIRTLVTGGATPELEALIAEENALRGGYSTPQTLANRDRCRVAQLALLDGPFADLGDGGCYGDLFCKALKTYNMLCFGIYRLRDAHLSTPSQCTKRYVITNPPYEFELVPTDLIFCLMQFDHNAGQSRASLSHSSHSSQSSSKKSSSVHSIPSTANRQNRPKSRESRDKQKYVQEERL

SEQ ID NO: 2874 - protein, 260 aa, Homo sapiens [sequence omitted]

SEQ ID NO: 2875 - protein, 1205 aa, Homo sapiens
MVLLSLWLIAAALVEVRTSADGQAGNEEMVQIDLPIKRYREYELVTPVSTNLEGRYLSHTLSASHKKRSARDVSSNPEQLFFNITAFGKDFHLRLKPNTQLVAPGAVVEWHETSLVPGNITDPINNHQPGSATYRIRRTEPLQTNCAYVGDIVDIPGTSVAISNCDGLAGMIKSDNEEYFIEPLERGKQMEEEKGRIHVVYKRSAVEQAPIDMSKDFHYRESDLEGLDDLGTVYGNIHQQLNETMRRRRHAGENDYNIEVLLGVDDSVVRFHGKEHVQNYLLTLMNIVNEIYHDESLGVHINVVLVRMIMLGYAKSISLIERGNPSRSLENVCRWASQQQRSDLNHSEHHDHAIFLTRQDFGPAGMQGYAPVTGMCHPVRSCTLNHEDGFSSAFVVAHETGHVLGMEHDGQGNRCGDETAMGSVMAPLVQAAFHRYHWSRCSGQELKRYIHSYDCLLDDPFDHDWPKLPELPGINYSMDEQCRFDFGVGYKMCTAFRTFDPCKQLWCSHPDNPYFCKTKKGPPLDGTECAAGKWCYKGHCMWKNANQQKQDGNWGSWTKFGSCSRTCGTGVRFRTRQCNNPMPINGGQDCPGVNFEYQLCNTEECQKHFEDFRAQQCQQRNSHFEYQNTKHHWLPYEHPDPKKRCHLYCQSKETGDVAYMKQLVHDGTHCSYKDPYSICVRGECVKVGCDKEIGSNKVEDKCGVCGGDNSHCRTVKGTFTRTPRKLGYLKMFDIPPGARHVLIQEDEASPHILAIKNQATGHYILNGKGEEAKSRTFIDLGVEWDYNIEDDIESLHTDGPLHDPVIVLIIPQENDTRSSLTYKYIIHEDSVPTINSNNVIQEELDTFEWALKSWSQCSKPCGGGFQYTKYGCRRKSDNKMVHRSFCEANKKPKPIRRMCNIQECTHPLWVAEEWEHCTKTCGSSGYQLRTVRCLQPLLDGTNRSVHSKYCMGDRPESRRPCNRVPCPAQWKTGPWSECSVTCGEGTEVRQVLCRAGDHCDGEKPESVRACQLPPCNDEPCLGDKSIFCQMEVLARYCSIPGYNKLCCESCSKRSSTLPPPYLLEAAETHDDVISNPSDLPRSLVMPTSLVPYHSETPAKKMSLSSISSVGGPNAYAAFRPNSKPDGANLRQRSAQQAGSKTVRLVTVPSSPPTKRVHLSSASQMAAASFFAASDSIGASSQARTSKKDGKIIDNRRPTRSSTLER

SEQ ID NO: 2876 - protein, 288 aa, Homo sapiens [sequence omitted]

SEQ ID NO: 2877 - protein, 753 aa, Homo sapiens
MGSGTSTQHHFAFQNAERAFKAAALIQRWYRRYVARLEMRRRCTWSIFQSIEYAGQQDQVKLHDFFSYLMDHFIPSSHNDRDFLTRIFTEDRFAQDSEMKKCSDYESIEVPDSYTGPRLSFPLLPDHATALVEAFRLKQQLHARYVLNLLYETKKHLVQLPNINRVSTCYSEEITVCGDLHGQLDDLIFIFYKNGLPSPERSYVFNGDFVDRGKDSVEILMILFAFMLVYPKEFHLNRGNHEDHMVNLRYGFTKEVMNKYKVHGKEILRTLQDVFCWLPLATLIDEKVLILHGGVSDITDLELLDKIERSKIVSTMRCKTRQKSEKQMEEKRRANQKSSAQGPIPWFLPESRSLPSSPLRLGSYKAQKTSRSSSIPCSGSLDGRELSRQVRSSVELELERCRQQAGLLVTGEKEEPSRSASEADSEAGELRKPTQEEWRQVVDILWSDPMAQEGCKANTIRGGGCYFGPDVTQQLLQKYNMQFLIRSHECKPEGYEFCHNRKVLTIFSASNYYEVGSNRGAYVKLGPALTPHIVQYQANKVTHTLTMRQRISRVEESALRALREKLFAHSSDLLSEFKKHDADKVGLITLSDWAAAVESVLHLGLPWRMLRPQLVNSSADNMLEYKSWLKNLAKEQLSRENIQSSLLETLYRNRSNLETIFRIIDSDHSGFISLDEFRQTWKLFSSHMNIDITDDCICDLARSIDFNKDGHIDINEFLEAFRLVEKSCPEGDASECPQATNAKDSGCSSPGAH

SEQ ID NO: 2878 - protein, 301 aa, Homo sapiens
MAQNVYGPGVRIGNWNEDVYLEEELMKDFLEKRDKGKLLIQRSRRLKQNLLRPMQLSVTEDGYIHYGDKVMLVNPDDPDTEADVFLRGDLSLCMTPDEIQSHLKDELEVPCGLSAVQAKTPIGRNTFIILSVHRDATGQVLRYGQDFCLGITGGFDNKMLYLSSDHRTLLKSSKRSWLQEVYLTDEVSHVNCWQAAFPDPQLRLEYEGFPVPANAKILINHCHTNRGLAAHRHLFLSTYFGKEAEVVAHTYLDSHRVEKPRNHWMLVTGNPRDASSSMLDLPKPPTEDTRAMEQAMGLDTQ

SEQ ID NO: 2879 - protein, 1691 aa, Homo sapiens
MASWTSPWWVLIGMVFMHSPLPQTTAEKSPGAYFLPEFALSPQGSFLEDTTGEQFLTYRYDDQTSRNTRSDEDKDGNWDAWGDWSDCSRTCGGGASYSLRRCLTGRNCEGQNIRYKTCSNHDCPPDAEDFRAQQCSAYNDVQYQGHYYEWLPRYNDPAAPCALKCHAQGQNLVVELAPKVLDGTRCNTDSLDMCISGICQAVGCDRQLGSNAKEDNCGVCAGDGSTCRLVRGQSKSHVSPEKREENVIAVPLGSRSVRITVKGPAHLFIESKTLQGSKGEHSFNSPGVFLVENTTVEFQRGSERQTFKIPGPLMADFIFKTRYTAAKDSVVQFFFYQPISHQWRQTDFFPCTVTCGGGYQLNSAECVDIRLKRVVPDHYCHYYPENVKPKPKLKECSMDPCPSSDGFKEIMPYDHFQPLPRWEHNPWTACSVSCGGGIQRRSFVCVEESMHGEILQVEEWKCMYAPKPKVMQTCNLFDCPKWIAMEWSQCTVTCGRGLRYRVVLCINHRGEHVGGCNPQLKLHIKEECVIPIPCYKPKEKSPVEAKLPWLKQAQELEETRIATEEPTFIPEPWSACSTTCGPGVQVREVKCRVLLTFTQTETELPEEECEGPKLPTERPCLLEACDESPASRELDIPLPEDSETTYDWEYAGFTPCTATCVGGHQEAIAVCLHIQTQQTVNDSLCDMVHRPPAMSQACNTEPCPPRWHVGSWGPCSATCGVGIQTRDVYCLHPGETPAPPEECRDEKPHALQACNQFDCPPGWHIEEWQQCSRTCGGGTQNRRVTCRQLLTDGSFLNLSDELCQGPKASSHKSCARTDCPPHLAVGDWSKCSVSCGVGIQRRKQVCQRLAAKGRRIPLSEMMCRDLPGLPLVRSCQMPECSKIKSEMKTKLGEQGPQILSVQRVYIQTREEKRINLTIGSRAYLLPNTSVIIKCPVRRFQKSLIQWEKDGRCLQNSKRLGITKSGSLKIHGLAAPDIGVYRCIAGSAQETVVLKLIGTDNRLIARPALREPMREYPGMDHSEANSLGVTWHKMRQMWNNKNDLYLDDDHISNQPFLRALLGHCSNSAGSTNSWELKNKQFEAAVKQGAYSMDTAQFDELIRNMSQLMETGEVSDDLASQLIYQLVAELAKAQPTHMQWRGIQEETPPAAQLRGETGSVSQSSHAKNSGKLTFKPKGPVLMRQSQPPSISFNKTINSRIGNTVYITKRTEVINILCDLITPSEATYTWTKDGTLLQPSVKIILDGTGKIQIQNPTRKEQGIYECSVANHLGSDVESSSVLYAEAPVILSVERNITKPEHNHLSVVVGGIVEAALGANVTIRCPVKGVPQPNITWLKRGGSLSGNVSLLFNGSLLLQNVSLENEGTYVCIATNALGKAVATSVLHLLERRWPESRIVFLQGHKKYILQATNTRTNSNDPTGEPPPQEPFWEPGNWSHCSATCGHLGARIQRPQCVMANGQEVSEALCDHLQKPLAGFEPCNIRDCPARWFTSVWSQCSVSCGEGYHSRQVTCKRTKANGTVQVVSPRACAPKDRPLGRKPCFGHPCVQWEPGNRCPGRCMGRAVRMQQRHTACQHNSSDSNCDDRKRPTLRRNCTSGACDVCWHTGPWKPCTAACGRGFQSRKVDCIHTRSCKPVAKRHCVQKKKPISWRHCLGPSCDRDCTDTTHYCMFVKHLNLCSLDRYKQRCCQSCQEG

SEQ ID NO: 2880 - protein, 809 aa, Homo sapiens
MEDEQPDSLEGWVPVREGLFAEPERHRLRFLVAWNGAEGKFAVTCHDRTAQQRRLREGARLGPEPEPKPEAAVSPSSWAGLLSAAGLRGAHRQLAALWPPLERCFPRLPPELDVGGGGAWGLGLGLWALLWPTRAGPGEAALQELCGQLERYLGAAADGCGGATVRDALFPAEGGAADCESPREFRERALRARWVEADARLRQVIQGHGKANTMVALMNVYQEEDEAYQELVTVATMFFQYLLQPFRAMREVATLCKLDILKSLDEDDLGPRRVVALEKEAEEWTRRAEEAVVSIQDITVNYFKETVKALAGMQKEMEQDAKRFGQAAWATAIPRLEKLQLMLARETLQLMRAKELCLNHKRAEIQGKMEDLPEQEKNTNVVDELEIQFYEIQLELYEVKFEILKNEEILLTTQLDSLKRLIKEKQDEVVYYDPCENPEELKVIDCVVGLQDDKNLEVKELRRQCQQLESKRGRICAKRASLRSRKDQCKENHRFRLQQAEESIRYSRQHHSIQMKRDKIKEEEQKKKEWINQERQKTLQRLRSFKDKRLAQSVRNTSGSEPVAPNLPSDLSQQMCLPASHAVSVIHPSSRKTRGVPLSEAGNVKSPKCQNCHGNIPVQVFVPVGDQTHSKSSEELSLPPPPPPPPPPPPPPPPPPPPLRALSSSSQAATHQNLGFRAPVKDDQPRPLVCESPAERPRDSLESFSCPGSMDEVLASLRHGRAPLRKVEVPAVRPPHASINEHILAAIRQGVKLKKVHPDLGPNPSSKPTSNRRTSDLERSIKAALQRIKRVSADSEEDSDEQDPGQWDG

SEQ ID NO: 2881 - protein, 736 aa, Homo sapiens
MSLSENSVFAYESSVHSTNVLLSLNDQRKKDVLCDVTIFVEGQRFRAHRSVLAACSSYFHSRIVGQADGELNITLPEEVTVKGFEPLIQFAYTAKLILSKENVDEVCKCVEFLSVHNIEESCFQFLKFKFLDSTADQQECPRKKCFSSHCQKTDLKLSLLDQRDLETDEVEEFLENKNVQTPQCKLRRYQGNAKASPPLQDSASQTYESMCLEKDAALALPSLCPKYRKFQKAFGTDRVRTGESSVKDIHASVQPNERSENECLGGVPECRDLQVMLKCDESKLAMEPEETKKDPASQCPTEKSEVTPFPHNSSIDPHGLYSLSLLHTYDQYGDLNFAGMQNTTVLTEKPLSGTDVQEKTFGESQDLPLKSDLGTREDSSVASSDRSSVEREVAEHLAKGFWSDICSTDTPCQMQLSPAVAKDGSEQISQKRSECPWLGIRISESPEPGQRTFTTLSSVNCPFISTLSTEGCSSNLEIGNDDYVSEPQQEPCPYACVISLGDDSETDTEGDSESCSAREQECEVKLPFNAQRIISLSRNDFQSLLKMHKLTPEQLDCIHDIRRRSKNRIAAQRCRKRKLDCIQNLESEIEKLQSEKESLLKERDHILSTLGETKQNLTGLCQKVCKEAALSQEQIQILAKYSAADCPLSFLISEKDKSTPDGELALPSIFSLSDRPPAVLPPCARGNSEPGYARGQESQQMSTATSEQAGPAEQCRQSGGISDFCQQMTDKCTTDE

SEQ ID NO: 2882 - protein, 1591 aa, Homo sapiens
MGNAESQHVEHEFYGEKHASLGRKHTSRSLRLSHKTRRTRHASSGKVIHRNSEVSTRSSSTPSIPQSLAENGLEPFSQDGTLEDFGSPIWVDRVDMGLRPVSYTDSSVTPSVDSSIVLTAASVQSMPDTEESRLYGDDATYLAEGGRRQHSYTSNGPTFMETASFKKKRSKSADIWREDSLEFSLSDLSQEHLTSNEEILGSAEEKDCEEARGMETRASPRQLSTCQRANSLGDLYAQKNSGVTANGGPGSKFAGYCRNLVSDIPNLANHKMPPAAAEETPPYSNYNTLPCRKSHCLSEGATNPQISHSNSMQGRRAKTTQDVNAGEGSEFADSGIEGATTDTDLLSRRSNATNSSYSPTTGRAFVGSDSGSSSTGDAARQGVYENFRRELEMSTTNSESLEEAGSAHSDEQSSGTLSSPGQSDILLTAAQGTVRKAGALAVKNFLVHKKNKKVESATRRKWKHYWVSLKGCTLFFYESDGRSGIDHNSIPKHAVWVENSIVQAVPEHPKKDFVFCLSNSLGDAFLFQTTSQTELENWITAIHSACATAVARHHHKEDTLRLLKSEIKKLEQKIDMDEKMKKMGEMQLSSVTDSKKKKTILDQIFVWEQNLEQFQMDLFRFRCYLASLQGGELPNPKRLLAFASRPTKVAMGRLGIFSVSSFHALVAARTGETGVRRRTQAMSRSASKRRSRFSSLWGLDTTSKKKQGRPSINQVFGEGTEAVKKSLEGIFDDIVPDGKREKEVVLPNVHQHNPDCDIWVHEYFTPSWFCLPNNQPALTVVRPGDTARDTLELICKTHQLDHSAHYLRLKFLIENKMQLYVPQPEEDIYELLYKEIEICPKVTQSIHIEKSDTAADTYGFSLSSVEEDGIRRLYVNSVKETGLASKKGLKAGDEILEINNRAADALNSSMLKDFLSQPSLGLLVRTYPELEEGVELLESPPHRVDGPADLGESPLAFLTSNPGHSLCSEQGSSAETAPEETEGPDLESSDETDHSSKSTEQVAAFCRSLHEMNPSDQSPSPQDSTGPQLATMRQLSDADKLRKVICELLETERTYVKDLNCLMERYLKPLQKETFLTQDELDVLFGNLTEMVEFQVEFLKTLEDGVRLVPDLEKLEKVDQFKKVLFSLGGSFLYYADRFKLYSAFCASHTKVPKVLVKAKTDTAFKAFLDAQNPKQQHSSTLESYLIKPIQRILKYPLLLRELFALTDAESEEHYHLDVAIKTMNKVASHINEMQKIHEEFGAVFDQLIAEQTGEKKEVADLSMGDLLLHTTVIWLNPPASLGKWKKEPELAAFVFKTAVVLVYKDGSKQKKKLVGSHRLSIYEDWDPFRFRHMIPTEALQVRALASADAEANAVCEIVHVKSESEGRPERVFHLCCSSPESRKDFLKAVHSILRDKHRRQLLKTESLPSSQQYVPFGGKRLCALKGARPAMSRAVSAPSKSLGRRRRRLARNRFTIDSDAVSASSPEKESQQPPGGGDTDRWVEEQFDLAQYEEQDDIKETDILSDDDEFCESVKGASVDRDLQERLQATSISQRERGRKTLDSHASRMAQLKKQAALSGINGGLESASEEVIWVRREDFAPSRKLNTEI

SEQ ID NO: 2883 - protein, 1147 aa, Homo sapiens
MDAVNAFNQELFSLMDMKPPISRAKMILITKAAIKAIKLYKHVVQIVEKFIKKCKPEYKVPGLYVIDSIVRQSRHQFGTDKDVFGPRFSKNITATFQYLYLCPSEDKSKIVRVLNLWQKNGVFKIEIIQPLLDMAAGTSNAAPVAENVTNNEGSPPPPVKVSSEPPTQATPNSVPAVPQLPSSDAFAAVAQLFQTTQGQQLQQILQTFQQPPKPQSPALDNAVMAQVQAITAQLKTTPTQPSEQKAAFPPPEQKTAFDKKLLDRFDYDDEPEAVEESKKEDTTAVTTTAPAAAVPPAPTATVPAAAAPAAASPPPPQAPFGFPGDGMQQPAYTQHQNMDQFQPRMMGIQQDPMHHQVPLPPNGQMPGFGLLPTPPFPPMAQPVIPPTPPVQQPFQASFQAQNEPLTQKPHQQEMEVEQPCIQEVKRHMSDNRKSRSRSASRSPKRRRSRSGSRSRRSRHRRSRSRSRDRRRHSPRSRSQERRDREKERERRQKGLPQVKPETASVCSTTLWVGQLDKRTTQQDVASLLEEFGPIESINMIPPRGCAYIVMVHRQDAYRALQKLSRGNYKVNQKSIKIAWALNKGIKADYKQYWDVELGVTYIPWDKVKPEELESFCEGGMLDSDTLNPDWKGIPKKPENEVAQNGGAETSHTEPVSPIPKPLPVPVPPIPVPAPITVPPPQVPPHQPGPPVVGALQPPAFTPPLGIPPPGFGPGVPPPPPPPPFLRPGFNPMHLPPGFLPPGPPPPITPPVSIPPPHTPPISIPNSTIAGINEDTTKDLSIGNPIPTVVSGARGNAESGDSVKMYGSAVPPAAPTNLPTPPVTQPVSLLGTQGVAPGPVIGLQAPSTGLLGARPGLIPLQRPPGMPPPHLQRFPLMPPRPMPPHMMHRGPPPGPGGFAMPPPHGMKGPFPPHGPFVRPGGMPGLGGPGPGPGGPEDRDGRQQPPQQPQQQPQPQAPQQPQQQQQQQPPPSQQPPPTQQQPQQFRNDNRQQFNSGRDQERFGRRSFGNRVENDRERYGNRNDDRDNSNRDRREWGRRSPDRDRHRDLEERNRRSSGHRDRERDSRDRESRREKEEARGKEKPEVTDRAGGNKTVEPPISQVGNVDTASELEKGVSEAAVLKPSEELPAEATSSVEPEKDSGSAAEAPR

SEQ ID NO: 2884 - protein, 1237 aa, Homo sapiens
MDSGAGGRRCPEAALLILGPPRMEHLRHSPGPGGQRLLLPSMLLALLLLLAPSPGHATRVVYKVPEEQPPNTLIGSLAADYGFPDVGHLYKLEVGAPYLRVDGKTGDIFTTETSIDREGLRECQNQLPGDPCILEFEVSITDLVQNGSPRLLEGQIEVQDINDNTPNFASPVITLAIPENTNIGSLFPIPLASDRDAGPNGVASYELQAGPEAQELFGLQVAEDQEEKQPQLIVMGNLDRERWDSYDLTIKVQDGGSPPRASSALLRVTVLDTNDNAPKFERPSYEAELSENSPIGHSVIQVKANDSDQGANAEIEYTFHQAPEVVRRLLRLDRNTGLITVQGPVDREDLSTLRFSVLAKDRGTNPKSARAQVVVTVKDMNDNAPTIEIRGIGLVTHQDGMANISEDVAEETAVALVQVSDRDEGENAAVTCVVAGDVPFQLRQASETGSDSKKKYFLQTTTPLDYEKVKDYTIEIVAVDSGNPPLSSTNSLKVQVVDVNDNAPVFTQSVTEVAFPENNKPGEVIAEITASDADSGSNAELVYSLEPEPAAKGLFTISPETGEIQVKTSLDREQRESYELKVVAADRGSPSLQGTATVLVNVLDCNDNDPKFMLSGYNFSVMENMPALSPVGMVTVIDGDKGENAQVQLSVEQDNGDFVIQNGTGTILSSLSFDREQQSTYTFQLKAVDGGVPPRSAYVGVTINVLDENDNAPYITAPSNTSHKLLTPQTRLGETVSQVAAEDFDSGVNAELIYSIAGGNPYGLFQIGSHSGAITLEKEIERRHHGLHRLVVKVSDRGKPPRYGTALVHLYVNETLANRTLLETLLGHSLDTPLDIDIAGDPEYERSKQRGNILFGVVAGVVAVALLIALAVLVRYCRQREAKSGYQAGKKETKDLYAPKPSGKASKGNKSKGKKSKSPKPVKPVEDEDEAGLQKSLKFNLMSDAPGDSPRIHLPLNYPPGSPDLGRHYRSNSPLPSIQLQPQSPSASKKHQVVQDLPPANTFVGTGDTTSTGSEQYSDYSYRTNPPKYPSKQLPHRRVTFSATSQAQELQDPSQHSYYDSGLEESETPSSKSSSGPRLGPLALPEDHYERTTPDGSIGEMEHPENDLRPLPDVAMTGTCTRECSEFGHSDTCWMPGQSSPSRRTKSSALKLSTFVPYQDRGGQEPAGAGSPSPPEDRNTKTAPVRLLPSYSAFSHSSHDSCKDSATLEEIPLTQTSDFPPAATPASAQTAKREIYL

SEQ ID NO: 2885 - protein, 455 aa, Homo sapiens
MDTPRVLLSAVFLISFLWDLPGFQQASISSSSSSAELGSTKGMRSRKEGKMQRAPRDSDAGREGQEPQPRPQDEPRAQQPRAQEPPGRGPRVVPHEYMLSIYRTYSIAEKLGINASFFQSSKSANTITSFVDRGLDDLSHTPLRRQKYLFDVSMLSDKEELVGAELRLFRQAPSAPWGPPAGPLHVQLFPCLSPLLLDARTLDPQGAPPAGWEVFDVWQGLRHQPWKQLCLELRAAWGELDAGEAEARARGPQQPPPPDLRSLGFGRRVRPPQERALLVVFTRSQRKNLFAEMREQLGSAEAAGPGAGAEGSWPPPSGAPDARPWLPSPGRRRRRTAFASRHGKRHGKKSRLRCSKKPLHVNFKELGWDDWIIAPLEYEAYHCEGVCDFPLRSHLEPTNHAIIQTLMNSMDPGSTPPSCCVPTKLTPISILYIDAGNNVVYKQYEDMVVESCGCR

SEQ ID NO: 2886 - protein, 417 aa, Homo sapiens
MALSAQQIPRWFNSVKLRSLINAAQLTKRFTRPARTLLHGFSAQPQISSDNCFLQWGFKTYRTSSLWNSSQSTSSSSQENNSAQSSLLPSMNEQSQKTQNISSFDSELFLEELDELPPLSPMQPISEEEAIQIIADPPLPPASFTLRDYVDHSETLQKLVLLGVDLSKIEKHPEAANLLLRLDFEKDIKQMLLFLKDVGIEDNQLGAFLTKNHAIFSEDLENLKTRVAYLHSKNFSKADVAQMVRKAPFLLNFSVERLDNRLGFFQKELELSVKKTRDLVVRLPRLLTGSLEPVKENMKVYRLELGFKHNEIQHMITRIPKMLTANKMKLTETFDFVHNVMSIPHHIIVKFPQVFNTRLFKVKERHLFLTYLGRAQYDPAKPNYISLDKLVSIPDEIFCEEIAKASVQDFEKFLKTL

SEQ ID NO: 2887 - protein, 477 aa, Homo sapiens
MTGQSLWDVSEANVEDGEIRINVGGFKRRLRSHTLLRFPETRLGRLLLCHSREAILELCDDYDDVQREFYFDRNPELFPYVLHFYHTGKLHVMAELCVFSFSQEIEYWGINEFFIDSCCSYSYHGRKVEPEQEKWDEQSDQESTTSSFDEILAFYNDASKFDGQPLGNFRRQLWLALDNPGYSVLSRVFSILSILVVMGSIITMCLNSLPDFQIPDSQGNPGEDPRFEIVEHFGIAWFTFELVARFAVAPDFLKFFKNALNLIDLMSIVPFYITLVVNLVVESTPTLANLGRVAQVLRLMRIFRILKLARHSTGLRSLGATLKYSYKEVGLLLLYLSVGISIFSVVAYTIEKEENEGLATIPACWWWATVSMTTVGYGDVVPGTTAGKLTASACILAGILVVVLPITLIFNKFSHFYRRQKQLESAMRSCDFGDGMKEVPSVNLRDYYAHKVKSLMASLTNMSRSSPSELSLNDSLR

SEQ ID NO: 2888 - protein, 1445 aa, Homo sapiens
MQGPPLLTAAHLLCVCTAALAVAPGPRFLVTAPGIIRPGGNVTIGVELLEHCPSQVTVKAELLKTASNLTVSVLEAEGVFEKGSFKTLTLPSLPLNSADEIYELRVTGRTQDEILFSNSTRLSFETKRISVFIQTDKALYKPKQEVKFRIVTLFSDFKPYKTSLNILIKDPKSNLIQQWLSQQSDLGVISKTFQLSSHPILGDWSIQVQVNDQTYYQSFQVSEYVLPKFEVTLQTPLYCSMNSKHLNGTITAKYTYGKPVKGDVTLTFLPLSFWGKKKNITKTFKINGSANFSFNDEEMKNVMDSSNGLSEYLDLSSPGPVEILTTVTESVTGISRNVSTNVFFKQHDYIIEFFDYTTVLKPSLNFTATVKVTRADGNQLTLEERRNNVVITVTQRNYTEYWSGSNSGNQKMEAVQKINYTVPQSGTFKIEFPILEDSSELQLKAYFLGSKSSMAVHSLFKSPSKTYIQLKTRDENIKVGSPFELVVSGNKRLKELSYMVVSRGQLVAVGKQNSTMFSLTPENSWTPKACVIVYYIEDDGEIISDVLKIPVQLVFKNKIKLYWSKVKAEPSEKVSLRISVTQPDSIVGIVAVDKSVNLMNASNDITMENVVHELELYNTGYYLGMFMNSFAVFQECGLWVLTDANLTKDYIDGVYDNAEYAERFMEENEGHIVDIHDFSLGSSPHVRKHFPETWIWLDTNMGYRIYQEFEVTVPDSITSWVATGFVISEDLGLGLTTTPVELQAFQPFFIFLNLPYSVIRGEEFALEITIFNYLKDATEVKVIIEKSDKFDILMTSNEINATGHQQTLLVPSEDGATVLFPIRPTHLGEIPITVTALSPTASDAVTQMILVKAEGIEKSYSQSILLDLTDNRLQSTLKTLSFSFPPNTVTGSERVQITAIGDVLGPSINGLASLIRMPYGCGEQNMINFAPNIYILDYLTKKKQLTDNLKEKALSFMRQGYQRELLYQREDGSFSAFGNYDPSGSTWLSAFVLRCFLEADPYIDIDQNVLHRTYTWLKGHQKSNGEFWDPGRVIHSELQGGNKSPVTLTAYIVTSLLGYRKYQPNIDVQESIHFLESEFSRGISDNYTLALITYALSSVGSPKAKEALNMLTWRAEQEGGMQFWVSSESKLSDSWQPRSLDIEVAAYALLSHFLQFQTSEGIPIMRWLSRQRNSLGGFASTQDTTVALKALSEFAALMNTERTNIQVTVTGPSSPSPVKFLIDTHNRLLLQTAELAVVQPTAVNISANGFGFAICQLNVVYNVKASGSSRRRRSIQNQEAFDLDVAVKENKDDLNHVDLNVCTSFSGPGRSGMALMEVNLLSGFMVPSEAISLSETVKKVEYDHGKLNLYLDSVNETQFCVNIPAVRNFKVSNTQDASVSIVDYYEPRRQAVRSYNSEVKLSSCDLCSDVQGCRPCEDGASGSHHHSSVIFIFCFKLLYFMELWL

SEQ ID NO: 2889 - protein, 814 aa, Homo sapiens
MVKQTIQIFARVKPPVRKHQQGIYSIDEDEKLIPSLEIILPRDLADGFVNNKRESYKFKFQRIFDQDANQETVFENIAKPVAGSVLAGYNGTIFAYGQTGSGKTFTITGGAERYSDRGIIPRTLSYIFEQLQKDSSKIYTTHISYLEIYNECGYDLLDPRHEASSLEDLPKVTILEDPDQNIHLKNLTLHQATTEEEALNLLFLGDTNRMIAETPMNQASTRSHCIFTIHLSSKEPGSATVRHAKLHLVDLAGSERVAKTGVGGHLLTEAKYINLSLHYLEQVIIALSEKHRSHIPYRNSMMTSVLRDSLGGNCMTTMIATLSLEKRNLDESISTCRFAQRVALIKNEAVLNEEINPRLVIKRLQKEIQELKDELAMVTGEQRTEALTEAELLQLEKLITSFLEDQDSDSRLEVGADMRKVHHCFHHLKKLLNDKKILENNTVSSESKDQDCQEPLKEEEYRKLRDILKQRDNEINILVNMLKKEKKKAQEALHLAGMDRREFRQSQSPPFRLGNPEEGQRMRLSSAPSQAQDFSILGKRSSLLHKKIGMREEMSLGCQEAFEIFKRDHADSVTIDDNKQILKQRFSEAKALGESINEARSKIGHLKEEITQRHIQQVALGISENMAVPLMPDQQEEKLRSQLEEEKRRYKTMFTRLKALKVEIEHLQLLMDKAKVKLQKEFEVWWAEEATNLQVNSPAVNSLDHTKPFLQTSDSQHEWSQLLSNKSSGGWEVQDQGTGRFDVCDVNARKILPSPCPSPHSQKQSSTSTPLEDSIPKRPVSSIPLTGDSQTDSDIIAFIKARQSILQKQCLGSN

SEQ ID NO: 2890 - protein, 715 aa, Homo sapiens
MPAESGKRFKPSKYVPVSAAAIFLVGATTLFFAFTCPGLSLYVSPAVPIYNAIMFLFVLANFSMATFMDPGIFPRAEEDEDKEDDFRAPLYKTVEIKGIQVRMKWCATCRFYRPPRCSHCSVCDNCVEEFDHHCPWVNNCIGRRNYRYFFLFLLSLTAHIMGVFGFGLLYVLYHIEELSGVRTAVTMAVMCVAGLFFIPVAGLTGFHVVLVARGRTTNEQVTGKFRGGVNPFTNGCCNNVSRVLCSSPAPRYLGRPKKEKTIVIRPPFLRPEVSDGQITVKIMDNGIQGELRRTKSKGSLEITESQSADAEPPPPPKPDLSRYTGLRTHLGLATNEDSSLLAKDSPPTPTMYKYRPGYSSSSTSAAMPHSSSAKLSRGDSLKEPTSIAESSRHPSYRSEPSLEPESFRSPTFGKSFHFDPLSSGSRSSSLKSAQGTGFELGQLQSIRSEGTTSTSYKSLANQTRNGSLSYDSLLTPSDSPDFESVQAGPEPDPPLGYTSPFLSARLAQQREAERHPRLVPTGPTHREPSPVRYDNLSRHIVASLQEREKLLRQSPPLPGREEEPGLGDSGIQSTPGSGHAPRTSSSSDDSKRSPLGKTPLGRPAVPRFGKPDGLRGRGVGSPEPGPTAPYLGRSMSYSSQKAQPGVSETEEVALQPLLTPKDEVQLKTTYSKSNGQPKSLGSASPGPGQPPLSSPTRGGVKKVSGVGGTTYEISV

SEQ ID NO: 2891 - protein, 630 aa, Homo sapiens
MDIKGQFWNDDDSEGDNESEEFLYGVQGSCAADLYRHPQLDADIEAVKEIYSENSVSIREYGTIDDVDIDLHINISFLDEEVSTAWKVLRTEPIVLRLRFSLSQYLDGPEPSIEVFQPSNKEGFGLGLQLKKILGMFTSQQWKHLSNDFLKTQQEKRHSWFKASGTIKKFRAGLSIFSPIPKSPSFPIIQDSMLKGKLGVPELRVGRLMNRSISCTMKNPKVEVFGYPPSPQAGLLCPQHVGLPPPARTSPLVSGHCKNIPTLEYGFLVQIMKYAEQRIPTLNEYCVVCDEQHVFQNGSMLKPAVCTRELCVFSFYTLGVMSGAAEEVATGAEVVDLLVAMCRAALESPRKSIIFEPYPSVVDPTDPKTLAFNPKKKNYERLQKALDSVMSIREMTQGSYLEIKKQMDKLDPLAHPLLQWIISSNRSHIVKLPLSRLKFMHTSHQFLLLSSPPAKEARFRTAKKLYGSTFAFHGSHIENWHSILRNGLVNASYTKLQLHGAAYGKGIYLSPISSISFGYSGMGKGQHRMPSKDELVQRYNRMNTIPQTRSIQSRFLQSRNLNCIALCEVITSKDLQKHGNIWVCPVSDHVCTRFFFVYEDGQVGDANINTQDPKIQKEIMRVIGTQVYTN

SEQ ID NO: 2892 - protein, 481 aa, Homo sapiens
MAAAPGGSAQPAGPGPRLGFSTADSGVGMSGLNPGPAVPMKDHDAIKLFVGQIPRGLDEQDLKPLFEEFGRIYELTVLKDRLTGLHKGCAFLTYCARDSALKAQSALHEQKTLPGMNRPIQVKPAASEGRGEDRKLFVGMLGKQQGEEDVRRLFQPFGHIEECTVLRSPDGTSKGCAFVKFGSQGEAQAAIRGLHGSRTMAGASSSLVVKLADTDRERALRRMQQMAGHLGAFHPAPLPLGACGAYTTAILQHQAALLAAAQGPGLGPVAAVAAQMQHVAAFSLVAAPLLPAAAANSPPGSGPGTLPGLPAPIGVNGFGPLTPQTNGQPGSDTLYNNGLSPYPAQSPGVADPLQQAYAGMHHYAAAYPSAYAPVSTAFPQQPSALPQQQREGPEGCNLFIYHLPQEFGDAELIQTFLPFGAVVSAKVFVDRATNQSKCFGFVSFDNPTSAQTAIQAMNGFQIGMKRLKVQLKRPKDANRPY

SEQ ID NO: 2893 - protein, 2073 aa, Homo sapiens
MVKLANPLYTEWILEAIQKIKKQKQRPSEERICHAVSTSHGLDKKTVSEQLELSVQDGSVLKVTNKGLASYKDPDNPGRFSSVKPGTFPKSAKGSRGSCNDLRNVDWNKLLRRAIEGLEEPNGSSLKNIEKYLRSQSDLTSTTNNPAFQQRLRLGAKRAVNNGRLLKDGPQYRVNYGSLDGKGAPQYPSAFPSSLPPVSLLPHEKDQPRADPIPICSFCLGTKESNREKKPEELLSCADCGSSGHPSCLKFCPELTTNVKALRWQCIECKTCSACRVQGRNADNMLFCDSCDRGFHMECCDPPLSRMPKGMWICQVCRPKKKGRKLLHEKAAQIKRRYAKPIGRPKNKLKQRLLSVTSDEGSMNAFTGRGSPGRGQKTKVCTTPSSGHAASGKDSSSRLAVTDPTRPGATTKITTTSTYISASTLKVNKKTKGLIDGLTKFFTPSPDGRRSRGEIIDFSKHYRPRKKVSQKQSCTSHVLATGTTQKLKPPPSSLPPPTPISGQSPSSQKSSTATSSPSPQSSSSQCSVPSLSSLTTNSQLKALFDGLSHIYTTQGQSRKKGHPSYAPPKRMRRKTELSSTAKSKAHFFGKRDIRSRFISHSSSSSWGMARGSIFKAIAHFKRTTFLKKHRMLGRLKYKVTPQMGTPSPGKGSLTDGRIKPDQDDDTEIKINIKQESADVNVIGNKDVVTEEDLDVFKQAQELSWEKIECESGVEDCGRYPSVIEFGKYEIQTWYSSPYPQEYARLPKLYLCEFCLKYMKSKNILLRHSKKCGWFHPPANEIYRRKDLSVFEVDGNMSKIYCQNLCLLAKLFLDHKTLYYDVEPFLFYVLTKNDEKGCHLVGYFSKEKLCQQKYNVSCIMIMPQHQRQGFGRFLIDFSYLLSRREGQAGSPEKPLSDLGRLSYLAYWKSVILEYLYHHHERHISIKAISRATGMCPHDIATTLQHLHMIDKRDGRFVIIRREKLILSHMEKLKTCSRANELDPDSLRWTPILISNAAVSEEEREAEKEAERLMEQASCWEKEEQEILSTRANSRQSPAKVQSKNKYLHSPESRPVTGERGQLLELSKESSEEEEEEEDEEEEEEEEEEEEDEEEEEEEEEEEEEENIQSSPPRLTKPQSVAIKRKRPFVLKKKRGRKRRRINSSVTTETISETTEVLNEPFDNSDEERPMPQLEPTCEIEVEEDGRKPVLRKAFQHQPGKKRQTEEEEGKDNHCFKNADPCRNNMNDDSSNLKEGSKDNPEPLKCKQVWPKGTKRGLSKWRQNKERKTGFKLNLYTPPETPMEPDEQVTVEEQKETSEGKTSPSPIRIEEEVKETGEALLPQEENRREETCAPVSPNTSPGEKPEDDLIKPEEEEEEEEEEEEEEEEEEGEEEEGGGNVEKDPDGAKSQEKEEPEISTEKEDSARLDDHEEEEEEDEEPSHNEDHDADDEDDSHMESAEVEKEELPRESFKEVLENQETFLDLNVQPGHSNPEVLMDCGVDLTASCNSEPKELAGDPEAVPESDEEPPPGEQAQKQDQKNSKEVDTEFKEGNPATMEIDSETVQAVQSLTQESSEQDDTFQDCAETQEACRSLQNYTRADQSPQIATTLDDCQQSDHSSPVSSVHSHPGQSVRSVNSPSVPALENSYAQISPDQSAISVPSLQNMETSPMMDVPSVSDHSQQVVDSGFSDLGSIESTTENYENPSSYDSTMGGSICGNGSSQNSCSYSNLTSSSLTQSSCAVTQQMSNISGSCSMLQQTSISSPPTCSVKSPQGCVVERPPSSSQQLAQCSMAANFTPPMQLAEIPETSNANIGLYERMGQSDFGAGHYPQPSATFSLAKLQQLTNTLIDHSLPYSHSAAVTSYANSASLSTPLSNTGLVQLSQSPHSVPGGPQAQATMTPPPNLTPPPMNLPPPLLQRNMAASNIGISHSQRLQTQIASKGHISMRTKSASLSPAAATHQSQIYGRSQTVAMQGPARTLTMQRGMNMSVNLMPAPAYNVNSVNMNMNTLNAMNGYSMSQPMMNSGYHSNHGYMNQTPQYPMQMQMGMMGTQPYAQQPMQTPPHGNMMYTAPGHHGYMNTGMSKQSLNGSYMRR

SEQ ID NO: 2894 - protein, 884 aa, Homo sapiens
MGRAAATAGGGGGARRWLPWLGLCFWAAGTAAARGTDNGEALPESIPSAPGTLPHFIEEPDDAYIIKSNPIALRCKARPAMQIFFKCNGEWVHQNEHVSEETLDESSGLKVREVFINVTRQQVEDFHGPEDYWCQCVAWSHLGTSKSRKASVRIAYLRKNFEQDPQGREVPIEGMIVLHCRPPEGVPAAEVEWLKNEEPIDSEQDENIDTRADHNLIIRQARLSDSGNYTCMAANIVAKRRSLSATVVVYVDGSWEVWSEWSVCSPECEHLRIRECTAPPPRNGGKFCEGLSQESENCTDGLCILDKKPLHEIKPQSIENASDIALYSGLGAAVVAVAVLVIGVTLYRRSQSDYGVDVIDSSALTGNSLLLNSAMQPDLTVSRTYSGPICLQDPLDKELMTESSLFNPLSDIKVKVQSSFMVSLGVSERAEYHGKNHSRTFPHGNNHSFSTMHPRNKMPYIQNLSSLPTRTELRTTGVFGHLGGRLVMPNTGVSLLIPHGAIPEENSWEIYMSINQGEPSLQSDGSEVLLSPEVTCGPPDMIVTTPFALTIPHCADVSSEHWNIHLKKRTQQGKWEEVMSVEDESTSCYCLLDPFACHVLLDSFGTYALTGEPITDCAVKQLKVAVFGCMSCNSLDYNLRVYCVDNTPCAFQEVVSDERHQGGQLLEEPKLLHFKGNTFSLQISVLDIPPFLWRIKPFTACQEVPFSRVWCSNRQPLHCAFSLERYTPTTTQLSCKICIRQLKGHEQILQVQTSILESERETITFFAQEDSTFPAQTGPKAFKIPYSIRQRICATFDTPNAKGKDWQMLAQKNSINRNLSYFATQSSPSAVILNLWEARHQHDGDLDSLACALEEIGRTHTKLSNISESQLDEADFNYSRQNGL

SEQ ID NO: 2895 - protein, 294 aa, Homo sapiens
MLVLHNSQKLQILYKSLEKSIPESIKVYGAIFNIKDKNPFNMEVLVDAWPDYQIVITRPQKQEMKDDQDHYTNTYHIFTKAPDKLEEVLSYSNVISWEQTLQIQGCQEGLDEAIRKVATSKSVQVDYMKTILFIPELPKKHKTSSNDKMELFEVDDDNKEGNFSNMFLDASHAGLVNEHWAFGKNERSLKYIERCLQDFLGFGVLGPEGQLVSWIVMEQSCELRMGYTVPKYRHQGNMLQIGYHLEKYLSQKEIPFYFHVADNNEKSLQALNNLGFKICPCGWHQWKCTPKKYC

SEQ ID NO: 2896 - protein, 457 aa, Homo sapiens
MSALRRSGYGPSDGPSYGRYYGPGGGDVPVHPPPPLYPLRPEPPQPPISWRVRGGGPAETTWLGEGGGGDGYYPSGGAWPEPGRAGGSHQEQPPYPSYNSNYWNSTARSRAPYPSTYPVRPELQGQSLNSYTNGAYGPTYPPGPGANTASYSGAYYAPGYTQTSYSTEVPSTYRSSGNSPTPVSRWIYPQQDCQTEAPPLRGQVPGYPPSQNPGMTLPHYPYGDGNRSVPQSGPTVRPQEDAWASPGAYGMGGRYPWPSSAPSAPPGNLYMTESTSPWPSSGSPQSPPSPPVQQPKDSSYPYSQSDQSMNRHNFPCSVHQYESSGTVNNDDSDLLDSQVQYSAEPQLYGNATSDHPNNQDQSSSLPEECVPSDESTPPSIKKIIHVLEKVQYLEQEVEEFVGKKTDKAYWLLEEMLTKELLELDSVETGGQDSVRQARKEAVCKIQAILEKLEKKGL

SEQ ID NO: 2897 - protein, 1066 aa, Homo sapiens
MQSTDLGNKESGKIWHRKPSPATRDGIIVNIIHNTSDYHPKVLRFLNVAFDGTGDCLIAGDHQGNIYVFDLHGNRFNLVQRTAQACTALAFNLRRKSEFLVALADYSIKCFDTVTKELVSWMRGHESSVFSISVHASGKYAITTSSDTAQLWDLDTFQRKRKLNIRQSVGIQKVFFLPLSNTILSCFKDNSIFAWECDTLFCKYQLPAPPESSSILYKVFAVTRDGRILAAGGKSNHLHLWCLEARQLFRIIQMPTKVRAIRHLEFLPDSFDAGSNQVLGVLSQDGIMRFINMQTCKLLFEIGSLDEGISSSAISPHGRYIASIMENGSLNIYSVQALTQEINKPPPPLVKVIEDLPKNKLSSSDLKMKVTSGRVQQPAKSRESKMQTRILKQDLTGDFESKKNELPDGLNKKRLQILLKGYGEYPTKYRMFIWRSLLQLPENHTAFSTLIDKGTHVAFLNLQKKYPIKSRKLLRVLQRTLSALAHWSVIFSDTPYLPLLAFPFVKLFQNNQLICFEVIATLIINWCQHWFEYFPNPPINILSMIENVLAFHDKELLQHFIDHDITSQLYAWPLLETVFSEVLTREEWLKLFDNIFSNHPSFLLMTVVAYNICSRTPLLSCNLKDDFEFFFHHRNNLDINVVIRQVYHLMETTPTDIHPDSMLNVFVALTKGQYPVFNQYPKFIVDYQTQERERIRNDELDYLRERQTVEDMQAKVDQQRVEDEAWYQKQELLRKAEETRREMLLQEEEKMIQQRQRLAAVKRELKVKEMHLQDAARRRFLKLQQDQQEMELRRLDDEIGRKVYMRDREIAATARDLEMRQLELESQKRLYEKNLTENQEALAKEMRADADAYRRKVDLEEHMFHKLIEAGETQSQKTQKVIKENLAKAEQACLNTDWQIQSLHKQKCDDLQRNKCYQEVAKLLRENRRKEIEIINAMVEEEAKKWKEAEGKEFRLRSAKKASALSDASRKWFLKQEINAAVEHAENPCHKEEPRFQNEQDSSCLPRTSQLNDSSEMDPSTQISLNRRAVEWDTTGQNLIKKVRNLRQRLTARARHRCQTPHLLAA

SEQ ID NO: 2898 - protein, 1390 aa, Homo sapiens
MVVLRSSLELHNHSAASATGSLDLSSDFLSLEHIGRRRLRSAGAAQKKPAATTAKAGDGSSVKEVETYHRTRALRSLRKDAQNSSDSSFEKNVEITEQLANGRHFTRQLARQQADKKKEEHREDKVIPVTRSLRARNIVQSTEHLHEDNGDVEVRRSCRIRSRYSGVNQSMLFDKLITNTAEAVLQKMDDMKKMRRQRMRELEDLGVFNETEESNLNMYTRGKQKDIQRTDEETTDNQEGSVESSEEGEDQEHEDDGEDEDDEDDDDDDDDDDDDDDEDDEDEEDGEEENQKRYYLRQRKATVYYQAPLEKPRHQRKPNIFYSGPASPARPRYRLSSAGPRSPYCKRMNRRRHAIHSSDSTSSSSSEDEQHFERRRKRSRNRAINRCLPLNFRKDELKGIYKDRMKIGASLADVDPMQLDSSVRFDSVGGLSNHIAALKEMVVFPLLYPEVFEKFKIQPPRGCLFYGPPGTGKTLVARALANECSQGDKRVAFFMRKGADCLSKWVGESERQLRLLFDQAYQMRPSIIFFDEIDGLAPVRSSRQDQIHSSIVSTLLALMDGLDSRGEIVVIGATNRLDSIDPALRRPGRFDREFLFSLPDKEARKEILKIHTRDWNPKPLDTFLEELAENCVGYCGADIKSICAEAALCALRRRYPQIYTTSEKLQLDLSSINISAKDFEVAMQKMIPASQRAVTSPGQALSTVVKPLLQNTVDKILEALQRVFPHAEFRTNKTLDSDISCPLLESDLAYSDDDVPSVYENGLSQKSSHKAKDNFNFLHLNRNACYQPMSFRPRILIVGEPGFGQGSHLAPAVIHALEKFTVYTLDIPVLFGVSTTSPEETCAQVIREAKRTAPSIVYVPHIHVWWEIVGPTLKATFTTLLQNIPSFAPVLLLATSDKPHSALPEEVQELFIRDYGEIFNVQLPDKEERTKFFEDLILKQAAKPPISKKKAVLQALEVLPVAPPPEPRSLTAEEVKRLEEQEEDTFRELRIFLRNVTHRLAIDKRFRVFTKPVDPDEVPDYVTVIKQPMDLSSVISKIDLHKYLTVKDYLRDIDLICSNALEYNPDRDPGDRLIRHRACALRDTAYAIIKEELDEDFEQLCEEIQESRKKRGCSSSKYAPSYYHVMPKQNSTLVGDKRSDPEQNEKLKTPSTPVACSTPAQLKRKIRKKSNWYLGTIKKRRKISQAKDDSQNAIDHKIESDTEETQDTSVDHNETGNTGESSVEENEKQQNASESKLELRNNSNTCNIENELEDSRKTTACTELRDKIACNGDASSSQIIHISDENEGKEMCVLRMTRARRSQVEQQQLITVEKALAILSQPTPSLVVDHERLKNLLKTVVKKSQNYNIFQLENLYAVISQCIYRHRKDHDKTSLIQKMEQEVENFSCSR

SEQ ID NO: 2899 - protein, 1428 aa, Homo sapiens
MENEPDHENVEQSLCAKTSEEELNKSFNLEASLSKFSYIDMDKELEFKNDLIDDKEFDIPQVDTPPTLESILNETDDEDESFILEDPTLLNIDTIDSHSYDTSSVASSDSGDRTNLKRKKKLPDSFSLHGSVMRHSLLKGISAQIVSAADKVDAGLPTAIAVSSLIAVGTSHGLALIFGKYQNQALRLCLGSTSVGGQYGAISALSINNDCSRLLCGFAKGQITMWDLASGKLLRSITDAHPPGTAILHIKFTDDPTLAICNDSGGSVFELTFKRVMGVRTCESRCLFSGSKGEVCCIEPLHSKPELKDHPITQFSLLAMASLTKILVIGLKPSLKVWMTFPYGRMDPSSVPLLAWHFVAVQNYVNPMLAFCRGDVVHFLLVKRDESGAIHVTKQKHLHLYYDLINFTWINSRTVVLLDSVEKLHVIDRQTQEELETVEISEVQLVYNSSHFKSLATGGNVSQALALVGEKACYQSISSYGGQIFYLGTKSVYVMMLRSWRERVDHLLKQDCLTEALALAWSFHEGKAKAVVGLSGDASKRKAIVADRMVEILFHYADRALKKCPDQGKIQVMEQHFQDMVPVIVDYCLLLQRKDLLFSQMYDKLSENSVAKGVFLECLEPYILSDKLVGITPQVMKDLIVHFQDKKLMENVEALIVHMDITSLDIQQVVLMCWENRLYDAMIYVYNRGMNEFISPMEKLFRVIAPPLNAGKTLTDEQVVMGNKLLVYISCCLAGRAYPLGDIPEDLVPLVKNQVFEFLIRLHSAEASPEEEIYPYIRTLLHFDTREFLNVLALTFEDFKNDKQAVEYQQRIVDILLKVMVENSDFTPSQVGCLFTFLARQLAKPDNTLFVNRTLFDQVLEFLCSPDDDSRHSERQQVLLELLQAGGIVQFEESRLIRMAEKAEFYQICEFMYEREHQYDKIIDCYLRDPLREEEVFNYIHNILSIPGHSAEEKQSVWQKAMDHIEELVSLKPCKAAELVATHFSGHIETVIKKLQNQVLLFKFLRSLLDPREGIHVNQELLQISPCITEQFIELLCQFNPTQVIETLQVLECYRLEETIQITQKYQLHEVTAYLLEKKGDIHGAFLIMLERLQSKLQEVTHQGENTKEDPSLKDVEDTMVETIALCQRNSHNLNQQQREALWFPLLEAMMAPQKLSSSAIPHLHSEALKSLTMQVLNSMAAFIALPSILQRILQDPVYGKGKLGEIQGLILGMLDTFNYEQTLLETTTSLLNQDLHWSLCNLRASVTRGLNPKQDYCSICLQQYKRRQEMADEIIVFSCGHLYHSFCLQNKECTVEFEGQTRWTCYKCSSSNKVGKLSENSSEIKKGRITPSQVKMSPSYHQSKGDPTAKKGTSEPVLDPQQIQAFDQLCRLYRGSSRLALLTELSQNRSSESYRPFSGSQSAPAFNSIFQNENFQLQLIPPPVTED

SEQ ID NO: 2900 - protein, 427 aa, Homo sapiens
MKLITILFLCSRLLLSLTQESQSEEIDCNDKDLFKAVDAALKKYNSQNQSNNQFVLYRITEATKTVGSDTFYSFKYEIKEGDCPVQSGKTWQDCEYKDAAKAATGECTATVGKRSSTKFSVATQTCQITPAEGPVVTAQYDCLGCVHPISTQSPDLEPILRHGIQYFNNNTQHSSLFMLNEVKRAQRQVVAGLNFRITYSIVQTNCSKENFLFLTPDCKSLWNGDTGECTDNAYIDIQLRIASFSQNCDIYPGKDFVQPPTKICVGCPRDIPTNSPELEETLTHTITKLNAENNATFYFKIDNVKKARVQVVAGKKYFIDFVARETTCSKESNEELTESCETKKLGQSLDCNAEVYVVPWEKKIYPTVNCQPLGMISLMKRPPGFSPFRSSRIGEIKEETTSHLRSCEYKGRPPKAGAEPASEREVS

SEQ ID NO: 2901 - protein, 368 aa, Homo sapiens
MAIKSIASRLRGSRRFLSGFVAGAVVGAAGAGLAALQFFRSQGAEGALTGKQPDGSAEKAVLEQFGFPLTGTEARCYTNHALSYDQAKRVPRWVLEHISKSKIMGDADRKHCKFKPDPNIPPTFSAFNEDYVGSGWSRGHMAPAGNNKFSSKAMAETFYLSNIVPQDFDNNSGYWNRIEMYCRELTERFEDVWVVSGPLTLPQTRGDGKKIVSYQVIGEDNVAVPSHLYKVILARRSSVSTEPLALGAFVVPNEAIGFQPQLTEFQVSLQDLEKLSGLVFFPHLDRTSDIRNICSVDTCKLLDFQEFTLYLSTRKIEGARSVLRLEKIMENLKNAEIEPDDYFMSRYEKKLEELKAKEQSGTQIRKPS

SEQ ID NO: 2902 - protein, 420 aa, Homo sapiens
MLSSFPVVLLETMSHYTDEPRFTIEQIDLLQRLRRTGMTKHEILHALETLDRLDQEHSDKFGRRSSYGGSSYGNSTNNVPASSSTATASTQTQHSGMSPSPSNSYDTSPQPCTTNQNGRENNERLSTSNGKMSPTRYHANSMGQRSYSFEASEEDLDVDDKVEELMRRDSSVIKEEIKAFLANRRISQAVVAQVTGISQSRISHWLLQQGSDLSEQKKRAFYRWYQLEKTNPGATLSMRPAPIPIEDPEWRQTPPPVSATSGTFRLRRGSRFTWRKECLAVMESYFNENQYPDEAKREEIANACNAVIQKPGKKLSDLERVTSLKVYNWFANRRKEIKRRANIEAAILESHGIDVQSPGGHSNSDDVDGNDYSEQDDSTSHSDHQDPISLAVEMAAVNHTILALARQGANEIKTEALDDD

SEQ ID NO: 2903 - protein, 310 aa, Homo sapiens
MPLLVEGRRVRLPQSAGDLVRAHPPLEERARLLRGQSVQQVGPQGLLYVQQRELAVTSPKDGSISILGSDDATTCHIVVLRHTGNGATCLTHCDGTDTKAEVPLIMNSIKSFSDHAQCGRLEVHLVGGFSDDRQLSQKLTHQLLSEFDRQEDDIHLVTLCVTELNDREENENHFPVIYGIAVNIKTAEIYRASFQDRGPEEQLRAARTLAGGPMISIYDAETEQLRIGPYSWTPFPHVDFWLHQDDKQILENLSTSPLAEPPHFVEHIRSTLMFLKKHPSPAHTLFSGNKALLYKKNEDGLWEKISSPGS

SEQ ID NO: 2904 - protein, 307 aa, Homo sapiens
MTETTKTHVILLACGSFNPITKGHIQMFERARDYLHKTGRFIVIGGIVSPVHDSYGKQGLVSSRHRLIMCQLAVQNSDWIRVDPWECYQDTWQTTCSVLEHHRDLMKRVTGCILSNVNTPSMTPVIGQPQNETPQPIYQNSNVATKPTAAKILGKVGESLSRICCVRPPVERFTFVDENANLGTVMRYEEIELRILLLCGSDLLESFCIPGLWNEADMEVIVGDFGIVVVPRDAADTDRIMNHSSILRKYKNNIMVVKDDINHPMSVVSSTKSRLALQHGDGHVVDYLSQPVIDYILKSQLYINASG

SEQ ID NO: 2905 - protein, 1425 aa, Homo sapiens
MENYFQAEAYNLDKVLDEFEQNEDETVSSTLLDTKWNKILDPPSHRLSFNPTLASVNESAVSNESQPQLKVFSLAHSAPLTTEEEDHCANGQDCNLNPEIATMWIDENAVAEDQLIKRNYSWDDQCSAVEVGEKKCGNLACLPDEKNVLVVAVMHNCDKRTLQNDLQDCNNYNSQSLMDAFSCSLDNENRQTDQFSFSINESTEKDMNSEKQMDPLNRPKTEGRSVNHLCPTSSDSLASVCSPSQLKDDGSIGRDPSMSAITSLTVDSVISSQGTDGCPAVKKQENYIPDEDLTGKISSPRTDLGSPNSFSHMSEGILMKKEPAEESTTEESLRSGLPLLLKPDMPNGSGRNNDCERCSDCLVPNEVRADENEGYEHEETLGTTEFLNMTEHFSESQDMTNWKLTKLNEMNDSQVNEEKEKFLQISQPEDTNGDSGGQCVGLADAGLDLKGTCISESEECDFSTVIDTPAANYLSNGCDSYGMQDPGVSFVPKTLPSKEDSVTEEKEIEESKSECYSNIYEQRGNEATEGSGLLLNSTGDLMKKNYLHNFCSQVPSVLGQSSPKVVASLPSISVPFGGARPKQPSNLKLQIPKPLSDHLQNDFPANSGNNTKNKNDILGKAKLGENSATNVCSPSLGNISNVDTNGEHLESYEAEISTRPCLALAPDSPDNDLRAGQFGISARKPFTTLGEVAPVWVPDSQAPNCMKCEARFTFTKRRHHCRACGKVFCASCCSLKCKLLYMDRKEARVCVICHSVLMNAQAWENMMSASSQSPNPNNPAEYCSTIPPLQQAQASGALSSPPPTVMVPVGVLKHPGAEVAQPREQRRVWFADGILPNGEVADAAKLTMNGTSSAGTLAVSHDPVKPVTTSPLPAETDICLFSGSITQVGSPVGSAMNLIPEDGLPPILISTGVKGDYAVEEKPSQISVMQQLEDGGPDPLVFVLNANLLSMVKIVNYVNRKCWCFTTKGMHAVGQSEIVILLQCLPDEKCLPKDIFNHFVQLYRDALAGNVVSNLGHSFFSQSFLGSKEHGGFLYVTSTYQSLQDLVLPTPPYLFGILIQKWETPWAKVFPIRLMLRLGAEYRLYPCPLFSVRFRKPLFGETGHTIMNLLADFRNYQYTLPVVQGLVVDMEVRKTSIKIPSNRYNEMMKAMNKSNEHVLAGGACFNEKADSHLVCVQNDDGNYQTQAISIHNQPRKVTGASFFVFSGALKSSSGYLAKSSIVEDGVMVQITAENMDSLRQALREMKDFTITCGKADAEEPQEHIHIQWVDDDKNVSKGVVSPIDGKSMETITNVKIFHGSEYKANGKVIRWTEVFFLENDDQHNCLSDPADHSRLTEHVAKAFCLALCPHLKLLKEDGMTKLGLRVTLDSDQVGYQAGSNGQPLPSQYMNDLDSALVPVIHGGACQLSEGPVVMELIFYILENIV

SEQ ID NO: 2906 - protein, 378 aa, Homo sapiens
MVMAYFVENFWGEKNSGFDVLYHNMKHGQISTKELADFVRERATIEEAYSRSMTKLAKSASNYSQLGTFAPVWDVFKTSTEKLANCHLDLVRKLQELIKEVQKYGEEQVKSHKKTKEEVAGTLEAVQTIQSITQALQKSKENYNAKCVEQERLKKEGATQREIEKAAVKSKKATDTYKLYVEKYALAKADFEQKMTETAQKFQDIEETHLIHIKEIIGSLSNAIKEIHLQIGQVHEEFINNMANTTVESLIQKFAESKGTGKERPGLIEFEECDTASAVEGIKPRKRKTFALPGIIKKEKDAESVWSFTVVAQVGMQWRDLGLLHSPPPRFKRFSSYLSLPSSWNYGAHHHIWLIFCIFSRDRVSPYWPGWSRTPDLR

SEQ ID NO: 2907 - protein, 599 aa, Homo sapiens [sequence omitted]

SEQ ID NO: 2908 - protein, 323 aa, Homo sapiens
MSPAAAAEPDGDQQDRHVSKLIFCFFVFGAVLLCVGVLLSIFGFQACQYKPLPDCPMVLKVAGPACAVVGLGAVILARSRAQLQLRAGLQRGQQMDPDRAFICGESRQFAQCLIFGFLFLTSGMLISVLGIWVPGCGSNWAQEPLNETDTGDSEPRMCGFLSLQIMGPLIVLVGLCFFVVAHVKKRNTLNAGQDASEREEGQIQIMEPVQVTVGDSVIIFPPPPPPYFPESSASAVAESPGTNSLLPNENPPSYYSIFNYGTPTSEGAASERDCESIYTISGTNSSSEASHTPHLPSELPPRYEEKENAAATFLPLSSEPSPP

SEQ ID NO: 2909 - protein, 224 aa, Homo sapiens
MPGSPRPAPSWVLLLRLLALLRPPGLGEACSCAPAHPQQHICHSALVIRAKISSEKVVPASADPADTEKMLRYEIKQIKMFKGFEKVKDVQYIYTPFDSSLCGVKLEANSQKQYLLTGQVLSDGKVFIHLCNYIEPWEDLSLVQRESLNHHYHLNCGCQITTCYTVPCTISAPNECLWTDWLLERKLYGYQAQHYVCMKHVDGTCSWYRGHLPLRKEFVDIVQP

SEQ ID NO: 2910 - protein, 505 aa, Homo sapiens
MGETLGDSPIDPESDSFTDTLSANISQEMTMVDTEMPFWPTNFGISSVDLSVMEDHSHSFDIKPFTTVDFSSISTPHYEDIPFTRTDPVVADYKYDLKLQEYQSAIKVEPASPPYYSEKTQLYNKPHEEPSNSLMAIECRVCGDKASGFHYGVHACEGCKGFFRRTIRLKLIYDRCDLNCRIHKKSRNKCQYCRFQKCLAVGMSHNAIRFGRMPQAEKEKLLAEISSDIDQLNPESADLRALAKHLYDSYIKSFPLTKAKARAILTGKTTDKSPFVIYDMNSLMMGEDKIKFKHITPLQEQSKEVAIRIFQGCQFRSVEAVQEITEYAKSIPGFVNLDLNDQVTLLKYGVHEIIYTMLASLMNKDGVLISEGQGFMTREFLKSLRKPFGDFMEPKFEFAVKFNALELDDSDLAIFIAVIILSGDRPGLLNVKPIEDIQDNLLQALELQLKLNHPESSQLFAKLLQKMTDLRQIVTEHVQLLQVIKKTETDMSLHPLLQEIYKDLY

SEQ ID NO: 2911 - protein, 645 aa, Homo sapiens
MSERKEGRGKGKGKKKERGSGKKPESAAGSQSPALPPRLKEMKSQESAAGSKLVLRCETSSEYSSLRFKWFKNGNELNRKNKPQNIKIQKKPGKSELRINKASLADSGEYMCKVISKLGNDSASANITIVESNEIITGMPASTEGAYVSSESPIRISVSTEGANTSSSTSTSTTGTSHLVKCAEKEKTFCVNGGECFMVKDLSNPSRYLCKCPNEFTGDRCQNYVMASFYKHLGIEFMEAEELYQKRVLTITGICIALLVVGIMCVVAYCKTKKQRKKLHDRLRQSLRSERNNMMNIANGPHHPNPPPENVQLVNQYVSKNVISSEHIVEREAETSFSTSHYTSTAHHSTTVTQTPSHSWSNGHTESILSESHSVIVMSSVENSRHSSPTGGPRGRLNGTGGPRECNSFLRHARETPDSYRDSPHSERYVSAMTTPARMSPVDFHTPSSPKSPPSEMSPPVSSMTVSMPSMAVSPFMEEERPLLLVTPPRLREKKFDHHPQQFSSFHHNPAHDSNSLPASPLRIVEDEEYETTQEYEPAQEPVKKLANSRRAKRTKPNGHIANRLEVDSNTSSQSSNSESETEDERVGEDTPFLGIQNPLAASLEATPAFRLADSRTNPAGRFSTQEEIQARLSSVIANQDPIAV

SEQ ID NO: 2912 - protein, 454 aa, Homo sapiens
MGRTYIVEETVGQYLSNINLQGKAFVSGLLIGQCSSQKDYVILATRTPPKEEQSENLKHPKAKLDNLDEEWATEHACQVSRMLPGGLLVLGVFIITTLELANDFQNALRRLMFAVEKSINRKRLWNFTEEEVSERVTLHICASTKKIFCRTYDIHDPKSSARPADWKYQSGLSSSWLSLECTVHINIHIPLSATSVSYTLEKNTKNGLTRWAKEIENGVYLINGQVKDEDCDLLEGQKKSSRGNTQATSHSFDVRVLTQLLLNSDHRSTATVQICSGSVNLKGAVKCRAYIHSSKPKVKDAVQAVKRDILNTVADRCEMLFEDLLLNEIPEKKDSEKEFHVLPYRVFVPLPGSTVMLCDYKFDDESAEEIRDHFMEMLDHTIQIEDLEIAEETNTACMSSSMNSQASLDNTDDEQPKQPIKTTMLLKIQQNIGVIAAFTVAVLAAGISFHYFSD

SEQ ID NO: 2913 - protein, 569 aa, Homo sapiens
MGSAVMDTKKKKDVSSPGGSGGKKNASQKRRSLRVHIPDLSSFAMPLLDGDLEGSGKHSSRKVDSPFGPGSPSKGFFSRGPQPRPSSPMSAPVRPKTSPGSPKTVFPFSYQESPPRSPRRMSFSGIFRSSSKESSPNSNPATSPGGIRFFSRSRKTSGLSSSPSTPTQVTKQHTFPLESYKHEPERLENRIYASSSPPDTGQRFCPSSFQSPTRPPLASPTHYAPSKAAALAAALGPAEAGMLEKLEFEDEAVEDSESGVYMRFMRSHKCYDIVPTSSKLVVFDTTLQVKKAFFALVANGVRAAPLWESKKQSFVGMLTITDFINILHRYYKSPMVQIYELEEHKIETWRELYLQETFKPLVNISPDASLFDAVYSLIKNKIHRLPVIDPISGNALYILTHKRILKFLQLFMSDMPKPAFMKQNLDELGIGTYHNIAFIHPDTPIIKALNIFVERRISALPVVDESGKVVDIYSKFDVINLAAEKTYNNLDITVTQALQHRSQYFEGVVKCNKLEILETIVDRIVRAEVHRLVVVNEADSIVGIISLSDILQALILTPAGAKQKETETE

SEQ ID NO: 2914 - protein, 357 aa, Homo sapiens
MDLPVNLTSFSLSTPSPLETNHSLGKDDLRPSSPLLSVFGVLILTLLGFLVAATFAWNLLVLATILRVRTFHRVPHNLVASMAVSDVLVAALVMPLSLVHELSGRRWQLGRRLCQLWIACDVLCCTASIWNVTAIALDRYWSITRHMEYTLRTRKCVSNVMIALTWALSAVISLAPLLFGWGETYSEGSEECQVSREPSYAVFSTVGAFYLPLCVVLFVYWKIYKAAKFRVGSRKTNSVSPISEAVEVKDSAKQPQMVFTVRHATVTFQPEGDTWREQKEQRAALMVGILIGVFVLCWIPFFLTELISPLCSCDIPAIWKSIFLWLGYSNSFFNPLIYTAFNKNYNSAFKNFFSRQH

SEQ ID NO: 2915 - protein, 268 aa, Homo sapiens
MAAALGASGGAGAGDDDFDQFDKPGAERSWRRRAADEDWDSELEDDLLGEDLLSGKKNQSDLSDEELNDDLLQSDNEDEENFSSQGVTISLNATSGMVTSFELSDNTNDQSGEQESEYEQEQGEDELVYHKSDGSELYTQEYPEEGQYEGHEAELTEDQIEYVEEPEEEQLYTDEVLDIEINEPLDEFTGGMETLELQKDIKEESDEEEEDDEESGRLRFKTERKEGTIIRLSDVTRERRNIPETLGNFFACLPSSFTLISTSSIVLL

SEQ ID NO: 2916 - protein, 647 aa, Homo sapiens
MAEEEAPKKSRAAGGGASWELCAGALSARLAEEGSGDAGGRRRPPVDPRRLARQLLLLLWLLEAPLLLGVRAQAAGQGPGQGPGPGQQPPPPPQQQQSGQQYNGERGISVPDHGYCQPISIPLCTDIAYNQTIMPNLLGHTNQEDAGLEVHQFYPLVKVQCSAELKFFLCSMYAPVCTVLEQALPPCRSLCERARQGCEALMNKFGFQWPDTLKCEKFPVHGAGELCVGQNTSDKGTPTPSLLPEFWTSNPQHGGGGHRGGFPGGAGASERGKFSCPRALKVPSYLNYHFLGEKDCGAPCEPTKVYGLMYFGPEELRFSRTWIGIWSVLCCASTLFTVLTYLVDMRRFSYPERPIIFLSGCYTAVAVAYIAGFLLEDRVVCNDKFAEDGARTVAQGTKKEGCTILFMMLYFFSMASSIWWVILSLTWFLAAGMKWGHEAIEANSQYFHLAAWAVPAIKTITILALGQVDGDVLSGVCFVGLNNVDALRGFVLAPLFVYLFIGTSFLLAGFVSLFRIRTIMKHDGTKTEKLEKLMVRIGVFSVLYTVPATIVIACYFYEQAFRDQWERSWVAQSCKSYAIPCPHLQAGGGAPPHPPMSPDFTVFMIKYLMTLIVGITSGFWIWSGKTLNSWRKFYTRLTNSKQGETTV

SEQ ID NO: 2917 - protein, 888 aa, Homo sapiens [sequence omitted]

SEQ ID NO: 2918 - protein, 491 aa, Homo sapiens
MEEGKMDENEWGYHGEGNKSLVVAHAQRCVVLRFLKFPPNRKKTSEEIFQHLQNIVDFGKNVMKEFLGENYVHYGEVVQLPLEFVKQLCLKIQSERPESRCDKDLDTLSGYAMCLPNLTRLQTYRFAEHRPILCVEIKPKCGFIPFSSDVTHEMKHKVCRYCMHQHLKVATGKWKQISKYCPLDLYSGNKQRMHFALKSLLQEAQNNLKIFKNGELIYGCKDARSPVADWSELAHHLKPFFFPSNGLASGPHCTRAVIRELVHVITRVLLSGSDKGRAGTLSPGLGPQGPRVCEASPFSRSLRCQGKNTPERSGLPKGCLLYKTLQVQMLDLLDIEGLYPLYNRVERYLEEFPEERKTLQIDGPYDEAFYQKLLDLSTEDDGTVAFALTKVQQYRVAMTAKDCSIMIALSPCLQDASSDQRPVVPSSRSRFAFSVSVLDLDLKPYESIPHQYKLDGKIVNYYSKTVRAKDNAVMSTRFKESEDCTLVLHKV

SEQ ID NO: 2919 - protein, 230 aa, Homo sapiens
MAQGLIEVERKFLPGPGTEERLQELGGTLEYRVTFRDTYYDTPELSLMQADHWLRRREDSGWELKCPGAAGVLGPHTEYKELTAEPTIVAQLCKVLRADGLGAGDVAAVLGPLGLQEVASFVTKRSAWKLVLLGADEEEPQLRVDLDTADFGYAVGEVEALVHEEAEVPTALEKIHRLSSMLGVPAQETAPAKLIVYLQRFRPQDYQRLLEVNSSRERPQETEDPDHCLG

SEQ ID NO: 2920 - protein, 879 aa, Homo sapiens
MMFYRLLSIVGRQRASPGWQNWSSARNSTSAAEARSMALPTQAQVVICGGGITGTSVAYHLSKMGWKDIVLLEQGRLAAGSTRFCAGILSTARHLTIEQKMADYSNKLYYQLEQETGIQTGYTRTGSIFLAQTQDRLISLKRINAGLNVIGIPSEIISPKKVAELHHLLNVHDLVGAMHVPEDAVVSSADVALALASAASQNGVQIYDRTSVLHVMVKKGQVTGVETDKGQIECQYFVNCAGQWAYELGLSNEEPVSIPLHACEHFYLLTRPLETPLQSSTPTIVDADGRIYIRNWQGGILSGGFEKNPKPIFTEGKNQLEIQNLQEDWDHFEPLLSSLLRRMPELETLEIMKLVNCPETFTPDMRCIMGESPAVQGYFVLAGMNSAGLSFGGGAGKYLAEWMVHGYPSENVWELDLKRFGALQSSRTFLRHRVMEVMPLMYDLKVPRWDFQTGRQLRTSPLYDRLDAQGARWMEKHGFERPKYFVPPDKDLLALEQSKTFYKPDWFDIVESEVKCCKEAVCVIDMSSFTKFEITSTGDQALEVLQYLFSNDLDVPVGHIVHTGMLNEGGGYENDCSIARLNKRSFFMISPTDQQVHCWAWLKKHMPKDSNLLLEDVTWKYTALNLIGPRAVDVLSELSYAPMTPDHFPSLFCKEMSVGYANGIRVMSMTHTGEPGFMLYIPIEYALHVYNEVMSVGQKYGIRNAGYYALRSLRIEKFFAFWGQDINNLTTPLECGRESRVKLEKGMDFIGRDALLQQKQNGVYKRLTMFILDDHDSDLDLWPWWGEPIYRNGQYVGKTTSSAYSYSLERHVCLGFVHNFSEDTGEEQVVTADFINRGEYEIDIAGYRFQAKAKLYPVASLFTQKRRKDDMELSDLHGK

SEQ ID NO: 2921 - protein, 367 aa, Homo sapiens
MGKSIPQYLGQLDIRKSVVSLATGAGAIYLLYKAIKAGIKCKPPLCSNSPICIARECPGPGERALPQEAPAPEASAVGGPKGLAVERERHGRDSGELRRLLNSLECKQDEYAKSMILHSITRCVYLLEAEASACTTDDIVLLGYMLDDKDNSVKTQALNTLKAFSGIRKFRLKIQEHSIKVLELISTIWDTELHIAGLRLLNNLPLPDYVHPQLRRVMPALMEILQSDYILAQVQAVRLLSYLAQKNDLLYDILNCQVHSNFLNLFQPTQSGSLLYEVLVFAERLSEGRNAPHYHVVKWHYNEQSLHESLFGEESRLADRLLALVIHPEEDVQIQACKVIVSLQYPQDLRARPSSCQPSRSYFKNTE

SEQ ID NO: 2922 - protein, 1084 aa, Homo sapiens
MEQPKGVDWTVIILTCQYKDSVQVFQRELEVRQKREQIPAGTLLLAVEDPEKRVGSGGATLNALLVAAEHLSARAGFTVVTSDVLHSAWILILHMGRDFPFDDCGRAFTCLPVENPEAPVEALVCNLDCLLDIMTYRLGPGSPPGVWVCSTDMLLSVPANPGISWDSFRGARVIALPGSPAYAQNHGVYLTDPQGLVLDIYYQGTEAEIQRCVRPDGRVPLVSGVVFFSVETAERLLATHVSPPLDACTYLGLDSGARPVQLSLFFDILHCMAENVTREDFLVGRPPELGQGDADVAGYLQSARAQLWRELRDQPLTMAYVSSGSYSYMTSSASEFLLSLTLPGAPGAQIVHSQVEEQQLLAAGSSVVSCLLEGPVQLGPGSVLQHCHLQGPIHIGAGCLVTGLDTAHSKALHGRELRDLVLQGHHTRLHGSPGHAFTLVGRLDSWERQGAGTYLNVPWSEFFKRTGVRAWDLWDPETLPAEYCLPSARLFPVLHPSRELGPQDLLWMLDHQEDGGEALRAWRASWRLSWEQLQPCLDRAATLASRRDLFFRQALHKARHVLEARQDLSLRPLIWAAVREGCPGPLLATLDQVAAGAGDPGVAARALACVADVLGCMAEGRGGLRSGPAANPEWMRPFSYLECGDLAAGVEALAQERDKWLSRPALLVRAARHYEGAGQILIRQAVMSAQHFVSTEQVELPGPGQWVVAECPARVDFSGGWSDTPPLAYELGGAVLGLAVRVDGRRPIGARARRIPEPELWLAVGPRQDEMTVKIVCRCLADLRDYCQPHAPGALLKAAFICAGIVHVHSELQLSEQLLRTFGGGFELHTWSELPHGSGLGTSSILAGTALAALQRAAGRVVGTEALIHAVLHLEQVLTTGGGWQDQVGGLMPGIKVGRSRAQLPLKVEVEEVTVPEGFVQKLNDHLLLVYTGKTRLARNLLQDVLRSWYARLPAVVQNAHSLVRQTEECAEGFRQGSLPLLGQCLTSYWEQKKLMAPGCEPLTVRRMMDVLAPHVHGQSLAGAGGGGFLYLLTKEPQQKEALEAVLAKTEGLGNYSIHLVEVDTQGLSLKLLGTEASTCCPFP

SEQ ID NO: 2923 - protein, 242 aa, Homo sapiens
MPRGFTWLRYLGIFLGVALGNEPLEMWPLTQNEECTVTGFLRDKLQYRSRLQYMKHYFPINYKISVPYEGVFRIANVTRLQRAQVSERELRYLWVLVSLSATESVQDVLLEGHPSWKYLQEVETLLLNVQQGLTDVEVSPKVESVLSLLNAPGPNLKLVRPKALLDNCFRVMELLYCSCCKQSSVLNWQDCEVPSPQSCSPEPSLQYAATQLYPPPPWSPSSPPHSTGSVRPVRAQGEGLLP

SEQ ID NO: 2924 - protein, 2161 aa, Homo sapiens
MMMMMMMKKMQHQRQQQADHANEANYARGTRLPLSGEGPTSQPNSSKQTVLSWQAAIDAARQAKAAQTMSTSAPPPVGSLSQRKRQQYAKSKKQGNSSNSRPARALFCLSLNNPIRRACISIVEWKPFDIFILLAIFANCVALAIYIPFPEDDSNSTNHNLEKVEYAFLIIFTVETFLKIIAYGLLLHPNAYVRNGWNLLDFVIVIVGLFSVILEQLTKETEGGNHSSGKSGGFDVKALRAFRVLRPLRLVSGVPSLQVVLNSIIKAMVPLLHIALLVLFVIIIYAIIGLELFIGKMHKTCFFADSDIVAEEDPAPCAFSGNGRQCTANGTECRSGWVGPNGGITNFDNFAFAMLTVFQCITMEGWTDVLYWMNDAMGFELPWVYFVSLVIFGSFFVLNLVLGVLSGEFSKEREKAKARGDFQKLREKQQLEEDLKGYLDWITQAEDIDPENEEEGGEEGKRNTSMPTSETESVNTENVSGEGENRGCCGSLCQAISKSKLSRRWRRWNRFNRRRCRAAVKSVTFYWLVIVLVFLNTLTISSEHYNQPDWLTQIQDIANKVLLALFTCEMLVKMYSLGLQAYFVSLFNRFDCFVVCGGITETILVELEIMSPLGISVFRCVRLLRIFKVTRHWTSLSNLVASLLNSMKSIASLLLLLFLFIIIFSLLGMQLFGGKFNFDETQTKRSTFDNFPQALLTVFQILTGEDWNAVMYDGIMAYGGPSSSGMIVCIYFIILFICGNYILLNVFLAIAVDNLADAESLNTAQKEEAEEKERKKIARKESLENKKNNKPEVNQIANSDNKVTIDDYREEDEDKDPYPPCDVPVGEEEEEEEEDEPEVPAGPRPRRISELNMKEKIAPIPEGSAFFILSKTNPIRVGCHKLINHHIFTNLILVFIMLSSAALAAEDPIRSHSFRNTILGYFDYAFTAIFTVEILLKMTTFGAFLHKGAFCRNYFNLLDMLVVGVSLVSFGIQSSAISVVKILRVLRVLRPLRAINRAKGLKHVVQCVFVAIRTIGNIMIVTTLLQFMFACIGVQLFKGKFYRCTDEAKSNPEECRGLFILYKDGDVDSPVVRERIWQNSDFNFDNVLSAMMALFTVSTFEGWPALLYKAIDSNGENIGPIYNHRVEISIFFIIYIIIVAFFMMNIFVGFVIVTFQEQGEKEYKNCELDKNQRQCVEYALKARPLRRYIPKNPYQYKFWYVVNSSPFEYMMFVLIMLNTLCLAMQHYEQSKMFNDAMDILNMVFTGVFTVEMVLKVIAFKPKGYFSDAWNTFDSLIVIGSIIDVALSEADPTESENVPVPTATPGNSEESNRISITFFRLFRVMRLVKLLSRGEGIRTLLWTFIKSFQALPYVALLIAMLFFIYAVIGMQMFGKVAMRDNNQINRNNNFQTFPQAVLLLFRCATGEAWQEIMLACLPGKLCDPESDYNPGEEYTCGSNFAIVYFISFYMLCAFLIINLFVAVIMDNFDYLTRDWSILGPHHLDEFKRIWSEYDPEAKGRIKHLDVVTLLRRIQPPLGFGKLCPHRVACKRLVAMNMPLNSDGTVMFNATLFALVRTALKIKTEGNLEQANEELRAVIKKIWKKTSMKLLDQVVPPAGDDEVTVGKFYATFLIQDYFRKFKKRKEQGLVGKYPAKNTTIALQAGLRTLHDIGPEIRRAISCDLQDDEPEETKREEEDDVFKRNGALLGNHVNHVNSDRRDSLQQTNTTHRPLHVQRPSIPPASDTEKPLFPPAGNSVCHNHHNHNSIGKQVPTSTNANLNNANMSKAAHGKRPSIGNLEHVSENGHHSSHKHDREPQRRSSVKRTRYYETYIRSDSGDEQLPTICREDPEIHGYFRDPHCLGEQEYFSSEECYEDDSSPTWSRQNYGYYSRYPGRNIDSERPRGYHHPQGFLEDDDSPVCYDSRRSPRRRLLPPTPASHRRSSFNFECLRRQSSQEEVPSSPIFPHRTALPLHLMQQQIMAVAGLDSSKAQKYSPSHSTRSWATPPATPPYRDWTPCYTPLIQVEQSEALDQVNGSLPSLHRSSWYTDEPDISYRTFTPASLTVPSSFRNKNSDKQRSADSLVEAVLISEGLGRYARDPKFVSATKHEIADACDLTIDEMESAASTLLNGNVRPRANGDVGPLSHRQDYELQDFGPGYSDEEPDPGRDEEDLADEMICITTL

SEQ ID NO: 2925 - protein, 976 aa, Homo sapiens [sequence omitted]

SEQ ID NO: 2926 - protein, 2181 aa, Homo sapiens
MMMMMMMKKMQHQRQQQADHANEANYARGTRLPLSGEGPTSQPNSSKQTVLSWQAAIDAARQAKAAQTMSTSAPPPVGSLSQRKRQQYAKSKKQGNSSNSRPARALFCLSLNNPIRRACISIVEWKPFDIFILLAIFANCVALAIYIPFPEDDSNSTNHNLEKVEYAFLIIFTVETFLKIIAYGLLLHPNAYVRNGWNLLDFVIVIVGLFSVILEQLTKETEGGNHSSGKSGGFDVKALRAFRVLRPLRLVSGVPSLQVVLNSIIKAMVPLLHIALLVLFVIIIYAIIGLELFIGKMHKTCFFADSDIVAEEDPAPCAFSGNGRQCTANGTECRSGWVGPNGGITNFDNFAFAMLTVFQCITMEGWTDVLYWVNDAIGWEWPWVYFVSLIILGSFFVLNLVLGVLSGEFSKEREKAKARGDFQKLREKQQLEEDLKGYLDWITQAEDIDPENEEEGGEEGKRNTSMPTSETESVNTENVSGEGENRGCCGSLWCWWRRRGAAKAGPSGCRRWGQAISKSKLSRRWRRWNRFNRRRCRAAVKSVTFYWLVIVLVFLNTLTISSEHYNQPDWLTQIQDIANKVLLALFTCEMLVKMYSLGLQAYFVSLFNRFDCFVVCGGITETILVELEIMSPLGISVFRCVRLLRIFKVTRHWTSLSNLVASLLNSMKSIASLLLLLFLFIIIFSLLGMQLFGGKFNFDETQTKRSTFDNFPQALLTVFQILTGEDWNAVMYDGIMAYGGPSSSGMIVCIYFIILFICGNYILLNVFLAIAVDNLADAESLNTAQKEEAEEKERKKIARKESLENKKNNKPEVNQIANSDNKVTIDDYREEDEDKDPYPPCDVPVGEEEEEEEEDEPEVPAGPRPRRISELNMKEKIAPIPEGSAFFILSKTNPIRVGCHKLINHHIFTNLILVFIMLSSAALAAEDPIRSHSFRNTILGYFDYAFTAIFTVEILLKMTTFGAFLHKGAFCRNYFNLLDMLVVGVSLVSFGIQSSAISVVKILRVLRVLRPLRAINRAKGLKHVVQCVFVAIRTIGNIMIVTTLLQFMFACIGVQLFKGKFYRCTDEAKSNPEECRGLFILYKDGDVDSPVVRERIWQNSDFNFDNVLSAMMALFTVSTFEGWPALLYKAIDSNGENIGPIYNHRVEISIFFIIYIIIVAFFMMNIFVGFVIVTFQEQGEKEYKNCELDKNQRQCVEYALKARPLRRYIPKNPYQYKFWYVVNSSPFEYMMFVLIMLNTLCLAMQHYEQSKMFNDAMDILNMVFTGVFTVEMVLKVIAFKPKGYFSDAWNTFDSLIVIGSIIDVALSEADPTESENVPVPTATPGNSEESNRISITFFRLFRVMRLVKLLSRGEGIRTLLWTFIKSFQALPYVALLIAMLFFIYAVIGMQMFGKVAMRDNNQINRNNNFQTFPQAVLLLFRCATGEAWQEIMLACLPGKLCDPESDYNPGEEYTCGSNFAIVYFISFYMLCAFLIINLFVAVIMDNFDYLTRDWSILGPHHLDEFKRIWSEYDPEAKGRIKHLDVVTLLRRIQPPLGFGKLCPHRVACKRLVAMNMPLNSDGTVMFNATLFALVRTALKIKTEGNLEQANEELRAVIKKIWKKTSMKLLDQVVPPAGDDEVTVGKFYATFLIQDYFRKFKKRKEQGLVGKYPAKNTTIALQAGLRTLHDIGPEIRRAISCDLQDDEPEETKREEEDDVFKRNGALLGNHVNHVNSDRRDSLQQTNTTHRPLHVQRPSIPPASDTEKPLFPPAGNSVCHNHHNHNSIGKQVPTSTNANLNNANMSKAAHGKRPSIGNLEHVSENGHHSSHKHDREPQRRSSVKRTRYYETYIRSDSGDEQLPTICREDPEIHGYFRDPHCLGEQEYFSSEECYEDDSSPTWSRQNYGYYSRYPGRNIDSERPRGYHHPQGFLEDDDSPVCYDSRRSPRRRLLPPTPASHRRSSFNFECLRRQSSQEEVPSSPIFPHRTALPLHLMQQQIMAVAGLDSSKAQKYSPSHSTRSWATPPATPPYRDWTPCYTPLIQVEQSEALDQVNGSLPSLHRSSWYTDEPDISYRTFTPASLTVPSSFRNKNSDKQRSADSLVEAVLISEGLGRYARDPKFVSATKHEIADACDLTIDEMESAASTLLNGNVRPRANGDVGPLSHRQDYELQDFGPGYSDEEPDPGRDEEDLADEMICITTL

SEQ ID NO: 2927 - protein, 725 aa, Homo sapiens
MESAGGFKLGEKKKLLKMTSRRLEESMGAVQMGLVNMFKGFQSKVLPPLSPKVVTEEEVNRMLTPSEFLKEMSLTTEQRLAKTRLMCRPQIIELLDMGETTHQKFSGIDLDQALFQPFPSEIIFQNYTPCEVYEVPLILRNNDKIPRLVKVVEESSPYFKVISPKDIGHKVAPGVPSIFRILFTPEENKDYAHTLTCVTEREKFIVPIKARGARAILDFPDKLNFSTCPVKYSTQKILLVRNIGNKNAVFHIKTCRPFSIEPAIGTLNVGESMQLEVEFEPQSVGDHSGRLIVCYDTGEKVFVSLYGAAIDMNIRLDKNSLTIEKTYISLANQRTITIHNRSNIIAHFLWKVFATQQEEDREKYRACDDLIKEEKDETDEFFEECITDPLLREHLSVLSRTFANQRRLVQGDSKLFFNNVFTVEPLEGDVWPNSSAEITVYFNPLEAKLYQQTIYCDILGREIRLPLRIKGEGMGPKIHFNFELLDIGKVFTGSAHCYEAILYNKGSIDALFNMTPPTSALGACFVFSPKEGIIEPSGVQAIQISFSSTILGNFEEEFLVNVNGSPEPVKLTIRGCVIGPTFHFNVPALHFGDVSFGFPHTLICSLNNTSLIPMTYKLRIPGDGLGHKSISYCEQHVDYKRPSWTKEEISSMKPKEFTISPDCGTIRPQGFAAIRVTLCSNTVQKYELALVVDVEGIGEEVLALLITARYCSPACSSPESPPSLQ

SEQ ID NO: 2928 - protein, 458 aa, Homo sapiens
MAAMPLKAQYQEMVTFEDVAVHFTKTEWTGLSPAQRALYRSVMLENFGNLTALGYPVPKPALISLLERGDMAWGLEAQDDPPAERTKNVCKDVETNIDSESTLIQGISEERDGMMSHGQLKSVPQRTDFPETRNVEKHQDIPTVKNIQGKVPRIPCARKPFICEECGKSFSYFSYYARHQRIHTGEKPFECSECGKAFNGNSSLIRHQRIHTGERPYQCEECGRAFNDNANLIRHQRIHSGDRPYYCTECGNSFTSSSEFVIHQRIHTGEKPYECNECGKAFVGNSPLLRHQKIHTGEKPYECNECGKSFGRTSHLSQHQRIHTGEKPYSCKVCGQAFNFHTKLTRHQRIHSEEKPFDCVDCGKAFSAQEQLKRHLRIHTQESSYVCDECGKALTSKRNLHQHQRIHTGEKPYECSKYEKAFGTSSQLGHLEHVYSGEKPVLDICRFGLPEFFTPFYW

SEQ ID NO: 2929 - protein, 1091 aa, Homo sapiens
MAGPGSPRRASRGASALLAAALLYAALGDVVRSEQQIPLSVVKLWASAFGGEIKSIAAKYSGSQLLQKKYKEYEKDVAIEEIDGLQLVKKLAKNMEEMFHKKSEAVRRLVEAAEEAHLKHEFDADLQYEYFNAVLINERDKDGNFLELGKEFILAPNDHFNNLPVNISLSDVQVPTNMYNKDPAIVNGVYWSESLNKVFVDNFDRDPSLIWQYFGSAKGFFRQYPGIKWEPDENGVIAFDCRNRKWYIQAATSPKDVVILVDVSGSMKGLRLTIAKQTVSSILDTLGDDDFFNIIAYNEELHYVEPCLNGTLVQADRTNKEHFREHLDKLFAKGIGMLDIALNEAFNILSDFNHTGQGSICSQAIMLITDGAVDTYDTIFAKYNWPDRKVRIFTYLIGREAAFADNLKWMACANKGFFTQISTLADVQENVMEYLHVLSRPKVIDQEHDVVWTEAYIDSTLPQAQKLTDDQGPVLMTTVAMPVFSKQNETRSKGILLGVVGTDVPVKELLKTIPKYKLGIHGYAFAITNNGYILTHPELRLLYEEGKKRRKPNYSSVDLSEVEWEDRDDVLRNAMVNRKTGKFSMEVKKTVDKGKRVLVMTNDYYYTDIKGTPFSLGVALSRGHGKYFFRGNVTIEEGLHDLEHPDVSLADEWSYCNTDLHPEHRHLSQLEAIKLYLKGKEPLLQCDKELIQEVLFDAVVSAPIEAYWTSLALNKSENSDKGVEVAFLGTRTGLSRINLFVGAEQLTNQDFLKAGDKENIFNADHFPLWYRRAAEQIPGSFVYSIPFSTGPVNKSNVVTASTSIQLLDERKSPVVAAVGIQMKLEFFQRKFWTASRQCASLDGKCSISCDDETVNCYLIDNNGFILVSEDYTQTGDFFGEIEGAVMNKLLTMGSFKRITLYDYQAMCRANKESSDGAHGLLDPYNAFLSAVKWIMTELVLFLVEFNLCSWWHSDMTAKAQKLKQTLEPCDTEYPAFVSERTIKETTGNIACEDCSKSFVIQQIPSSNLFMVVVDSSCLCESVAPITMAPIEIRYNESLKCERLKAQKIRRRPESCHGFHPEENARECGGAPSLQAQTVLLLLPLLLMLFSR

SEQ ID NO: 2930 - protein, 986 aa, Homo sapiens
MSQWTPEYNELYTLKVDMKSEIPSDAPKTQESLKGILLHPEPIGAAKSFPAGVEMINSKVGNEFSHLCDDSQKQEKEMNGNQQEQEKSLVVRKKRKSQQAGPSYVQNCVKENQGILGLRQHLGTPSDEDNDSSFSDCLSSPSSSLHFGDSDTVTSDEDKEVSVRHSQTILNAKSRSHSARSHKWPRTETESVSGLLMKRPCLHGSSLRRLPCRKRFVKNNSSQRTQKQKERILMQRKKREVLARRKYALLPSSSSSSENDLSSESSSSSSTEGEEDLFVSASENHQNNPAVPSGSIDEDVVVIEASSTPQVTANEEINVTSTDSEVEIVTVGESYRSRSTLGHSRSHWSQGSSSHASRPQEPRNRSRISTVIQPLRQNAAEVVDLTVDEDEPTVVPTTSARMESQATSASINNSNPSTSEQASDTASAVTSSQPSTVSETSATLTSNSTTGTSIGDDSRRTTSSAVTETGPPAMPRLPSCCPQHSPCGGSSQNHHALGHPHTSCFQQHGHHFQHHHHHHHTPHPAVPVSPSFSDPACPVERPPQVQAPCGANSSSGTSYHEQQALPVDLSNSGIRSHGSGSFHGASAFDPCCPVSSSRAAIFGHQAAAAAPSQPLSSIDGYGSSMVAQPQPQPPPQPSLSSCRHYMPPPYASLTRPLHHQASACPHSHGNPPPQTQPPPQVDYVIPHPVHAFHSQISSHATSHPVAPPPPTHLASTAAPIPQHLPPTHQPISHHIPATAPPAQRLHPHEVMQRMEVQRRRMMQHPTRAHERPPPHPHRMHPNYGHGHHIHVPQTMSSHPRQAPERSAWELGIEAGVTAATYTPGALHPHLAHYHAPPRLHHLQLGALPLMVPDMAGYPHIRYISSGLDGTSFRGPFRGNFEELIHLEERLGNVNRGASQGTIERCTYPHKYKKRKLHCKQDGEEGTEEDTEEKCTICLSILEEGEDVRRLPCMHLFHQVCVDQWLITNKKCPICRVDIEAQLPSES

SEQ ID NO: 2931 - protein, 957 aa, Homo sapiens
MYGSARTITNLEGSPSRSPRLPRSPRLGHRRTSSGGGGGTGKTLSMENIQSLNAAYATSGPMYLSDHEGVASTTYPKGTMTLGRATNRAVYGGRVTAMGSSPNIASAGLSHTDVLSYTDQHGGLTGSSHHHHHQVPSMLRQVRDSTMLDLQAQLKELQRENDLLRKELDIKDSKLGSSMNSIKTFWSPELKKERVLRKEEAARMSVLKEQMRVSHEENQHLQLTIQALQDELRTQRDLNHLLQQESGNRGAEHFTIELTEENFRRLQAEHDRQAKELFLLRKTLEEMELRIETQKQTLNARDESIKKLLEMLQSKGLPSKSLEDDNERTRRMAEAESQVSHLEVILDQKEKENIHLREELHRRSQLQPEPAKTKALQTVIEMKDTKIASLERNIRDLEDEIQMLKANGVLNTEDREEEIKQIEVYKSHSKFMKTKIDQLKQELSKKESELLALQTKLETLSNQNSDCKQHIEVLKESLTAKEQRAAILQTEVDALRLRLEEKESFLNKKTKQLQDLTEEKGTLAGEIRDMKDMLEVKERKINVLQKKIENLQEQLRDKDKQLTNLKDRVKSLQTDSSNTDTALATLEEALSEKERIIERLKEQRERDDRERLEEIESFRKENKDLKEKVNALQAELTEKESSLIDLKEHASSLASAGLKRDSKLKSLEIAIEQKKEECSKLEAQLKKAHNIEDDSRMNPEFADQIKQLDKEASYYRDECGKAQAEVDRLLEILKEVENEKNDKDKKIAELESLTLRHMKDQNKKVANLKHNQQLEKKKNAQLLEEVRRREDSMADNSQHLQIEELMNALEKTRQELDATKARLASTQQSLAEKEAHLANLRIERRKQLEEILEMKQEALLAAISEKDANIALLELSASKKKKTQEEVMALKREKDRLVHQLKQQTQNRMKLMADNYDDDHHHYHHHHHHHHHRSPGRSQHSNHRPSPDQDDEEGIWA

SEQ ID NO: 2932 - protein, 1108 aa, Homo sapiens
MGSKGVYQYHWQSHNVKHSGVDDMVLLSKITENSIVENLKKRYMDDYIFTYIGSVLISVNPFKQMPYFGEKEIEMYQGAAQYENPPHIYALADNMYRNMIIDRENQCVIISGESGAGKTVAAKYIMSYISRVSGGGTKVQHVKDIILQSNPLLEAFGNAKTVRNNNSSRFGKYFEIQFSPGGEPDGGKISNFLLEKSRVVMRNPGERSFHIFYQLIEGASAEQKHSLGITSMDYYYYLSLSGSYKVDDIDDRREFQETLHAMNVIGIFAEEQTLVLQIVAGILHLGNISFKEVGNYAAVESEEFLAFPAYLLGINQDRLKEKLTSRQMDSKWGGKSESIHVTLNVEQACYTRDALAKALHARVFDFLVDSINKAMEKDHEEYNIGVLDIYGFEIFQKNGFEQFCINFVNEKLQQIFIELTLKAEQEEYVQEGIRWTPIEYFNNKIVCDLIENKVNPPGIMSILDDVCATMHAVGEGADQTLLQKLQMQIGSHEHFNSWNQGFIIHHYAGKVSYDMDGFCERNRDVLFMDLIELMQSSELPFIKSLFPENLQADKKGRPTTAGSKIKKQANDLVSTLMKCTPHYIRCIKPNETKKPRDWEESRVKHQVEYLGLKENIRVRRAGYAYRRIFQKFLQRYAILTKATWPSWQGEEKQGVLHLLQSVNMDSDQFQLGRSKVFIKAPESLFLLEEMRERKYDGYARVIQKSWRKFVARKKYVQMREEASDLLLNKKERRRNSINRNFIGDYIGMEEHPELQQFVGKREKIDFADTVTKYDRRFKGVKRDLLLTPKCLYLIGREKVKQGPDKGLVKEVLKRKIEIERILSVSLSTMQDDIFILHEQEYDSLLESVFKTEFLSLLAKRYEEKTQKQLPLKFSNTLELKLKKENWGPWSAGGSRQVQFHQGFGDLAVLKPSNKVLQVSIGPGLPKNSRPTRRNTTQNTGYSSGTQNANYPVRAAPPPPGYHQNGVIRNQYVPYPHAPGSQRSNQKSLYTSMARPPLPRQQSTSSDRVSQTPESLDFLKVPDQGAAGVRRQTTSRPPPAGGRPKPQPKPKPQVPQCKALYAYDAQDTDELSFNANDIIDIIKEDPSGWWTGRLRGKQGLFPNNYVTKI

SEQ ID NO: 2933 - protein, 709 aa, Homo sapiens
MPGIDKLPIEETLEDSPQTRSLLGVFEEDATAISNYMNQLYQAMHRIYDAQNELSAATHLTSKLLKEYEKQRFPLGGDDEVMSSTLQQFSKVIDELSSCHAVLSTQLADAMMFPITQFKERDLKEILTLKEVFQIASNDHDAAINRYSRLSKKRENDKVKYEVTEDVYTSRKKQHQTMMHYFCALNTLQYKKKIALLEPLLGYMQAQISFFKMGSENLNEQLEEFLANIGTSVQNVRREMDSDIETMQQTIEDLEVASDPLYVPDPDPTKFPVNRNLTRKAGYLNARNKTGLVSSTWDRQFYFTQGGNLMSQARGDVAGGLAMDIDNCSVMAVDCEDRRYCFQITSFDGKKSSILQAESKKDHEEWICTINNISKQIYLSENPEETAARVNQSALEAVTPSPSFQQRHESLRPAAGQSRPPTARTSSSGSLGSESTNLAALSLDSLVAPDTPIQFDIISPVCEDQPGQAKAFGQGGRRTNPFGESGGSTKSETEDSILHQLFIVRFLGSMEVKSDDHPDVVYETMRQILAARAIHNIFRMTESHLLVTCDCLKLIDPQTQVTRLTFPLPCVVLYATHQENKRLFGFVLRTSSGRSESNLSSVCYIFESNNEGEKICDSVGLAKQIALHAELDRRASEKQKEIERVKEKQQKELNKQKQIEKDLEEQSRLIAASSRPNQASSEGQFVVLSSSQSEESDLGEGGKKRESEA

SEQ ID NO: 2934 - protein, 479 aa, Homo sapiens
MASTIKEALSVVSEDQSLFECAYGTPHLAKTEMTASSSSDYGQTSKMSPRVPQQDWLSQPPARVTIKMECNPSQVNGSRNSPDECSVAKGGKMVGSPDTVGMNYGSYMEEKHMPPPNMTTNERRVIVPADPTLWSTDHVRQWLEWAVKEYGLPDVNILLFQNIDGKELCKMTKDDFQRLTPSYNADILLSHLHYLRETPLPHLTSDDVDKALQNSPRLMHARNTGGAAFIFPNTSVYPEATQRITTRPDLPYEPPRRSAWTGHGHPTPQSKAAQPSPSTVPKTEDQRPQLDPYQILGPTSSRLANPGSGQIQLWQFLLELLSDSSNSSCITWEGTNGEFKMTDPDEVARRWGERKSKPNMNYDKLSRALRYYYDKNIMTKVHGKRYAYKFDFHGIAQALQPHPPESSLYKYPSDLPYMGSYHAHPQKMNFVAPHPPALPVTSSSFFAAPNPYWNSPTGGIYPNTRLPTSHMPSHLGTYY

SEQ ID NO: 2935 - protein, 670 aa, Homo sapiens
MSLADLTKTNIDEHFFGVALENNRRSAACKRSPGTGDFSRNSNASNKSVDYSRSQCSCGSLSSQYDYSEDFLCDCSEKAINRNYLKQPVVKEKEKKKYNVSKISQSKGQKEISVEKKHTWNASLFNSQIHMIAQRRDAMAHRILSARLHKIKGLKNELADMHHKLEAILTENQFLKQLQLRHLKAIGKYENSQNNLPQIMAKHQNEVKNLRQLLRKSQEKERTLSRKLRETDSQLLKTKDILQALQKLSEDKNLAEREELTHKLSIITTKMDANDKKIQSLEKQLRLNCRAFSRQLAIETRKTLAAQTATKTLQVEVKHLQQKLKEKDRELEIKNIYSHRILKNLHDTEDYPKVSSTKSVQADRKILPFTSMRHQGTQKSDVPPLTTKGKKATGNIDHKEKSTEINHEIPHCVNKLPKQEDSKRKYEDLSGEEKHLEVQILLENTGRQKDKKEDQEKKNIFVKEEQELPPKIIEVIHPERESNQEDVLVREKFKRSMQRNGVDDTLGKGTAPYTKGPLRQRRHYSFTEATENLHHGLPASGGPANAGNMRYSHSTGKHLSNREEMELEHSDSGYEPSFGKSSRIKVKDTTFRDKKSSLMEELFGSGYVLKTDQSSPGVAKGSEEPLQSKESHPLPPSQASTSHAFGDSKVTVVNSIKPSSPTEGKRKIII

SEQ ID NO: 2936 - protein, 1606 aa, Homo sapiens
MSEDSRGDSRAESAKDLEKQLRLRVCVLSELQKTERDYVGTLEFLVSAFLHRMNQCAASKVDKNVTEETVKMLFSNIEDILAVHKEFLKVVEECLHPEPNAQQEVGTCFLHFKDKFRIYDEYCSNHEKAQKLLLELNKIRTIRTFLLNCMLLGGRKNTDVPLEGYLVTPIQRICKYPLILKELLKRTPRKHSDYAAVMEALQAMKAVCSNINEAKRQMEKLEVLEEWQSHIEGWEGSNITDTCTEMLMCGVLLKISSGNIQERVFFLFDNLLVYCKRKHRRLKNSKASTDGHRYLFRGRINTEVMEVENVDDGTADFHSSGHIVVNGWKIHNTAKNKWFVCMAKTPEEKHEWFEAILKERERRKGLKLGMEQDTWVMISEQGEKLYKMMCRQGNLIKDRKRKLTTFPKCFLGSEFVSWLLEIGEIHRPEEGVHLGQALLENGIIHHVTDKHQFKPEQMLYRFRYDDGTFYPRNEMQDVISKGVRLYCRLHSLFTPVIRDKDYHLRTYKSVVMANKLIDWLIAQGDCRTREEAMIFGVGLCDNGFMHHVLEKSEFKDEPLLFRFFSDEEMEGSNMKHRLMKHDLKVVENVIAKSLLIKSNEGSYGFGLEDKNKVPIIKLVEKGSNAEMAGMEVGKKIFAINGDLVFMRPFNEVDCFLKSCLNSRKPLRVLVSTKPRETVKIPDSADGLGFQIRGFGPSVVHAVGRGTVAAAAGLHPGQCIIKVNGINVSKETHASVIAHVTACRKYRRPTKQDSIQWVYNSIESAQEDLQKSHSKPPGDEAGDAFDCKVEEVIDKFNTMAIIDGKKEHVSLTVDNVHLEYGVVYEYDSTAGIKCNVVEKMIEPKGFFSLTAKILEALAKSDEHFVQNCTSLNSLNEVIPTDLQSKFSALCSERIEHLCQRISSYKKFSRVLKNRAWPTFKQAKSKISPLHSSDFCPTNCHVNVMEVSYPKTSTSLGSAFGVQLDSRKHNSHDKENKSSEQGKLSPMVYIQHTITTMAAPSGLSLGQQDGHGLRYLLKEEDLETQDIYQKLLGKLQTALKEVEMCVCQIDDLLSSITYSPKLERKTSEGIIPTDSDNEKGERNSKRVCFNVAGDEQEDSGHDTISNRDSYSDCNSNRNSIASFTSICSSQCSSYFHSDEMDSGDELPLSVRISHDKQDKIHSCLEHLFSQVDSITNLLKGQAVVRAFDQTKYLTPGRGLQEFQQEMEPKLSCPKRLRLHIKQDPWNLPSSVRTLAQNIRKFVEEVKCRLLLALLEYSDSETQLRRDMVFCQTLVATVCAFSEQLMAALNQMFDNSKENEMETWEASRRWLDQIANAGVLFHFQSLLSPNLTDEQAMLEDTLVALFDLEKVSFYFKPSEEEPLVANVPLTYQAEGSRQALKVYFYIDSYHFEQLPQRLKNGGGFKIHPVLFAQALESMEGYYYRDNVSVEEFQAQINAASLEKVKQYNQKLRAFYLDKSNSPPNSTSKAAYVDKLMRPLNALDELYRLVASFIRSKRTAACANTACSASGVGLLSVSSELCNRLGACHIIMCSSGVHRCTLSVTLEQAIILARSHGLPPRYIMQATDVMRKQGARVQNTAKNLGVRDRTPQSAPRLYKLCEPPPPAGEE

SEQ ID NO: 2937 - protein, 639 aa, Homo sapiens
MVVSEVDIAKADPAAASHPLLLNGDATVAQKNPGSVAENNLCSQYEEKVRPCIDLIDSLRALGVEQDLALPAIAVIGIVTRCPLVLKLKKLVNEDKWRGKVSYQDYEIEISDASEVEKEINKAQNAIAGEGMGISHELITLEISSRDVPDLTLIDLPGITRVAVGNQPADIGYKIKTLIKKYIQRQETISLVVVPSNVDIATTEALSMAQEVDPEGDRTIGILTKPDLVDKGTEDKVVDVVRNLVFHLKKGYMIVKCRGQQEIQDQLSLSEALQREKIFFENHPYFRDLLEEGKATVPCLAEKLTSELITHICKSLPLLENQIKETHQRITEELQKYGVDIPEDENEKMFFLIDKVNAFNQDITALMQGEETVGEEDIRLFTRLRHEFHKWSTIIENNFQEGHKILSRKIQKFENQYRGRELPGFVNYRTFETIVKQQIKALEEPAVDMLHTVTDMVRLAFTDVSIKNFEEFFNLHRTAKSKIEDIRAEQEREGEKLIRLHFQMEQIVYCQDQVYRGALQKVREKELEEEKKKKSWDFGAFQSSSATDSSMEEIFQHLMAYHQEASKRISSHIPLIIQFFMLQTYGQQLQKAMLQLLQDKDTYSWLLKERSDTSDKRKFLKERLARLTQARRRLAQFPG

SEQ ID NO: 2938 - protein, 772 aa, Homo sapiens
MEDEREDVQKKTFTKWVNAQFSKFGKQHIENLFSDLQDGRRLLDLLEGLTGQKLPKEKGSTRVHALNNVNKALRVLQNNNVDLVNIGSTDIVDGNHKLTLGLIWNIILHWQVKNVMKNIMAGLQQTNSEKILLSWVRQSTRNYPQVNVINFTTSWSDGLALNALIHSHRPDLFDWNSVVCQQSATQRLEHAFNIARYQLGIEKLLDPEDVDTTYPDKKSILMYITSLFQVLPQQVSIEAIQEVEMLPRPPKVTKEEHFQLHHQMHYSQQITVSLAQGYERTSSPKPRFKSYAYTQAAYVTTSDPTRSPFPSQHLEAPEDKSFGSSLMESEVNLDRYQTALEEVLSWLLSAEDTLQAQGEISNDVEVVKDQFHTHEGYMMDLTAHQGRVGNILQLGSKLIGTGKLSEDEETEVQEQMNLLNSRWECLRVASMEKQSNLHRVLMDLQNQKLKELNDWLTKTEERTRKMEEEPLGPDLEDLKRQVQQHKVLQEDLEQEQVRVNSLTHMVVVVDESSGDHATAALEEQLKVLGDRWANICRWTEDRWVLLQDILLKWQRLTEEQCLFSAWLSEKEDAVNKIHTTGFKDQNEMLSSLQKLAVLKADLEKKKQSMGKLYSLKQDLLSTLKNKSVTQKTEAWLDNFARCWDNLVQKLEKSTAQISQAVTTTQPSLTQTTVMETVTTVTTREQILVKHAQEELPPPPPQKKRQITVDSEIRKRLDVDITELHSWITRSEAVLQSPEFAIFRKEGNFSDLKEKVNVGYALIFISVLILCCL

SEQ ID NO: 2939 - protein, 1065 aa, Homo sapiens
MDAAGRGCHLLPLPAARGPARAPAAAAAAAASPPGPCSGAACAPSAAAGAGAMNPSSSAGEEKGATGGSSSSGSGAGSCCLGAEGGADPRGAGSAAAAGAAALDEPAAAGQKEKDEALEEKLRNLTFRKQVSYRKAISRAGLQHLAPAHPLSLPVANGPAKEPRATLDWSENAVNGEHLWLETNVSGDLCYLGEENCQVRFAKSALRRKCAVCKIVVHTACIEQLEKINFRCKPTFREGGSRSPRENFVRHHWVHRRRQEGKCKQCGKGFQQKFSFHSKEIVAISCSWCKQAFHNKVTCFMLHHIEEPCSLGAHAAVIVPPTWIIKVKKPQNSLKASNRKKKRTSFKRKASKRGMEQENKGRPFVIKPISSPLMKPLLVFVNPKSGGNQGTKVLQMFMWYLNPRQVFDLSQEGPKDALELYRKVPNLRILACGGDGTVGWILSILDELQLSPQPPVGVLPLGTGNDLARTLNWGGGYTDEPVSKILCQVEDGTVVQLDRWNLHVERNPDLPPEELEDGVCKLPLNVFNNYFSLGFDAHVTLEFHESREANPEKFNSRFRNKMFYAGAAFSDFLQRSSRDLSKHVKVVCDGTDLTPKIQELKFQCIVFLNIPRYCAGTMPWGNPGDHHDFEPQRHDDGYIEVIGFTMASLAALQVGGHGERLHQCREVMLLTYKSIPMQVDGEPCRLAPAMIRISLRNQANMVQKSKRRTSMPLLNDPQSVPDRLRIRVNKISLQDYEGFHYDKEKLREASISDWLRTIAGELVQSFGAIPLGILVVRGDCDLETCRMYIDRLQEDLQSVSSGSQRVHYQDHETSFPRALSAQRLSPRWCFLDDRSQEHLHFVMEISQDEIFILDPDMVVSQPAGTPPGMPDLVVEQASGISDWWNPALRKRMLSDSGLGMIAPYYEDSDLKDLSHSRVLQSPVSSEDHAILQAVIAGDLMKLIESYKNGGSLLIQGPDHCSLLHYAAKTGNGEIVKYILDHGPSELLDMADSETGETALHKAACQRNRAVCQLLVDAGASLRKTDSKGKTPQERAQQAGDPDLAAYLESRQNYKVIGHEDLETAV

SEQ ID NO: 2940 - protein, 340 aa, Homo sapiens
MAAGRLIIKTEFLPTKYRGYMLPLSQVFWLAGSLLIIGLASVIIPTIGWRWLIRVASIPGIILIVAFKFIPESARFNVSTGNTRAALATLERVAKMNRSVMPEGKLVEPVLEKRGRFADLLDAKYLRTTLQIWVIWLGISFAYYGVILASAELLERDLVCGSKSDSAVVVTGGDSGESQSPCYCHMFAPSDYRTMIISTIGEIALNPLNILGINFLGRRLSLSITMGCTALFFLLLNICTSSAGLIGFLFMLRALVAANFNTVYIYTAEVYPTTMRALGMGTSGSLCRIGAMVAPFISQVLMSASILGALCLFSSVCVVCAISAFTLPIETKGRALQQIK

SEQ ID NO: 2941 - protein, 440 aa, Homo sapiens
MNTLLCKGMFCLLSWEADSRGRLGEYTLQPLSLQTEETTELGSKKELKSMPFITYLSGLLTAQMLSDDQLISGVEIRCEEKGRCPSTCHLCRRPGKEQLSPTPVLLEINRVVPLYTLIQDNGTKEAFKSALMSSYWCSGKGDVIDDWCRCDLSAFDANGLPNCSPLLQPVLRLSPTVEPSSTVVSLEWVDVQPAIGTKVSDYILQHKKVDEYTDTDLYTGEFLSFADDLLSGLGTSCVAAGRSHGEVPEVSIYSVIFKCLEPDGLYKFTLYAVDTRGRHSELSTVTLRTACPLVDDNKAEEIADKIYNLYNGYTSGKEQQMAYNTLMEVSASMLFRVQHHYNSHYEKFGDFVWRSEDELGPRKAHLILRRLERVSSHCSSLLRSAYIQSRVETVPYLFCRSEEVRPAGMVWYSILKDTKITCEEKMVSMARNTYGESKGR

SEQ ID NO: 2942 - protein, 541 aa, Homo sapiens
HSYGVAQPPTFSPAVNVQAPVIGVTPSLPPHVGPQLPLMPGHYSLPQPPSQPLSSVVVNMPAQALYASPQPLAVSTLPGVGQVARPGPTAVGNGHMAGPLLPPPPPAQPSATLPSGAPATNGPPTTDSAHGLQMLRTIGVGKYEFTDPGHPREMLKELNQQRRAKAFTDLKIVVEGREFEVHQNVLASCSLYFKDLIQRSVQDSGQGGREKLELVLSNLQADVLELLLEFVYTGSLVIDSANAKTLLEAASKFQFHTFCKVCVSFLEKQLTASNCLGVLAMAEAMQCSELYHMAKAFALQIFPEVAAQEEILSISKDDFIAYVSNDSLNTKAEELVYETVIKWIKKDPATRTQYAAELLAVVRLPFIHPSYLLNVVDNEELIKSSEACRDLVNEAKRYHMLPHARQEMQTPRTRPRLSAGVAEVIVLVGGRQMVGMTQRSLVAVTCWNPQNNKWYPLASLPFYDREFFSVVSAGDNIYLSGGMESGVTLADVWCYMSLLDNWNLVSRMTVPRCRHNSLVYDGKIYTLGGLGVAGNVDHVER

SEQ ID NO: 2943 - protein, 1399 aa, Homo sapiens
MSGLGDSSSDPANPDSHKRKGSPCDTLASSTEKRRREQENKYLEELAELLSANISDIDSLSVKPDKCKILKKTVDQIQLMKRMEQEKSTTDDDVQKSDISSSSQGVIEKESLGPLLLEALDGFFFVVNCEGRIVFVSENVTSYLGYNQEELMNTSVYSILHVGDHAEFVKNLLPKSLVNGVPWPQEATRRNSHTFNCRMLIHPPDEPGTENQEACQRYEVMQCFTVSQPKSIQEDGEDFQSCLICIARRLPRPPAITGVESFMTKQDTTGKIISIDTSSLRAAGRTGWEDLVRKCIYAFFQPQGREPSYARQLFQEVMTRGTASSPSYRFILNDGTMLSAHTKCKLCYPQSPDMQPFIMGIHIIDREHSGLSPQDDTNSGMSIPRVNPSVNPSISPAHGVARSSTLPPSNSNMVSTRINRQQSSDLHSSSHSNSSNSQGSFGCSPGSQIVANVALNQGQASSQSSNPSLNLNNSPMEGTGISLAQFMSPRRQVTSGLATRPRMPNNSFPPNISTLSSPVGMTSSACNNNNRSYSNIPVTSLQGMNEGPNNSVGFSASSPVLRQMSSQNSPSRLNIQPAKAESKDNKEIASILNEMIQSDNSSSDGKPLDSGLLHNNDRLSDGDSKYSQTSHKLVQLLTTTAEQQLRHADIDTSCKDVLSCTGTSNSASANSSGGSCPSSHSSLTERHKILHRLLQEGSPSDITTLSVEPDKKDSASTSVSVTGQVQGNSSIKLELDASKKKESKDHQLLRYLLDKDEKDLRSTPNLSLDDVKVKVEKKEQMDPCNTNPTPMTKPTPEEIKLEAQSQFTADLDQFDQLLPTLEKAAQLPGLCETDRMDGAVTSVTIKSEILPASLQSATARPTSRLNRLPELELEAIDNQFGQPGTGDQIPWTNNTVTAINQSKSEDQCISSQLDELLCPPTTVEGRNDEKALLEQLVSFLSGKDETELAELDRALGIDKLVQGGGLDVLSERFPPQQATPPLIMEERPNLYSQPYSSPSPTANLPSPFQGMVRQKPSLGTMPVQVTPPRGAFSPGMGMQPRQTLNRPPAAPNQLRLQLQQRLQGQQQLIHQNRQAILNQFAATAPVGINMRSGMQQQITPQPPLNAQMLAQRQRELYSQQHRQRQLIQQQRAMLMRQQSFGNNLPPSSGLPVQMGNPRLPQGAPQQFPYPPNYGTNPGTPPASTSPFSQLAANPEASLANRNSMVSRGMTGNIGGQFGTGINPQMQQNVFQYPGAGMVPQGEANFAPSLSPGSSMVPMPIPPPQSSLLQQTPPASGYQSPDMKAWQQGAIGNNNVFSQAVQNQPTPAQPGVYNNMSITVSMAGGNTNVQNMNPMMAQMQMSSLQMPGMNTVCPEQINDPALRHTGLYCNQLSSTDLLKTEADGTQDKKTEEFFSVVTTD

SEQ ID NO: 2944 - protein, 806 aa, Homo sapiens
MAALSGGGGGGAEPGQALFNGDMEPEAGAGAGAAASSAADPAIPEEVWNIKQMIKLTQEHIEALLDKFGGEHNPPSIYLEAYEEYTSKLDALQQREQQLLESLGNGTDFSVSSSASMDTVTSSSSSSLSVLPSSLSVFQNPTDVARSNPKSPQKPIVRVFLPNKQRTVVPARCGVTVRDSLKKALMMRGLIPECCAVYRIQDGEKKPIGWDTDISWLTGEELHVEVLENVPLTTHNFVRKTFFTLAFCDFCRKLLFQGFRCQTCGYKFHQRCSTEVPLMCVNYDQLDLLFVSKFFEHHPIPQEEASLAETALTSGSSPSAPASDSIGPQILTSPSPSKSIPIPQPFRPADEDHRNQFGQRDRSSSAPNVHINTIEPVNIDDLIRDQGFRGDGAPLNQLMRCLRKYQSRTPSPLLHSVPSEIVFDFEPGPVFRGSTTGLSATPPASLPGSLTNVKALQKSPGPQRERKSSSSSEDRNRMKTLGRRDSSDDWEIPDGQITVGQRIGSGSFGTVYKGKWHGDVAVKMLNVTAPTPQQLQAFKNEVGVLRKTRHVNILLFMGYSTKPQLAIVTQWCEGSSLYHHLHIIETKFEMIKLIDIARQTAQGMDYLHAKSIIHRDLKSNNIFLHEDLTVKIGDFGLATVKSRWSGSHQFEQLSGSILWMAPEVIRMQDKNPYSFQSDVYAFGIVLYELMTGQLPYSNINNRDQIIFMVGRGYLSPDLSKVRSNCPKAMKRLMAECLKKKRDERPLFPQILASIELLARSLPKIHRSASEPSLNRAGFQTEDFSLYACASPKTPIQAGGYGAFPVH

SEQ ID NO: 2945 - protein, 1092 aa, Homo sapiens
MGNAGSMDSQQTDFRAHNVPLKLPMPEPGELEERFAIVLNAMNLPPDKARLLRQYDNEKKWELICDQERFQVKNPPHTYIQKLKGYLDPAVTRKKFRRRVQESTQVLRELEISLRTNHIGWVREFLNEENKGLDVLVEYLSFAQYAVTFDFESVESTVESSVDKSKPWSRSIEDLHRGSNLPSPVGNSVSRSGRHSALRYNTLPSRRTLKNSRLVSKKDDVHVCIMCLRAIMNYQYGFNMVMSHPHAVNEIALSLNNKNPRTKALVLELLAAVCLVRGGHEIILSAFDNFKEVCGEKQRFEKLMEHFRNEDNNIDFMVASMQFINIVVHSVEDMNFRVHLQYEFTKLGLDEYLDKLKHTESDKLQVQIQAYLDNVFDVGALLEDAETKNAALERVEELEENISHLSEKLQDTENEAMSKIVELEKQLMQRNKELDVVREIYKDANTQVHTLRKMVKEKEEAIQRQSTLEKKIHELEKQGTIKIQKKGDGDIAILPVVASGTLSMGSEVVAGNSVGPTMGAASSGPLPPPPPPLPPSSDTPETVQNGPVTPPMPPPPPPPPPPPPPPPPPPPPPLPGPAAETVPAPPLAPPLPSAPPLPGTSSPTVVFNSGLAAVKIKKPIKTKFRMPVFNWVALKPNQINGTVFNEIDDERILEDLNVDEFEEIFKTKAQGPAIDLSSSKQKIPQKGSNKVTLLEANRAKNLAITLRKAGKTADEICKAIHVFDLKTLPVDFVECLMRFLPTENEVKVLRLYERERKPLENLSDEDRFMMQFSKIERLMQKMTIMAFIGNFAESIQMLTPQLHAIIAASVSIKSSQKLKKILEIILALGNYMNSSKRGAVYGFKLQSLDLLLDTKSTDRKQTLLHYISNVVKEKYHQVSLFYNELHYVEKAAAVSLENVLLDVKELQRGMDLTKREYTMHDHNTLLKEFILNNEGKLKKLQDDAKIAQDAFDDVVKYFGENPKTTPPSVFFPVFVRFVKAYKQAEEENELRKKQEQALMEKLLEQEALMEQQDPKSPSHKSKRQQQELIAELRRRQVKDNRHVYEGKDGAIEDIITDLRNQPYRRADAVRRSVRRRFDDQNLRSVNGAEITM

SEQ ID NO: 2946 - protein, 564 aa, Homo sapiens
MLANSASVRILIKGGKVVNDDCTHEADVYIENGIIQQVGRELMIPGGAKVIDATGKLVIPGGIDTSTHFHQTFMNATCVDDFYHGTKAALVGGTTMIIGHVLPDKETSLVDAYEKCRGLADPKVCCDYALHVGITWWAPKVKAEMETLVREKGVNSFQMFMTYKDLYMLRDSELYQVLHACKDIGAIARVHAENGELVAEGAKEALDLGITGPEGIEISRPEELEAEATHRVITIANRTHCPIYLVNVSSISAGDVIAAAKMQGKVVLAETTTAHATLTGLHYYHQDWSHAAAYVTVPPLRLDTNTSTYLMSLLANDTLNIVASDHRPFTTKQKAMGKEDFTKIPHGVSGVQDRMSVIWERGVVGGKMDENRFVAVTSSNAAKLLNLYPRKGRIIPGADADVVVWDPEATKTISASTQVQGGDFNLYENMRCHGVPLVTISRGRVVYENGVFMCAEGTGKFCPLRSFPDTVYKKLVQREKTLKVRGVDRTPYLGDVAVVVHPGKKEMGTPLADTPTRPVTRHGGMRDLHESSFSLSGSQIDDHVPKRASARILAPPGGRSSGIW

SEQ ID NO: 2947 - protein, 740 aa, Homo sapiens
MNPPGSLEALDPNVDEHLSTQILAPSVHSDNSQERIQARRLRIAARLEARRREALGEYLDGKKESEEDQSKSYKQKEESRLKLAKLLLCGTELVTNIQVAIDIREIHRRVEEEEIKRQRIEKLENEVKTSQDKFDEITSKWEEGKQKRIPQELWEMLNTQQLHCAGLLEDKNKLISELQQELKTKDDQYVKDLKKQSDDICLLLERMEEQVKNVMKTFREELYNIEKAFEVERQELLASNKKKWEQALQAHNAKELEYLNNRMKKVEDYEKQLNRQRIWDCEEYNMIKIKLEQDVQILEQQLQQRKAIYQLNQEKLEYNLQVLKKRDEESTVIKSQQKRKINRLHDILNNLRSKYAKQIKQFQEENQSLTSDYKRLVMQFKELQKAMRHFALIDDEKFWEIWLMNEEEAKDLIARAFDVDRIIHTHHLGLPWAAPDFWFLNNVGPISQQPQKSATQIVEEMLMRSEEEEAEEAAAEPESYLDLPKQISEKTTKRILMLLCDESGFLIESKLLSLLLPLEQNECYLLRLDAIFSALGIESEDDLYKLVNFFLKYRAHRLSSSLQIKPCSQASMEKASMEETSTRSELELAEQTEMEGEKEESLVEGEKEEEEETPPSPWVIHPNDVLKILEAFVMGLKKPRDSRAPLRVQKNVRDNSKDSEYWQALTTVIPSSKQNLWDALYTALEKYHLVLTQRAKLLLENSSLEQQNTELQALLQQYLNSKINSELQVPPTQVLRVPTK

SEQ ID NO: 2948 - protein, 969 aa, Homo sapiens
MHTPSIRSITHDAQTSSTGSSAPGTALCTEECVHGRCVSPDTCHCEPGWGGPDCSSGCDSDHWGPHCSNRCQCQNGALCNPITGACVCAAGFRGWRCEELCAPGTHGKGCQLPCQCRHGASCDPRAGECLCAPGYTGVYCEELCPPGSHGAHCELRCPCQNGGTCHHITGECACPPGWTGAVCAQPCPPGTFGQNCSQDCPCHHGGQCDHVTGQCHCTAGYMGDRCQEECPFGSFGFQCSQHCDCHNGGQCSPTTGACECEPGYKGPRCQERLCPEGLHGPGCTLPCPCDADNTISCHPVTGACTCQPGWSGHHCNESCPVGYYGDGCQLPCTCQNGADCHSITGGCTCAPGFMGEVCAVSCAAGTYGPNCSSICSCNNGGTCSPVDGSCTCKEGWQGLDCTLPCPSGTWGLNCNESCTCANGAACSPIDGSCSCTPGWLGDTCELPCPDGTFGLNCSEHCDCSHADGCDPVTGHCCCLAGWTGIRCDSTCPPGRWGPNCSVSCSCENGGSCSPEDGSCECAPGFRGPLCQRICPPGFYGHGCAQPCPLCVHSSRPCHHISGICECLPGFSGALCNQVCAGGYFGQDCAQLCSCANNGTCSPIDGSCQCFPGWIGKDCSQACPPGFWGPACFHACSCHNGASCSAEDGACHCTPGWTGLFCTQRCPAAFFGKDCGRVCQCQNGASCDHISGKCTCRTGFTGQHCEQRCAPGTFGYGCQQLCECMNNSTCDHVTGTCYCSPGFKGIRCDQAALMMEELNPYTKISPALGAERHSVGAVTGIMLLLFLIVVLLGLFAWHRRRQKEKGRDLAPRVSYTPAMRMTSTDYSLSGACGMDRRQNTYIMDKGFKDYMKESVCSSSTCSLNSSENPYATIKDPPILTCKLPESSYVEMKSPVHMGSPYTDVPSLSTSNKNIYEVEPTVSVVQEGCGHNSSYIQNAYDLPRNSHIPGHYDLLPVRQSPANGPSQDKQS

SEQ ID NO: 2949 - protein, 438 aa, Homo sapiens
MSKRDKAGKDTARGKGKDISKYGSVQKSFADRGLPKPPKEKLLQVEKLRKESGKGSFLQPTAKPRALAQQQAVIRGFTYYKAGKQEVTEAVADNTLQGTSWLEQLPPKVEGRSNSAEPNSAEQDEAEPRSSERVDLASGTPTSIPATTTTATTTPTPTTSLLPTEPPSGPEVSSQGREASCEGTLRAVDPPVRHHSYGRHEGAWMKDPAARDDRIYVTNYYYGNSLVEFRNLENFKQGRWSNMYKLPYNWIGTGHVVYQGAFYYNRAFTKNIIKYDLRQRFVASWALLPDVVYEDTTPWKWRGHSDIDFAVDESGLWVIYPAVDDRDEAQPEVIVLSRLDPGDLSVHRETTWKTRLRRNSYGNCFLVCGILYAVDTYNQQEGQVAYAFDTHTGTDARPQLPFLNEHAYTTQIDYNPKERVLYAWDNGHQLTYTLHFVV

SEQ ID NO: 2950 - protein, 496 aa, Homo sapiens
MFRSKRSGLVRRLWRSRVVPDREEGGSGGGGGGDEDGSLGSRAEPAPRAREGGGCGRSEVRPVAPRRPRDAVGQRGAQGAGRRRRAGGPPRPMSEPGAGAGSSLLDVAEPGGPGWLPESDCETVTCCLFSERDAAGAPRDASDPLAGAALEPAGGGRSREARSRLLLLEQELKTVTYSLLKRLKERSLDTLLEAVESRGGVPGGCVLVPRADLRLGGQPAPPQLLLGRLFRWPDLQHAVELKPLCGCHSFAAAADGPTVCCNPYHFSRLCGPESPPPPYSRLSPRDEYKPLDLSDSTLSYTETEATNSLITAPGEFSDASMSPDATKPSHWCSVAYWEHRTRVGRLYAVYDQAVSIFYDLPQGSGFCLGQLNLEQRSESVRRTRSKIGFGILLSKEPDGVWAYNRGEHPIFVNSPTLDAPGGRALVVRKVPPGYSIKVFDFERSGLQHAPEPDAADGPYDPNSVRISFAKGWGPCYSRQFITSCPCWLEILLNNPR

SEQ ID NO: 2951 - protein, 1149 aa, Homo sapiens
MSDAAEAPREATGENGETEMKEEEEPNPNYKEVEDPQQESKDDTIAWRESQEEERKTGEEEGEEEGKEDKKIVMEETEEKAGEVQEKEASGIQEETTVEPQEVTASMIRLETQITDSQSITSGIFPKTQRGSKSKLSLQLEDAETDELLRDLSTQIEFLDLDQISPEEQQISSPERQPSGELEEKTDRMPQDELGQERRDLEPENREEGQERRVSDIQSKAGISRESLVSSTTEDILFQKDKSTPVYPLTMTWSFGWNSSLPVYYIREERQRVLLYVCAHTAIIYNVFRNNQYHLQGHANIISCLCVSEDRRWIATADKGPDCLVIIWDSFTGIPVHTIFDSCPEGNGIMAMAMTHDAKYLATISDAEVQKVCIWKWTLAVETPACTLELPTEYGVQNYVTFNPTNNKELVSNSKTRAIYYAWYEERDTLAHSAPLLTEKTFNKLVGKFSQSIFHLNLTQILSATMEGKLVVWDIHRPPSSASTFLGFPYIKPCKLVHLQKEGITVLTTIDSYIVTGDIKGNIKFYDHTLSIVNWYSHLKLGAIRTLSFSKTPATPPTEKSNYPPDCTLKGDLFVLRNFIIGTSDAAVYHLTTDGTKLEKLFVEPKDAICAISCHPYQPLIAIGSICGMIKVWNYENKQYLFSRVFEKGLGVQSLTYNPEGALLGAGFTEGTVYILDAMSLENESPEPFKYSRTSVTHISFSHDSQYMATADRSFTVAVYMLVVRNGQRVWEYLARLRSHRKSIRSLLFGVYLDSNEPRLLSLGTDRLLIEYDLLRSYKDHLEVLDIHHTDQGCYPTCMVWYPPLTRELFLLICNSGYKVKLFNATTKMCRKTLLGPAYGSPIEQTQVLPVRSMAELQKRYLVFINRDKVGLQILPVDGNPHKTSAIVCHPNGVAGMAVSYDGCYAFTAGGHDRSVVQWKITLSVLEAAVSLGGEDLTPFYGLLSGGREGKFYRELEDYFYYSQLRSQGIDTMETRKVSEHICLSELPFVMRAIGFYPSEEKIDDIFNEIKFGEYVDTGKLIDKINLPDFLKVYLNHKPPFGNTMSGIHKSFEVLGYTNSKGKKAIRREDFLRLLVTKGEHMTEEEMLDCFASLFGLNPEGWKSEPATCSVKGSEICLEEELPDEITAEIFATEILGLTISEDSGQDGQ

SEQ ID NO: 2952 - protein, 175 aa, Homo sapiens [sequence omitted]

SEQ ID NO: 2953 - protein, 314 aa, Homo sapiens
MGLEAARELECAALGTLLRDPREAERTLLLDCRPFLAFCRRHVRAARPVPWNALLRRRARGPPAAVLACLLPDRALRTRLVRGELARAVVLDEGSASVAELRPDSPAHVLLAALLHETRAGPTAVYFLRGGFDGFQGCCPDLCSEAPAPALPPTGDKTSRSDSRAPVYDQGGPVEILPYLFLGSCSHSSDLQGLQACGITAVLNVSASCPNHFEGLFRYKSIPVEDNQMVEISAWFQEAIGFIDWVKNSGGRVLVHCQAGISRSATICLAYLMQSRRVRLDEAFDFVKQRRGVISPNFSFMGQLLQFETQVLCH

SEQ ID NO: 2954 - protein, 626 aa, Homo sapiens
MSNELDFRSVRLLKNDPVNLQKFSYTSEDEAWKTYLENPLTAATKAMMRVNGDDDSVAALSFLYDYYMGPKEKRILSSSTGGRNDQGKRYYHGMEYETDLTPLESPTHLMKFLTENVSGTPEYPDLLKKNNLMSLEGALPTPGKAAPLPAGPSKLEAGSVDSYLLPTTDMYDNGSLNSLFESIHGVPPTQRWQPDSTFKDDPQESMLFPDILKTSPEPPCPEDYPSLKSDFEYTLGSPKAIHIKSGESPMAYLNKGQFYPVTLRTPAGGKGLALSSNKVKSVVMVVFDNEKVPVEQLRFWKHWHSRQPTAKQRVIDVADCKENFNTVEHIEEVAYNALSFVWNVNEEAKVFIGVNCLSTDFSSQKGVKGVPLNLQIDTYDCGLGTERLVHRAVCQIKIFCDKGAERKMRDDERKQFRRKVKCPDSSNSGVKGCLLSGFRGNETTYLRPETDLETPPVLFIPNVHFSSLQRSGGAAPSAGPSSSNRLPLKRTCSPFTEEFEPLPSKQAKEGDLQRVLLYVRRETEEVFDALMLKTPDLKGLRNAISEKYGFPEENIYKVYKKCKRGETSLLHPRLSRHPPPDCLECSHPVTQVRNMGFGDGFWRQRDLDSNPSPTTVNSLHFTVNSE

SEQ ID NO: 2955 - protein, 806 aa, Homo sapiens
MQVQDATRRPSAVRFLSSFLQGRRHSTSDPVLRLQQARRGSGLGSGSATKLLSSSSLQVMVAVSSVSHAEGNPTFPERKRNLERPTPKYTKVGERLRHVIPGHMACSMACGGRACKYENPARWSEQEQAIKGVYSSWVTDNILAMARPSSELLEKYHIIDQFLSHGIKTIINLQRPGEHASCGNPLEQESGFTYLPEAFMEAGIYFYNFGWKDYGVASLTTILDMVKVMTFALQEGKVAIHCHAGLGRTGVLIACYLVFATRMTADQAIIFVRAKRPNSIQTRGQLLCVREFTQFLTPLRNIFSCCDPKAHAVTLPQYLIRQRHLLHGYEARLLKHVPKIIHLVCKLLLDLAENRPVMMKDVSEGPGLSAEIEKTMSEMVTMQLDKELLRHDSDVSNPPNPTAVAADFDNRGMIFSNEQQFDPLWKRRNVECLQPLTHLKRRLSYSDSDLKRAENLLEQGETPQTVPAQILVGHKPRQQKLISHCYIPQSPEPDLHKEALVRSTLSFWSQSKFGGLEGLKDNGSPIFHGRIIPKEAQQSGAFSADVSGSHSPGEPVSPSFANVHKDPNPAHQQVSHCQCKTHGVGSPGSVRQNSRTPRSPLDCGSSPKAQFLVEHETQDSKDLSEAASHSALQSELSAEARRILAAKALANLNESVEKEELKRKVEMWQKELNSRDGAWERICGERDPFILCSLMWSWVEQLKEPVITKEDVDMLVDRRADAAEALFLLEKGQHQTILCVLHCIVNLQTIPVDVEEAFLAHAIKAFTKVNFDSENGPTVYNTLKKIFKHTLEEKRKMTKDGPKPGL

SEQ ID NO: 2956 - protein, 552 aa, Homo sapiens
MRRLTRRLVLPVFGVLWITVLLFFWVTKRKLEVPTGPEVQTPKPSDADWDDLWDQFDERRYLNAKKWRVGDDPYKLYAFNQRESERISSNRAIPDTRHLRCTLLVYCTDLPPTSIIITFHNEARSTLLRTIRSVLNRTPTHLIREIILVDDFSNDPDDCKQLIKLPKVKCLRNNERQGLVRSRIRGADIAQGTTLTFLDSHCEVNRDWLQPLLHRVKEDYTRVVCPVIDIINLDTFTYIESASELRGGFDWSLHFQWEQLSPEQKARRLDPTEPIRTPIIAGGLFVIDKAWFDYLGKYDMDMDIWGGENFEISFRVWMCGGSLEIVPCSRVGHVFRKKHPYVFPDGNANTYIKNTKRTAEVWMDEYKQYYYAARPFALERPFGNVESRLDLRKNLRCQSFKWYLENIYPELSIPKESSIQKGNIRQRQKCLESQRQNNQETPNLKLSPCAKVKGEDAKSQVWAFTYTQQILQEELCLSVITLFPGAPVVLVLCKNGDDRQQWTKTGSHIEHIASHLCLDTDMFGDGTENGKEIVVNPCESSLMSQHWDMVSS

SEQ ID NO: 2957 - protein, 393 aa, Homo sapiens
MTTYSDKGAKPERGRFLHFHSVTFWVGNAKQATSFYCSKMGFEPLAYRGLETGSREVVSHVIKQGKIVFVLSSALNPWNKEMGDHLVKHGDGVKDIAFEVEDCDYIVQKARERGAKIMREPWVEQDKFGKVKFAVLQTYGDTTHTLVEKMNYIGQFLPGYEAPAFMDPLLPKLPKCSLEMIDHIVGNQPDQEMVSASEWYLKNLQFHRFWSVDDTQVHTEYSSLRSIVVANYEESIKMPINEPAPGKKKSQIQEYVDYNGGAGVQHIALKTEDIITAIRHLRERGLEFLSVPSTYYKQLREKLKTAKIKVKENIDALEELKILVDYDEKGYLLQIFTKPVQDRPTLFLEVIQRHNHQGFGAGNFNSLFKAFEEEQNLRGNLTNMETNGVVPGM

SEQ ID NO: 2958 - protein, 670 aa, Homo sapiens
MILEERPDGAGAGEESPRLQGCDSLTQIQCGQLQSRRAQIHQQIDKELQMRTGAENLYRATSNNRVRETVALELSYVNSNLQLLKEELEELSGGVDPGRHGSEAVTVPMIPLGLKETKELDWSTPLKELISVHFGEDGASYEAEIRELEALRQAMRTPSRNESGLELLTAYYNQLCFLDARFLTPARSLGLFFHWYDSLTGVPAQQRALAFEKGSVLFNIGALHTQIGARQDRSCTEGARRAMEAFQRAAGAFSLLRENFSHAPSPDMSAASLCALEQLMMAQAQECVFEGLSPPASMAPQDCLAQLRLAQEAAQVAAEYRLVHRTMAQPPVHDYVPVSWTALVHVKAEYFRSLAHYHVAMALCDGSPATEGELPTHEQVFLQPPTSSKPRGPVLPQELEERRQLGKAHLKRAILGQEEALRLHALCRVLREVDLLRAVISQTLQRSLAKYAELDREDDFCEAAEAPDIQPKTHQKPEARMPRLSQGKGPDIFHRLGPLSVFSAKNRWRLVGPVHLTRGEGGFGLTLRGDSPVLIAAVIPGSQAAAAGLKEGDYIVSVNGQPCRWWRHAEVVTELKAAGEAGASLQVVSLLPSSRLPSLGDRRPVLLGPRGLLRSQREHGCKTPASTWASPRPLLNWSRKAQQGKTGGCPQPCAPVKPAPPSSLKHPGWP

SEQ ID NO: 2959 - protein, 310 aa, Homo sapiens
MRAEEPCAPGAPSALGAQRTPGPELRLSSQLLPELCTFVVRVLFYLGPVYLAGYLGLSITWLLLGALLWMWWRRNRRGKLGRLAAAFEFLDNEREFISRELRGQHLPAWIHFPDVERVEWANKIISQTWPYLSMIMESKFREKLEPKIREKSIHLRTFTFTKLYFGQKCPRVNGVKAHTNTCNRRRVTVDLQICYIGDCEISVELQKIQAGVNGIQLQGTLRVILEPLLVDKPFVGAVTVFFLQKPHLQINWTGLTNLLDAPGINDVSDSLLEDLIATHLVLPNRVTVPVKKGLDLTNLRFPLPCVSTQY

SEQ ID NO: 2960 - protein, 1070 aa, Homo sapiens
MCFSFIMPPAMADILDIWAVDSQIASDGSIPVDFLLPTGIYIQLEVPREATISYIKQMLWKQVHNYPMFNLLMDIDSYMFACVNQTAVYEELEDETRRLCDVRPFLPVLKLVTRSCDPGEKLDSKIGVLIGKGLHEFDSLKDPEVNEFRRKMRKFSEEKILSLVGLSWMDWLKQTYPPEHEPSIPENLEDKLYGGKLIVAVHFENCQDVFSFQVSPNMNPIKVNELAIQKRLTIHGKEDEVSPYDYVLQVSGRVEYVFGDHPLIQFQYIRNCVMNRALPHFILVECCKIKKMYEQEMIAIEAAINRNSSNLPLPLPPKKTRIISHVWENNNPFQIVLVKGNKLNTEETVKVHVRAGLFHGTELLCKTIVSSEVSGKNDHIWNEPLEFDINICDLPRMARLCFAVYAVLDKVKTKKSTKTINPSKYQTIRKAGKVHYPVAWVNTMVFDFKGQLRTGDIILHSWSSFPDELEEMLNPMGTVQTNPYTENATALHVKFPENKKQPYYYPPFDKIIEKAAEIASSDSANVSSRGGKKFLPVLKEILDRDPLSQLCENEMDLIWTLRQDCREIFPQSLPKLLLSIKWNKLEDVAQLQALLQIWPKLPPREALELLDFNYPDQYVREYAVGCLRQMSDEELSQYLLQLVQVLKYEPFLDCALSRFLLERALGNRRIGQFLFWHLRSEVHIPAVSVQFGVILEAYCRGSVGHMKVLSKQVEALNKLKTLNSLIKLNAVKLNRAKGKEAMHTCLKQSAYREALSDLQSPLNPCVILSELYVEKCKYMDSKMKPLWLVYNNKVFGEDSVGVIFKNGDDLRQDMLTLQMLRLMDLLWKEAGLDLRMLPYGCLATGDRSGLIEVVSTSETIADIQLNSSNVAAAAAFNKDALLNWLKEYNSGDDLDRAIEEFTLSCAGYCVASYVLGIGDRHSDNIMVKKTGQLFHIDFGHILGNFKSKFGIKRERVPFILTYDFIHVIQQGKTGNTEKFGRFRQCCEDAYLILRRHGNLFITLFALMLTAGLPELTSVKDIQYLKDSLALGKSEEEALKQFKQKFDEALRESWTTKVNWMAHTVRKDYRS

SEQ ID NO: 2961 - protein, 425 aa, Homo sapiens
MMPSESGAERRDRAAAQVGTAAATAVATAAPAGGGPDPEALSAFPGRHLSGLSWPQVKRLDALLSEPIPIHGRGNFPTLSVQPRQIVQVVRSTLEEQGLHVHSVRLHGSAASHVLHPESGLGYKDLDLVFRVDLRSEASFQLTKAVVLACLLDFLPAGVSRAKITPLTLKEAYVQKLVKVCTDSDRWSLISLSNKSGKNVELKFVDSVRRQFEFSIDSFQIILDSLLLFGQCSSTPMSEAFHPTVTGESLYGDFTEALEHLRHRVIATRSPEEIRGGGLLKYCHLLVRGFRPRPSTDVRALQRYMCSRFFIDFPDLVEQRRTLERYLEAHFGGADAARRYACLVTLHRVVNESTVCLMNHERRQTLDLIAALALQALAEQGPAATAALAWRPPGTDGVVPATVNYYVTPVQPLLAHAYPTWLPCN

SEQ ID NO: 2962 - protein, 752 aa, Homo sapiens
MTSPAAAQSREIDCLSPEAQKLAEARLAAKRAARAEAREIRMKELERQQKEVEERPEKDFTEKGSRNMPGLSAATLASLGGTSSRRGSGDTSISIDTEASIREIKDSLAEVEEKYKKAMVSNAQLDNEKTNFMYQVDTLKDMLLELEEQLAESRRQYEEKNKEFEREKHAHSILQFQFAEVKEALKQREEMLEKHGIILNSEIATNGETSDTLNNVGYQGPTKMTKEELNALKSTGDGTLGRASEVEVKNEIVANVGKREILHNTEKEQHTEDTVKDCVDIEVFPAGENTEDQKSSEDTAPFLGTLAGATYEEQVQSQILESSSLPENTVQVESNEVMGAPDDRTRTPLEPSNCWSDLDGGNHTENVGEAAVTQVEEQAGTVASCPLGHSDDTVYHDDKCMVEVPQELETSTGHSLEKEFTNQEAAEPKEVPAHSTEVGRDHNEEEGEETGLRDEKPIKTEVPGSPAGTEGNCQEATGPSTVDTQNEPLDMKEPDEEKSDQQGEALDSSQKKTKNKKKKNKKKKSPVPVETLKDVKKELTYQNTDLSEIKEEEQVKSTDRKSAVEAQNEVTENPKQKIAAESSENVDCPENPKIKLDGKLDQEGDDVQTAAEEVLADGDTLDFEDDTVQSSGPRAGGEELDEGVAKDNAKIDGATQSSPAEPKSEDADRCTLPEHESPSQDISDACEAESTERCEMSEHPSQTVRKALDSNSLENDDLSAPGREPGHFNPESREDTRGGNEKGKSKEDCTMS

SEQ ID NO: 2963 - protein, 376 aa, Homo sapiens
MESYDIIANQPVVIDNGSGVIKAGFAGDQIPKYCFPNYVGRPKHMRVMAGALEGDLFIGPKAEEHRGLLTIRYPMEHGVVRDWNDMERIWQYVYSKDQLQTFSEEHPVLLTEAPLNPSKNREKAAEVFFETFNVPALFISMQAVLSLYATGRTTGVVLDSGDGVTHAVPIYEGFAMPHSIMRVDIAGRDVSRYLRLLLRKEGVDFHTSAEFEVVRTIKERACYLSINPQKDEALETEKVQYTLPDGSTLDVGPARFRAPELLFQPDLVGDESEGLHEVVAFAIHKSDMDLRRTLFANIVLSGGSTLFKGFGDRLLSEVKKLAPKDIKIKISAPQERLYSTWIGGSILASLDTFKKMWVSKKEYEEDGSRAIHRKTF

SEQ ID NO: 2964 - protein, 1007 aa, Homo sapiens
MEQAGTRPAATEHPRLRRPMPWLLLLPLLLLLLLLLPGPAASQLRYSVPEEQAPGALVGNVARALGLELRRLGPGCLRINHLGAPSPRYLELDLTSGALFVNERIDREALCEQRPRCLLSLEVLAHNPVAVSAVEVEILDINDNSPRFPRPNYQLQVSESVAPGARFHIESAQDPDVGANSVQTYELSPSEHFELDLKPLQENSKVLELVLRKGLDREQAALHHLVLTAVDGGIPARSGTAQISVRVLDTNDNSPAFDQSTYRVQLREDSPPGTLVVKLNASDPDEGSNGELRYSLSSYTSDRERQLFSIDASTGEVRVIGGLDYEEASSYQIYVQATDRGPVPMAGHCKVLVDIVDVNDNAPEVVLTDLYSPVPENATPNTIVAVLSVNDQDSGPNRKVSLGLEATLPFRLNGFGNSYTLVVSGPLDRERVAVYNITVTATDGGIPQLTSLRTLKVEISDINDNPPSFLEDSYSIYIQENNLPGVLLCTVQATDPDEKENAEVTYSLLEREIQGLPVTSYVSINSASGSLYAVNSFDYEKFREFFVTVEAQDKGSPPLSSTVTANVYVVDMNDHAPHILYPTSTNSSAAFEMVPRTAPAGYLVTKVIAMDSDSGQNAWLFYHLAQTSDLDLFKVELHTGEIRTTRKMGDESGSTFNLTVVVRDNGEPSLSASVAITVAVVDRVSKILPDTQRHVKSPRTYSEITLYLIIALSTVSFIFLLTIIILSIIKCYRYTAYGTACCGGFCGVRERSPAELYKQANNNIDARIPHGLKVQPHFIEVRGNGSLTKTYCYKACLTAGSGSDTFMFYNTGAQTGPGPSGAQAAVTDSRNLTGQSGQNAGNLIILKNEAVSQNEPRQPNPDWRYSASLRAGMHSSVHLEEAGILRAGPGGPDQQWPTVSSATPEPEAGEVSPPVGAGVNSNSWTFKYGPGNPKQSGPGELPDKFIIPGSPAIISIRQEPTNSQIDKSDFITFGKKEETKKKKKKKKGNKTQEKKEKGNSTTDNSDQ

SEQ ID NO: 2965 - protein, 950 aa, Homo sapiens
MLSSWQGGPRPRQLLLWLLILAAWETGSGQLHYSVPEEAKHGTFVGRIAQDLGLELAELVPRLFRVASKRHGDLLEVNLQNGILFVNSRIDREELCGRSAECSIHLEVIVDRPLQVFHVEVKVRDINDNPPIFPESKKRIIIAESRPPETRFPLDGASDADIGVNSALTYRLDPNDYFTLDAQNSLEQMSSLSLVLRKTLDREEIQEHSLLLTASDGGKPELTGTVQLLITILDVNDNAPEFYQSVYKVTVLENAFNGTLVIKLNATDPDDGTNGDIVYSFRRPVWPAVVYAFTINPNNGEIRTKGKLDFEEKKLYEISVEAVDKGNIPMAGHCTLLVEVLDVNDNAPEVTITSLSLPIREDTQPSAIIALISVSDRDSGSNGQVTCTLTPHVPFKLVSTYKNYYSLVLDSALDRESVSAYELVVTARDGGSPSLWATASVSVGVADVNDNAPAFAQPEYTVFVKENNPPGCHIFTVSAQDADAQENALVSYSLVERRVGERALSSYVSVHAESGKVYALQPLDHEELELLQFQVSARDSGVPPLGSNVTLQVFVLDENDNAPALLTPGAGSAGGTVSELMPRSVGAGHVVAKVRAVDADSGYNAWLSYELQLAAVGARIPFRVGLYTGEISTTRPLDEVDAPHHRLLVLVKDHGEPALTATATVLLSLVESGQAPQASSRASAGAVGPEAALVDVNVYLIIAICAVSSLLVLTLLLYTALRCSAPPTEGACAPGKPTLVCSSAAGSWSYSQQRRPRVCSGEGPHKTDLMAFSPSLPPCLGSAEGTGQREEDSECLKEPRQPNPDWRYSASLRAGMHSSVHLEEAGILRAGPGGPDQQWPTVSSATPEPEAGEVSPPVGAGVNSNSWTFKYGPGNPKQSGPGELPDKFIIPGSPAIISIRQEPTNSQIDKSDFITFGKKEETKKKKKKKKGNKTQEKKEKGNSTTDNSDQ

SEQ ID NO: 2966 - protein, 1493 aa, Homo sapiens
MENRPGSFQYVPVQLQGGAPWGFTLKGGLEHCEPLTVSKIEDGGKAALSQKMRTGDELVNINGTPLYGSRQEALILIKGSFRILKLIVRRRNAPVSRPHSWHVAKLLEGCPEAATTMHFPSEAFSLSWHSGCNTSDVCVQWCPLSRHCSTEKSSSIGSMESLEQPGQATYESHLLPIDQNMYPNQRDSAYSSFSASSNASDCALSLRPEEPASTDCIMQGPGPTKAPSGRPNVAETSGGSRRTNGGHLTPSSQMSSRPQEGYQSGPAKAVRGPPQPPVRRDSLQASRAQLLNGEQRRASEPVVPLPQKEKLSLEPVLPARNPNRFCCLSGHDQVTSEGHQNCEFSQPPESSQQGSEHLLMQASTKAVGSPKACDRASSVDSNPLNEASAELAKASFGRPPHLIGPTGHRHSAPEQLLASHLQHVHLDTRGSKGMELPPVQDGHQWTLSPLHSSHKGKKSPCPPTGGTHDQSSKERKTRQVDDRSLVLGHQSQSSPPHGEADGHPSEKGFLDPNRTSRAASELANQQPSASGSLVQQATDCSSTTKAASGTEAGEEGDSEPKECSRMGGRRSGGTRGRSIQNRRKSERFATNLRNEIQRRKAQLQKSKGPLSQLCDTKEPVEETQEPPESPPLTASNTSLLSSCKKPPSPRDKLFNKSMMLRARSSECLSQAPESHESRTGLEGRISPGQRPGQSSLGLNTWWKAPDPSSSDPEKAHAHCGVRGGHWRWSPEHNSQPLVAAAMEGPSNPGDNKELKASTAQAGEDAILLPFADRRKFFEESSKSLSTSHLPGLTTHSNKTFTQRPKPIDQNFQPMSSSCRELRRHPMDQSYHSADQPYHATDQSYHSMSPLQSETPTYSECFASKGLENSMCCKPLHCGDFDYHRTCSYSCSVQGALVHDPCIYCSGEICPALLKRNMMPNCYNCRCHHHQCIRCSVCYHNPQHSALEDSSLAPGNTWKPRKLTVQEFPGDKWNPITGNRKTSQSGREMAHSKTSFSWATPFHPCLENPALDLSSYRAISSLDLLGDFKHALKKSEETSVYEEGSSLASMPHPLRSRAFSESHISLAPQSTRAWGQHRRELFSKGDETQSDLLGARKKAFPPPRPPPPNWEKYRLFRAAQQQKQQQQQQKQQEEEEEEEEEEEEEEEEEEEEAEEEEEELPPQYFSSETSGSCALNPEEVLEQPQPLSFGHLEGSRQGSQSVPAEQESFALHSSDFLPPIRGHLGSQPEQAQPPCYYGIGGLWRTSGQEATESAKQEFQHFSPPSGAPGIPTSYSAYYNISVAKAELLNKLKDQPEMAEIGLGEEEVDHELAQKKIQLIESISRKLSVLREAQRGLLEDINANSALGEEVEANLKAVCKSNEFEKYHLFVGDLDKVVNLLLSLSGRLARVENALNSIDSEANQEKLVLIEKKQQLTGQLADAKELKEHVDRREKLVFGMVSRYLPQDQLQDYQHFVKMKSALIIEQRELEEKIKLGEEQLKCLRESLLLGPSNF

SEQ ID NO: 2967 - protein, 513 aa, Homo sapiens
MKMASFLAFLLLNFRVCLLLLQLLMPHSAQFSVLGPSGPILAMVGEDADLPCHLFPTMSAETMELKWVSSSLRQVVNVYADGKEVEDRQSAPYRGRTSILRDGITAGKAALRIHNVTASDSGKYLCYFQDGDFYEKALVELKVAALGSDLHVDVKGYKDGGIHLECRSTGWYPQPQIQWSNNKGENIPTVEAPVVADGVGLYAVAASVIMRGSSGEGVSCTIRSSLLGLEKTASISIADPFFRSAQRWIAALAGTLPVLLLLLGGAGYFLWQQQEEKKTQFRKKKREQELREMAWSTMKQEQSTRVKLLEELRWRSIQYASRGERHSAYNEWKKALFKPADVILDPKTANPILLVSEDQRSVQRAKEPQDLPDNPERFNWHYCVLGCESFISGRHYWEVEVGDRKEWHIGVCSKNVQRKGWVKMTPENGFWTMGLTDGNKYRTLTEPRTNLKLPKPPKKVGVFLDYETGDISFYNAVDGSHIHTFLDVSFSEALYPVFRILTLEPTALTICPA

SEQ ID NO: 2968 - protein, 1220 aa, Homo sapiens
MGKKQKNKSEDSTKDDIDLDALAAEIEGAGAAKEQEPQKSKGKKKKEKKKQDFDEDDILKELEELSLEAQGIKADRETVAVKPTENNEEEFTSKDKKKKGQKGKKQSFDDNDSEELEDKDSKSKKTAKPKVEMYSGSDDDDDFNKLPKKAKGKAQKSNKKWDGSEEDEDNSKKIKERSRINSSGESGDESDEFLQSRKGQKKNQKNKPGPNIESGNEDDDASFKIKTVAQKKAEKKERERKKRDEEKAKLRKLKEKEELETGKKDQSKQKESQRKFEEETVKSKVTVDTGVIPASEEKAETPTAAEDDNEGDKKKKDKKKKKGEKEEKEKEKKKGPSKATVKAMQEALAKLKEEEERQKREEEERIKRLEELEAKRKEEERLEQEKRERKKQKEKERKERLKKEGKLLTKSQREARARAEATLKLLQAQGVEVPSKDSLPKKRPIYEDKKRKKIPQQLESKEVSESMELCAAVEVMEQGVPEKEETPPPVEPEEEEDTEDAGLDDWEAMASDEETEKVEGNKVHIEVKENPEEEEEEEEEEEEDEESEEEEEEEGESEGSEGDEEDEKVSDEKDSGKTLDKKPSKEMSSDSEYDSDDDRTKEERAYDKAKRRIEKRRLEHSKNVNTEKLRAPIICVLGHVDTGKTKILDKLRHTHVQDGEAGGITQQIGATNVPLEAINEQTKMIKNFDRENVRIPGMLIIDTPGHESFSNLRNRGSSLCDIAILVVDIMHGLEPQTIESINLLKSKKCPFIVALNKIDRLYDWKKSPDSDVAATLKKQKKNTKDEFEERAKAIIVEFAQQGLNAALFYENKDPRTFVSLVPTSAHTGDGMGSLIYLLVELTQTMLSKRLAHCEELRAQVMEVKALPGMGTTIDVILINGRLKEGDTIIVPGVEGPIVTQIRGLLLPPPMKELRVKNQYEKHKEVEAAQGVKILGKDLEKTLAGLPLLVAYKEDEIPVLKDELIHELKQTLNAIKLEEKGVYVQASTLGSLEALLEFLKTSEVPYAGINIGPVHKKDVMKASVMLEHDPQYAVILAFDVRIERDAQEMADSLGVRIFSAEIIYHLFDAFTKYRQDYKKQKQEEFKHIAVFPCKIKILPQYIFNSRDPIVMGVTVEAGQVKQGTPMCVPSKNFVDIGIVTSIEINHKQVDVAKKGQEVCVKIEPIPGESPKMFGRHFEATDILVSKISRQSIDALKDWFRDEMQKSDWQLIVELKKVFEII

SEQ ID NO: 2969 - protein, 844 aa, Homo sapiens
MRQVCCSALPPPPLEKGRCSSYSDSSSSSSERSSSSSSSSSESGSSSRSSSNNSSISRPAAPPEPRPQQQPQPRSPAARRAAARSRAAAAGGMRRDPAPGFSMLLFGVSLACYSPSLKSVQDQAYKAPVVVEGKVQGLVPAGGSSSNSTREPPASGRVALVKVLDKWPLRSGGLQREQVISVGSCVPLERNQRYIFFLEPTEQPLVFKTAFAPLDTNGKNLKKEVGKILCTDCATRPKLKKMKSQTGQVGEKQSLKCEAAAGNPQPSYRWFKDGKELNRSRDIRIKYGNGRKNSRLQFNKVKVEDAGEYVCEAENILGKDTVRGRLYVNSVSTTLSSWSGHARKCNETAKSYCVNGGVCYYIEGINQLSCKCPVGYTGDRCQQFAMVNFSKAEELYQKRVLTITGICVALLVVGIVCVVAYCKTKKQRKQMHNHLRQNMCPAHQNRSLANGPSHPRLDPEEIQMADYISKNVPATDHVIRRETETTFSGSHSCSPSHHCSTATPTSSHRHESHTWSLERSESLTSDSQSGIMLSSVGTSKCNSPACVEARARRAAAYNLEERRRATAPPYHDSVDSLRDSPHSERYVSALTTPARLSPVDFHYSLATQVPTFEITSPNSAHAVSLPPAAPISYRLAEQQPLLRHPAPPGPGPGPGPGPGPGADMQRSYDSYYYPAAGPGPRRGTCALGGSLGSLPASPFRIPEDDEYETTQECAPPPPPRPRARGASRRTSAGPRRWRRSRLNGLAAQRARAARDSLSLSSGSGGGSASASDDDADDADGALAAESTPFLGLRGAHDALRSDSPPLCPAADSRTYYSLDSHSTRASSRHSRGPPPRAKQDSAPL

SEQ ID NO: 2970 - protein, 586 aa, Homo sapiens
MLARVTRKMLRHAKCFQRLAIFGSVRALHKDNRTATPQNFSNYESMKQDFKLGIPEYFNFAKDVLDQWTDKEKAGKKPSNPAFWWINRNGEEMRWSFEELGSLSRKFANILSEACSLQRGDRVILILPRVPEWWLANVACLRTGTVLIPGTTQLTQKDILYRLQSSKANCIITNDVLAPAVDAVASKCENLHSKLIVSENSREGWGNLKELMKHASDSHTCVKTKHNEIMAIFFTSGTSGYPKMTAHTHSSFGLGLSVNGRFWLDLTPSDVMWNTSDTGWAKSAWSSVFSPWIQGACVFTHHLPRFEPTSILQTLSKYPITVFCSAPTVYRMLVQNDITSYKFKSLKHCVSAGEPITPDVTEKWRNKTGLDIYEGYGQTETVLICGNFKGMKIKPGSMGKPSPAFDVKIVDVNGNVLPPGQEGDIGIQVLPNRPFGLFTHYVDNPSKTASTLRGNFYITGDRGYMDKDGYFWFVARADDVILSSGYRIGPFEVENALNEHPSVAESAVVSSPDPIRGEVVKAFVVLNPDYKSHDQEQLIKEIQEHVKKTTAPYKYPRKVEFIQELPKTISGKTKRNELRKKEWKTI

SEQ ID NO: 2971 - protein, 858 aa, Homo sapiens
MRQVCCSALPPPPLEKGRCSSYSDSSSSSSERSSSSSSSSSESGSSSRSSSNNSSISRPAAPPEPRPQQQPQPRSPAARRAAARSRAAAAGGMRRDPAPGFSMLLFGVSLACYSPSLKSVQDQAYKAPVVVEGKVQGLVPAGGSSSNSTREPPASGRVALVKVLDKWPLRSGGLQREQVISVGSCVPLERNQRYIFFLEPTEQPLVFKTAFAPLDTNGKNLKKEVGKILCTDCATRPKLKKMKSQTGQVGEKQSLKCEAAAGNPQPSYRWFKDGKELNRSRDIRIKYGNGRKNSRLQFNKVKVEDAGEYVCEAENILGKDTVRGRLYVNSVSTTLSSWSGHARKCNETAKSYCVNGGVCYYIEGINQLSCKCPNGFFGQRCLEKLPLRLYMPDPKQKHLGFELKEAEELYQKRVLTITGICVALLVVGIVCVVAYCKTKKQRKQMHNHLRQNMCPAHQNRSLANGPSHPRLDPEEIQMADYISKNVPATDHVIRRETETTFSGSHSCSPSHHCSTATPTSSHRHESHTWSLERSESLTSDSQSGIMLSSVGTSKCNSPACVEARARRAAAYNLEERRRATAPPYHDSVDSLRDSPHSERYVSALTTPARLSPVDFHYSLATQVPTFEITSPNSAHAVSLPPAAPISYRLAEQQPLLRHPAPPGPGPGPGPGPGPGADMQRSYDSYYYPAAGPGPRRGTCALGGSLGSLPASPFRIPEDDEYETTQECAPPPPPRPRARGASRRTSAGPRRWRRSRLNGLAAQRARAARDSLSLSSGSGGGSASASDDDADDADGALAAESTPFLGLRGAHDALRSDSPPLCPAADSRTYYSLDSHSTRASSRHSRGPPPRAKQDSAPL

SEQ ID NO: 2972 - protein, 520 aa, Homo sapiens
MGKPSSMDTKFKDDLFRKYVQFHESKVDTTTSRQRPGSDECLRVAASTLLSLHKVDPFYRFRLIQFYEVVESSLRSLSSSSLRALHGAFSMLETVGINLFLYPWKKEFRSIKTYTGPFVYYVKSTLLEEDIRAILSCMGYTPELGTAYKLRELVETLQVKMVSFELFLAKVECEQMLEIHSQVKDKGYSELDIVSERKSSAEDVRGCSDALRRRAEGREHLTASMSRVALQKSASERAAKDYYKPRVTKPSRSVDAYDSYWESRKPPLKASLSLRKEPVATDVGDDLKDEIIRPSPSLLTMASSPHGSPDVLPPASPSNGPALLRGTYFSTQDDVDLYTDSEPRATYRRQDALRPDVWLLRNDAHSLYHKRSPPAKESALSKCQSCGLSCSSSLCQRCDSLLTCPPASKPSAFPSKASTHDSLAHGASLREKYPGQTQGLDRLPHLHSKSKPSTTPTSRCGFCNRPGATNTCTQCSKVSCDACLSAYHYDPCYKKSELHKFMPNNQLNYKSTQLSHLVYR

SEQ ID NO: 2973 - protein, 1296 aa, Homo sapiens
MLKTESSGERTTLRSASPHRNAYRTEFQALKSTFDKPKSDGEQKTKEGEGSQQSRGRKYGSNVNRIKNLFMQMGMEPNENAAVIAKTRGKGGHSSPQRRMKPKEFLEKTDGSVVKLESSVSERISRFDTMYDGPSYSKFTETRKMFERSVHESGQNNRYSPKKEKAGGSEPQDEWGGSKSNRGSTDSLDSLSSRTEAVSPTVSQLSAVFENTDSPSAIISEKAENNEYSVTGHYPLNLPSVTVTNLDTFGHLKDSNSWPPSNKRGVDTEDAHKSNATPVPEVASKSTSLASIPGEEIQQSKEPEDSTSNQQTPDSIDKDGPEEPCAESKAMPKSEIPSPQSQLLEDAEANLVGREAAKQQRKELAGGDFTSPDASASSCGKEVPEDSNNFDGSHVYMHSDYNVYRVRSRYNSDWGETGTEQDEEEDSDENSYYQPDMEYSEIVGLPEEEEIPANRKIKFSSAPIKVFNTYSNEDYDRRNDEVDPVAASAEYELEKRVEKLELFPVELEKDEDGLGISIIGMGVGADAGLEKLGIFVKTVTEGGAAQRDGRIQVNDQIVEVDGISLVGVTQNFAATVLRNTKGNVRFVIGREKPGQVSEVAQLISQTLEQERRQRELLEQHYAQYDADDDETGEYATDEEEDEVGPVLPGSDMAIEVFELPENEDMFSPSELDTSKLSHKFKELQIKHAVTEAEIQKLKTKLQAAENEKVRWELEKTQLQQNIEENKERMLKLESYWIEAQTLCHTVNEHLKETQSQYQALEKKYNKAKKLIKDFQQKELDFIKRQEAERKKIEDLEKAHLVEVQGLQVRIRDLEAEVFRLLKQNGTQVNNNNNIFERRTSLGEVSKGDTMENLDGKQTSCQDGLSQDLNEAVPETERLDSKALKTRAQLSVKNRRQRPSRTRLYDSVSSTDGEDSLERKGLRTSSPESDSGVPPLTPVDSNVPFSSDHIAEFQEEPLDPEMGPLSSMWGDTSLFSTSKSDHDVEESPCHHQTTNKKILREKDDAKDPKSLRASSSLAVQGGKIKRKFVDLGAPLRRNSSKGKKWKEKEKEASRFSAGSRIFRGRLENWTPKPCSTAQTSTRSPCMPFSWFNDSRKGSYSFRNLPAPTSSLQPSPETLISDKKGSKNFTFNDDFSPSSTSSADLSGLGAEPKTPGLSQSLALSSDEILDDGQSPKHSQCQNRAVQEWSVQQVSHWLMSLNLEQYVSEFSAQNITGEQLLQLDGNKLKALGMTASQDRAVVKKKLKEMKMSLEKARKAQEKMEKQREKLRRKEQEQMQRKSKKTEKMTSTTAEGAGEQ

SEQ ID NO: 2974 - protein, 1359 aa, Homo sapiens
MAEAGLRGWLLWALLLRLAQSEPYTTIHQPGYCAFYDECGKNPELSGSLMTLSNVSCLSNTPARKITGDHLILLQKICPRLYTGPNTQACCSAKQLVSLEASLSITKALLTRCPACSDNFVNLHCHNTCSPNQSLFINVTRVAQLGAGQLPAVVAYEAFYQHSFAEQSYDSCSRVRVPAAATLAVGTMCGVYGSALCNAQRWLNFQGDTGNGLAPLDITFHLLEPGQAVGSGIQPLNEGVARCNESQGDDVATCSCQDCAASCPAIARPQALDSTFYLGQMPGSLVLIIILCSVFAVVTILLVGFRVAPARDKSKMVDPKKGTSLSDKLSFSTHTLLGQFFQGWGTWVASWPLTILVLSVIPVVALAAGLVFTELTTDPVELWSAPNSQARSEKAFHDQHFGPFFRTNQVILTAPNRSSYRYDSLLLGPKNFSGILDLDLLLELLELQERLRHLQVWSPEAQRNISLQDICYAPLNPDNTSLYDCCINSLLQYFQNNRTLLLLTANQTLMGQTSQVDWKDHFLYCANAPLTFKDGTALALSCMADYGAPVFPFLAIGGYKGKDYSEAEALIMTFSLNNYPAGDPRLAQAKLWEEAFLEEMRAFQRRMAGMFQVTFMAERSLEDEINRTTAEDLPIFATSYIVIFLYISLALGSYSSWSRVMVDSKATLGLGGVAVVLGAVMAAMGFFSYLGIRSSLVILQVVPFLVLSVGADNIFIFVLEYQRLPRRPGEPREVHIGRALGRVAPSMLLCSLSEAICFFLGALTPMPAVRTFALTSGLAVILDFLLQMSAFVALLSLDSKRQEASRLDVCCCVKPQELPPPGQGEGLLLGFFQKAYAPFLLHWITRGVVLLLFLALFGVSLYSMCHISVGLDQELALPKDSYLLDYFLFLNRYFEVGAPVYFVTTLGYNFSSEAGMNAICSSAGCNNFSFTQKIQYATEFPEQSYLAIPASSWVDDFIDWLTPSSCCRLYISGPNKDKFCPSTVNSLNCLKNCMSITMGSVRPSVEQFHKYLPWFLNDRPNIKCPKGGLAAYSTSVNLTSDGQVLDTVAILSPRLEYSGTISAHCNLYLLDSTSRFMAYHKPLKNSQDYTEALRAARELAANITADLRKVPGTDPAFEVFPYTITNVFYEQYLTILPEGLFMLSLCLVPTFAVSCLLLGLDLRSGLLNLLSIVMILVDTVGFMALWGISYNAVSLINLVSAVGMSVEFVSHITRSFAISTKPTWLERAKEATISMGSAVFAGVAMTNLPGILVLGLAKAQLIQIFFFRLNLLITLLGLLHGLVFLPVILSYVGPDVNPALALEQKRAEEAVAAVMVASCPNHPSRVSTADNIYVNHSFEGSIKGAGAISNFLPNNGRQF

SEQ ID NO: 2975 - protein, 709 aa, Homo sapiens
MGPRIGPAGEVPQVPDKETKATMGTENTPGGKASPDPQDVRPSVFHNIKLFVLCHSLLQLAQLMISGYLKSSISTVEKRFGLSSQTSGLLASFNEVGNTALIVFVSYFGSRVHRPRMIGYGAILVALAGLLMTLPHFISEPYRYDNTSPEDMPQDFKASLCLPTTSAPASAPSNGNCSSYTETQHLSVVGIMFVAQTLLGVGGVPIQPFGISYIDDFAHNSNSPLYLGILFAVTMMGPGLAFGLGSLMLRLYVDINQMPEGGISLTIKDPRWVGAWWLGFLIAAGAVALAAIPYFFFPKEMPKEKRELQFRRKVLAVTDSPARKGKDSPSKQSPGESTKKQDGLVQIAPNLTVIQFIKVFPRVLLQTLRHPIFLLVVLSQVCLSSMAAGMATFLPKFLERQFSITASYANLLIGCLSFPSVIVGIVVGGVLVKRLHLGPVGCGALCLLGMLLCLFFSLPLFFIGCSSHQIAGITHQTSAHPGLELSPSCMEACSCPLDGFNPVCDPSTRVEYITPCHAGCSSWVVQDALDNSQVFYTNCSCVVEGNPVLAGSCDSTCSHLVVPFLLLVSLGSALACLTHTPSFMLILRGVKKEDKTLAVGIQFMFLRILAWMPSPVIHGSAIDTTCVHWALSCGRRAVCRYYNNDLLRNRFIGLQFFFKTGSVICFALVLAVLRQQDKEARTKESRSSPAVEQQLLVSGPGKKPEDSRV

SEQ ID NO: 2976 - protein, 612 aa, Homo sapiens
MRGRVRTVANVTVKGPILKRLPRKLDVLEGENAVLLVETLEAGVEGRWSRDGEELPVICQSSSGHMHALVLPGVTREDAGEVTFSLGNSRTTTLLRVKCVKHSPPGPPILAEMFKGHKNTVLLTWKPPEPAPETPFIYRLERQEVGSEDWIQCFSIEKAGAVEVPGDCVPSEGDYRFRICTVSGHGRSPHVVFHGSAHLVPTARLVAGLEDVQVYDGEDAVFSLDLSTIIQGTWFLNGEELKSNEPEGQVEPGALRYRIEQKGLQHRLILHAVKHQDSGALVGFSCPGVQDSAALTIQESPVHILSPQDRVSLTFTTSERVVLTCELSRVDFPATWYKDGQKVEESELLVVKMDGRKHRLILPEAKVQDSGEFECRTEGVSAFFGVTVQDPPVHIVDPREHVFVHAITSECVMLACEVDREDAPVRWYKDGQEVEESDFVVLENEGPHRRLVLPATQPSDGGEFQCVAGDECAYFTVTITDVSSWIVYPSGKVYVAAVRLERVVLTCELCRPWAEVRWTKDGEEVVESPALLLQKEDTVRRLVLPAVQLEDSGEYLCEIDDESASFTVTVTESYQSQDSSNNNPELCVLLKKPKTRRLWSRFPPWRRTAGTE

SEQ ID NO: 2977 - protein, 2849 aa, Homo sapiens
MAEEAAQNISDDQERCLQAACCLSFGGELSVSTDKSWGLHLCSCSPPGGGLWVEVYANHVLLMSDGKCGCPWCALNGKAEDRESQSPSSSASRQKNIWKTTSEAALSVVNEKTQAVVNEKTQAPLDCDNSADRIPHKPFIIIARAWSSGGPRFHHRRLCATGTADSTFSALLQLQGTTSAAAPCSLKMEASCCVLRLLCCAEDVATGLLPGTVTMETPTKVARPTQTSSQRVPLWPISHFPTSPRSSHGLPPGIPRTPSFTASQSGSEILYPPTQHPPVAILARNSDNFMNPVLNCSLEVEARAPPNLGFRVHMASGEALCLMMDFGDSSGVEMRLHNMSEAMAVTAYHQYSKGIFFHLLHFQLDMSTYKEAETQNTTLNVYLCQSENSCLEDSDPSNLGYELISAFVTKGVYMLKAVIYNEFHGTEVELGPYYVEIGHEAVSAFMNSSSVHEDEVLVFADSQVNQKSTVVIHHFPSIPSYNVSFISQTQVGDSQAWHSMTVWYKMQSVSVYTNGTVFATDTDITFTAVTKETIPLEFEWYFGEDPPVRTTSRSIKKRLSIPQWYRVMVKASNRMSSVVSEPHVIRVQKKIVANRLTSPSSALVNASVAFECWINFGTDVAYLWDFGDGTVSLGSSSSSHVYSREGEFTVEVLAFNNVSASTLRQQLFIVCEPCQPPLVKNMGPGKVQIWRSQPVRLGVTFEAAVFCDISQGLSYTWNLMDSEGLPVSLPAAVDTHRQTLILPSHTLEYGNYTALAKVQIEGSVVYSNYCVGLEVRAQAPVSVISEGTHLFFSRTTSSPIVLRGTQSFDPDDPGATLRYHWECATAGSPAHPCFDSSTAHQLDAAAPTVSFEAQWLSDSYDQFLVMLRVSSGGRNSSETRVFLSPYPDSAFRFVHISWVSFKDTFVNWNDELSLQAMCEDCSEIPNLSYSWDLFLVNATEKNRIEVPFCRVVGLLGSLGLGAISESSQLNLLPTEPGTADPDATTTPFSREPSPVTLGQPATSAPRGTPTEPMTGVYWIPPAGDSAVLGEAPEEGSLDLEPGPQSKGSLMTGRSERSQPTHSPDPHLSDFEAYYSDIQEAIPSGGRQPAKDTSFPGSGPSLSAEESPGDGDNLVDPSLSAGRAEPVLMIDWPKALLGRAVFQGYSSSGITEQTVTIKPYSLSSGETYVLQVSVASKHGLLGKAQLYLTVNPAPRDMACQVQPHHGLEAHTVFSVFCMSGKPDFHYEFSYQIGNTSKHTLYHGRDTQYYFVLPAGEHLDNYKVMVSTEITDGKGSKVQPCTVVVTVLPRYHGNDCLGEDLYNSSLKNLSTLQLMGSYTEIRNYITVITRILSRLSKEDKTASCNQWSRIQDALISSVCRLAFVDQEEMIGSVLMLRDLVSFSNKLGFMSAVLILKYTRALLAQGQFSGPFVIDKGVRLELIGLISRVWEVSEQENSKEEVYRHEEGITVISDLLLGCLSLNHVSTGQMEFRTLLHYNLQSSVQSLGSVQVHLPGDLAGHSPAGAETQSPCYISQLILFKKNPYPGSQAPGQIGGVVGLNLYTCSSRRPINRQWLRKPVMVEFGEEDGLDNRRNKTTFVLLRDKVNLHQFTELSENPQESLQIEIEFSKPVTRAFPVMLLVRFSEKPTPSDFLVKQIYFWDESIVQIYIPAASQKDASVGYLSLLDADYDRKPPNRYLAKAVNYTVHFQWIRCLFWDKREWKSERFSPQPGTSPEKVNCSYHRLAAFALLRRKLKASFEVSDISKLQSHPENLLPSIFIMGSVILYGFLVAKSRQVDHHEKKKAGYIFLQEASLPGHQLYAVVIDTGFRAPARLTSKVYIVLCGDNGLSETKELSCPEKPLFERNSRHTFILSAPAQLGLLRKIRLWHDSRGPSPGWFISHVMVKELHTGQGWFFPAQCWLSAGRHDGRVERELTCLQGGLGFRKLFYCKFTEYLEDFHVWLSVYSRPSSSRYLHTPRLTVSFSLLCVYACLTALVAAGGQEQPHLDVSPTLGSFRVGLLCTLLASPGAQLLSLLFRLSKEAPGSARVEPHSPLRGGAQTEAPHGPNSWGRIPDAQEPRKQPASAILSGSGRAQRKAASDNGTACPAPKLQVHGADHSRTSLMGKSHCCPPHTQAPSSGLEGLMPQWSRALQPWWSSAVWAICGTASLACSLGTGFLAYRFGQEQCVQWLHLLSLSVVCCIFITQPLMVCLMALGFAWKRRADNHFFTESLCEATRDLDSELAERSWTRLPFSSSCSIPDCAGEVEKVLAARQQARHLRWAHPPSKAQLRGTRQRMRRESRTRAALRDISMDILMLLLLLCVIYGRFSQDEYSLNQAIRKEFTRNARNCLGGLRNIADWWDWSLTTLLDGLYPGGTPSARVPGAQPGALGGKCYLIGSSVIRQLKVFPRHLCKPPRPFSALIEDSIPTCSPEVGGPENPYLIDPENQNVTLNGPGGCGTREDCVLSLGRTRTEAHTALSRLRASMWIDRSTRAVSVHFTLYNPPTQLFTSVSLRVEILPTGSLVPSSLVESFSIFRSDSALQYHLMLPQLVFLALSLIHLCVQLYRMMDKGVLSYWRKPRNWLELSVVGVSLTYYAVSGHLVTLAGDVTNQFHRGLCRAFMDLTLMASWNQRARWLRGILLFLFTLKCVYLPGIQNTMASCSSMMRHSLPSIFVAGLVGALMLAALSHLHRFLLSMWVLPPGTFTDAFPGLLFHFPRRSQKDCLLGLSKSDQRAMACYFGILLIVSATLCFGMLRGFLMTLPQKRKSFQSKSFVRLKDVTAYMWEKVLTFLRLETPKLEEAEMVENHNYYLDEFANLLDELLMKINGLSDSLQLPLLEKTSNNTGEARTEESPLVDISSYQAAEPADIKDF

SEQ ID NO: 2978 - protein, 285 aa, Homo sapiens
MVMRPLWSLLLWEALLPITVTGAQVLSKVGGSVLLVAARPPGFQVREAIWRSLWPSEELLATFFRGSLETLYHSRFLGRAQLHSNLSLELGPLESGDSGNFSVLMVDTRGQPWTQTLQLKVYDAVPRPVVQVFIAVERDAQPSKTCQVFLSCWAPNISEITYSWRRETTMDFGMEPHSLFTDGQVLSISLGPGDRDVAYSCIVSNPVSWDLATVTPWDSCHHEAAPGKASYKDVLLVVVPVSLLLMLVTLFSAWHWCPCSGKKKKDVHADRVGPETENPLVQDLP

SEQ ID NO: 2979 - protein, 1880 aa, Homo sapiens
MPYSVGFREADAATSFLRAARSGNLDKALDHLRNGVDINTCNQNGLNGLHLASKEGHVKMVVELLHKEIILETTTKKGNTALHIAALAGQDEVVRELVNYGANVNAQSQKGFTPLYMAAQENHLEVVKFLLENGANQNVATEDGFTPLAVALQQGHENVVAHLINYGTKGKVRLPALHIAARNDDTRTAAVLLQNDPNPDVLSKTGFTPLHIAAHYENLNVAQLLLNRGASVNFTPQNGITPLHIASRRGNVIMVRLLLDRGAQIETKTKDELTPLHCAARNGHVRISEILLDHGAPIQAKTKNGLSPIHMAAQGDHLDCVRLLLQYDAEIDDITLDHLTPLHVAAHCGHHRVAKVLLDKGAKPNSRALNGFTPLHIACKKNHVRVMELLLKTGASIDAVTESGLTPLHVASFMGHLPIVKNLLQRGASPNVSNVKVETPLHMAARAGHTEVAKYLLQNKAKVNAKAKDDQTPLHCAARIGHTNMVKLLLENNANPNLATTAGHTPLHIAAREGHVETVLALLEKEASQACMTKKGFTPLHVAAKYGKVRVAELLLERDAHPNAAGKNGLTPLHVAVHHNNLDIVKLLLPRGGSPHSPAWNGYTPLHIAAKQNQVEVARSLLQYGGSANAESVQGVTPLHLAAQEGHAEMVALLLSKQANGNLGNKSGLTPLHLVAQEGHVPVADVLIKHGVMVDATTRMGYTPLHVASHYGNIKLVKFLLQHQADVNAKTKLGYSPLHQAAQQGHTDIVTLLLKNGASPNEVSSDGTTPLAIAKRLGYISVTDVLKVVTDETSFVLVSDKHRMSFPETVDEILDVSEDEGEELISFKAERRDSRDVDEEKELLDFVPKLDQVVESPAIPRIPCAMPETVVIRSEEQEQASKEYDEDSLIPSSPATETSDNISPVASPVHTGFLVSFMVDARGGSMRGSRHNGLRVVIPPRTCAAPTRITCRLVKPQKLSTPPPLAEEEGLASRIIALGPTGAQFLSPVIVEIPHFASHGRGDRELVVLRSENGSVWKEHRSRYGESYLDQILNGMDEELGSLEELEKKRVCRIITTDFPLYFVIMSRLCQDYDTIGPEGGSLKSKLVPLVQATFPENAVTKRVKLALQAQPVPDELVTKLLGNQATFSPIVTVEPRRRKFHRPIGLRIPLPPSWTDNPRDSGEGDTTSLRLLCSVIGGTDQAQWEDITGTTKLVYANECANFTTNVSARFWLSDCPRTAEAVNFATLLYKELTAVPYMAKFVIFAKMNDPREGRLRCYCMTDDKVDKTLEQHENFVEVARSRDIEVLEGMSLFAELSGNLVPVKKAAQQRSFHFQSFRENRLAMPVKVRDSSREPGGSLSFLRKAMKYEDTQHILCHLNITMPPCAKGSGAEDRRRTPTPLALRYSILSESTPGSLSGTEQAEMKMAVISEHLGLSWAELARELQFSVEDINRIRVENPNSLLEQSVALLNLWVIREGQNANMENLYTALQSIDRGEIVNMLEGSGRQSRNLKPDRRHTDRDYSLSPSQMNGYSSLQDELLSPASLGCALSSPLRADQYWNEVAVLDAIPLAATEHDTMLEMSDMQVWSAGLTPSLVTAEDSSLECSKAEDSDATGHEWKLEGALSEEPRGPELGSLELVEDDTVDSDATNGLIDLLEQEEGQRSEEKLPGSKRQDDATGAGQDSENEVSLVSGHQRGQARITHSPTVSQVTERSQDRLQDWDADGSIVSYLQDAAQGSWQEEVTQGPHSFQGTSTMTEGLEPGGSQEYEKVLVSVSEHTWTEQPEAESSQADRDRRQQGQEEQVQEAKNTFTQVVQGNEFQNIPGEQVTEEQFTDEQGNIVTKKIIRKVVRQIDLSSADAAQEHEEVELRGSGLQPDLIEGRKGAQIVKRASLKRGKQ

SEQ ID NO: 2980 - protein, 814 aa, Homo sapiens
MDAAFLLVLGLLAQSLCLSLGVPGWRRPTTLYPWRRAPALSRVRRAWVIPPISVSENHKRLPYPLVQIKSDKQQLGSVIYSIQGPGVDEEPRGVFSIDKFTGKVFLNAMLDREKTDRFRLRAFALDLGGSTLEDPTDLEIVVVDQNDNRPAFLQEAFTGRVLEGAVPGTYVTRAEATDADDPETDNAALRFSILQQGSPELFSIDELTGEIRTVQVGLDREVVAVYNLTLQVADMSGDGLTATASAIITLDDINDNAPEFTRDEFFMEAIEAVSGVDVGRLEVEDRDLPGSPNWVARFTILEGDPDGQFTIRTDPKTNEGVLSIVKALDYESCEHYELKVSVQNEAPLQAAALRAERGQAKVRVHVQDTNEPPVFQENPLRTSLAEGAPPGTLVATFSARDPDTEQLQRLSYSKDYDPEDWLQVDAATGRIQTQHVLSPASPFLKGGWYRAIVLAQDDASQPRTATGTLSIEILEVNDHAPVLAPPPPGSLCSEPHQGPGLLLGATDEDLPPHGAPFHFQLSPRLPELGRNWSLSQVNVSHARLRPRHQVPEGLHRLSLLLRDSGQPPQQREQPLNVTVCRCGKDGVCLPGAAALLAGGTGLSLGALVIVLASALLLLVLVLLVALRARFWKQSRGKGLLHGPQDDLRDNVLNYDEQGGGEEDQDAYDISQLRHPTALSLPLGPPPLRRDAPQGRLHPQPPRVLPTSPLDIADFINDGLEAADSDPSVPPYDTALIYDYEGDGSVAGTLSSILSSQGDEDQDYDYLRDWGPRFARLADMYGHPCGLEYGARWDHQAREGLSPGALLPRHRGRTA

SEQ ID NO: 2981 - protein, 1215 aa, Homo sapiens
MPGLLNWITGAALPLTASDVTSCVSGYALGLTASLTYGNLEAQPFQGLFVYPLDECTTVIGFEAVIADRVVTVQIKDKAKLESGHFDASHVRSPTVTGNILQDGVSIAPHSCTPGKVTLDEDLERILFVANLGTIAPMENVTIFISTSSELPTLPSGAVRVLLPAVCAPTVPQFCTKSTGTSNQQAQGKDRHCFGAWAPGSWNKLCLATLLNTEVSNPMEYEFNFQLEIRGPCLLAGVESPTHEIRADAAPSARSAKSIIITLANKHTFDRPVEILIHPSEPHMPHVLIEKGDMTLGEFDQHLKGRTDFIKGMKKKSRAERKTEIIRKRLHKDIPHHSVIMLNFCPDLQSVQPCLRKAHGEFIFLIDRSSSMSGISMHRVKDAMLVALKSLMPACLFNIIGFGSTFKSLFPSSQTYSEDSLAMACDDIQRMKADMGGTNILSPLKWVIRQPVHRGHPRLLFVITDGAVNNTGKVLELVRNHAFSTRCYSFGIGPNVCHRLVKGLASVSEGSAELLMEGERLQPKMVKSLKKAMAPVLSDVTVEWIFPETTEVLVSPVSASSLFPGERLVGYGIVCDASLHISNPRSDKRRRYSMLHSQESGSSVFYHSQDDGPGLEGGDCAKNSGAPFILGQAKNARLASGDSTTKHDLNLSQRRRAYSTNQITNHKPLPRATMASDPMPAAKRYPLRKARLQDLTNQTSLDVQRWQIDLQPLLNSGQDLNQGPKLRGPGARRPSLLPQGCQPFLPWGQETQAWSPVRERTSDSRSPGDLEPSHHPSAFETETSSDWDPPAESQERASPSRPATPAPVLGKALVKGLHDSQRLQWEVSFELGTPGPERGGAQDADLWSETFHHLAARAIIRDFEQLAEREGEIEQGSNRRYQVSALHTSKACNIISKYTAFVPVDVSKSRYLPTVVEYPNSGAALRMLGSRALAQQWRGTSSGFGRPQTMLGEDSAPGNDMEASPTALFSEARSPGREKHGASEGPQRSLATNTLSSMKASENLFGSWLNLNKSRLLTRAAKGFLSKPLIKAVESTSGNQSFDYIPLVSLQLASGAFLLNEAFCEATHIPMEKLKWTSPFTCHRVSLTTRPSESKTPSPQLCTSSPPRHPSCDSFSLEPLAKGKLGLEPRAVVEHTGKLWATVVGLAWLEHSSASYFTEWELVAAKANSWLEQQEVPEGRTQGTLKAAARQLFVLLRHWDENLEFNMLCYNPNYV

SEQ ID NO: 2982 - protein, 565 aa, Homo sapiens
MPQASEHRLGRTREPPVNIQPRVGSKLPFAPRARSKERRNPASGPNPMLRPLPPRPGLPDERLKKLELGRGRTSGPRPRGPLRADHGVPLPGSPPPTVALPLPSRTNLARSKSVSSGDLRPMGIALGGHRGTGELGAALSRLALRPEPPTLRRSTSLRRLGGFPGPPTLFSIRTEPPASHGSFHMISARSSEPFYSDDKMAHHTLLLGSGHVGLRNLGNTCFLNAVLQCLSSTRPLRDFCLRRDFRQEVPGGGRAQELTEAFADVIGALWHPDSCEAVNPTRFRAVFQKYVPSFSGYSQQDAQEFLKLLMERLHLEINRRGRRAPPILANGPVPSPPRRGGALLEEPELSDDDRANLMWKRYLEREDSKIVDLFVGQLKSCLKCQACGYRSTTFEVFCDLSLPIPKKGFAGGKVSLRDCFNLFTKEEELESENAPVCDRCRQKTRSTKKLTVQRFPRILVLHLNRFSASRGSIKKSSVGVDFPLQRLSLGDFASDKAGSPVYQLYALCNHSGSVHYGHYTALCRCQTGWHVYNDSRVSPVSENQVASSEGYVLFYQLMQEPPRCL

SEQ ID NO: 2983 - protein, 748 aa, Homo sapiens
MIPAASSTPPGDALFPSVAPQDFWRSQVTGYSGSVTRHLSHRANNFKRHPKRRKCIRPSPPPPPNTPCPLELVDFGDLHPQRSFRELLFNGCILFGIEFSYAMETAYVTPVLLQMGLPDQLYSLVWFISPILGFLLQPLLGAWSDRCTSRFGRRRPFILVLAIGALLGLSLLLNGRDIGIALADVTGNHKWGLLLTVCGVVLMDFSADSADNPSHAYMMDVCSPADQDRGLNIHALLAGLGGGFGYVVGGIHWDKTGFGRALGGQLRVIYLFTAVTLSVTTVLTLVSIPERPLRPPSEKRAAMKSPSLPLPPSPPVLPEEGPGDSLPSHTATNFSSPISPPSPLTPKYGSFISRDSSLTGISEFASSFGTANIDSVLIDCFTGGHDSYLAIPGSVPRPPISVSFPRAPDGFYRQDRGLLEGREGALTSGCDGDILRVGSLDTSKPRSSGILKRPQTLAIPDAAGGGGPETSRRRNVTFSQQVANILLNGVKYESELTGSSERAEQPLSVGRLCSTICNMPKALRTLCVNHFLGWLSFEGMLLFYTDFMGEVVFQGDPKAPHTSEAYQKYNSGVTMGCWGMCIYAFSAAFYSAILEKLEEFLSVRTLYFIAYLAFGLGTGLATLSRNLYVVLSLCITYGILFSTLCTLPYSLLCDYYQSKKFAGSSADGTRRGMGVDISLLSCQYFLAQILVSLVLGPLTSAVGSANGVMYFSSLVSFLGCLYSSLFVIYEIPPSDAADEEHRPLLLNV

SEQ ID NO: 2984 - protein, 458 aa, Homo sapiens
MLPDFMLVLIVLGIPSSATTGFNSIAENEDALLRHLFQGYQKWVRPVLHSNDTIKVYFGLKISQLVDVDEKNQLMTTNVWLKQEWTDHKLRWNPDDYGGIHSIKVPSESLWLPDIVLFENADGRFEGSLMTKVIVKSNGTVVWTPPASYKSSCTMDVTFFPFDRQNCSMKFGSWTYDGTMVDLILINENVDRKDFFDNGEWEILNAKGMKGNRRDGVYSYPFITYSFVLRRLPLFYTLFLIIPCLGLSFLTVLVFYLPSDEGEKLSLSTSVLVSLTVFLLVIEEIIPSSSKVIPLIGEYLLFIMIFVTLSIIVTVFVINVHHRSSSTYHPMAPWVKRLFLQKLPKLLCMKDHVDRYSSPEKEESQPVVKGKVLEKKKQKQLSDGEKVLVAFLEKAADSIRYISRHVKKEHFISQVVQDWKFVAQVLDRIFLWLFLIVSVTGSVLIFTPALKMWLHSYH

SEQ ID NO: 2985 - protein, 881 aa, Homo sapiens
MKKQFNRMKQLANQTVGRAEKTEVLSEDLLQIERRLDTVRSICHHSHKRLVACFQGQHGTDAERRHKKLPLTALAQNMQEASTQLEDSLLGKMLETCGDAENQLALELSQHEVFVEKEIVDPLYGIAEVEIPNIQKQRKQLARLVLDWDSVRARWNQAHKSSGTNFQGLPSKIDTLKEEMDEAGNKVEQCKDQLAADMYNFMAKEGEYGKFFVTLLEAQADYHRKALAVLEKTLPEMRAHQDKWAEKPAFGTPLEEHLKRSGREIALPIEACVMLLLETGMKEEGLFRIGAGASKLKKLKAALDCSTSHLDEFYSDPHAVAGALKSYLRELPEPLMTFNLYEEWTQVASVQDQDKKLQDLWRTCQKLPPQNFVNFRYLIKFLAKLAQTSDVNKMTPSNIAIVLGPNLLWARNEGTLAEMAAATSVHVVAVIEPIIQHADWFFPEEVEFNVSEAFVPLTTPSSNHSFHTGNDSDSGTLERKRPASMAVMEGDLVKKESFGVKLMDFQAHRRGGTLNRKHISPAFQPPLPPTDGSTVVPAGPEPPPQSSRAESSSGGGTVPSSAGILEQGPSPGDGSPPKPKDPVSAAVPAPGRNNSQIASGQNQPQAAAGSHQLSMGQPHNAAGPSPHTLRRAVKKPAPAPPKPGNPPPGHPGGQSSSGTSQHPPSLSPKPPTRSPSPPTQHTGQPPGQPSAPSQLSAPRRYSSSLSPIQAPNHPPPQPPTQATPLMHTKPNSQGPPNPMALPSEHGLEQPSHTPPQTPTPPSTPPLGKQNPSLPAPQTLAGGNPETAQPHAGTLPRPRPVPKPRNRPSVPPPPQPPGVHSAGDSSLTNTAPTASKIVTDSNSRVSEPHRSIFPEMHSDSASKDVPGRILLDIDNDTESTAL

SEQ ID NO: 2986 - protein, 365 aa, Homo sapiens
MMGRRRAFAVDGRDGAGEGLARGCIVPGVTSTYRRIPDAAHGCSSWERGDKFRGVGREALFLKLASRDSGVEMAVGDSPLAALPGLSQDSLDFESSGSSEPPAQVGRLLASQKLGEVLERSRRLPTAPTSLSGQHRSLRLASKPEREVPLGAGQQESMEADTDLEAGLEEEAVGGLGPGAWACLPGQGLRYLEHLCLVLEQMARLQQLYLQLRIQRPPGDPGEEESTRAPLPSPLHTPGNRGQGPWELLSQTEHTGAKAASPPKVEVPSANPPRLPETPVEPTYHLPSSQGHKRDISHWDKVKVLLNRICRRSHHHPEPPAPPDGSDPRIESRDLPERPQCRPHRKTFMPSLVVKKQRAKNLSVG

SEQ ID NO: 2987 - protein, 357 aa, Homo sapiens
MRPPPALALAGLCLLALPAAAASYFGLTGREVLTPFPGLGTAAAPAQGGAHLKQCDLLKLSRRQKQLCRREPGLAETLRDAAHLGLLECQFQFRHERWNCSLEGRMGLLKRGFKETAFLYAVSSAALTHTLARACSAGRMERCTCDDSPGLESRQAWQWGVCGDNLKYSTKFLSNFLGSKRGNKDLRARADAHNTHVGIKAVKSGLRTTCKCHGVSGSCAVRTCWKQLSPFRETGQVLKLRYDSAVKVSSATNEALGRLELWAPARQGSLTKGLAPRSGDLVYMEDSPSFCRPSKYSPGTAGRVCSREASCSSLCCGRGYDTQSRLVAFSCHCQVQWCCYVECQQCVQEELVYTCKH

SEQ ID NO: 2988 - protein, 2334 aa, Homo sapiens
MQPPPQTVPSGMAGPPPAGNPRSVFWASSPYRRRANNNAAVAPTTCPLQPVTDPFAFSRQALQSTPLGSSSKSSPPVLQGPAPAGFSQHPGLLVPHTHARDSSQGPCEPLPGPLTQPRAHASPFSGALTPSAPPGPEMNRSAEVGPSSEPEVQTLPYLPHYIPGVDPETSHGGHPHGNMPGLDRPLSRQNPHDGVVTPAASPSLPQPGLQMPGQWGPVQGGPQPSGQHRSPCPEGPVPSGVPCATSVPHFPTPSILHQGPGHEQHSPLVAPPAALPSDGRDEVSHLQSGSHLANNSDPESTFRQNPRIVNHWASPELRQNPGVKNEHRPASALVNPLARGDSPENRTHHPLGAGAGSGCAPLEADSGASGALAMFFQGGETENEENLSSEKAGLSGQADFDDFCSSPGLGRPPAPTHVGAGSLCQALLPGPSNEAAGDVWGDTASTGVPDASGSQYENVENLEFVQNQEVLPSEPLNLDPSSPSDQFRYGPLPGPAVPRHGAVCHTGAPDATLHTVHPDSVSSSYSSRSHGRLSGSARPQELVGTFIQQEVGKPEDEASGSFFKQIDSSPVGGETDETTVSQNYRGSVSQPSTPSPPKPTGIFQTSANSSFEPVKSHLVGVKPFEADRANVVGEVRETCVRQKQCRPAAALPDASPGNLEQPPDNMETLCAPQVCPLPLNSTTEAVHMLPHAGAPPLDTVYPAPEKRPSARTQGPVKCESPATTLWAQSELPDFGGNVLLAPAAPALYVCAKPQPPVVQPPEEAMSGQQSRNPSSAAPVQSRGGIGASENLENPPKMGEEEALQSQASSGYASLLSSPPTESLQNPPVLIAQPDHSYNLAQPINFSVSLSNSHEKNQSWREALVGDRPAVSSWALGGDSGENTSLSGIPTSSVLSLSLPSSVAQSNFPQGSGASEMVSNQPANLLVQPPSQPVPENLVPESQKDRKAGSALPGFANSPAGSTSVVLVPPAHGTLVPDGNKANHSSHQEDTYGALDFTLSRTLENPVNVYNPSHSDSLASQQSVASHPRQSGPGAPNLDRFYQQVTKDAQGQPGLERAQQELVPPQQQASPPQLPKAMFSELSNPESLPAQGQAQNSAQSPASLVLVDAGQQLPPRPPQSSSVSLVSSGSGQAAVPSEQPWPQPVPALAPGPPPQDLAAYYYYRPLYDAYQPQYSLPYPPEPGAASLYYQDVYSLYEPRYRPYDGAASAYAQNYRYPEPERPSSRASHSSERPPPRQGYPEGYYSSKSGWSSQSDYYASYYSSQYDYGDPGHWDRYHYSARVRDPRTYDRRYWCDAEYDAYRREHSAFGDRPEKRDNNWRYDPRFTGSFDDDPDPHRDPYGEEVDRRSVHSEHSARSLHSAHSLASRRSSLSSHSHQSQIYRSHNVAAGSYEAPLPPGSFHGDFAYGTYRSNFSSGPGFPEYGYPADTVWPAMEQVSSRPTSPEKFSVPHVCARFGPGGQLIKVIPNLPSEGQPALVEVHSMEALLQHTSEQEEMRAFPGPLAKDDTHKVDVINFAQNKAMKCLQNENLIDKESASLLWNFIVLLCRQNGTVVGTDIAELLLRDHRTVWLPGKSPNEANLIDFTNEAVEQVEEEESGEAQLSFLTGGPAAAASSLERETERFRELLLYGRKKDALESAMKNGLWGHALLLASKMDSRTHARVMTRFANSLPINDPLQTVYQLMSGRMPAASTCCGDEKWGDWRPHLAMVLSNLNNNMDVESRTMATMGDTLASRGLLDAAHFCYLMAQAGFGVYTKKTTKLVLIGSNHSLPFLKFATNEAIQRTEAYEYAQSLGAETCPLPSFQVFKFIYSCRLAEMGLATQAFHYCEAIAKSILTQPHLYSPVLISQLVQMASQLRLFDPQLKEKPEEESLAAPTWLVHLQQVERQIKEGAGVWHQDGALPQQCPGTPSSEMEQLDRPGLSQPGALGIANPLLAVPAPSPEHSSPSVRLLPSAPQTLPDGPLASPARVPMFPVPLPPGPLEPGPGCVTPGPALGFLEPSGPGLPPGVPPLQERRHLLQEARSPDPGIVPQEAPVGNSLSELSEENFDGKFANLTPSRTVPDSEAPPGWDRADSGPTQPPLSLSPAPETKRPGQAAKKETKEPKKGESWFFRWLPGKKKTEAYLPDDKNKSIVWDEKKNQWVNLNEPEEEKKAPPPPPTSMPKTVQAAPPALPGPPGAPVNMYSRRAAGTRARYVDVLNPSGTQRSEPALAPADFVAPLAPLPIPSNLFVPTPVSSVRPQGRSGRNDGLLALSSPDAEEPQLPDGTGREGPAAARGLANPEPAPEPKAPGDLPAAGGPPSGAMPFYNPAQLAQACATSGSSRLGRIGQRKHLVLN

SEQ ID NO: 2989 - protein, 1223 aa, Homo sapiens
MRRLAAEELGVVTMQRIFNSFVYTEKISNGESEVQQLAKKIREKFNRYLDVVNRNKQVVEASYTAHLTSPLTAIQDCCTIPPSMMEFDGNFNTNVSRTISCDRLSTTVNSRAFNPGRDLNSVLADNLKSNPGIKWQYFSSEEGIFTVFPAHKFRCKGSYEHRSRPIYVSTVRPQSKHIVVILDHGASVTDTQLQIAKDAAQVILSAIDEHDKISVLTVADTVRTCSLDQCYKTFLSPATSETKRKMSTFVSSVKSSDSPTQHAVGFQKAFQLIRSTNNNTKFQANTDMVIIYLSAGITSKDSSEEDKKATLQVINEENSFLNNSVMILTYALMNDGVTGLKELAFLRDLAEQNSGKYGVPDRMALPVIKGSMMVLNQLSNLETTVGRFYTNLPNRMIDEAVFSLPFSDEMGDGLIMTVSKPCYFGNLLLGIVGVDVNLAYILEDVTYYQDSLASYTFLIDDKGYTLMHPSLTRPYLLSEPPLHTDIIHYENIPKFELVRQNILSLPLGSQIIAVPVNSSLSWHINKLRETGKEAYNVSYAWKMVQDTSFILCIVVIQPEIPVKQLKNLNTVPSSKLLYHRLDLLGQPSACLHFKQLATLESPTIMLSAGSFSSPYEHLSQPETKRMVEHYTAYLSDNTRLIANPGLKFSVRNEVMATSHVTDEWMTQMEMSSLNTYIVRRYIATPNGVLRIYPGSLMDKAFDPTRRQWYLHAVANPGLISLTGPYLDVGGAGYVVTISHTIHSSSTQLSSGHTVAVMGIDFTLRYFYKVLMDLLPVCNQDGGNKIRCFIMEDRGYLVAHPTLIDPKGHAPVEQQHITHKEPLVANDILNHPNFVKKNLCNSFSDRTVQRFYKFNTSLAGDLTNLVHGSHCSKYRLARIPGTNAFVGIVNETCDSLAFCACSMVDRLCLNCHRMEQNECECPCECPLEVNECTGNLTNAENRNPSCEVHQEPVTYTAIDPGLQDALHQCVNSRCSQRLESGDCFGVLDCEWCMVDSDGKTHLDKPYCAPQKECFGGIVGAKSPYVDDMGAIGDEVITLNMIKSAPVGPVAGGIMGCIMVLVLAVYAYRHQIHRRSHQHMSPLAAQEMSVRMSNLENDRDERDDDSHEDRGIISNTRFIAAVIERHAHSPERRRRYWGRSGTESDHGYSTMSPQEDSENPPCNNDPLSAGVDVGNHDEDLDLDTPPQTAALLSHKFHHYRSHHPTLHHSHHLQAAVTVHTVDAEC

SEQ ID NO: 2990 - protein, 155 aa, Homo sapiens
MELRSGSVGSQAVARRMDGDSRDGGGGKDATGSEDYENLPTSASVSTHMTAGAMAGILEHSVMYPVDSVKTRMQSLSPDPKAQYTSIYGALKKIMRTEGFWRPLRGVNVMIMGAGPAHAMYFACYENMKRTLNDVFHHQGNSHLANGILKAFVWS

SEQ ID NO: 2991 - protein, 775 aa, Homo sapiens
MTTEKSLVTEAENSQHQQKEEGEEAINSGQQEPQQEESCQTAAEGDNWCEQKLKASNGDTPTHEDLTKNKERTSESRGLSRLFSSFLKRPKSQVSEEEGKEVESDKEKGEGGQKEIEFGTSLDEEIILKAPIAAPEPELKTDPSLDLHSLSSAETQPAQEELREDPDFEIKEGEGLEECSKIEVKEESPQSKAETELKASQKPIRKHRNMHCKVSLLDDTVYECVVETWLDSAKEIKKQVRGVPWNFTFNVKFYPPDPAQLTEDITRYYLCLQLRQDIVAGRLPCSFATLALLGSYTIQSELGDYDPELHGVDYVSDFKLAPNQTKELEEKVMELHKSYRSMTPAQADLEFLENAKKLSMYGVDLHKAKDLEGVDIILGVCSSGLLVYKDKLRINRFPWPKVLKISYKRSSFFIKIRPGEQEQYESTIGFKLPSYRAAKKLWKVCVEHHTFFRLTSTDTIPKSKFLALGSKFRYSGRTQAQTRQASALIDRPAPHFERTASKRASRSLDGAAAVDSADRSPRPTSAPAITQGQVAEGGVLDASAKKTVVPKAQKETVKAEVKKEDEPPEQAEPEPTEAWKDLDKSQEEIKKHHASISELKKNFMESVPEPRPSEWDKRLSTHSPFRTLNINGQIPTGEGPPLVKTQTVTISDNANAVKSEIPTKDVPIVHTETKTITYEAAQTDDNSGDLDPGVLLTAQTITSETPSSTTTTQITKTVKGGISETRIEKRIVITGDADIDHDQVLVQAIKEAKEQHPDMSVTKVVVHQETEIADE

SEQ ID NO: 2992 - protein, 692 aa, Homo sapiens
MIEKMQGSRMDEQRCSFPPPLKTEEDYIPYPSVHEVLGREGPFPLILLPQFGGYWIEGTNHEITSIPETEPLQSPTTKVKLECNPTARIYRKHFLGKEHFNYYSLDAALGHLVFSLKYDVIGDQEHLRLLLRTKCRTYHDVIPISCLTEFPNVVQMAKLVCEDVNVDRFYPVLYPKASRLIVTFDEHVISNNFKFGVIYQKLGQTSEEELFSTNEESPAFVEFLEFLGQKVKLQDFKGFRGGLDVTHGQTGTESVYCNFRNKEIMFHVSTKLPYTEGDAQQLQRKRHIGNDIVAVVFQDENTPFVPDMIASNFLHAYVVVQAEGGGPDGPLYKVSVTARDDVPFFGPPLPDPAVFRKGPEFQEFLLTKLINAEYACYKAEKFAKLEERTRAALLETLYEELHIHSQSMMGLGGDEDKMENGSGGGGFFESFKRVIRSRSQSMDAMGLSNKKPNTVSTSHSGSFAPNNPDLAKAAGISLLIPGKSASRFGRRGSAIGIGTVEEVVVRGAAGSGGCLHALFSARSQDGGHIGDVAPLPPGQAPGRAGWSGGSSDGTQHLLWGLSLIVPGKSPTRKKSGPFGSRRSSAIGIENIQEVQEKRESPPAGQKTPDSGHVSQEPKSENSSTQSSPEMPTTKNRAETAAQRAEALKLPLLVQCQQLRQRGGGDGGCGRRGHRPGERVILRNTPQAGLLHL

SEQ ID NO: 2993 - protein, 233 aa, Homo sapiens
MAGVRSLRCSRGCAGGCECGDKGKCSDSSLLGKRLSEDSSRHQLLQKWASMWSSMSEDASVADMERAQLEEEAAAAEERPLVFLCSGCRRPLGDSLSWVASQEDTNCILLRCVSCNVSVDKEQKLSKREKENGCVLETLCCAGCSLNLGYVYRCTPKNLDYKRDLFCLSVEAIESYVLGSSEKQIVSEDKELFNLESRVEIEKSLTQMEDVLKALQMKLWEAESKLSFATCKS

SEQ ID NO: 2994 - protein, 351 aa, Homo sapiens
MSPRSCLRSLRLLVFAVFSAAASNWLYLAKLSSVGSISEEETCEKLKGLIQRQVQMCKRNLEVMDSVRRGAQLAIEECQYQFRNRRWNCSTLDSLPVFGKVVTQGTREAAFVYAISSAGVAFAVTRACSSGELEKCGCDRTVHGVSPQGFQWSGCSDNIAYGVAFSQSFVDVRERSKGASSSRALMNLHNNEAGRKAILTHMRVECKCHGVSGSCEVKTCWRAVPPFRQVGHALKEKFDGATEVEPRRVGSSRALVPRNAQFKPHTDEDLVYLEPSPDFCEQDMRSGVLGTRGRTCNKTSKAIDGCELLCCGRGFHTAQVELAERCSCKFHWCCFVKCRQCQRLVELHTCR

SEQ ID NO: 2995 - protein, 815 aa, Homo sapiens
MFRKARRVNVRKRNDSEEEERERDEEQEPPPLLPPPGTGEEAGPGGGDRAPGGESLLGPGPSPPSALTPGLGAEAGGGFPGGAEPGNGLKPRKRPRENKEVPRASLLSFQDEEEENEEVFKVKKSSYSKKIVKLLKKEYKEDLEKSKIKTELNSSAESEQPLDKTGHVKDTNQEDGVIISEHGEDEMDMESEKEEEKPKTGGAFSNALSSLNVLRPGEIPDAAFIHAARKKRQMARELGDFTPHDNEPGKGRLVREDENDASDDEDDDEKRRIVFSVKEKSQRQKIAEEIGIEGSDDDALVTGEQDEELSRWEQEQIRKGINIPQVQASQPAEVNMYYQNTYQTMPYGSSYGIPYSYTAYGSSDAKSQKTDNTVPFKTPSNEMTPVTIDLVKKQLKDRLDSMKELHKTNRQQHEKHLQSRVDSTRAIERLEGSSGGIGERYKFLQEMRGYVQDLLECFSEKVPLINELESAIHQLYKQRASRLVQRRQDDIKDESSEFSSHSNKALMAPNLDSFGRDRALYQEHAKRRIAEREARRTRRRQAREQTGKMADHLEGLSSDDEETSTDITNFNLEKDRISKESGKVFEDVLESFYSIDCIKSQFEAWRSKYYTSYKDAYIGLCLPKLFNPLIRLQLLTWTPLEAKCRDFENMLWFESLLFYGCEEREQEKDDVDVALLPTIVEKVILPKLTVIAENMWDPFSTTQTSRMVGITLKLINGYPSVVNAENKNTQVYLKALLLRMRRTLDDDVFMPLYPKNVLENKNSGPYLFFQRQFWSSVKVIKPPFQRGSCPIPRRKECCSERPRRIWTDRPCVVFS

SEQ ID NO: 2996 - protein, 325 aa, Homo sapiens
MAWSLGSWLGGCLLVSALGMVPPPENVRMNSVNFKNILQWESPAFAKGNLTFTAQYLSYRIFQDKCMNTTLTECDFSSLSKYGDHTLRVRAEFADEHSDWVNITFCPVDDTIIGPPGMQVEVLADSLHMRFLAPKIENEYETWTMKNVYNSWTYNVQYWKNGTDEKFQITPQYDFEVLRNLEPWTTYCVQVRGFLPDRNKAGEWSEPVCEQTTHDETVPSWMVAVILMASVFMVCLALLGCFALLWCVYKKTKYAFSPRNSLPQHLKEFLGHPHHNTLLFFSFPLSDENDVFDKLSVIAEDSESGKQNPGDSCSLGTPPGQGPQS

SEQ ID NO: 2997 - protein, 1099 aa, Homo sapiens
MPHFTVTKVEDPEEGAAASISQEPSLADIKARIQDSDEPDLSQNSITGEHSQLLDDGHKKARNAYLNNSNYEEGDEYFDKNLALFEEEMDTRPKVSSLLNRMANYTNLTQGAKEHEEAENITEGKKKPTKTPQMGTFMGVYLPCLQNIFGVILFLRLTWVVGTAGVLQAFAIVLICCCCTMLTAISMSAIATNGVVPAGGSYFMISRALGPEFGGAVGLCFYLGTTFAAAMYILGAIEIFLVYIVPRAAIFHSDDALKESAAMLNNMRVYGTAFLVLMVLVVFIGVRYVNKFASLFLACVIVSILAIYAGAIKSSFAPPHFPVCMLGNRTLSSRHIDVCSKTKEINNMTVPSKLWGFFCNSSQFFNATCDEYFVHNNVTSIQGIPGLASGIITENLWSNYLPKGEIIEKPSAKSSDVLGSLNHEYVLVDITTSFTLLVGIFFPSVTGIMAGSNRSGDLKDAQKSIPIGTILAILTTSFVYLSNVVLFGACIEGVVLRDKFGDAVKGNLVVGTLSWPSPWVIVIGSFFSTCGAGLQSLTGAPRLLQAIAKDNIIPFLRVFGHSKANGEPTWALLLTAAIAELGILIASLDLVAPILSMFFLMCYLFVNLACALQTLLRTPNWRPRFRYYHWALSFMGMSICLALMFISSWYYAIVAMVIAGMIYKYIEYQGAEKEWGDGIRGLSLSAARFALLRLEEGPPHTKNWRPQLLVLLKLDEDLHVKHPRLLTFASQLKAGKGLTIVGSVIVGNFLENYGEALAAEQTIKHLMEAEKVKGFCQLVVAAKLREGISHLIQSCGLGGMKHNTVVMGWPNGWRQSEDARAWKTFIGTVRVTTAAHLALLVAKNISFFPSNVEQFSEGNIDVWWIVHDGGMLMLLPFLLKQHKVWRKCSIRIFTVAQLEDNSIQMKKDLATFLYHLRIEAEVEVVEMHDSDISAYTYERTLMMEQRSQMLRHMRLSKTERDREAQLVKDRNSMLRLTSIGSDEDEETETYQEKVHMTWTKDKYMASRGQKAKSMEGFQDLLNMRPDQSNVRRMHTAVKLNEVIVNKSHEAKLVLLNMPGPPRNPEGDENYMEFLEVLTEGLERVLLVRGGGSEVITIYS

SEQ ID NO: 2998 - protein, 337 aa, Homo sapiens
MRPTLLWSLLLLLGVFAAAAAAPPDPLSQLPAPQHPKIRLYNAEQVLSWEPVALSNSTRPVVYQVQFKYTDSKWFTADIMSIGVNCTQITATECDFTAASPSAGFPMDFNVTLRLRAELGALHSAWVTMPWFQHYRNVTVGPPENIEVTPGEGSLIIRFSSPFDIADTSTAFFCYYVHYWEKGGIQQVKGPFRSNSISLDNLKPSRVYCLQVQAQLLWNKSNIFRVGHLSNISCYETMADASTELQQVILISVGTFSLLSVLAGACFFLVLKYRGLIKYWFHTPPSIPLQIEEYLKDPTQPILEALDKDSSPKDDVWDSVSIISFPEKEQEDVLQTL

SEQ ID NO: 2999 - protein, 579 aa, Homo sapiens
MNTAPSRPSPTRRDPYGFGDSRDSRRDRSPIRGSPRREPRDGRNGRDARDSRDIRDPRDLRDHRHSRDLRDHRDSRSVRDVRDVRDLRDFRDLRDSRDFRDQRDPMYDRYRDMRDSRDPMYRREGSYDRYLRMDDYCRRKDDSYFDRYRDSFDGRGPPGPESQSRAKERLKREERRREELYRQYFEEIQRRFDAERPVDCSVIVVNKQTKDYAESVGRKVRDLGMVVDLIFLNTEVSLSQALEDVSRGGSPFAIVITQQHQIHRSCTVNIMFGTPQEHRNMPQADAMVLVARNYERYKNECREKEREEIARQAAKMADEAILQERERGGPEEGVRGGHPPAIQSLINLLADNRYLTAEETDKIINYLRERKERLMRSSTDSLPGPISRQPLGATSGASLKTQPSSQPLQSGQVLPSATPTPSAPPTSQQELQAKILSLFNSGTVTANSSSASPSVAAGNTPNQNFSTAANSQPQQRSQASGNQPPSILGQGGSAQNMGPRPGAPSQGLFGQPSSRLAPASNMTSQRPVSSTGINFDNPSVQKALDTLIQSGPALSHLVSQTTAQMGQPQAPMGSYQRHY

SEQ ID NO: 3000 - protein, 609 aa, Homo sapiens
MEPPRGPPANGAEPSRAVGTVKVYLPNKQRTVVTVRDGMSVYDSLDKALKVRGLNQDCCVVYRLIKGRKTVTAWDTAIAPLDGEELIVEVLEDVPLTMHNFVRKTFFSLAFCDFCLKFLFHGFRCQTCGYKFHQHCSSKVPTVCVDMSTNRQQPSRFYHSVQDLSGGSRQHEAPSNRPLNELLTPQGPSPRTQHCDPEHFPFPAPANAPLQRIRSTSTPNVHMVSTTAPMDSNLIQLTGQSFSTDAAGSRGGSDGTPRGSPSPASVSSGRKSPHSKSPAEQRERKSLADDKKKVKNLGYRDSGYYWEVPPSEVQLLKRIGTGSFGTVFRGRWHGDVAVKVLKVSQPTAEQAQAFKNEMQVLRKTRHVNILLFMGFMTRPGFAIITQWCEGSSLYHHLHVADTRFDMVQLIDVARQTAQGMDYLHAKNIIHRDLKSNNIFLHEGLTVKIGDFGLATVKTRWSGAQPLEQPSGSVLWMAAEVIRMQDPNPYSFQSDVYAYGVVLYELMTGSLPYSHIGCRDQIIFMVGRGYLSPDLSKISSNCPKAMRRLLSDCLKFQREERPLFPQILATIELLQRSLPKIERSASEPSLHRTQADELPACLLSAARLVP

SEQ ID NO: 3001 - protein, 284 aa, Homo sapiens
MEPGNYATLDGAKDIEGLLGAGGGRNLVAHSPLTSHPAAPTLMPAVNYAPLDLPGSAEPPKQCHPCPGVPQGTSPAPVPYGYFGGGYYSCRVSRSSLKPCAQAATLAAYPAETPTAGEEYPSRPTEFAFYPGYPGTYQPMASYLDVSVVQTLGAPGEPRHDSLLPVDSYQSWALAGGWNSQMCCQGEQNPPGPFWKAAFADSSGQHPPDACAFRRGRKKRIPYSKGQLRELEREYAANKFITKDKRRKISAATSLSERQITIWFQNRRVKEKKVLAKVKNSATP

SEQ ID NO: 3002 - protein, 555 aa, Homo sapiens
MAVYWCTEALPLSVTALLPIVLFPFMGILPSNKVCPQYFLDTNFLFLSGLIMASAIEEWNLHRRIALKILMLVGVQPARLILGMMVTTSFLSMWLSNTASTAMMLPIANAILKSLFGQKEVRKDPSQESEENTAAVRRNGLHTVPTEMQFLASTEAKDHPGETEVPLDLPADSRKEDEYRRNIWKGFLISIPYSASIGGTATLTGTAPNLILLGQLKSFFPQCDVVNFGSWFIFAFPLMLLFLLAGWLWISFLYGGLSFRGWRKNKSEIRTNAEDRARAVIREEYQNLGPIKFAEQAVFILFCMFAILLFTRDPKFIPGWASLFNPGFLSDAVTGVAIVTILFFFPSQRPSLKWWFDFKAPNTETEPLLTWKKAQETVPWNIILLLGGGFAMAKGCEESGLSVWIGGQLHPLENVPPALAVLLITVVIAFFTEFASNTATIIIFLPVLAELAIRLRVHPLYLMIPGTVGCSFAFMLPVSTPPNSIAFASGHLLVKDMVRTGLLMNLMGVLLLSLAMNTWAQTIFQLGTFPDWADMYSVNVTALPPTLANDTFRTL

SEQ ID NO: 3003 - protein, 686 aa, Homo sapiens
MAEAAEPEGVAPGPQGPPEVPAPLAERPGEPGAAGGEAEGPEGSEGAEEAPRGAAAVKEAGGGGPDRGPEAEARGTRGAHGETEAEEGAPEGAEVPQGGEETSGAQQVEGASPGRGAQGEPRGEAQREPEDSAAPERQEEAEQRPEVPEGSASGEAGDSVDAEGPLGDNIEAEGPAGDSVEAEGRVGDSVDAEGPAGDSVDAEGPLGDNIQAEGPAGDSVDAEGRVGDSVDAEGPAGDSVDAEGRVGDSVEAGDPAGDGVEAGVPAGDSVEAEGPAGDSMDAEGPAGRARRVSGEPQQSGDGSLSPQAEAIEVAAGESAGRSPGELAWDAAEEAEVPGVKGSEEAAPGDARADAGEDRVGDGPQQEPGEDEERRERSPEGPREEEAAGGEEESPDSSPHGEASRGAAEPEAQLSNHLAEEGPAEGSGEAARVNGRREDGEASEPRALGQEHDITLFVKAGYDGESIGNCPFSQRLFMILWLKGVIFNVTTVDLKRKPADLQNLAPGTNPPFMTFDGEVKTDVNKIEEFLEEKLAPPRYPKLGTQHPESNSAGNDVFAKFSAFIKNTKKDANEIHEKNLLKALRKLDNYLNSPLPDEIDAYSTEDVTVSGRKFLDGDELTLADCNLLPKLHIIKIVAKKYRDFEFPSEMTGIWRYLNNAYARDEFTNTCPADQEIEHAYSDVAKRMK

SEQ ID NO: 3004 - protein, 577 aa, Homo sapiens
MNKLYIGNLNESVTPADLEKVFAEHKISYSGQFLVKSGYAFVDCPDEHWAMKAIETFSGKVELQGKRLEIEHSVPKKQRSRKIQIRNIPPQLRWEVLDSLLAQYGTVENCEQVNTESETAVVNVTYSNREQTRQAIMKLNGHQLENHALKVSYIPDEQIAQGPENGRRGGFGSRGQPRQGSPVAAGAPAKQQQVDIPLRLLVPTQYVGAIIGKEGATIRNITKQTQSKIDVHRKENAGAAEKAISVHSTPEGCSSACKMILEIMHKEAKDTKTADEVPLKILAHNNFVGRLIGKEGRNLKKVEQDTETKITISSLQDLTLYNPERTITVKGAIENCCRAEQEIMKKVREAYENDVAAMSLQSHLIPGLNLAAVGLFPASSSAVPPPPSSVTGAAPYSSFMQAPEQEMVQVFIPAQAVGAIIGKKGQHIKQLSRFASASIKIAPPETPDSKVRMVIITGPPEAQFKAQGRIYGKLKEENFFGPKEEVKLETHIRVPASAAGRVIGKGGKTVNELQNLTAAEVVVPRDQTPDENDQVIVKIIGHFYASQMAQRKIRDILAQVKQQHQKGQSNQAQARRK

SEQ ID NO: 3005 - protein, 321 aa, Homo sapiens
MGEWTILERLLEAAVQQHSTMIGRILLTVVVIFRILIVAIVGETVYDDEQTMFVCNTLQPGCNQACYDRAFPISHIRYWVFQIIMVCTPSLCFITYSVHQSAKQRERRYSTVFLALDRDPPESIGGPGGTGGGGSGGGKREDKKLQNAIVNGVLQNTENTSKETEPDCLEVKELTPHPSGLRTASKSKLRRQEGISRFYIIQVVFRNALEIGFLVGQYFLYGFSVPGLYECNRYPCIKEVECYVSRPTEKTVFLVFMFAVSGICVVLNLAELNHLGWRKIKLAVRGAQAKRKSIYEIRNKDLPRVSVPNFGRTQSSDSAYV

SEQ ID NO: 3006 - protein, 377 aa, Homo sapiens
MCDDEETTALVCDNGSGLVKAGFAGDDAPRAVFPSIVGRPRHQGVMVGMGQKDSYVGDEAQSKRGILTLKYPIEHGIITNWDDMEKIWHHTFYNELRVAPEEHPTLLTEAPLNPKANREKMTQIMFETFNVPAMYVAIQAVLSLYASGRTTGIVLDSGDGVTHNVPIYEGYALPHAIMRLDLAGRDLTDYLMKILTERGYSFVTTAEREIVRDIKEKLCYVALDFENEMATAASSSSLEKSYELPDGQVITIGNERFRCPETLFQPSFIGMESAGIHETTYNSIMKCDIDIRKDLYANNVLSGGTTMYPGIADRMQKEITALAPSTMKIKIIAPPERKYSVWIGGSILASLSTFQQMWISKQEYDEAGPSIVHRKCF

SEQ ID NO: 3007 - protein, 588 aa, Homo sapiens
MEMQSPIVQRQERQVRDRGVTRSKAEKVRPPTVPVPQVDIVPGRLSEAEWMALTALEEGEDVVGDILADLLARVMDSAFKVYLTQQCIPFTISQAREAMLQITEWRFLARDEGESAVAEDPTWGEDEEPSACTTDSWAQGSVPVLHASTSEGLENFQGEDPGGVDRIPLGRSWMGRGSQEQMESWEPSPQLRVTSAPPPTSELFQEAGPGGPVEEADGQSRGLSSAGSLSASFQLSVEEAPADDADPSLDPYLVASPQASTGRGHPLGFHLSLEDLYCCMPQLDAAGDRLELRSEGVPCIASGVLVSYPSVGGATRPSASCQQQRAGHSDVRLSAHHHRMRRKAAVKRLDPARLPCHWVRPLAEVLVPDSQTRPLEAYRGRQRGEKTKARAEPQALGPGTRVSPAAFFPLRPGIPFRDLDSGPALLFPTLNLGLSSPSLESKLPLPNSRIRFLTTHPVLPDVARSRSPKLWPSVRWPSGWEGKAELLGELWAGRTRVPPQGLELADREGQDPGRWPRTTPPVLEATSQVMWKPVLLPEALKLAPGVSMWNRSTQVLLSSGVPEQEDKEGSTFPPVEQHPIQTGAPKPR

SEQ ID NO: 3008 - protein, 743 aa, Homo sapiens
MAQASRSGSLPPLVIVPPLRAQPGGTGEEQWERSRTGGLRWEVHCWPSGTSGGTPWWPTPADVSEDYEADAAAWRRGPAGGGPIPPALQRLRAVLLRLHREREQLLQARDCAYHLQSAVRLMKTLSPGSPSGGPSPLPQWCRDLQLHPSQGAVLRIGPGETLEPLLLARPIGLAAQCLEAVIEMQLRALGREPASPGLSSQLAELLFALPAYHTLQRKALSHVPGAARPFPTSRVLRLLTGERGCQVASRLDEALQGSALRDQLRRRCQEEGDLLPGLLGLVGGVAGSASCGLGLGGAGALWSQYWTLLWAACAQSLDLNLGPWRDPRATAQQLSQALGQASLPQECEKELASLCHRLLHQSLIWSWDQGFCQALGSALGGQSSLPTSSGTAELLQQLFPPLLDALREPRLRRIFCQPAGLCTLQTTLLWFLGRAQQYLAAWDPASFLLLIQKDLPPLLHEAEALYSLASEESLALEVEQQLGLEIQKLTAQIQLLPEESLSVFSQECHKQAMQGFKLYMPRGRYWRLRLCPEPPSAPSEYAGLVVRTVLEPVLQGLQGLPPQAQAPALGQALTAIVGAWLDHILTHGIRFSLQGALQLKQDFGVVRELLEEEQWSLSPDLRQTLLMLSIFQQLDGALLCLLQQPLPKSQVHRRPPCCCACQEVQTTKLPSSCLNSLESLEPPLQPGTSPAQTGQLQSTLGGRGPSPEGYLVGNQQAWLALRQHQRPRWHLPFFSCLGTSPES

SEQ ID NO: 3009 - protein, 613 aa, Homo sapiens
MAEASRWHRGGASKHKLHYRKEVEITTTLQELLLYFIFLINLCILTFGMVNPHMYYLNKVMSSLFLDTSVPGEERTNFKSIRSITDFWKFMEGPLLEGLYWDSWYNNQQLYNLKNSSRIYYENILLGVPRVRQLKVRNNTCKVYSSFQSLMSECYGKYTSANEDLSNFGLQINTEWRYSTSNTNSPWHWGFLGVYRNGGYIFTLSKSKSETKNKFIDLRLNSWITRGTRVIFIDFSLYNANVNLFCIIRLVAEFPATGGILTSWQFYSVKLLRYVSYYDYFIASCEITFCIFLFVFTTQEVKKIKEFKSAYFKSIWNWLELLLLLLCFVAVSFNTYYNVQIFLLLGQLLKSTEKYSDFYFLACWHIYYNNIIAITIFFAWIKIFKFISFNKTMSQLSSTLSRCVKDIVGFAIMFFIIFFAYAQLGFLVFGSQVDDFSTFQNSIFAQFRIVLGDFNFAGIQQANPILGPIYFITFIFFVFFVLLNMFLAIINDTYSEVKADYSIGRRLDFELGKMIKQSYKNVLEKFRLKKAQKDEDKKTKGSGDLAEQARREGFDENEIQNAEQMKKWKERLEKKYYSMEIQDDYQPVTQEEFRDGTTTKYKMRFSECLTKRI

SEQ ID NO: 3010 - protein, 818 aa, Homo sapiens
MESLSPGGPPGHPYQGEASTCWQLTVRVLEARNLRWADLLSEADPYVILQLSTAPGMKFKTKTLTDTSHPVWNEAFRFLIQSQVKNVLELSIYDEDSVTEDDICFKVLYDISEVLPGKLLRKTFSQSPQGEEELDVEFLMEETSDRPENLITNKVIVARELSCLDVHLDSTGSTAVVADQDKLELELVLKGSYEDTQTSFLGTASAFRFHYMAALETELSGRLRSSRSNGWNGDNSAGYLTVPLRPLTIGKEVTMDVPAPNAPGVRLQLKAEGCPEELAVHLGFNLCAEEQAFLSRRKQVVAKALKQALQLDRDLQEDEVPVVGIMATGGGARAMTSLYGHLLALQKLGLLDCVTYFSGISGSTWTMAHLYGDPEWSQRDLEGPIRYAREHLAKSKLEVFSPERLASYRRELELRAEQGHPTTFVDLWALVLESMLHGQVMDQKLSGQRAALERGQNPLPLYLSLNVKENNLETLDFKEWVEFSPYEVGFLKYGAFVPPELFGSEFFMGRLMRRIPEPRICFLEAIWSNIFSLNLLDAWYDLTSSGESWKQHIKDKTRSLEKEPLTTSGTSSRLEASWLQPGTALAQAFKGFLTGRPLHQRSPNFLQGLQLHQDYCSHKDFSTWADYQLDSMPSQLTPKEPRLCLVDAAYFINTSSPSMFRPGRRLDLILSFDYSLSAPFEALQQTELYCRARGLPFPRVEPSPQDQHQPRECHLFSDPACPEAPILLHFPLVNASFKDHSAPGVQRSPAELQGGQVDLTGATCPYTLSNMTYKEEDFERLLRLSDYNVQTSQGAILQALRTALKHRTLEARPPRAQT

SEQ ID NO: 3011 - protein, 616 aa, Homo sapiens
MAEDEPDAKSPKTGGRAPPGGAEAGEPTTLLQRLRGTISKAVQNKVEGILQDVQKFSDNDKLYLYLQLPSGPTTGDKSSEPSTLSNEEYMYAYRWIRNHLEEHTDTCLPKQSVYDAYRKYCESLACCRPLSTANFGKIIREIFPDIKARRLGGRGQSKYCYSGIRRKTLVSMPPLPGLDLKGSESPEMGPEVTPAPRDELVEAACALTCDWAERILKRSFSSIVEVARFLLQQHLISARSAHAHVLKAMGLAEEDEHAPRERSSKPKNGLENPEGGAHKKPERLAQPPKDLEARTGAGPLARGERKKSVVESSAPGANNLQVNALVARLPLLLPRAPRSLIPPIPVSPPILAPRLSSGALKVATLPLSSRAGAPPAAVPIINMILPTVPALPGPGPGPGRAPPGGLTQPRGTENREVGIGGDQGPHDKGVKRTAEVPVSEASGQAPPAKAAKQDIEDTASDAKRKRGRPRKKSGGSGERNSTPLKSAAAMESAQSSRLPWETWGSGGEGNSAGGAERPGPMGEAEKGAVLAQGQGDGTVSKGGRGPGSQHTKEAEDKIPLVPSKVSVIKGSRSQKEAFPLAKGEVDTAPQGNKDLKEHVLQSSLSQEHKDPKATPP

SEQ ID NO: 3012 - protein, 158 aa, Homo sapiens
MSHGKGTDMLPEIAAAVGFLSSLLRTRGCVSEQRLKVFSGALQEALTEHYKHHWFPEKPSKGSGYRCIRINHKMDPIISRVASQIGLSQPQLHQLLPSELTLWVDPYEVSYRIGEDGSICVLYEEAPLAASCGLLTCKNQVLLGRSSPSKNYVMAVSS

SEQ ID NO: 3013 - protein, 446 aa, Homo sapiens
MSFPHFGHPYRGASQFLASASSSTTCCESTQRSVSDVASGSTPAPALCCAPYDSRLLGSARPELGAALGIYGAPYAAAAAAQSYPGYLPYSPEPPSLYGALNPQYEFKEAAGSFTSSLAQPGAYYPYERTLGQYQYERYGAVELSGAGRRKNATRETTSTLKAWLNEHRKNPYPTKGEKIMLAIITKMTLTQVSTWFANARRRLKKENKMTWAPKNKGGEERKAEGGEEDSLGCLTADTKEVTASQEARGLRLSDLEDLEEEEEEEEEAEDEEVVATAGDRLTEFRKGAQSLPGPCAAAREGRLERRECGLAAPRFSFNDPSGSEEADFLSAETGSPRLTMHYPCLEKPRIWSLAHTATASAVEGAPPARPRPRSPECRMIPGQPPASARRLSVPRDSACDESSCIPKAFGNPKFALQGLPLNCAPCPRRSEPVVQCQYPSGAEAG

SEQ ID NO: 3014 - protein, 575 aa, Homo sapiens
MSGNWVHPGQILIWAIWVLAAPTKGPSAEGPQRNTRLGWIQGKQVTVLGSPVPVNVFLGVPFAAPPLGSLRFTNPQPASPWDNLREATSYPNLCLQNSEWLLLDQHMLKVHYPKFGVSEDCLYLNIYAPAHADTGSKLPVLVWFPGGAFKTGSASIFDGSALAAYEDVLVVVVQYRLGIFGFFTTWDQHAPGNWAFKDQVAALSWVQKNIEFFGGDPSSVTIFGESAGAISVSSLILSPMAKGLFHKAIMESGVAIIPYLEAHDYEKSEDLQVVAHFCGNNASDSEALLRCLRTKPSKELLTLSQKTKSFTRVVDGAFFPNEPLDLLSQKAFKAIPSIIGVNNHECGFLLPMKEAPEILSGSNKSLALHLIQNILHIPPQYLHLVANEYFHDKHSLTEIRDSLLDLLGDVFFVVPALITARYHRDAGAPVYFYEFRHRPQCFEDTKPAFVKADHADEVRFVFGGAFLKGDIVMFEGATEEEKLLSRKMMKYWATFARTGNPNGNDLSLWPAYNLTEQYLQLDLNMSLGQRLKEPRVDFWTSTIPLILSASDMLHSPLSSLTFLSLLQPFFFFCAP

SEQ ID NO: 3015 - protein, 917 aa, Homo sapiens
MIASHLLAYFFTELNHDQVQKVDQYLYHMRLSDETLLEISKRFRKEMEKGLGATTHPTAAVKMLPTFVRSTPDGTEHGEFLALDLGGTNFRVLWVKVTDNGLQKVEMENQIYAIPEDIMRGSGTQLFDHIAECLANFMDKLQIKDKKLPLGFTFSFPCHQTKLDESFLVSWTKGFKSSGVEGRDVVALIRKAIQRRGDFDIDIVAVVNDTVGTMMTCGYDDHNCEIGLIVGTGSNACYMEEMRHIDMVEGDEGRMCINMEWGAFGDDGSLNDIRTEFDQEIDMGSLNPGKQLFEKMISGMYMGELVRLILVKMAKEELLFGGKLSPELLNTGRFETKDISDIEGEKDGIRKAREVLMRLGLDPTQEDCVATHRICQIVSTRSASLCAATLAAVLQRIKENKGEERLRSTIGVDGSVYKKHPHFAKRLHKTVRRLVPGCDVRFLRSEDGSGKGAAMVTAVAYRLADQHRARQKTLEHLQLSHDQLLEVKRRMKVEMERGLSKETHASAPVKMLPTYVCATPDGTEKGDFLALDLGGTNFRVLLVRVRNGKWGGVEMHNKIYAIPQEVMHGTGDELFDHIVQCIADFLEYMGMKGVSLPLGFTFSFPCQQNSLDESILLKWTKGFKASGCEGEDVVTLLKEAIHRREEFDLDVVAVVNDTVGTMMTCGFEDPHCEVGLIVGTGSNACYMEEMRNVELVEGEEGRMCVNMEWGAFGDNGCLDDFRTEFDVAVDELSLNPGKQRFEKMISGMYLGEIVRNILIDFTKRGLLFRGRISERLKTRGIFETKFLSQIESDCLALLQVRAILQHLGLESTCDDSIIVKEVCTVVARRAAQLCGAGMAAVVDRIRENRGLDALKVTVGVDGTLYKLHPHFAKVMHETVKDLAPKCDVSFLQSEDGSGKGAALITAVACRIREAGQR

SEQ ID NO: 3016 - protein, 465 aa, Homo sapiens
MKEPDAIKLFVGQIPRHLEEKDLKPIFEQFGRIFELTVIKDKYTGLHKGCAFLTYCARDSALKAQSALHEQKTLPGMNRPIQVKPADSESRGEDRKLFVGMLGKQQTDEDVRKMFEPFGTIDECTVLRGPDGTSKGCAFVKFQTHAEAQAAINTLHSSRTLPGASSSLVVKFADTEKERGLRRMQQVATQLGMFSPIALQFGAYSAYTQALMQQQAALVAAHSAYLSPMATMAAVQMQHMAAINANGLIATPITPSSGTSTPPAIAATPVSAIPAALGVNGYSPVPTQPTGQPAPDALYPNGVHPYPAQSPAAPVDPLQQAYAGMQHYTAAYPAAYSLVAPAFPQPPALVAQQPPPPPQQQQQQQQQQQQQQQREGPDGCNIFIYHLPQEFTDSEILQMFVPFGHVISAKVFVDRATNQSKCFGFVSFDNPASAQAAIQAMNGFQIGMKRLKVQLKRPKDANRPY

SEQ ID NO: 3017 - protein, 415 aa, Homo sapiens
MKEPDAIKLFVGQIPRHLEEKDLKPIFEQFGRIFELTVIKDKYTGLHKGCAFLTYCARDSALKAQSALHEQKTLPGMNRPIQVKPADSESRGEDRKLFVGMLGKQQTDEDVRKMFEPFGTIDECTVLRGPDGTSKGCAFVKFQTHAEAQAAINTLHSSRTLPGASSSLVVKFADTEKERGLRRMQQVATQLGMFSPIALQFGAYSAYTQALMQQQAALVAAHSAYLSPMATMAAVQMQHMAAINANGLIATPITPSSAQSPAAPVDPLQQAYAGMQHYTAAYPAAYSLVAPAFPQPPALVAQQPPPPPQQQQQQQQQQQQQQQREGPDGCNIFIYHLPQEFTDSEILQMFVPFGHVISAKVFVDRATNQSKCFGFVSFDNPASAQAAIQAMNGFQIGMKRLKVQLKRPKDANRPY

SEQ ID NO: 3018 - protein, 563 aa, Homo sapiens
MLLPAPALRRALLSRPWTGAGLRWKHTSSLKVANEPVLAFTQGSPERDALQKALKDLKGRMEAIPCVVGDEEVWTSDVQYQVSPFNHGHKVAKFCYADKSLLNKAIEAALAARKEWDLKPIADRAQIFLKAADMLSGPRRAEILAKTMVGQGKTVIQAEIDAAAELIDFFRFNAKYAVELEGQQPISVPPSTNSTVYRGLEGFVAAISPFNFTAIGGNLAGAPALMGNVVLWKPSDTAMLASYAVYRILREAGLPPNIIQFVPADGPLFGDTVTSSEHLCGINFTGSVPTFKHLWKQVAQNLDRFHTFPRLAGECGGKNFHFVHRSADVESVVSGTLRSAFEYGGQKCSACSRLYVPHSLWPQIKGRLLEEHSRIKVGDPAEDFGTFFSAVIDAKSFARIKKWLEHARSSPSLTILAGGKCDDSVGYFVEPCIVESKDPQEPIMKEEIFGPVLSVYVYPDDKYKETLQLVDSTTSYGLTGAVFSQDKDVVQEATKVLRNAAGNFYINDKSTGSIVGQQPFGGARASGTNDKPGGPHYILRWTSPQVIKETHKPLGDWSYAYMQ

SEQ ID NO: 3019 - protein, 4700 aa, Homo sapiens
MANVQVAVRVRPLSKRETKEGGRIIVEVDGKVAKIRNLKVDNRPDGFGDSREKVMAFGFDYCYWSVNPEDPQYASQDVVFQDLGMEVLSGVAKGYNICLFAYGQTGSGKTYTMLGTPASVGLTPRICEGLFVREKDCASLPSSCRIKVSFLEIYNERVRDLLKQSGQKKSYTLRVREHPEMGPYVQGLSQHVVTNYKQVIQLLEEGIANRITAATHVHEASSRSHAIFTIHYTQAILENNLPSEMASKINLVDLAGSERADPSYCKDRIAEGANINKSLVTLGIVISTLAQNSQVFSSCQSLNSSVSNGGDSGILSSPSGTSSGGAPSRRQSYIPYRDSVLTWLLKDSLGGNSKTIMVATVSPAHTSYSETMSTLRYASSAKNIINKPRVNEDANLKLIRELREEIERLKALLLSFELRNFSSLSDENLKELVLQNELKIDQLTKDWTQKWNDWQALMEHYSVDINRRRAGVVIDSSLPHLMALEDDVLSTGVVLYHLKEGTTKIGRIDSDQEQDIVLQGQWIERDHCTITSACGVVVLRPARGARCTVNGREVTASCRLTQGAVITLGKAQKFRFNHPAEAAVLRQRRQVGEAAAGRGSLEWLDLDGDLAASRLGLSPLLWKERRALEEQCDEDHQTPRDGETSHRAQIQQQQSYVEDLRHQILAEEIRAAKELEFDQAWISQQIKENQQCLLREETWLASLQQQQQEDQVAEKELEASVALDAWLQTDPEIQPSPFVQSQKRVVHLQLLRRHTLRAAERNVRRKKVSFQLERIIKKQRLLEAQKRLEKLTTLCWLQDDSTQEPPYQVLSPDATVPRPPCRSKLTSCSSLSPQRLCSKHMPQLHSIFLSWDPSTTLPPRPDPTHQTSEKTSSEEHLPQAASYPARTGCLRKNGLHSSGHGQPCTARAALARKGASAPDACLTMSPNSVGIQEMEMGVKQPHQMVSQGLASLRKSANKLKPRHEPKIFTSTTQTRGAKGLADPSHTQAGWRKEGNLGTHKAAKGASCNSLYPHGPRQTAGHGKAVKTFWTEYKPPSPSRASKRHQRVLATRVRNITKKSSHLPLGSPLKRQQNTRDPDTMVPLTDFSPVMDHSREKDNDLSDTDSNYSLDSLSCVYAKALIEPLKPEERKWDFPEPENSESDDSQLSEDSLAEKRYQSPKNRLGGNRPTNNRGQPRTRTRASVRGFTAASDSDLLAQTHRSFSLDSLIDAEEELGEDQQEEPFPGSADEIPTETFWHLEDSSLPVMDQEAICRLGPINYRTAARLDAVLPMSSSFYLDPQFQPHCELQPHCELQPHCELQPHCEQAESQVEPSYSEQADSLQGMQLSRESPLMSMDSWFSCDSKINPSSPPGIVGSLCPSPDMQEFHSCKGERPGYWPNTEELKPSDAETVLPYSSKLHQGSTELLCSARDEHTASAADTSRLSLWGIQRLIQPGADGTFQGRCIPDMTQQGSSEASHNSSVSNVLAASATTLTHVGSTHERDWSALQQKYLLELSCPVLEAIGAPKPAYPYLEEDSGSLAQASSKGGDTLLPVGPRVSSNLNLNNFPVHLSRIRRLRAEKEQDSLNAKLEGVSDFFSTSEKEASYDETYSADLESLSASRSTNAQVFATENAIPDSMTEACEVKQNNLEECLQSCRKPGLMTSSDEDFFQKNACHSNVTTATKADHWSQGWAPLRKNSAVQPGQLSPDSHYPLEEEKTDCQESSKEAVRRHINVSFALPSGPELYLHSAPWNPLSSSLQPPLLETFYVTKSRDALTETALEIPACREVRVPSPPPREAWGFGHNHQALQGAYLKNNLPVLLQNQNSKIASSQQVTAEIPVDLNTREVIRESGKCPGNITEESHDSVYSSVTQNRHFLPSTSTKVCEFENQVVILNKKHSFPALEGGEVTAQSCCGASSDSTESGKSLLFRESEAREEEELDQNTVLRQTINVSLEKDMPGESAVSLKSRSVDRRVSSPVMVAQGGGPTPKWEGKNETGLLEKGLRPKDSSEEFKLPGTKPAYERFQLVACPQERNPSECKSQEMLNPNREPSGKKQNKRVNNTDEMARLIRSVMQLENGILEIESKQNKQVHASHTPGTDKELVFQDQKEQEKTDHAFRPDSSGNPLPSKDQPSSPRQTDDTVFRDSEAGAMEVNSIGNHPQVQKITPNPFRSREGVRESEPVREHTHPAGSDRPARDICDSLGKHTTCREFTNTSLHPQRMKALARALPLQPRLERSSKNNGQFVKASASLKGQPWGLGSLEELETVKGFQESQVAEHVSSSNQEEPKAQGKVEEMPMQRGGSLQEENKVTQKFPSLSQLCRDTFFRQETVSPLLSRTEFCTAPLHQDLSNTLPLNSPRWPRRCLHVPVALGISSLDCVLDLTMLKIHNSPLVTGVEHQDQSTETRSHSPEGNVRGRSSEAHTAWCGSVRSMAMGSHSQSGVPESIPLGTEDRISASTSPQDHGKDLRITLLGFSTSEDFASEAEVAVQKEIRVSSLNKVSSQPEKRVSFSLEEDSDQASKPRQKAEKETEDVGLTSGVSLAPVSLPRVPSPEPRLLEPSDHASMCLAILEEIRQAKAQRKQLHDFVARGTVLSYCETLLEPECSSRVAGRPQCKQIDQSSSDQTRNEGEAPGFHVASLSAEAGQIDLLPDERKVQATSLSADSFESLPNTETDREPWDPVQAFSHAAPAQDRKRRTGELRQFAGASEPFICHSSSSEIIEKKKDATRTPSSADPLAPDSPRSSAPVEEVRRVVSKKVVAALPSQAPYDDPRVTLHELSQSVPQETAEGIPPGSQDSSPEHQEPRTLDTTYGEVSDNLLVTAQGEKTAHFESQSVTCDVQNSTSASGPKQDHVQCPEASTGFEEGRASPKQDTILPGALTRVALEAPTQQCVQCKESVGSGLTEVCRAGSKHSRPIPLPDQRPSANPGGIGEEAPCRHPREALDGPVFSRNPEGSRTLSPSRGKESRTLPCRQPCSSQPVATHAYSSHSSTLLCFRDGDLGKEPFKAAPHTIHPPCVVPSRAYEMDETGEISRGPDVHLTHGLEPKDVNREFRLTESSTCEPSTVAAVLSRAQGCRSPSAPDVRTGSFSHSATDGSVGLIGVPEKKVAEKQASTELEAASFPAGMYSEPLRQFRDSSVGDQNAQVCQTNPEPPATTQGPHTLDLSEGSAESKLVVEPQHECLENTTRCFLEKPQFSTELRDHNRLDSQAKFVARLKHTCSPQEDSPWQEEEQHRDQASGGGEGFAQGVNPLPDEDGLDGCQILDAGREEVAVAKPPVSKILSQGFKDPATVSLRQNETPQPAAQRSGHLYTGREQPAPNHRGSLPVTTIFSGPKHSRSSPTPQFSVVGSSRSLQELNLSVEPPSPTDEDTQGPNRLWNPHLRGYSSGKSVARTSLQAEDSNQKASSRLDDGTTDHRHLKPATPPYPMPSTLSHMPTPDFTTSWMSGTLEQAQQGKREKLGVQVRPENWCSQMDKGMLHFGSSDISPYALPWRPEEPARISWKQYMSGSAVDVSCSQKPQGLTLSNVARCSSMDNGLEDQNSPFHSHLSTYANICDLSTTHSSTENAQGSNEAWEVFRGSSSIALGDPHIPTSPEGVAPTSGHDRRPQFRGPSGEADCLRSKPPLAKGSAAGPVDEIMLLYPSEAGCPVGQTRTNTFEQGTQTLGSRRHWSSTDISFAQPEASAVSAFDLASWTSMHNLSLHLSQLLHSTSELLGSLSQPDVARREQNTKRDIPDKAPQALMMDGSTQTTVDEGSQTDLTLPTLCLQTSEAEPQGANVILEGLGSDTSTVSQEEGDVPGVPQKREAEETAQKMAQLLYLQEESTPYKPQSPSIPSSHLRFQKAPVGQHLPSVSPSVSDAFLPPSSQPEESYCLVVSSPSPSSPHSPGLFPSTSEYPGDSRVQKKLGPTSALFVDRASSPILTLSASTQEPGLSPGSLTLSAPSTHPVEGHQKLDSSPDPVDAPRTPMDNYSQTTDELGGSQRGRSSLQRSNGRSFLELHSPHSPQQSPKLQFSFLGQHPQQLQPRTTIGVQSRLLPPPLRHRSQRLGNSFVPEKVASPEHCPLSGREPSQWQSRTENGGESSASPGEPQRTLDRPSSWGGLQHLSPCPVSELTDTAGLRGSALGLPQACQPEELLCFSCQMCMAPEHQHHSLRDLPVHNKFSNWCGVQKGSPGGLDMTEEELGASGDLSSEKQEQSPPQPPNDHSQDSEWSKREQIPLQVGAQNLSLSVELTEAKLHHGFGEADALLQVLQSGTGEALAADEPVTSTWKELYARQKKAIETLRRERAERLGNFCRTRSLSPQKQLSLLPNKDLFIWDLDLPSRRREYLQQLRKDVVETTRSPESVSRSAHTPSDIELMLQDYQQAHEEAKVEIARARDQLRERTEQEKLRIHQKIISQLLKEEDKLHTLANSSSLCTSSNGSLSSGMTSGYNSSPALSGQLQFPENMGHTNLPDSRDVWIGDERGGHSAVRKNSAYSHRASLGSCCCSPSSLSSLGTCFSSSYQDLAKHVVDTSMADVMAACSDNLHNLFSCQATAGWNYQGEEQAVQLYYKVFSPTRHGFLGAGVVSQPLSRVWAAVSDPTVWPLYYKPIQTARLHQRVTNSISLVYLVCNTTLCALKQPRDFCCVCVEAKEGHLSVMAAQSVYDTSMPRPSRKMVRGEILPSAWILQPITVEGKEVTRVIYLAQVELGAPGFPPQLLSSFIKRQPLVIARLASFLGR

SEQ ID NO: 3020 - protein, 643 aa, Homo sapiens
MPLLFLERFPWPSLRTYTGLSGLALLGTIISAYRALSQPEAGPGEPDQLTASLQPEPPAPARPSAGGPRARDVAQYLLSDSLFVWVLVNTACCVLMLVAKLIQCIVFGPLRVSERQHLKDKFWNFIFYKFIFIFGVLNVQTVEEVVMWCLWFAGLVFLHLMVQLCKDRFEYLSFSPTTPMSSHGRVLSLLVAMLLSCCGLAAVCSITGYTHGMHTLAFMAAESLLVTVRTAHVILRYVIHLWDLNHEGTWEGKGTYVYYTDFVMELTLLSLDLMHHIHMLLFGNIWLSMASLVIFMQLRYLFHEVQRRIRRHKNYLRVVGNMEARFAVATPEELAVNNDDCAICWDSMQAARKLPCGHLFHNSCLRSWLEQDTSCPTCRMSLNIADNNRVREEHQGENLDENLVPVAAAEGRPRLNQHNHFFHFDGSRIASWLPSFSVEVMHTTNILGITQASNSQLNAMAHQIQEMFPQVPYHLVLQDLQLTRSVEITTDNILEGRIQVPFPTQRSDSIRPALNSPVERPSSDQEEGETSAQTERVPLDLSPRLEETLDFGEVEVEPSEVEDFEARGSRFSKSADERQRMLVQRKDELLQQARKRFLNKSSEDDAASESFLPSEGASSDPVTLRRRMLAAAAERRLQKQQTS

SEQ ID NO: 3021 - protein, 1749 aa, Homo sapiens
MADEEAGGTERMEISAELPQTPQRLASWWDQQVDFYTAFLHHLAQLVPEIYFAEMDPDLEKQEESVQMSIFTPLEWYLFGEDPDICLEKLKHSGAFQLCGRVFKSGETTYSCRDCAIDPTCVLCMDCFQDSVHKNHRYKMHTSTGGGFCDCGDTEAWKTGPFCVNHEPGRAGTIKENSRCPLNEEVIVQARKIFPSVIKYVVEMTIWEEEKELPPELQIREKNERYYCVLFNDEHHSYDHVIYSLQRALDCELAEAQLHTTAIDKEGRRAVKAGAYAACQEAKEDIKSHSENVSQHPLHVEVLHSEIMAHQKFALRLGSWMNKIMSYSSDFRQIFCQACLREEPDSENPCLISRLMLWDAKLYKGARKILHELIFSSFFMEMEYKKLFAMEFVKYYKQLQKEYISDDHDRSISITALSVQMFTVPTLARHLIEEQNVISVITETLLEVLPEYLDRNNKFNFQGYSQDKLGRVYAVICDLKYILISKPTIWTERLRMQFLEGFRSFLKILTCMQGMEEIRRQVGQHIEVDPDWEAAIAIQMQLKNILLMFQEWCACDEELLLVAYKECHKAVMRCSTSFISSSKTVVQSCGHSLETKSYRVSEDLVSIHLPLSRTLAGLHVRLSRLGAVSRLHEFVSFEDFQVEVLVEYPLRCLVLVAQVVAEMWRRNGLSLISQVFYYQDVKCREEMYDKDIIMLQIGASLMDPNKFLLLVLQRYELAEAFNKTISTKDQDLIKQYNTLIEEMLQVLIYIVGERYVPGVGNVTKEEVTMREIIHLLCIEPMPHSAIAKNLPENENNETGLENVINKVATFKKPGVSGHGVYELKDESLKDFNMYFYHYSKTQHSKAEHMQKKRRKQENKDEALPPPPPPEFCPAFSKVINLLNCDIMMYILRTVFERAIDTDSNLWTEGMLQMAFHILALGLLEEKQQLQKAPEEEVTFDFYHKASRLGSSAMNIQMLLEKLKGIPQLEGQKDMITWILQMFDTVKRLREKSCLIVATTSGSESIKNDEITHDKEKAERKRKAEAARLHRQKIMAQMSALQKNFIETHKLMYDNTSEMPGKEDSIMEEESTPAVSDYSRIALGPKRGPSVTEKEVLTCILCQEEQEVKIENNAMVLSACVQKSTALTQHRGKPIELSGEALDPLFMDPDLAYGTYTGSCGHVMHAVCWQKYFEAVQLSSQQRIHVDLFDLESGEYLCPLCKSLCNTVIPIIPLQPQKINSENADALAQLLTLARWIQTVLARISGYNIRHAKGENPIPIFFNQGMGDSTLEFHSILSFGVESSIKYSNSIKEMVILFATTIYRIGLKVPPDERDPRVPMLTWSTCAFTIQAIENLLGDEGKPLFGALQNRQHNGLKALMQFAVAQRITCPQVLIQKHLVRLLSVVLPNIKSEDTPCLLSIDLFHVLVGAVLAFPSLYWDDPVDLQPSSVSSSYNHLYLFHLITMAHMLQILLTVDTGLPLAQVQEDSEEAHSASSFFAEISQYTSGSIGCDIPGWYLWVSLKNGITPYLRCAALFFHYLLGVTPPEELHTNSAEGEYSALCSYLSLPTNLFLLFQEYWDTVRPLLQRWCADPALLNCLKQKNTVVRYPRKRNSLIELPDDYSCLLNQASHFRCPRSADDERKHPVLCLFCGAILCSQNICCQEIVNGEEVGACIFHALHCGAGVCIFLKIRECRVVLVEGKARGCAYPAPYLDEYGETDPGLKRGNPLHLSRERYRKLHLVWQQHCIIEEIARSQETNQMLFGFNWQLL

SEQ ID NO: 3022 - protein, 301 aa, Homo sapiens
MQREEKQLEASLDALLSQVADLKNSLGSFICKLENEYGRLTWPSVLDSFALLSGQLNTLNKVLKHEKTPLFRNQVIIPLVLSPDRDEDLMRQTEGRVPVFSHEVVPDHLRTKPDPEVEEQEKQLTTDAARIGADAAQKQIQSLNKMCSNLLEKISKEERESESGGLRPNKQTFNPTDTNALVAAVAFGKGLSNWRPSGSSGPGQAGQPGAGTILAGTSGLQQVQMAGAPSQQQPMLSGVQMAQAGQPGKMPSGIKTNIKSASMHPYQRPSCLGFILAIPLRRKVKKLLGQEGKKNAHLQLW

SEQ ID NO: 3023 - protein, 473 aa, Homo sapiens
MRKLLTNLPAAAVLSAQVYSAVLQGLWEENVCGTPGRTRVCTALLYGQVCPFQDSTDGLRTITSILFNWPPENTSVYYQPPQRSSFRIKLAFRNLSWPGLGLEDHQEIVLGQLVLPEPNEAKPDDPAPRPGQHALTMPALEPAPPLLADLGPALEPESPAALGPPGYLHSAPGPAPAPGEGPPPGTVLEPQSAPESSCPCRGSVKNQPSEELPDMTTFPPRLLAEQLTLMDAELFKKVVLHECLGCIWGQGHLKGNEHMAPTVRATIAHFNRLTNCITTSCLGDHSMRARDRARVVEHWIKVARECLSLNNFSSVHVIVSALCSNPIGQLHKTWAGVSSKSMKELKELCKKDTAVKRDLLIKAGSFKVATQERNPQRVQMRLRRQKKGVVPFLGDFLTELQRLDSAIPDDLDGNTNKRSKEVRVLQEMQLLQVAAMNYRLRPLEKFVTYFTRMEQLSDKESYKLSCQLEPENP

SEQ ID NO: 3024 - protein, 341 aa, Homo sapiens
MGTLPWLLAFFILGLQAWDTPTIVSRKEWGARPLACRALLTLPVAYIITDQLPGMQCQQQSVCSQMLRGLQSHSVYTIGWCDVAYNFLVGDDGRVYEGVGWNIQGLHTQGYNNISLGIAFFGNKIGSSPSPAALSAAEGLISYAIQKGHLSPRYIQPLLLKEETCLDPQHPVMPRKVCPNIIKRSAWEARETHCPKMNLPAKYVIIIHTAGTSCTVSTDCQTVVRNIQSFHMDTRNFCDIGYHFLVGQDGGVYEGVGWHIQGSHTYGFNDIALGIAFIGYFVEKPPNAAALEAAQDLIQCAVVEGYLTPNYLLMGHSDVVNILSPGQALYNIISTWPHFKH

SEQ ID NO: 3025 - protein, 534 aa, Homo sapiens
MAQLGKLLKEQKYDRQLRLWGDHGQEALESAHVCLINATATGTEILKNLVLPGIGSFTIIDGNQVSGEDAGNNFFLQRSSIGKNRAEAAMEFLQELNSDVSGSFVEESPENLLDNDPSFFCRFTVVVATQLPESTSLRLADVLWNSQIPLLICRTYGLVGYMRIIIKEHPVIESHPDNALEDLRLDKPFPELREHFQSYDLDHMEKKDHSHTPWIVIIAKYLAQWYSETNGRIPKTYKEKEDFRDLIRQGILKNENGAPEDEENFEEAIKNVNTALNTTQIPSSIEDIFNDDRCINITKQTPSFWILARALKEFVAKEGQGNLPVRGTIPDMIADSGKYIKLQNVYREKAKKDAAAVGNHVAKLLQSIGQAPESISEKELKLLCSNSAFLRVVRCRSLAEEYGLDTINKDEIISSMDNPDNEIVLYLMLRAVDRFHKQQGRYPGVSNYQVEEDIGKLKSCLTGFLQEYGLSVMVKDDYVHEFCRYGAAEPHTIAAFLGGAAAQEVIKIITKQFVIFNNTYIYSGMSQTSATFQL

SEQ ID NO: 3026 - protein, 191 aa, Homo sapiens
MHDSNNVEKDITPSELPANPGCLHSKEHSIKATLIWRLFFLIMFLTIIVCGMVAALSAIRANCHQEPSVCLQAACPESWIGFQRKCFYFSDDTKNWTSSQRFCDSQDADLAQVESFQELNFLLRYKGPSDHWIGLSREQGQPWKWINGTEWTRQFPILGAGECAYLNDKGASSARHYTERKWICSKSDIHV

SEQ ID NO: 3027 - protein, 182 aa, Homo sapiens
MPRVVPDQRSKFENEEFFRKLSRECEIKYTGFRDRPHEERQARFQNACRDGRSEIAFVATGTNLSLQFFPASWQGEQRQTPSREYVDLEREAGKVYLKAPMILNGVCVIWKGWIDLQRLDGMGCLEFDEERAQQEDALAQQAFEEARRRTREFEDRDRSHREEMEVRVSQLLAVTGKKTTRP

SEQ ID NO: 3028 - protein, 732 aa, Homo sapiens
MGQGWATAGLPSLLFLLLCYGHPLLVPSQEASQQVTVTHGTSSQATTSSQTTTHQATAHQTSAQSPNLVTDEAEASKFVEEYDRTSQVVWNEYAEANWNYNTNITTETSKILLQKNMQIANHTLKYGTQARKFDVNQLQNTTIKRIIKKVQDLERAALPAQELEEYNKILLDMETTYSVATVCHPNGSCLQLEPDLTNVMATSRKYEDLLWAWEGWRDKAGRAILQFYPKYVELINQAARLNGYVDAGDSWRSMYETPSLEQDLERLFQELQPLYLNLHAYVRRALHRHYGAQHINLEGPIPAHLLGNMWAQTWSNIYDLVVPFPSAPSMDTTEAMLKQGWTPRRMFKEADDFFTSLGLLPVPPEFWNKSMLEKPTDGREVVCHASAWDFYNGKDFRIKQCTTVNLEDLVVAHHEMGHIQYFMQYKDLPVALREGANPGFHEAIGDVLALSVSTPKHLHSLNLLSSEGGSDEHDINFLMKMALDKIAFIPFSYLVDQWRWRVFDGSITKENYNQEWWSLRLKYQGLCPPVPRTQGDFDPGAKFHIPSSVPYIRYFVSFIIQFQFHEALCQAAGHTGPLHKCDIYQSKEAGQRLATAMKLGFSRPWPEAMQLITGQPNMSASAMLSYFKPLLDWLRTENELHGEKLGWPQYNWTPNSARSEGPLPDSGRVSFLGLDLDAQQARVGQWLLLFLGIALLVATLGLSQRLFSIRHRSLHRHSHGPQFGSEVELRHS

SEQ ID NO: 3029 - protein, 1306 aa, Homo sapiens
MGAASGRRGPGLLLPLPLLLLLPPQPALALDPGLQPGNFSADEAGAQLFAQSYNSSAEQVLFQSVAASWAHDTNITAENARRQEEAALLSQEFAEAWGQKAKELYEPIWQNFTDPQLRRIIGAVRTLGSANLPLAKRQQYNALLSNMSRIYSTAKVCLPNKTATCWSLDPDLTNILASSRSYAMLLFAWEGWHNAAGIPLKPLYEDFTALSNEAYKQDGFTDTGAYWRSWYNSPTFEDDLEHLYQQLEPLYLNLHAFVRRALHRRYGDRYINLRGPIPAHLLGDMWAQSWENIYDMVVPFPDKPNLDVTSTMLQQGWNATHMFRVAEEFFTSLELSPMPPEFWEGSMLEKPADGREVVCHASAWDFYNRKDFRIKQCTRVTMDQLSTVHHEMGHIQYYLQYKDLPVSLRRGANPGFHEAIGDVLALSVSTPEHLHKIGLLDRVTNDTESDINYLLKMALEKIAFLPFGYLVDQWRWGVFSGRTPPSRYNFDWWYLRTKYQGICPPVTRNETHFDAGAKFHVPNVTPYIRYFVSFVLQFQFHEALCKEAGYEGPLHQCDIYRSTKAGAKLRKVLQAGSSRPWQEVLKDMVGLDALDAQPLLKYFQPVTQWLQEQNQQNGEVLGWPEYQWHPPLPDNYPEGIDLVTDEAEASKFVEEYDRTSQVVWNEYAEANWNYNTNITTETSKILLQKNMQIANHTLKYGTQARKFDVNQLQNTTIKRIIKKVQDLERAALPAQELEEYNKILLDMETTYSVATVCHPNGSCLQLEPDLTNVMATSRKYEDLLWAWEGWRDKAGRAILQFYPKYVELINQAARLNGYVDAGDSWRSMYETPSLEQDLERLFQELQPLYLNLHAYVRRALHRHYGAQHINLEGPIPAHLLGNMWAQTWSNIYDLVVPFPSAPSMDTTEAMLKQGWTPRRMFKEADDFFTSLGLLPVPPEFWNKSMLEKPTDGREVVCHASAWDFYNGKDFRIKQCTTVNLEDLVVAHHEMGHIQYFMQYKDLPVALREGANPGFHEAIGDVLALSVSTPKHLHSLNLLSSEGGSDEHDINFLMKMALDKIAFIPFSYLVDQWRWRVFDGSITKENYNQEWWSLRLKYQGLCPPVPRTQGDFDPGAKFHIPSSVPYIRYFVSFIIQFQFHEALCQAAGHTGPLHKCDIYQSKEAGQRLATAMKLGFSRPWPEAMQLITGQPNMSASAMLSYFKPLLDWLRTENELHGEKLGWPQYNWTPNSARSEGPLPDSGRVSFLGLDLDAQQARVGQWLLLFLGIALLVATLGLSQRLFSIRHRSLHRHSHGPQFGSEVELRHS

SEQ ID NO: 3030 - protein, 676 aa, Homo sapiens
MSSLQALCSGLPLRPLPENRGRQAGVPHAPVRTPSLSPVEKQLALRNALRYFPPDVQELLAPEFAQELQLYGHIYMYRFCPDIEMRAYPIEQYPCQTKVAAAIMHMIMNNLDPAVAQFPQELVTYGGNGQVFSNWAQFWLTMFYLSKMTEEQTLVMYSGHPLGLFPSSRSAPRLVITNGMVIPNYSSRTEYEKLFALGVTMYGQMTAGSYCYIGPQGIVHGTVLTVLNAARRYLGIEDLAGKVFVTSGLGGMSGAQAKAAVIVGCIGVIAEVDKAALEKRHRQGWLMEVTDSLDRCIQRLREARKKKEVLSLGYHGNVVALWERLVHELDTTGECLVDLGSDQTSCHNPFNGGYYPVQLSFTEAQSLMASNPAVFKDLVQESLRRQVSAINRLAEEKFFFWDYGNAFLLEAQRAGADVEKKGAGRTEFRYPSYVQHIMGDIFSQGFGPFRWVCTSGDPQDLAVTDELATSVLEEAIADGVKVSVKLQYMDNIRWIREAARHRLVVGSQARILYSDQKGRVAIAVAINQAIACRRIKAPVVLSRDHHDVSGTDSPFRETSNIYDGSAFCADMAVQNFVGDACRGATWVALHNGGGVGWGEVINGGFGLVLDGTPEAEGRARLMLSWDVSNGVARRCWSGNQKAYEIICQTMQENSTLVVTLPHKVEDERVLQQALQL

SEQ ID NO: 3031 - protein, 471 aa, Homo sapiens
MVLDSGAQAYDQAPPSPPTSPPSLRHRLKPSDRDGPPLYPWSQSLALPLALAVPPALQPQPEQQPFSQMLLGHRGHMRRSESTYSVNSTGRRGRGTLGRPPPGRGRNPGGGTLRPAASLPHIAKTQRDAGHIASKSPCMLVALRPTNMDRERDKFFQSHYTYNPQFEYQEPMPTAVLEKYCEASGQFIHQAVGIIEAVLEKFGTYEHFEAATGGQLLTKCQIWSIVRKYMQKEGCAGEVVVQLSEDLLSQAVMMVENSRPTLAINLTGARQYWLEGMLRHEIGTHYLRGVNNARQPWHNAEGRLRYGLRPANPTEEGLASLHSVLFRKQPFLWRAALLYYTIHRAARMSFRQLFQDLERYVQDADVRWEYCVRAKRGQTDTSLPGCFSKDQVYLDGIVRILRHRQTIDFPLLTSLGKVSYEDVDHLRPHGVLDNTRVPHFMQDLARYRQQLEHIMATNRLDEAELGRLLPD

SEQ ID NO: 3032 - protein, 440 aa, Homo sapiens
MGSSHLLNKGLPLGVRPPIMNGPLHPRPLVALLDGRDCTVEMPILKDVATVAFCDAQSTQEIHEKVLNEAVGALMYHTITLTREDLEKFKALRIIVRIGSGFDNIDIKSAGDLGIAVCNVPAASVEETADSTLCHILNLYRRATWLHQALREGTRVQSVEQIREVASGAARIRGETLGIIGLGRVGQAVALRAKAFGFNVLFYDPYLSDGVERALGLQRVSTLQDLLFHSDCVTLHCGLNEHNHHLINDFTVKQMRQGAFLVNTARGGLVDEKALAQALKEGRIRGAALDVHESEPFSFSQGPLKDAPNLICTPHAAWYSEQASIEMREEAAREIRRAITGRIPDSLKNCVNKDHLTAATHWASMDPAVVHPELNGAAYRYPPGVVGVAPTGIPAAVEGIVPSAMSLSHGLPPVAHPPHAPSPGQTVKPEADRDHASDQL

SEQ ID NO: 3033 - protein, 1011 aa, Homo sapiens
MRKLLSFGRRLGQALLSSMDQEYAGRGYHIRDWELRKIHRAAIKGDAAEVEHCLTRRFRDLDVRDRKDRTVLHLACAHGRVQVVTLLLDRKCQINICDRLNRTPLMKAVHCQEEACAIILLKRGANPNIKDIYGNTALHYAVYNEGTSLAERLLSHHANIEALNKEGNTPLLFAINSRRQHMVEFLLKNQANIHAVDNFKRTALILAVQHNLSSIVTLLLQQNIHISSQDMFGQTAEDYAFCCDLRSIQQQILEHKNKMLKNHLRNDNQETAAMKPENLKKRKKRKKLKKRKEGAKAEHNLKVASEEKQERLERSENKQPQDSQSYGKKKDEMFGNFMLKRDIAMLKEELYAIKNDSLRKEKKYIQEIKSITEINANFEKSVRLNEEMITKKVAQYSQQLNDLKAENARLNSKLEKEKHNKERLEAEVESLHSNLATAINEYNEILERKDLELVLWRADDVSRHETMGSNISQLTDKNELLTEQVHKARVKFNTLKGKLRETRDALREKTLALESVQLDLKQAQHRIKEMKQMHPNGEAKESQSIGKQNSSEERIRQRELENLLLERQLEDARKEGDNKEIVINIHRDCLENGKEDLLEERNKELMNEYNYLKEKLLQYEKEKAEREVIVREFQEELVDHLKKFSMSESPLEGTSHCHINLDETWTSKKKLFQVEIQPEEKHEEFRKVFELISLLNYTADQIRKKNRELEEEATGYKKCLEMTINMLNAFANEDFSCHGDLNTDQLKMDILFKKLKQKFDDLMAEKEAVSSKCVNLAKDNEVLHQELLSMGKVQEKCEKLEKDKKMLEEKVLNLKTHMEKDMVELGKVQEYKSELDERAMQAIEKLEEIHLQKQAEYEKQLEQLNKDNTASLKKKELTLKDVECKFSKMKTAYEDVTTELEEYKEAFAVALKANSSMSEKITKSDKKIAVISTKLFMEKERMEYFLSTLPMRPDPELPCVENLNSIELNRKYIPKMAIRIPTSNPQTSNNCKNSLTELLLRWALAPIYFLL

SEQ ID NO: 3034 - protein, 351 aa, Homo sapiens
MSFFPELYFNVDNGYLEGLVRGLKAGVLSQADYLNLVQCETLEDLKLHLQSTDYGNFLANEASPLTVSVIDDRLKEKMVVEFRHMRNHAYEPLASFLDFITYSYMIDNVILLITGTLHQRSIAELVPKCHPLGSFEQMEAVNIAQTPAELYNAILVDTPLAAFFQDCISEQDLDEMNIEIIRNTLYKAYLESFYKFCTLLGGTTADAMCPILEFEADRRAFIITINSFGTELSKEDRAKLFPHCGRLYPEGLAQLARADDYEQVKNVADYYPEYKLLFEGAGSNPGDKTLEDRFFEHEVKLNKLAFLNQFHFGVFYAFVKLKEQECRNIVWIAECIAQRHRAKIDNYIPIF

SEQ ID NO: 3035 - protein, 887 aa, Homo sapiens
MMNRFRKWLYKPKRSDPQLLARFYYADEELNQVAAELDSLDGRKDPQRCTLLVSQFRSCQDNVLNIINQIMDECIPQDRAPRDFCVKFPEEIRHDNLAGQLWFGAECLAAGSIIMNRELESMAMRPLAKELTRSLEDVRGALRDQALRDLNTYTEKMREALRHFDVLFAEFELSYVSAMVPVKSPREYYVQQEVIVLFCETVERALDFGYLTQDMIDDYEPALMFSIPRLAIVCGLVVYADGPLNLDRKVEDMSELFRPFHTLLRKIRDLLQTLTEEELHTLERNLCISQDVEFPIRADVQGPAALAPALSAPLPPEGPLSAKAKDPDAELACSMQYDDQELEQLSRMVHRAGDEMSSLLSPPIACQSPAHRPGAEGSPGGEASPGRPRLRSGSDEEERVFFMDDVEGTAEALARPESPAGPFGWAGSTWADPQEKGQGGPGGAAGISLPASEKEEDLSNNNLEAEGTDGASLAGTSSCSCLDSRLHLDGWEVGADDAETAEMIAHRTGGMKLSATVIFNPKSPTSLDSAVATQEAASEPVAEGMDGGPHKLSTGATNCLLHSCVCCGSCGDSREDVVERLREKCSPGGVIGASYAAGLAKASDRAPERQEEAPPPSEDASNGREPKAPTSDKCLPHTSGSQVDTASGLQGEAGVAGQQEPEARELHAGSPSAHEAPQALSGSSSSTAGSCSSDKMGPEAAPAATHAAPQATREKIRSRFHGSHDLIHRLFVCISGVADQLQTNYASDLRSILKTLFEVMATKPETDDKEKLRKVTQTLRSAALEDCALCQETLSSSELAAKTRDGDFEDPPEWVPDEACGFCTACKAPFTVIRRKHHCRSCGKIFCSRCSSHSAPLPRYGQVKPVRVCTHCYMFHVTPFYSDKAGL

SEQ ID NO: 3036 - protein, 424 aa, Homo sapiens
MGCGTSKVLPEPPKDVQLDLVKKVEPFSGTKSDVYKHFITEVDSVGPVKAGFPAASQYAHPCPGPPTAGHTEPPSEPPRRARVAKYRAKFDPRVTAKYDIKALIGRGSFSRVVRVEHRATRQPYAIKMIETKYREGREVCESELRVLRRVRHANIIQLVEVFETQERVYMVMELATGGELFDRIIAKGSFTERDATRVLQMVLDGVRYLHALGITHRDLKPENLLYYHPGTDSKIIITDFGLASARKKGDDCLMKTTCGTPEYIAPEVLVRKPYTNSVDMWALGVIAYILLSGTMPFEDDNRTRLYRQILRGKYSYSGEPWPSVSNLAKDFIDRLLTVDPGARMTALQALRHPWVVSMAASSSMKNLHRSISQNLLKRASSRCQSTKSAQSTRSSRSTRSNKSRRVRERELRELNLRYQQQYNG

SEQ ID NO: 3037 - protein, 670 aa, Homo sapiens
MMEEEELEFVEELEAVLQLTPEVQLAIEQVFPSQDPLDRADFNAVEYINTLFPTEQSLANIDEVVNKIRLKIRRLDDNIRTVVRGQTNVGQDGRQVKEITRDIKQLDHAKRHLTTSITTLNHLHMLAGGVDSLEAMTRRRQYGEVANLLQGVMNVLEHFHKYMGIPQIRQLSERVKAAQTELGQQILADFEEAFPSQGTKRPGGPSNVLRDACLVANILDPRIKQEIIKKFIKQHLSEYLVLFQENQDVAWLDKIDRRYAWIKRQLVDYEEKYGRMFPREWCMAERIAVEFCHVTRAELAKIMRTRAKEIEVKLLLFAIQRTTNFEGFLAKRFSGCTLTDGTLKKLESPPPSTNPFLEDEPTPEMEELATEKGDLDQPKKPKAPDNPFHGIVSKCFEPHLYVYIESQDKNLGELIDRFVADFKAQGPPKPNTDEGGAVLPSCADLFVYYKKCMVQCSQLSTGEPMIALTTIFQKYLREYAWKILSGNLPKTTTSSGGLTISSLLKEKEGSEVAKFTLEELCLICNILSTAEYCLATTQQLEEKLKEKVDVSLIERINLTGEMDTFSTVISSSIQLLVQDLDAACDPALTAMSKMQWQNVEHVGDQSPYVTSVILHIKQNVPIIRDNLASTRKYFTQFCVKFANSFIPKFITHLFKCKPISMVGAEQVRWT

SEQ ID NO: 3038 - protein, 822 aa, Homo sapiens
MEEEEEAIGLLDKVLEDEDVFLLEECELGTPTSPGSGSPFLVAVKVEAGKGLEMRKLVLSGFLASEEIYINQLEALLLPMKPLKATATTSQPVLTIQQIETIFYKIQDIYEIHKEFYDNLCPKVQQWDSQVTMGHLFQKLASQLGVYKAFVDNYKVALETAEKCSQSNNQFQKISEELKVKGPKDSKDSHTSVTMEALLYKPIDRVTRSTLVLHDLLKHTPVDHPDYPLLQDALRISQNFLSSINEDIDPRRTAVTTPKGETRQLVKDGFLVEVSESSRKLRHVFLFTDVLLCAKLKKTSAGKHQQYDCKWYIPLADLVFPSPEESEASPQVHPFPDHELEDMKMKISALKSEIQKEKANKGQSRAIERLKKKMFENEFLLLLNSPTIPFRIHNRNGKSYLFLLSSDYERSEWREAIQKLQKKDLQAFVLSSVELQVLTGSCFKLRTVHNIPVTSNKDDDESPGLYGFLHVIVHSAKGFKQSANLYCTLEVDSFGYFVSKAKTRVFRDTAEPKWDEEFEIELEGSQSLRILCYEKCYDKTKVNKDNNEIVDKIMGKGQIQLDPQTVETKNWHTDVIEMNGIKVEFSMKFTSRDMSLKRTPSKKQTGVFGVKISVVTKRERSKVPYIVRQCVEEVEKRGIEEVGIYRISGVATDIQALKAVFDANNKDILLMLSDMDINAIAGTLKLYFRELPEPLLTDRLYPAFMEGIALSDPAAKENCMMHLLRSLPDPNLITFLFLLEHLKRVAEKEPINKMSLHNLATVFGPTLLRPSEVESKAHLTSAADIWSHDVMAQVQVLLYYLQHPPISFAELKRNTLYFSTDV

SEQ ID NO: 3039 - protein, 738 aa, Homo sapiens
MTKFQEAVTFKDVAVAFTEEELGLLDSAQRKLYRDVMLENFRNLVSVGHQSFKPDMISQLEREEKLWMKELQTQRGKHSGDRNQNEMATLHKAGLRCFSLGELSCWQIKRHIASKLARSQDSMINIEGKSSQFPKHHDSPCQVGAGESIQASVDDNCLVNHIGDHSSIIENQEFPTGKVPNSWSKIYLNETQNYQRSCKQTQMKNKLCIFAPYVDIFSCISHHHDDNIVHKRDKVHSNSDCGKDTLKVSPLTQRSIHTGQKTYQGNECEEAFNDSSSLELHKQVHLGKKSPACSTHEKDTSYSSGIPVQQSVRTGKKRYWCHECGKGFSQSSNLQTHQRVHTGEKPYTCHECGKSFNQSSHLYAHLPIHTGEKPYRCDSCGKGFSRSTDLNIHCRVHTGEKPYKCEVCGKGFTQRSHLQAHERIHTGEKPYKCGDCGKRFSCSSNLHTHQRVHTEEKPYKCDECGKCFSLSFNLHSHQRVHTGEKPYKCEECGKGFSSASSFQSHQRVHTGEKPFRCNVCGKGFSQSSYFQAHQRVHTGEKPYKCEVCGKRFNWSLNLHNHQRVHTGEKPYKCEECGKGFSQASNLQAHQSVHTGEKPFKCDACQKRFSQASHLQAHQRVHTGEKPYKCDTCGKAFSQRSNLQVHQIIHTGEKPFKCEECGKEFSWSAGLSAHQRVHTGEKPYTCQQCGKGFSQASHFHTHQRVHTGERPYICDVCCKGFSQRSHLIYHQRVHTGGNL

SEQ ID NO: 3040 - protein, 321 aa, Homo sapiens
MSLQKLMEPEAGTNRTAVAEFILLGLVQTEEMQPVVFVLLLFAYLVTTGGNLSILAAVLVEPKLHAPMYFFLGNLSVLDVGCITVTVPAMLGRLLSHKSTISYDACLSQLFFFHLLAGMDCFLLTAMAYDRLLAICQPLTYSTRMSQTVQRMLVAASWACAFTNALTHTVAMSTLNFCGPNEVNHFYCDLPQLFQLSCSSTQLNELLLFVAAAFMAVAPLVFISVSYAHVVAAVLQIRSAEGRKKAFSTCGSHLTVVGIFYGTGVFSYMRLGSVESSDKDKGVGVFMTVINPMLNPLIYSLRNTDVQGALCQLLVGKRSLT

SEQ ID NO: 3041 - protein, 878 aa, Homo sapiens
MATAPSYPAGLPGSPGPGSPPPPGGLELQSPPPLLPQIPAPGSGVSFHIQIGLTREFVLLPAASELAHVKQLACSIVDQKFPECGFYGLYDKILLFKHDPTSANLLQLVRSSGDIQEGDLVEVVLSASATFEDFQIRPHALTVHSYRAPAFCDHCGEMLFGLVRQGLKCDGCGLNYHKRCAFSIPNNCSGARKRRLSSTSLASGHSVRLGTSESLPCTAEELSRSTTELLPRRPPSSSSSSSASSYTGRPIELDKMLLSKVKVPHTFLIHSYTRPTVCQACKKLLKGLFRQGLQCKDCKFNCHKRCATRVPNDCLGEALINGDVPMEEATDFSEADKSALMDESEDSGVIPGSHSENALHASEEEEGEGGKAQSSLGYIPLMRVVQSVRHTTRKSSTTLREGWVVHYSNKDTLRKRHYWRLDCKCITLFQNNTTNRYYKEIPLSEILTVESAQNFSLVPPGTNPHCFEIVTANATYFVGEMPGGTPGGPSGQGAEAARGWETAIRQALMPVILQDAPSAPGHAPHRQASLSISVSNSQIQENVDIATVYQIFPDEVLGSGQFGVVYGGKHRKTGRDVAVKVIDKLRFPTKQESQLRNEVAILQSLRHPGIVNLECMFETPEKVFVVMEKLHGDMLEMILSSEKGRLPERLTKFLITQILVALRHLHFKNIVHCDLKPENVLLASADPFPQVKLCDFGFARIIGEKSFRRSVVGTPAYLAPEVLLNQGYNRSLDMWSVGVIMYVSLSGTFPFNEDEDINDQIQNAAFMYPASPWSHISAGAIDLINNLLQVKMRKRYSVDKSLSHPWLQEYQTWLDLRELEGKMGERYITHESDDARWEQFAAEHPLPGSGLPTDRDLGGACPPQDHDMQGLAERISVL

SEQ ID NO: 3042 - protein, 386 aa, Homo sapiens [sequence omitted]

SEQ ID NO: 3043 - protein, 423 aa, Homo sapiens
MSASAVYVLDLKGKVLICRNYRGDVDMSEVEHFMPILMEKEEEGMLSPILAHGGVRFMWIKHNNLYLVATSKKNACVSLVFSFLYKVVQVFSEYFKELEEESIRDNFVIIYELLDELMDFGYPQTTDSKILQEYITQEGHKLETGAPRPPATVTNAVSWRSEGIKYRKNEVFLDVIESVNLLVSANGNVLRSEIVGSIKMRVFLSGMPELRLGLNDKVLFDNTGRGKSKSVELEDVKFHQCVRLSRFENDRTISFIPPDGEFELMSYRLNTHVKPLIWIESVIEKHSHSRIEYMIKAKSQFKRRSTANNVEIHIPVPNDADSPKFKTTVGSVKWVPENSEIVWSIKSFPGGKEYLMRAHFGLPSVEAEDKEGKPPISVKFEIPYFTTSGIQVRYLKIIEKSGYQALPWVRYITQNGDYQLRTQ

SEQ ID NO: 3044 - protein, 503 aa, Homo sapiens
MSGALLWPLLPLLLLLLSARDGVRAAQPQAPGYLIAAPSVFRAGVEEVISVTIFNSPREVTVQAQLVAQGEPVVQSQGAILDKGTIKLKVPTGLRGQALLKVWGRGWQAEEGPLFHNQTSVTVDGRGASVFIQTDKPVYRPQHRVLISIFTVSPNLRPVNEKLEAYILDPRGSRMIEWRHLKPFCCGITNMSFPLSDQPVLGEWFIFVEMQGHAYNKSFEVQKYVLPKFELLIDPPRYIQDLDACETGTVRARYTFGKPVAGALMINMTVNGVGYYSHEVGRPVLRTTKILGSRDFDICVRDMIPADVPEHFRGRVSIWAMVTSVDGSQQVAFDDSTPVQRQLVDIRYSKDTRKQFKPGLAYVGKVELSYPDGSPAEGVTVQIKAELTPKDNIYTSEVVSQRGLVGFEIPSIPTSAQHVWLEVFQELEDYDVSDSFGVSREDGPFWWAGLTAQRRRRSSVFPWPWGITKDSGFAFTVRRGNGTGGDDRPSEPEPPAGRWPLHR

SEQ ID NO: 3045 - protein, 1289 aa, Homo sapiens
MKGGDRAYTRGPSLGWLFAKCCCCFPCRDAYSHSSSENGGKSESVANLQAQPSLNSIHSSPGPKRSTNTLKKWLTSPVRRLNSGKADGNIKKQKKVRDGRKSFDLGSPKPGDETTPQGDSADEKSKKGWGEDEPDEESHTPLPPPMKIFDNDPTQDEMSSSLLAARQASTEVPTAADLVNAIEKLVKNKLSLEGSSYRGSLKDPAGCLNEGMAPPTPPKNPEEEQKAKALRGRMFVLNELVQTEKDYVKDLGIVVEGFMKRIEEKGVPEDMRGKDKIVFGNIHQIYDWHKDFFLAELEKCIQEQDRLAQLFIKHERKLHIYVWYCQNKPRSEYIVAEYDAYFEEVKQEINQRLTLSDFLIKPIQRITKYQLLLKDFLRYSEKAGLECSDIEKAVELMCLVPKRCNDMMNLGRLQGFEGTLTAQGKLLQQDTFYVIELDAGMQSRTKERRVFLFEQIVIFSELLRKGSLTPGYMFKRSIKMNYLVLEENVDNDPCKFALMNRETSERVVLQAANADIQQAWVQDINQVLETQRDFLNALQSPIEYQRKERSTAVMRSQPARLPQASPRPYSSVPAGSEKPPKGSSYNPPLPPLKISTSNGSPGFEYHQPGDKFEASKQNDLGGCNGTSSMAVIKDYYALKENEICVSQGEVVQVLAVNQQNMCLVYQPASDHSPAAEGWVPGSILAPLTKATAAESSDGSIKKSCSWHTLRMRKRAEVENTGKNEATGPRKPKDILGNKVSVKETNSSEESECDDLDPNTSMEILNPNFIQEVAPEFLVPLVDVTCLLGDTVILQCKVCGRPKPTITWKGPDQNILDTDNSSATYTVSSCDSGEITLKICNLMPQDSGIYTCIATNDHGTTSTSATVKVQGVPAAPNRPIAQERSCTSVILRWLPPSSTGNCTISGYTVEYREEGSQIWQQSVASTLDTYLVIEDLSPGCPYQFRVSASNPWGISLPSEPSEFVRLPEYDAAADGATISWKENFDSAYTELNEIGRGRFSIVKKCIHKATRKDVAVKFVSKKMKKKEQAAHEAALLQHLQHPQYITLHDTYESPTSYILILELMDDGRLLDYLMNHDELMEEKVAFYIRDIMEALQYLHNCRVAHLDIKPENLLIDLRIPVPRVKLIDLEDAVQISGHFHIHHLLGNPEFAAPEVIQGIPVSLGTDIWSIGVLTYVMLSGVSPFLDESKEETCINVCRVDFSFPHEYFCGVSNAARDFINVILQEDFRRRPTAATCLQHPWLQPHNGSYSKIPLDTSRLACFIERRKHQNDVRPIPNVKSYIVNRVNQGT

SEQ ID NO: 3046 - protein, 402 aa, Homo sapiens
MVCARAALGPGALWAAAWGVLLLTAPAGAQRGRKKVVHVLEGESGSVVVQTAPGQVVSHRGGTIVLPCRYHYEAAAHGHDGVRLKWTKVVDPLAFTDVFVALGPQHRAFGSYRGRAELQGDGPGDASLVLRNVTLQDYGRYECEVTNELEDDAGMVKLDLEGVVFPYHPRGGRYKLTFAEAQRACAEQDGILASAEQLHAAWRDGLDWCNAGWLRDGSVQYPVNRPREPCGGLGGTGSAGGGGDANGGLRNYGYRHNAEERYDAFCFTSNLPGRVFFLKPLRPVPFSGAARACAARGAAVAKVGQLFAAWKLQLLDRCTAGWLADGSARYPIVNPRARCGGRRPGVRSLGFPDATRRLFGVYCYRAPGAPDPAPGGWGWGWAGGGGWAGGARDPAAWTPLHV

SEQ ID NO: 3047 - protein, 1156 aa, Homo sapiens
MASLLPLLCLCVVAAHLAGARDATPTEEPMATALGLERRSVYTGQPSPALEDWEEASEWTSWFNVDHPGGDGDFESLAAIRFYYGPARVCPRPLALEARTTDWALPSAVGERVHLNPTRGFWCLNREQPRGRRCSNYHVRFRCPLEASWGAWGPWGPCSGSCGPGRRLRRRHCPSPAGDACPGRPLEAQKCVRPRCPGCSLDTCECPDHILLGSVVTPSGQPLLGARVSLRDQPGTVATSDAHGTFRVPGVCADSRANIRAQMDGFSAGEAQAQANGSISVVTIILDKLEKPYLVKHPESRVREAGQNVTFCCKASGTPMPKKYSWFHNGTLLDRRAHGYGAHLELRGLRPDQAGIYHCKAWNEAGAVRSGTARLTVLAPGQPACDPRPREYLIKLPEDCGQPGSGPAYLDVGLCPDTRCPSLAGSSPRCGDASSRCCSVRRLERREIHCPGYVLPVKVVAECGCQKCLPPRGLVRGRVVAADSGEPLRFARILLGQEPIGFTAYQGDFTIEVPPSTQRLVVTFVDPSGEFMDAVRVLPFDPRGAGVYHEVKAMRKKAPVILHTSQSNTIPLGELEDEAPLGELVLPSGAFRRADGKPYSGPVEARVTFVDPRDLTSAASAPSDLRFVDSDGELAPLRTYGMFSVDLRAPGSAEQLQVGPVAVRVAASQIHMPGHVEALKLWSLNPETGLWEEESGFRREGSSGPRVRREERVFLVGNVEIRERRLFNLDVPERRRCFVKVRAYANDKFTPSEQVEGVVVTLVNLEPAPGFSANPRAWGRFDSAVTGPNGACLPAFCDADRPDAYTALVTATLGGEELEPAPSLPRPLPATVGVTQPYLDRLGYRRTDHDDPAFKRNGFRINLAKPRPGDPAEANGPVYPWRSLRECQGAPVTASHFRFARVEADKYEYNVVPFREGTPASWTGDLLAWWPNPQEFRACFLKVKIQGPQEYMVRSHNAGGSHPRTRGQLYGLRDARSVRDPERPGTSAACVEFKCSGMLFDQRQVDRTLVTIMPQGSCRRVAVNGLLRDYLTRHPPPVPAEDPAAFSMLAPLDPLGHNYGVYTVTDQSPRLAKEIAIGRCFDGSSDGFSREMKADAGTAVTFQCREPPAGRPSLFQRLLESPATALGDIRREMSEAAQAQARASGPLRTRRGRVRQ

SEQ ID NO: 3048 - protein, 1086 aa, Homo sapiens
MEKWEELNSHQPGEEYDPSKATFVKVVPTPNNGSTELVALHRNEGEDGLEVLSFEFQKIKYSYDALEKKQFLPVAFPVGNAFSYYQSNRGFQEDSEIRAAEKKFGSNKAEMVVPDFSELFKERATAPFFVFQVFCVGLWCLDEYWYYSVFTLSMLVAFEASLVQQQMRNMSEIRKMGNKPHMIQVYRSRKWRPIASDEIVPGDIVSIGRSPQENLVPCDVLLLRGRCIVDEAMLTGESVPQMKEPIEDLSPDRVLDLQADSRLHVIFGGTKVVQHIPPQKATTGLKPVDSGCVAYVLRTGFNTSQGKLLRTILFGVKRVTANNLETFIFILFLLVFAIAAAAYVWIEGTKDPSRNRYKLFLECTLILTSVVPPELPIELSLAVNTSLIALAKLYMYCTEPFRIPFAGKVEVCCFDKTGTLTSDSLVVRGVAGLRDGKEVTPVSSIPVETHRALASCHSLMQLDDGTLVGDPLEKAMLTAVDWTLTKDEKVFPRSIKTQGLKIHQRFHFASALKRMSVLASYEKLGSTDLCYIAAVKGAPETLHSMFSQCPPDYHHIHTEISREGARVLALGYKELGHLTHQQAREVKREALECSLKFVGFIVVSCPLKADSKAVIREIQNASHRVVMITGDNPLTACHVAQELHFIEKAHTLILQPPSEKGRQCEWRSIDGSIVLPLARGSPKALALEYALCLTGDGLAHLQATDPQQLLRLIPHVQVFARVAPKQKEFVITSLKELGYVTLMCGDGTNDVGALKHADVGVALLANAPERVVERRRRPRDSPTLSNSGIRATSRTAKQRSGLPPSEEQPTSQRDRLSQVLRDLEDESTPIVKLGDASIAAPFTSKLSSIQCICHVIKQGRCTLVTTLQMFKILALNALILAYSQSVLYLEGVKFSDFQATLQGLLLAGCFLFISRSKPLKTLSRERPLPNIFNLYTILTVMLQFFVHFLSLVYLYREAQARSPEKQEQFVDLYKEFEPSLVNSTVYIMAMAMQMATFAINYKGPPFMESLPENKPLVWSLAVSLLAIIGLLLGSSPDFNSQFGLVDIPVEFKLVIAQVLLLDFCLALLADRVLQFFLGTPKLKVPS

SEQ ID NO: 3049 - protein, 623 aa, Homo sapiens
MAAGETQLYAKVSNKLKSRSSPSLLEPLLAMGFPVHTALKALAATGRKTAEEALAWLHDHCNDPSLDDPIPQEYALFLCPTGPLLEKLQEFWRESKRQCAKNRAHEVFPHVTLCDFFTCEDQKVECLYEALKRAGDRLLGSFPTAVPLALHSSISYLGFFVSGSPADVIREFAMTFATEASLLADCSVKPCTKQLHLTLAHKFYPHHQRTLEQLARAIPLGHSCQWTAALYSRDMRFVHYQTLRALFQYKPQNVDELTLSPGDYIFVDPTQQDEASEGWVIGISQRTGCRGFLPENYTDRASESDTWVKHRMYTFSLATDLNSRKDGEASSRCSGEFLPQTARSLSSLQALQATVARKSVLVVRHGERVDQIFGKAWLQQCSTPDGKYYRPDLNFPCSLPRRSRGIKDFENDPPLSSCGIFQSRIAGDALLDSGIRISSVFASPALRCVQTAKLILEELKLEKKIKIRVEPGIFEWTKWEAGKTTPTLMSLEELKEANFNIDTDYRPAFPLSALMPAESYQEYMDRCTASMVQIVNTCPQDTGVILIVSHGSTLDSCTRPLLGLPPRECGDFAQLVRKIPSLGMCFCEENKEEGKWELVNPPVKTLTHGANAAFNWRNWISGN

SEQ ID NO: 3050 - protein, 309 aa, Homo sapiens
MSDLGSEELEEEGENDIGEYEGGRNEAGERHGRGRARLPNGDTYEGSYEFGKRHGQGIYKFKNGARYIGEYVRNKKHGQGTFIYPDGSRYEGEWANDLRHGHGVYYYINNDTYTGEWFAHQRHGQGTYLYAETGSKYVGTWVNGQQEGTAELIHLNHRYQGKFLNKNPVGPGKYVFDVGCEQHGEYRLTDMERGEEEEEEELVTVVPKWKATQITELALWTPTLPKKPTSTDGPGQDAPGAESAGEPGEEAQALLEGFEGEMDMRPGDEDADVLREESREYDQEEFRYDMDEGNINSEEEETRQSDLQD

SEQ ID NO: 3051 - protein, 593 aa, Homo sapiens
MGSGSSSYRPKAIYLDIDGRIQKVIFSKYCNSSDIMDLFCIATGLPRNTTISLLTTDDAMVSIDPTMPANSERTPYKVRPVAIKQLSAGVEDKRTTSRGQSAERPLRDRRVVGLEQPRREGAFESGQVEPRPREPQGCYQEGQRIPPEREELIQSVLAQVAEQFSRAFKINELKAEVANHLAVLEKRVELEGLKVVEIEKCKSDIKKMREELAARSSRTNCPCKYSFLDNHKKLTPRRDVPTYPKYLLSPETIEALRKPTFDVWLWEPNEMLSCLEHMYHDLGLVRDFSINPVTLRRWLFCVHDNYRNNPFHNFRHCFCVAQMMYSMVWLCSLQEKFSQTDILILMTAAICHDLDHPGYNNTYQINARTELAVRYNDISPLENHHCAVAFQILAEPECNIFSNIPPDGFKQIRQGMITLILATDMARHAEIMDSFKEKMENFDYSNEEHMTLLKMILIKCCDISNEVRPMEVAEPWVDCLLEEYFMQSDREKSEGLPVAPFMDRDKVTKATAQIGFIKFVLIPMFETVTKLFPMVEEIMLQPLWESRDRYEELKRIDDAMKELQKKTDSLTSGATEKSRERSRDVKNSEGDCA

SEQ ID NO: 3052 - protein, 436 aa, Homo sapiens
MMATQTLSIDSYQDGQQMQVVTELKTEQDPNCSEPDAEGVSPPPVESQTPMDVDKQAIYRHPLFPLLALLFEKCEQSTQGSEGTTSASFDVDIENFVRKQEKEGKPFFCEDPETDNLMVKAIQVLRIHLLELEKVNELCKDFCSRYIACLKTKMNSETLLSGEPGSPYSPVQSQQIQSAITGTISPQGIVVPASALQQGNVAMATVAGGTVYQPVTVVTPQGQVVTQTLSPGTIRIQNSQLQLQLNQDLSILHQDDGSSKNKRGVLPKHATNVMRSWLFQHIGHPYPTEDEKKQIAAQTNLTLLQVNNWFINARRRILQPMLDSSCSETPKTKKKTAQNRPVQRFWPDSIASGVAQPPPSELTMSEGAVVTITTPVNMNVDSLQSLSSDGATLAVQQVMMAGQSEDESVDSTEEDAGALAPAHISGLVLENSDSLQ

SEQ ID NO: 3053 - protein, 240 aa, Homo sapiens
MAEYLASIFGTEKDKVNCSFYFKIGACRHGDRCSRLHNKPTFSQTIALLNIYRNPQNSSQSADGLRCAVSDVEMQEHYDEFFEEVFTEMEEKYGEVEEMNVCDNLGDHLVGNVYVKFRREEDAEKAVIDLNNRWFNGQPIHAELSPVTDFREACCRQYEMGECTRGGFCNFMHLKPISRELRRELYGRRRKKHRSRSRSRERRSRSRDRGRGGGGGGGGGGGGRERDRRRSRDRERSGRF

SEQ ID NO: 3054 - protein, 1259 aa, Homo sapiens
MDASEEPLPPVIYTMENKPIVTCAGDQNLFTSVYPTLSQQLPREPMEWRRSYGRAPKMIHLESNFVQFKEELLPKEGNKALLTFPFLHIYWTECCDTEVYKATVKDDLTKWQNVLKAHSSVDWLIVIVENDAKKKNKTNILPRTSIVDKIRNDFCNKQSDRCVVLSDPLKDSSRTQESWNAFLTKLRTLLLMSFTKNLGKFEDDMRTLREKRTEPGWSFCEYFMVQEELAFVFEMLQQFEDALVQYDELDALFSQYVVNFGAGDGANWLTFFCQPVKSWNGLILRKPIDMEKRESIQRREATLLDLRSYLFSRQCTLLLFLQRPWEVAQRALELLHNCVQELKLLEVSVPPGALDCWVFLSCLEVLQRIEGCCDRAQIDSNIAHTVGLWSYATEKLKSLGYLCGLVSEKGPNSEDLNRTVDLLAGLGAERPETANTAQSPYKKLKEALSSVEAFEKHYLDLSHATIEMYTSIGRIRSAKFVGKDLAEFYMRKKAPQKAEIYLQGALKNYLAEGWALPITHTRKQLAECQKHLGQIENYLQTSSLLASDHHLTEEERKHFCQEILDFASQPSDSPGHKIVLPMHSFAQLRDLHFDPSNAVVHVGGVLCVEITMYSQMPVPVHVEQIVVNVHFSIEKNSYRKTAEWLTKHKTSNGIINFPPETAPFPVSQNSLPALELYEMFERSPSDNSLNTTGIICRNVHMLLRRQESSSSLEMPSGVALEEGAHVLRCSHVTLEPGANQITFRTQAKEPGTYTLRQLCASVGSVWFVLPHIYPIVQYDVYSQEPQLHVEPLADSLLAGIPQRVKFTVTTGHYTIKNGDSLQLSNAEAMLILCQAESRAVVYSNTREQSSEAALRIQSSDKVTSISLPVAPAYHVIEFELEVLSLPSAPALGGESDMLGMAEPHRKHKDKQRTGRCMVTTDHKVSIDCPWSIYSTVIALTFSVPFRTTHSLLSSGTRKYVQVCVQNLSELDFQLSDSYLVDTGDSTDLQLVPLNTQSQQPIYSKQSVFFVWELKWTEEPPPSLHCRFSVGFSPASEEQLSISLKPYTYEFKVENFFTLYNVKAEIFPPSGMEYCRTGSLCSLEVLITRLSDLLEVDKDEALTESDEHFSTKLMYEVVDNSSNWAVCGKSCGVISMPVAARATHRVHMEVMPLFAGYLPLPDVRLFKYLPHHSAHSSQLDADSWIENDSLSVDKHGDDQPDSSSLKSRGSVHSACSSEHKGLPMPRLQALPAGQVFNSSSGTQVLVIPSQDDHVLEVSVT

SEQ ID NO: 3055 - protein, 919 aa, Homo sapiens [sequence omitted]

SEQ ID NO: 3056 - protein, 545 aa, Homo sapiens
MATDAALRRLLRLHRTEIAVAVDSAFPLLHALADHDVVPEDKFQETLHLKEKEGCPQAFHALLSWLLTQDSTAILDFWRVLFKDYNLERYGRLQPILDSFPKDVDLSQPRKGRKPPAVPKALVPPPRLPTKRKASEEARAAAPAALTPRGTASPGSQLKAKPPKKPESSAEQQRLPLGNGIQTMSASVQRAVAMSSGDVPGARGAVEGILIQQVFESGGSKKCIQVGGEFYTPSKFEDSGSGKNKARSSSGPKPLVRAKGAQGAAPGGGEARLGQQGSVPAPLALPSDPQLHQKNEDECAVCRDGGELICCDGCPRAFHLACLSPPLREIPSGTWRCSSCLQATVQEVQPRAEEPRPQEPPVETPLPPGLRSAGEEVRGPPGEPLAGMDTTLVYKHLPAPPSAAPLPGLDSSALHPLLCVGPEGQQNLAPGARCGVCGDGTDVLRCTHCAAAFHWRCHFPAGTSRPGTGLRCRSCSGDVTPAPVEGVLAPSPARLAPGPAKDDTASHEPALHRDDLESLLSEHTFDGILQWAIQSMARPAAPFPS

SEQ ID NO: 3057 - protein, 569 aa, Homo sapiens
MSKDLVTFGDVAVNFSQEEWEWLNPAQRNLYRKVMLENYRSLVSLGVSVSKPDVISLLEQGKEPWMVKKEGTRGPCPDWEYVFKNSEFSSKQETYEESSKVVTVGARHLSYSLDYPSLREDCQSEDWYKNQLGSQEVHLSQLIITHKEILPEVQNKEYNKSWQTFHQDTIFDIQQSFPTKEKAHKHEPQKKSYRKKSVEMKHRKVYVEKKLLKCNDCEKVFNQSSSLTLHQRIHTGEKPYACVECGKTFSQSANLAQHKRIHTGEKPYECKECRKAFSQNAHLAQHQRVHTGEKPYQCKECKKAFSQIAHLTQHQRVHTGERPFECIECGKAFSNGSFLAQHQRIHTGEKPYVCNVCGKAFSHRGYLIVHQRIHTGERPYECKECRKAFSQYAHLAQHQRVHTGEKPYECKVCRKAFSQIAYLDQHQRVHTGEKPYECIECGKAFSNSSSLAQHQRSHTGEKPYMCKECRKTFSQNAGLAQHQRIHTGEKPYECNVCGKAFSYSGSLTLHQRIHTGERPYECKDCRKSFRQRAHLAHHERIHTMESFLTLSSPSPSTSNQLPRPVGFIS

SEQ ID NO: 3058 - protein, 541 aa, Homo sapiens
MSQLVECVPNFSEGKNQEVIDAISGAITQTPGCVLLDVDAGPSTNRTVYTFVGPPECVVEGALNAARVASRLIDMSRHQGEHPRMGALDVCPFIPVRGVSVDECVLCAQAFGQRLAEELDVPVYLYGEAARMDSRRTLPAIRAGEYEALPKKLQQADWAPDFGPSSFVPSWGATATGARKFLIAFNINLLGTKEQAHRIALNLREQGRGKDQPGRLKKVQGIGWYLDEKNLAQVSTNLLDFEVTALHTVYEETCREAQELSLPVVGSQLVGLVPLKALLDAAAFYCEKENLFILEEEQRIRLVVSRLGLDSLCPFSPKERIIEYLVPERGPERGLGSKSLRAFVGEVGARSAAPGGGSVAAAAAAMGAALGSMVGLMTYGRRQFQSLDTTMRRLIPPFREASAKLTTLVDADAEAFTAYLEAMRLPKNTPEEKDRRTAALQEGLRRAVSVPLTLAETVASLWPALQELARCGNLACRSDLQVAAKALEMGVFGAYFNVLINLRDITDEAFKDQIHHRVSSLLQEAKTQAALVLDCLETRQE

SEQ ID NO: 3059 - protein, 1980 aa, Homo sapiens
MNPTNPFSGQQPSAFSASSSNVGTLPSKPPFRFGQPSLFGQNSTLSGKSSGFSQVSSFPASSGVSHSSSVQTLGFTQTSSVGPFSGLEHTSTFVATSGPSSSSVLGNTGFSFKSPTSVGAFPSTSAFGQEAGEIVNSGFGKTEFSFKPLENAVFKPILGAESEPEKTQSQIASGFFTFSHPISSAPGGLAPFSFPQVTSSSATTSNFTFSKPVSSNNSLSAFTPALSNQNVEEEKRGPKSIFGSSNNSFSSFPVSSAVLGEPFQASKAGVRQGCEEAVSQVEPLPSLMKGLKRKEDQDRSPRRHGHEPAEDSDPLSRGDHPPDKRPVRLNRPRGGTLFGRTIQDVFKSNKEVGRLGNKEAKKETGFVESAESDHMAIPGGNQSVLAPSRIPGVNKEEETESREKKEDSLRGTPARQSNRSESTDSLGGLSPSEVTAIQCKNIPDYLNDRTILENHFGKIAKVQRIFTRRSKKLAVVHFFDHASAALARKKGKSLHKDMAIFWHRKKISPNKKPFSLKEKKPGDGEVSPSTEDAPFQHSPLGKAAGRTGASSLLNKSSPVKKPSLLKAHQFEGDSFDSASEGSEGLGPCVLSLSTLIGTVAETSKEKYRLLDQRDRIMRQARVKRTDLDKARTFVGTCLDMCPEKERYMRETRSQLSVFEVVPGTDQVDHAAAVKEYSRSSADQEEPLPHELRPLPVLSRTMDYLVTQIMDQKEGSLRDWYDFVWNRTRGIRKDITQQHLCDPLTVSLIEKCTRFHIHCAHFMCEEPMSSFDAKINNENMTKCLQSLKEMYQDLRNKGVFCASEAEFQGYNVLLSLNKGDILREVQQFHPAVRNSSEVKFAVQAFAALNSNNFVRFFKLVQSASYLNACLLHCYFSQIRKDALRALNFAYTVSTQRSTIFPLDGVVRMLLFRDCEEATDFLTCHGLTVSDGCVELNRSAFLEPEGLSKTRKSVFITRKLTVSVGEIVNGGPLPPVPRHTPVCSFNSQNKYIGESLAAELPVSTQRPGSDTVGGGRGEECGVEPDAPLSSLPQSLPAPAPSPVPLPPVLALTPSVAPSLFQLSVQPEPPPPEPVPMYSDEDLAQVVDELIQEALQRDCEEVGSAGAAYAAAALGVSNAAMEDLLTAATTGILRHIAAEEVSKERERREQERQRAEEERLKQERELVLSELSQGLAVELMERVMMEFVRETCSQELKNAVETDQRVRVARCCEDVCAHLVDLFLVEEIFQTAKETLQELQCFCKYLQRWREAVTARKKLRRQMRAFPAAPCCVDVSDRLRALAPSAECPIAEENLARGLLDLGHAGRLGISCTRLRRLRNKTAHQMKVQHFYQQLLSDVAWASLDLPSLVAEHLPGRQEHVFWKLVLVLPDVEEQSPESCGRILANWLKVKFMGDEGSVDDTSSDAGGIQTLSLFNSLSSKGDQMISVNVCIKVAHGALSDGAIDAVETQKDLLGASGLMLLLPPKMKSEDMAEEDVYWLSALLQLKQLLQAKPFQPALPLVVLVPSPGGDAVEKEVEDGLMLQDLVSAKLISDYTVTEIPDTINDLQGSTKVLQAVQWLVSHCPHSLDLCCQTLIQYVEDGIGHEFSGRFFHDRRERRLGGLASQEPGAIIELFNSVLQFLASVVSSEQLCDLSWPVTEFAEAGGSRLLPHLHWNAPEHLAWLKQAVLGFQLPQMDLPPLGAPWLPVCSMVVQYASQIPSSRQTQPVLQSQVENLLHRTYCRWKSKSPSPVHGAGPSVMEIPWDDLIALCINHKLRDWTPPRLPVTSEALSEDGQICVYFFKNDLKKYDVPLSWEQARLQTQKELQLREGRLAIKPFHPSANNFPIPLLHMHRNWKRSTECAQEGRIPSTEDLMRGASAEELLAQCLSSSLLLEKEENKRFEDQLQQWLSEDSGAFTDLTSLPLYLPQTLVSLSHTIEPVMKTSVTTSPQSDMMREQLQLSEATGTCLGERLKHLERLIRSSREEEVASELHLSALLDMVDI

SEQ ID NO: 3060 - protein, 92 aa, Homo sapiens
MSELEKAMVALIDVFHQYSGREGDKHKLKKSELKELINNELSHFLEEIKEQEVVDKVMETLDNDGDGECDFQEFMAFVAMVTTACHEFFEHE

SEQ ID NO: 3061 - protein, 595 aa, Homo sapiens
MLLLLLLLPPLLCGRVGAKEQKDYLLTMQKSVTVQEGLCVSVLCSFSYPQNGWTASDPVHGYWFRAGDHVSRNIPVATNNPARAVQEETRDRFHLLGDPQNKDCTLSIRDTRESDAGTYVFCVERGNMKWNYKYDQLSVNVTASQDLLSRYRLEVPESVTVQEGLCVSVPCSVLYPHYNWTASSPVYGSWFKEGADIPWDIPVATNTPSGKVQEDTHGRFLLLGDPQTNNCSLSIRDARKGDSGKYYFQVERGSRKWNYIYDKLSVHVTALTHMPTFSIPGTLESGHPRNLTCSVPWACEQGTPPTITWMGASVSSLDPTITRSSMLSLIPQPQDHGTSLTCQVTLPGAGVTMTRAVRLNISYPPQNLTMTVFQGDGTASTTLRNGSALSVLEGQSLHLVCAVDSNPPARLSWTWGSLTLSPSQSSNLGVLELPRVHVKDEGEFTCRAQNPLGSQHISLSLSLQNEYTGKMRPISGVTLGAFGGAGATALVFLYFCIIFVVVRSCRKKSARPAVGVGDTGMEDANAVRGSASQGPLIESPADDSPPHHAPPALATPSPEEGEIQYASLSFHKARPQYPQEQEAIGYEYSEINIPK

SEQ ID NO: 3062 - protein, 130 aa, Homo sapiens
MSSSGGAPGASASSAPPAQEEGMTWWYRWLCRLSGVLGAVSCAISGLFNCITIHPLNIAAGVWMMMAVVPIVISLTLTTLLGNAIAFATGVLYGLSALGKKGDAISYARIQQQRQQADEEKLAETLEGEL

SEQ ID NO: 3063 - protein, 275 aa, Homo sapiens
MELDRAVGVLGAATLLLSFLGMAWALQAADTCPGERGPPGPPGKAGPPGPNGAPGEPQPCLTGPRTCKDLLDRGHFLSGWHTIYLPDCRPLTVLCDMDTDGGGWTVFQRRVDGSVDFYRDWATYKQGFGSRLGEFWLGNDNIHALTAQGTSELRVDLVDFEDNYQFAKYRSFKVADEAEKYNLVLGAFVEGSAGDSLTFHNNQSFSTKDQDNDLNTGNCAVMFQGAWWYKNCHVSNLNGRYLRGTHGSFANGINWKSGKGYNYSYKVSEMKVRPA

SEQ ID NO: 3064 - protein, 313 aa, Homo sapiens
MELDRAVGVLGAATLLLSFLGMAWALQAADTCPEVKMVGLEGSDKLTILRGCPGLPGAPGPKGEAGTNGKRGERGPPGPPGKAGPPGPNGAPGEPQPCLTGPRTCKDLLDRGHFLSGWHTIYLPDCRPLTVLCDMDTDGGGWTVFQRRVDGSVDFYRDWATYKQGFGSRLGEFWLGNDNIHALTAQGTSELRVDLVDFEDNYQFAKYRSFKVADEAEKYNLVLGAFVEGSAGDSLTFHNNQSFSTKDQDNDLNTGNCAVMFQGAWWYKNCHVSNLNGRYLRGTHGSFANGINWKSGKGYNYSYKVSEMKVRPA

SEQ ID NO: 3065 - protein, 240 aa, Homo sapiens
MGPLPAPSCTQRITWKGLLLTASLLNFWNPPTTAEVTIEAQPPKVSEGKDVLLLVHNLPQNLPGYFWYKGEMTDLYHYIISYIVDGKIIIYGPAYSGRETVYSNASLLIQNVTRKDAGTYTLHIIKRGDETREEIRHFTFTLYYGPDLPRIYPSFTYYRSGENLDLSCFTESNPPAEYFWTINGKFQQSGQKLFIPQITRNHSGLYACSVHNSATGKEISKSMTVKVSGPCHGDLTESQS

SEQ ID NO: 3066 - protein, 333 aa, Homo sapiens
MACSRPPSQCEPTSLPPGPPAGRRHLPLSRRRREMSSNKEQRSAVFVILFALITILILYSSNSANEVFHYGSLRGRSRRPVNLKKWSITDGYVPILGNKTLPSRCHQCVIVSSSSHLLGTKLGPEIERAECTIRMNDAPTTGYSADVGNKTTYRVVAHSSVFRVLRRPQEFVNRTPETVFIFWGPPSKMQKPQGSLVRVIQRAGLVFPNMEAYAVSPGRMRQFDDLFRGETGKDREKSHSWLSTGWFTMVIAVELCDHVHVYGMVPPNYCSQRPRLQRMPYHYYEPKGPDECVTYIQNEHSRKGNHHRFITEKRVFSSWAQLYGITFSHPSWT

SEQ ID NO: 3067 - protein, 707 aa, Homo sapiens
MAAAATAAEGVPSRGPPGEVIHLNVGGKRFSTSRQTLTWIPDSFFSSLLSGRISTLKDETGAIFIDRDPTVFAPILNFLRTKELDPRGVHGSSLLHEAQFYGLTPLVRRLQLREELDRSSCGNVLFNGYLPPPVFPVKRRNRHSLVGPQQLGGRPAPVRRSNTMPPNLGNAGLLGRMLDEKTPPSPSGQPEEPGMVRLVCGHHNWIAVAYTQFLVCYRLKEASGWQLVFSSPRLDWPIERLALTARVHGGALGEHDKMVAAATGSEILLWALQAEGGGSEIGVFHLGVPVEALFFVGNQLIATSHTGRIGVWNAVTKHWQVQEVQPITSYDAAGSFLLLGCNNGSIYYVDVQKFPLRMKDNDLLVSELYRDPAEDGVTALSVYLTPKTSDSGNWIEIAYGTSSGGVRVIVQHPETVGSGPQLFQTFTVHRSPVTKIMLSEKHLISVCADNNHVRTWSVTRFRGMISTQPGSTPLASFKILALESADGHGGCSAGNDIGPYGERDDQQVFIQKVVPSASQLFVRLSSTGQRVCSVRSVDGSPTTAFTVLECEGSRRLGSRPRRYLLTGQANGSLAMWDLTTAMDGLGQAPAGGLTEQELMEQLEHCELAPPAPSAPSWGCLPSPSPRISLTSLHSASSNTSLSGHRGSPSPPQAEARRRGGGSFVERCQELVRSGPDLRRPPTPAPWPSSGLGTPLTPPKMKLNETSF

SEQ ID NO: 3068 - protein, 304 aa, Homo sapiens
MSSTLPALLCVGLCLSQRISAQQQTLPKPFIWAEPHFMVPKEKQVTICCQGNYGAVEYQLHFEGSLFAVDRPKPPERINKVQFYIPDMNSRMAGQYSCIYRVGELWSEPSNLLDLVVTEMYDTPTLSVHPGPEVISGEKVTFYCRLDTATSMFLLLKEGRSSHVQRGYGKVQAEFPLGPVTTAHRGTYRCFGSYNNHAWSFPSEPVKLLVTGDIENTSLAPEDPTFPADTWGTYLLTTETGLQKDHALWDHTAQNLLRMGLAFLVLVALVWFLVEDWLSRKRTRERASRASTWEGRRRLNTQTL

SEQ ID NO: 3069 - protein, 766 aa, Homo sapiens
MASDTPESLMALCTDFCLRNLDGTLGYLLDKETLRLHPDIFLPSEICDRLVNEYVELVNAACNFEPHESFFSLFSDPRSTRLTRIHLREDLVQDQDLEAIRKQDLVELYLTNCEKLSAKSLQTLRSFSHTLVSLSLFGCTNIFYEEENPGGCEDEYLVNPTCQVLVKDFTFEGFSRLRFLNLGRMIDWVPVESLLRPLNSLAALDLSGIQTSDAAFLTQWKDSLVSLVLYNMDLSDDHIRVIVQLHKLRHLDISRDRLSSYYKFKLTREVLSLFVQKLGNLMSLDISGHMILENCSISKMEEEAGQTSIEPSKSSIIPFRALKRPLQFLGLFENSLCRLTHIPAYKVSGDKNEEQVLNAIEAYTEHRPEITSRAINLLFDIARIERCNQLLRALKLVITALKCHKYDRNIQVTGSAALFYLTNSEYRSEQSVKLRRQVIQVVLNGMESYQEVTVQRNCCLTLCNFSIPEELEFQYRRVNELLLSILNPTRQDESIQRIAVHLCNALVCQVDNDHKEAVGKMGFVVTMLKLIQKKLLDKTCDQVMEFSWSALWNITDETPDNCEMFLNFNGMKLFLDCLKEFPEKQELHRNMLGLLGNVAEVKELRPQLMTSQFISVFSNLLESKADGIEVSYNACGVLSHIMFDGPEAWGVCEPQREEVEERMWAAIQSWDINSRRNINYRSFEPILRLLPQGISPVSQHWATWALYNLVSVYPDKYCPLLIKEGGMPLLRDIIKMATARQETKEMARKVIEHCSNFKEENMDTSR

SEQ ID NO: 3070 - protein, 1048 aa, Homo sapiens
MSDVNPPSDTPIPFSSSSTHSSHIPPWTFSCYPGSPCENGVMLYMRNVSHEELQRFKQLLLTELSTGTMPITWDQVETASWAEVVHLLIERFPGRRAWDVTSNIFAIMNCDKMCVVVRREINAILPTLEPEDLNVGETQVNLEEGESGKIRRYKSNVMEKFFPIWDITTWPGNQRDFFYQGVHRHEEYLPCLLLPKRPQGRQPKTVAIQGAPGIGKTILAKKVMFEWARNKFYAHKRWCAFYFHCQEVNQTTDQSFSELIEQKWPGSQDLVSKIMSKPDQLLLLLDGFEELTSTLIDRLEDLSEDWRQKLPGSVLLSSLLSKTMLPEATLLIMIRFTSWQTCKPLLKCPSLVTLPGFNTMEKIKYFQMYFGHTEEGDQVLSFAMENTILFSMCRVPVVCWMVCSGLKQQMERGNNLTQSCPNATSVFVRYISSLFPTRAENFSRKIHQAQLEGLCHLAADSMWHRKWVLGKEDLEEAKLDQTGVTAFLGMSILRRIAGEEDHYVFTLVTFQEFFAALFYVLCFPQRLKNFHVLSHVNIQRLIASPRGSKSYLSHMGLFLFGFLNEACASAVEQSFQCKVSFGNKRKLLKVIPLLHKCDPPSPGSGVPQLFYCLHEIREEAFVSQALNDYHKVVLRIGNNKEVQVSAFCLKRCQYLHEVELTVTLNFMNVWKLSSSSHPGSEAPESNGLHRWWQDLCSVFATNDKLEVLTMTNSVLGPPFLKALAAALRHPQCKLQKLLLRRVNSTMLNQDLIGVLTGNQHLRYLEIQHVEVESKAVKLLCRVLRSPRCRLQCLRLEDCLATPRIWTDLGNNLQGNGHLKTLILRKNSLENCGAYYLSVAQLERLSIENCNLTQLTCESLASCLRQSKMLTHLSLAENALKDEGAKHIWNALPHLRCPLQRLVLRKCDLTFNCCQDMISALCKNKTLKSLDLSFNSLKDDGVILLCEALKNPDCTLQILELENCLFTSICCQAMASMLRKNQHLRHLDLSKNAIGVYGILTLCEAFSSQKKREEVIFCIPAWTRITSFSPTPHPPDFTGKSDCLSQINP

SEQ ID NO: 3071 - protein, 384 aa, Homo sapiens
MVSGDYSLGLNDLNVSPPELTVHVGDSALMGCVFQSTEDKCIFKIDWTLSPGEHAKDEYVLYYYSNLSVPIGRFQNRVHLMGDILCNDGSLLLQDVQEADQGTYICEIRLKGESQVFKKAVVLHVLPEEPKELMVHVGGLIQMGCVFQSTEVKHVTKVEWIFSGRRAKEEIVFRYYHKLRMSVEYSQSWGHFQNRVNLVGDIFRNDGSIMLQGVRESDGGNYTCSIHLGNLVFKKTIVLHVSPEEPRTLVTPAALRPLVLGGNQLVIIVGIVCATILLLPVLILIVKKTCGNKSSVNSTVLVKNTKKTNPEIKEKPCHFERCEGEKHIYSPIIVREVIEEEEPSEKSEATYMTMHPVWPSLRSDRNNSLEKKSGGGMPKTQQAF

SEQ ID NO: 3072 - protein, 610 aa, Homo sapiens
MPSARGKSKSKAPITFGDLAIYFSQEEWEWLSPIQKDLYEDVMLENYRNLVSLGLSFRRPNVITLLEKGKAPWMVEPVRRRRAPDSGSKCETKKLPPNQCNKSGQSICQKLVSAQQKAPTRKSGCNKNSVLVKPKKGHSGKKPLKCNDCGKTFSRSFSLKLHQNIHTGEKPFECSNCRKAFRQISSILLHQRIHSGKKSHECNKCGESFNQRTTLILHMRIHDGKEILDCGKALSQCQSFNIHQKIHVVGNVCQCRKCGKAFNQMSSLLLHKKIHNGKKTHKYNKCGRGFKKKSVFVVHKRIHAGEKIPENAKALSQSLQQRSHHLENPFKCRKCGKLFNRISPLMLHQRIHTSEKPYKCDKCDKFFRRLSTLILHLRIHNGEKLYRCNKCEKVCNRHSSLIQHQKVHTKKKKLFECKECGKMFSGTANLKIHQNIHSEEKPFKCNKCSKVFGRQSFLIEHQRIHTGEKPYQCEECGKAFSHRISLTRHKRIHTEDRPYECDQCGKAFSQSAHLAQHERIHTGEKPYTCKTCGKAFSQRTSLILHERSHTGEKPYECNECGKAFSSGSDLIRHQRSHSSEKPYECSKCGKAYSRSSSLIRHQNTHSEEKA

SEQ ID NO: 3073 - protein, 915 aa, Homo sapiens
MAETLSGLGDSGAAGAAALSSASSETGTRRLSDLRVIDLRAELRKRNVDSSGNKSVLMERLKKAIEDEGGNPDEIEITSEGNKKTSKRSSKGRKPEEEGVEDNGLEENSGDGQEDVETSLENLQDIDIMDISVLDEAEIDNGSVADCVEDDDADNLQESLSDSRELVEGEMKELPEQLQEHAIEDKETINNLDTSSSDFTILQEIEEPSLEPENEKILDILGETCKSEPVKEESSELEQPFAQDTSSVGPDRKLAEEEDLFDSAHPEEGDLDLASESTAHAQSSKADSLLAVVKREPAEQPGDGERTDCEPVGLEPAVEQSSAASELAEASSEELAEAPTEAPSPEARDSKEDGRKFDFDACNEVPPAPKESSTSEGADQKMSSPEDDSDTKRLSKEEKGRSSCGRNFWVSGLSSTTRATDLKNLFSKYGKVVGAKVVTNARSPGARCYGFVTMSTAEEATKCINHLHKTELHGKMISVEKAKNEPVGKKTSDKRDSDGKKEKSSNSDRSTNLKRDDKCDRKDDAKKGDDGSGEKSKDQDDQKPGPSERSRATKSGSRGTERTVVMDKSKGVPVISVKTSGSKERASKSQDRKSASREKRSVVSFDKVKEPRKSRDSESHSRVRERSEREQRMQAQWEREERERLEIARERLAFQRQRLERERMERERLERERMHVEHERRREQERIHREREELRRQQELRYEQERRPAVRRPYDLDRRDDAYWPEAKRAALDERYHSDFNRQDRFHDFDHRDRGRYPDHSVDRREGSRSMMGEREGQHYPERHGGPERHGRDSRDGWGGYGSDKRMSEGRGLPPPPRRDWGDHGRREDDRSWQGTADGGMMDRDHKRWQGGERSMSGHSGPGHMMNRGGMSGRGSFAPGGASRGHPIPHGGMQGGFGGQSRGSRPSDARFTRRY

SEQ ID NO: 3074 - protein, 435 aa, Homo sapiens
MGPLSAPPCTQHITWKGLLLTASLLNFWNLPTTAQVIIEAKPPKVSEGKDVLLLVHNLPQNLTGYIWYKGQMTDLYHYITSYVVHGQIIYGPAYSGRETVYSNASLLIQNVTQEDAGSYTLHIIKRGDGTGGVTGYFTVTLYSETPKPSISSSNLNPREVMEAVRLICDPETPDASYLWLLNGQNLPMTHRLQLSKTNRTLYLFGVTKYIAGPYECEIRNPVSASRSDPVTLNLLPKLPMPYITINNLNPREKKDVLAFTCEPKSRNYTYIWWLNGQSLPVSPRVKRPIENRILILPSVTRNETGPYQCEIRDRYGGIRSNPVTLNVLYGPDLPRIYPSFTYYRSGENLDLSCFADSNPPAEYSWTINGKFQLSGQKLFIPQITTNHSGLYACSVRNSATGKEISKSMIVKVSETASPQVTYAGPNTWFQEILLL

SEQ ID NO: 3075 - protein, 539 aa, Homo sapiens
MGSPEDDLIGIPFPDHSSELLSCLNEQRQLGHLCDLTIRTQGLEYRTHRAVLAACSHYFKKLFTEGGGGAVMGAGGSGTATGGAGAGVCELDFVGPEALGALLEFAYTATLTTSSANMPAVLQAARLLEIPCVIAACMEILQGSGLEAPSPDEDDCERARQYLEAFATATASGVPNGEDSPPQVPLPPPPPPPPRPVARRSRKPRKAFLQTKGARANHLVPEVPTVPAHPLTYEEEEVAGRVGSSGGSGPGDSYSPPTGTASPPEGPQSYEPYEGEEEEEELVYPPAYGLAQGGGPPLSPEELGSDEDAIDPDLMAYLSSLHQDNLAPGLDSQDKLVRKRRSQMPQECPVCHKIIHGAGKLPRHMRTHTGEKPFACEVCGVRFTRNDKLKIHMRKHTGERPYSCPHCPARFLHSYDLKNHMHLHTGDRPYECHLCHKAFAKEDHLQRHLKGQNCLEVRTRRRRKDDAPPHYPPPSTAAASPAGLDLSNGHLDTFRLSLARFWEQSAPTGPPVSTPGPPDDDEEEGAPTTPQAEGAMESS

SEQ ID NO: 3076 - protein, 975 aa, Homo sapiens
MRWGHHLPRASWGSGFRRALQRPDDRIPFLIHWSWPLQGERPFGPPRAFIRHHGSSVDSAPPPGRHGRLFPSASATEAIQRHRRNLAEWFSRLPREERQFGPTFALDTVHVDPVIRESTPDELLRPPAELALEHQPPQAGLPPLALSQLFNPDACGRRVQTVVLYGTVGTGKSTLVRKMVLDWCYGRLPAFELLIPFSCEDLSSLGPAPASLCQLVAQRYTPLKEVLPLMAAAGSHLLFVLHGLEHLNLDFRLAGTGLCSDPEEPQEPAAIIVNLLRKYMLPQASILVTTRPSAIGRIPSKYVGRYGEICGFSDTNLQKLYFQLRLNQPYCGYAVGGSGVSATPAQRDHLVQMLSRNLEGHHQIAAACFLPSYCWLVCATLHFLHAPTPAGQTLTSIYTSFLRLNFSGETLDSTDPSNLSLMAYAARTMGKLAYEGVSSRKTYFSEEDVCGCLEAGIRTEEEFQLLHIFRRDALRFFLAPCVEPGRAGTFVFTVPAMQEYLAALYIVLGLRKTTLQKVGKEVAELVGRVGEDVSLVLGIMAKLLPLRALPLLFNLIKVVPRVFGRMVGKSREAVAQAMVLEMFREEDYYNDDVLDQMGASILGVEGPRRHPDEPPEDEVFELFPMFMGGLLSAHNRAVLAQLGCPIKNLDALENAQAIKKKLGKLGRQVLPPSELLDHLFFHYEFQNQRFSAEVLSSLRQLNLAGVRMTPVKCTVVAAVLGSGRHALDEVNLASCQLDPAGLRTLLPVFLRARKLGLQLNSLGPEACKDLRDLLLHDQCQITTLRLSNNPLTAAGVAVLMEGLAGNTSVTHLSLLHTGLGDEGLELLAAQLDRNRQLQELNVAYNGAGDTAALALARAAREHPSLELLHLYFNELSSEGRQVLRDLGGAAEGGARVVVSLTEGTAVSEYWSVILSEVQRNLNSWDRARVQRHLELLLRDLEDSRGATLNPWRKAQLLRVEGEVRALLEQLGSSGS

SEQ ID NO: 3077 - protein, 422 aa, Homo sapiens
MQQPQPQGQQQPGPGQQLGGQGAAPGAGGGPGGGPGPGPCLRRELKLLESIFHRGHERFRIASACLDELSCEFLLAGAGGAGAGAAPGPHLPPRGSVPGDPVRIHCNITESYPAVPPIWSVESDDPNLAAVLERLVDIKKGNTLLLQHLKRIISDLCKLYNLPQHPDVEMLDQPLPAEQCTQEDVSSEDEDEEMPEDTEDLDHYEMKEEEPAEGKKSEDDGIGKENLAILEKIKKNQRQDYLNGAVSGSVQATDRLMKELRDIYRSQSFKGGNYAVELVNDSLYDWNVKLLKVDQDSALHNDLQILKEKEGADFILLNFSFKDNFPFDPPFVRVVSPVLSGGYVLGGGAICMELLTKQGWSSAYSIESVIMQISATLVKGKARVQFGANKSQYSLTRAQQSYKSLVQIHEKNGWYTPPKEDG

SEQ ID NO: 3078 - protein, 660 aa, Homo sapiens
MKVTLSALDTSESSFTPLVVIELAQDVKEETKEWLKNRIIAKKKDGGAQLLFRPLLNKYEQETLENQNLYLVGASKIRMLLGAEAVGLVKECNDNTMRAFTYRTRQNFKGFDDNNDDFLTMAECQFIIKHELENLRAKDEKMIPGYPQAKLYPGKSLLRRLLTSGIVIQVFPLHDSEALKKLEDTWYTRFALKYQPIDSIRGYFGETIALYFGFLEYFTFALIPMAVIGLPYYLFVWEDYDKYVIFASFNLIWSTVILELWKRGCANMTYRWGTLLMKRKFEEPRPGFHGVLGINSITGKEEPLYPSYKRQLRIYLVSLPFVCLCLYFSLYVMMIYFDMEVWALGLHENSGSEWTSVLLYVPSIIYAIVIEIMNRLYRYAAEFLTSWENHRLESAYQNHLILKVLVFNFLNCFASLFYIAFVLKDMKLLRQSLATLLITSQILNQIMESFLPYWLQRKHGVRVKRKVQALKADIDATLYEQVILEKEMGTYLGTFDDYLELFLQFGYVSLFSCVYPLAAAFAVLNNFTEVNSDALKMCRVFKRPFSEPSANIGVWQLAFETMSVISVVTNCALIGMSPQVNAVFPESKADLILIVVAVEHALLALKFILAFAIPDKPRHIQMKLARLEFESLEALKQQQMKLVTENLKEEPMESGKEKAT

SEQ ID NO: 3079 - protein, 374 aa, Homo sapiens
MLSTSRSRFIRNTNESGEEVTTFFDYDYGAPCHKFDVKQIGAQLLPPLYSLVFIFGFVGNMLVVLILINCKKLKCLTDIYLLNLAISDLLFLITLPLWAHSAANEWVFGNAMCKLFTGLYHIGYFGGIFFIILLTIDRYLAIVHAVFALKARTVTFGVVTSVITWLVAVFASVPGIIFTKCQKEDSVYVCGPYFPRGWNNFHTIMRNILGLVLPLLIMVICYSGILKTLLRCRNEKKRHRAVRVIFTIMIVYFLFWTPYNIVILLNTFQEFFGLSNCESTSQLDQATQVTETLGMTHCCINPIIYAFVGEKFRSLFHIALGCRIAPLQKPVCGGPGVRPGKNVKVTTQGLLDGRGKGKSIGRAPEASLQDKEGA

SEQ ID NO: 3080 - protein, 352 aa, Homo sapiens [sequence omitted]

SEQ ID NO: 3081 - protein, 1037 aa, Homo sapiens
MSPPLCPLLLLAVGLRLAGTLNPSDPNTCSFWESFTTTTKESHSRPFSLLPSEPCERPWEGPHTCPQPTVVYRTVYRQVVKTDHRQRLQCCHGFYESRGFCVPLCAQECVHGRCVAPNQCQCVPGWRGDDCSSECAPGMWGPQCDKPCSCGNNSSCDPKSGVCSCPSGLQPPNCLQPCTPGYYGPACQFRCQCHGAPCDPQTGACFCPAERTGPSCDVSCSQGTSGFFCPSTHSCQNGGVFQTPQGSCSCPPGWMGTICSLPCPEGFHGPNCSQECRCHNGGLCDRFTGQCRCAPGYTGDRCREECPVGRFGQDCAETCDCAPDARCFPANGACLCEHGFTGDRCTDRLCPDGFYGLSCQAPCTCDREHSLSCHPMNGECSCLPGWAGLHCNESCPQDTHGPGCQEHCLCLHGGVCQATSGLCQCAPGYTGPHCASLCPPDTYGVNCSARCSCENAIACSPIDGECVCKEGWQRGNCSVPCPPGTWGFSCNASCQCAHEAVCSPQTGACTCTPGWHGAHCQLPCPKGQFGEGCASRCDCDHSDGCDPVHGRCQCQAGWMGARCHLSCPEGLWGVNCSNTCTCKNGGTCLPENGNCVCAPGFRGPSCQRSCQPGRYGKRCVPCKCANHSFCHPSNGTCYCLAGWTGPDCSQPCPPGHWGENCAQTCQCHHGGTCHPQDGSCICPLGWTGHHCLEGCPLGTFGANCSQPCQCGPGEKCHPETGACVCPPGHSGAPCRIGIQEPFTVMPTTPVAYNSLGAVIGIAVLGSLVVALVALFIGYRHWQKGKEHHHLAVAYSSGRLDGSEYVMPDVPPSYSHYYSNPSYHTLSQCSPNPPPPNKVPGPLFASLQNPERPGGAQGHDNHTTLPADWKHRREPPPGPLDRGSSRLDRSYSYSYSNGPGPFYNKGLISEEELGASVASLSSENPYATIRDLPSLPGGPRESSYMEMKGPPSGSPPRQPPQFWDSQRRRQPQPQRDSGTYEQPSPLIHDRDSVGSQPPLPPGLPPGHYDSPKNSHIPGHYDLPPVRHPPSPPLRRQDR

SEQ ID NO: 3082 - protein, 579 aa, Homo sapiens
MSALRPLLLLLLPLCPGPGPGPGSEAKVTRSCAETRQVLGARGYSLNLIPPALISGEHLRVCPQEYTCCSSETEQRLIRETEATFRGLVEDSGSFLVHTLAARHRKFDEFFLEMLSVAQHSLTQLFSHSYGRLYAQHALIFNGLFSRLRDFYGESGEGLDDTLADFWAQLLERVFPLLHPQYSFPPDYLLCLSRLASSTDGSLQPFGDSPRRLRLQITRTLVAARAFVQGLETGRNVVSEALKVPVSEGCSQALMRLIGCPLCRGVPSLMPCQGFCLNVVRGCLSSRGLEPDWGNYLDGLLILADKLQGPFSFELTAESIGVKISEGLMYLQENSAKVSAQVFQECGPPDPVPARNRRAPPPREEAGRLWSMVTEEERPTTAAGTNLHRLVWELRERLARMRGFWARLSLTVCGDSRMAADASLEAAPCWTGAGRGRYLPPVVGGSPAEQVNNPELKVDASGPDVPTRRRRLQLRAATARMKTAALGHDLDGQDADEDASGSGGGQQYADDWMAGAVAPPARPPRPPYPPRRDGSGGKGGGGSARYNQGRSRSGGASIGFHTQTILILSLSALALLGPR

SEQ ID NO: 3083 - protein, 802 aa, Homo sapiens
MRLLLALLGVLLSVPGPPVLSLEASEEVELEPCLAPSLEQQEQELTVALGQPVRLCCGRAERGGHWYKEGSRLAPAGRVRGWRGRLEIASFLPEDAGRYLCLARGSMIVLQNLTLITGDSLTSSNDDEDPKSHRDPSNRHSYPQQAPYWTHPQRMEKKLHAVPAGNTVKFRCPAAGNPTPTIRWLKDGQAFHGENRIGGIRLRHQHWSLVMESVVPSDRGTYTCLVENAVGSIRYNYLLDVLERSPHRPILQAGLPANTTAVVGSDVELLCKVYSDAQPHIQWLKHIVINGSSFGADGFPYVQVLKTADINSSEVEVLYLRNVSAEDAGEYTCLAGNSIGLSYQSAWLTVLPEEDPTWTAAAPEARYTDIILYASGSLALAVLLLLAGLYRGQALHGRHPRPPATVQKLSRFPLARQFSLESGSSGKSSSSLVRGVRLSSSGPALLAGLVSLDLPLDPLWEFPRDRLVLGKPLGEGCFGQVVRAEAFGMDPARPDQASTVAVKMLKDNASDKDLADLVSEMEVMKLIGRHKNIINLLGVCTQEGPLYVIVECAAKGNLREFLRARRPPGPDLSPDGPRSSEGPLSFPVLVSCAYQVARGMQYLESRKCIHRDLAARNVLVTEDNVMKIADFGLARGVHHIDYYKKTSNGRLPVKWMAPEALFDRVYTHQSDVWSFGILLWEIFTLGGSPYPGIPVEELFSLLREGHRMDRPPHCPPELYGLMRECWHAAPSQRPTFKQLVEALDKVLLAVSEEYLDLRLTFGPYSPSGGDASSTCSSSDSVFSHDPLPLGSSSFPFGSGVQT

SEQ ID NO: 3084 - protein, 503 aa, Homo sapiens
MALRAKAEVCMAVPWLSLQRAQALGTRAARVPRTVLPFEAMPRRPGNRWLRLLQIWREQGYEDLHLEVHQTFQELGPIFRYDLGGAGMVCVMLPEDVEKLQQVDSLHPHRMSLEPWVAYRQHRGHKCGVFLLNGPEWRFNRLRLNPEVLSPNAVQRFLPMVDAVARDFSQALKKKVLQNARGSLTLDVQPSIFHYTIEASNLALFGERLGLVGHSPSSASLNFLHALEVMFKSTVQLMFMPRSLSRWTSPKVWKEHFEAWDCIFQYGDNCIQKIYQELAFSRPQQYTSIVAELLLNAELSPDAIKANSMELTAGSVDTTVFPLLMTLFELARNPNVQQALRQESLAAAASISEHPQKATTELPLLRAALKETLRLYPVGLFLERVASSDLVLQNYHIPAGTLVRVFLYSLGRNPALFPRPERYNPQRWLDIRGSGRNFYHVPFGFGMRQCLGRRLAEAEMLLLLHHVLKHLQVETLTQEDIKMVYSFILRPSMFPLLTFRAIN

SEQ ID NO: 3085 - protein, 923 aa, Homo sapiens
MDSIGSSGLRQGEETLSCSEEGLPGPSDSSELVQECLQQFKVTRAQLQQIQASLLGSMEQALRGQASPAPAVRMLPTYVGSTPHGTEQGDFVVLELGATGASLRVLWVTLTGIEGHRVEPRSQEFVIPQEVMLGAGQQLFDFAAHCLSEFLDAQPVNKQGLQLGFSFSFPCHQTGLDRSTLISWTKGFRCSGVEGQDVVQLLRDAIRRQGAYNIDVVAVVNDTVGTMMGCEPGVRPCEVGLVVDTGTNACYMEEARHVAVLDEDRGRVCVSVEWGSFSDDGALGPVLTTFDHTLDHESLNPGAQRFEKMIGGLYLGELVRLVLAHLARCGVLFGGCTSPALLSQGSILLEHVAEMEDPSTGAARVHAILQDLGLSPGASDVELVQHVCAAVCTRAAQLCAAALAAVLSCLQHSREQQTLQVAVATGGRVCERHPRFCSVLQGTVMLLAPECDVSLIPSVDGGGRGVAMVTAVAARLAAHRRLLEETLAPFRLNHDQLAAVQAQMRKAMAKGLRGEASSLRMLPTFVRATPDGSERGDFLALDLGGTNFRVLLVRVTTGVQITSEIYSIPETVAQGSGQQLFDHIVDCIVDFQQKQGLSGQSLPLGFTFSFPCRQLGLDQGILLNWTKGFKASDCEGQDVVSLLREAITRRQAVELNVVAIVNDTVGTMMSCGYEDPRCEIGLIVGTGTNACYMEELRNVAGVPGDSGRMCINMEWGAFGDDGSLAMLSTRFDASVDQASINPGKQRFEKMISGMYLGEIVRHILLHLTSLGVLFRGQQIQRLQTRDIFKTKFLSEIESDSLALRQVRAILEDLGLPLTSDDALMVLEVCQAVSQRAAQLCGAGVAAVVEKIRENRGLEELAVSVGVDGTLYKLHPRFSSLVAATVRELAPRCVVTFLQSEDGSGKGAALVTAVACRLAQLTRV

SEQ ID NO: 3086 - protein, 493 aa, Homo sapiens
MHTLVFLSTRQVLQCQPAACQALPLLPRELFPLLFKVAFMDKKTVVLRELVHTWPFPLLSFQQLLQECAHCSRALLQERPSTESMQAVILGLTARLHTSEPGASTQPLCRKHALRVLDMTGLLDDGVEQDPGTMSMWDCTAAVARTCIAQQQGGAAEPGPAPIPVEVRVDLRVNRASYAFLREALRSSVGSPLRLCCRDLRAEDLPMRNTVALLQLLDAGCLRRVDLRFNNLGLRGLSVIIPHVARFQHLASLRLHYVHGDSRQPSVDGEDNFRYFLAQMGRFTCLRELSMGSSLLSGRLDQLLSTLQSPLESLELAFCALLPEDLRFLARSPHAAHLKKLDLSGNDLSGSQLAPFQGLLQASAATLLHLELTECQLADTQLLATLPILTQCASLRYLGLYGNPLSMAGLKELLRDSVAQAELRTVVHPFPVDCYEGLPWPPPASVLLEASINEEKFARVEAELHQLLLASGRAHVLWTTDIYGRLAADYFSL

SEQ ID NO: 3087 - protein, 1505 aa, Homo sapiens
MLCVAGARLKRELDATATVLANRQDESEQSRKRLIEQSREFKKNTPEDLRKQVAPLLKSFQGEIDALSKRSKEAEAAFLNVYKRLIDVPDPVPALDLGQQLQLKVQRLHDIETENQKLRETLEEYNKEFAEVKNQEVTIKALKEKIREYEQTLKNQAETIALEKEQKLQNDFAEKERKLQETQMSTTSKLEEAEHKVQSLQTALEKTRTELFDLKTKYDEETTAKADEIEMIMTDLERANQRAEVAQREAETLREQLSSANHSLQLASQIQKAPDVEQAIEVLTRSSLEVELAAKEREIAQLVEDVQRLQASLTKLRENSASQISQLEQQLSAKNSTLKQLEEKLKGQADYEEVKKELNILKSMEFAPSEGAGTQDAAKPLEVLLLEKNRSLQSENAALRISNSDLSGSARRKGKDQPESRRPGSLPAPPPSQLPRNPGEQASNTNGTHQFSPAGLSQDFFSSSLASPSLPLASTGKFALNSLLQRQLMQSFYSKAMQEAGSTSMIFSTGPYSTNSISSQSPLQQSPDVNGMAPSPSQSESAGSVSEGEEMDTAEIARQVKEQLIKHNIGQRIFGHYVLGLSQGSVSEILARPKPWNKLTVRGKEPFHKMKQFLSDEQNILALRSIQGRQRENPGQSLNRLFQEVPKRRNGSEGNITTRIRASETGSDEAIKSILEQAKRELQVQKTAEPAQPSSASGSGNSDDAIRSILQQARREMEAQQAALDPALKQAPLSQSDITILTPKLLSTSPMPTVSSYPPLAISLKKPSAAPEAGASALPNPPALKKEAQDAPGLDPQGAADCAQGVLRQVKNEVGRSGAWKDHWWSAVQPERRNAASSEEAKAEETGGGKEKGSGGSGGGSQPRAERSQLQGPSSSEYWKEWPSAESPYSQSSELSLTGASRSETPQNSPLPSSPIVPMSKPTKPSVPPLTPEQYEVYMYQEVDTIELTRQVKEKLAKNGICQRIFGEKVLGLSQGSVSDMLSRPKPWSKLTQKGREPFIRMQLWLNGELGQGVLPVQGQQQGPVLHSVTSLQDPLQQGCVSSESTPKTSASCSPAPESPMSSSESVKSLTELVQQPCPPIEASKDSKPPEPSDPPASDSQPTTPLPLSGHSALSIQELVAMSPELDTYGITKRVKEVLTDNNLGQRLFGETILGLTQGSVSDLLARPKPWHKLSLKGREPFVRMQLWLNDPNNVEKLMDMKRMEKKAYMKRRHSSVSDSQPCEPPSVGTEYSQGASPQPQHQLKKPRVVLAPEEKEALKRAYQQKPYPSPKTIEDLATQLNLKTSTVINWFHNYRSRIRRELFIEEIQAGSQGQAGASDSPSARSGRAAPSSEGDSCDGVEATEGPGSADTEEPKSQGEAEREEVPRPAEQTEPPPSGTPGPDDARDDDHEGGPVEGPGPLPSPASATATAAPAAPEDAATSAAAAPGEGPAAPSSAPPPSNSSSSSAPRRPSSLQSLFGLPEAAGARDSRDNPLRKKKAANLNSIIHRLEKAASREEPIEWEF

SEQ ID NO: 3088 - protein, 678 aa, Homo sapiens
MAANVGSMFQYWKRFDLQQLQRELDATATVLANRQDESEQSRKRLIEQSREFKKNTPEDLRKQVAPLLKSFQGEIDALSKRSKEAEAAFLNVYKRLIDVPDPVPALDLGQQLQLKVQRLHDIETENQKLRETLEEYNKEFAEVKNQEVTIKALKEKIREYEQTLKNQAETIALEKEQKLQNDFAEKERKLQETQMSTTSKLEEAEHKVQSLQTALEKTRTELFDLKTKYDEETTAKADEIEMIMTDLERANQRAEVAQREAETLREQLSSANHSLQLASQIQKAPDVEQAIEVLTRSSLEVELAAKEREIAQLVEDVQRLQASLTKLRENSASQISQLEQQLSAKNSTLKQLEEKLKGQADYEEVKKELNILKSMEFAPSEGAGTQDAAKPLEVLLLEKNRSLQSENAALRISNSDLSGRCAELQVRITEAVATATEQRELIARLEQDLSIIQSIQRPDAEGAAEHRLEKIPEPIKEATALFYGPAAPASGALPEGQVDSLLSIISSQRERFRARNQELEAENRLAQHTLQALQSELDSLRADNIKLFEKIKFLQSYPGRGSGSDDTELRYSSQYEERLDPFSSFSKRERQRKYLSLSPWDKATLSMGRLVLSNKMARTIGFFYTLFLHCLVFLVLYKLAWSESMERDCATFCAKKFADHLHKFHENDNGAAAGDLWQ

SEQ ID NO: 3089 - protein, 528 aa, Homo sapiens
MAEHLELLAEMPMVGRMSTQERLKHAQKRRAQQVKMWAQAEKEAQGKKGPGERPRKEAASQGLLKQVLFPPSVVLLEAAARNDLEEVRQFLGSGVSPDLANEDGLTALHQCCIDDFREMVQQLLEAGANINACDSECWTPLHAAATCGHLHLVELLIASGANLLAVNTDGNMPYDLCDDEQTLDCLETAMADRGITQDSIEAARAVPELRMLDDIRSRLQAGADLHAPLDHGATLLHVAAANGFSEAAALLLEHRASLSAKDQDGWEPLHAAAYWGQVPLVELLVAHGADLNAKSLMDETPLDVCGDEEVRAKLLELKHKHDALLRAQSRQRSLLRRRTSSAGSRGKVVRRVSLTQRTDLYRKQHAQEAIVWQQPPPTSPEPPEDNDDRQTGAELRPPPPEEDNPEVVRPHNGRVGGSPVRHLYSKRLDRSVSYQLSPLDSTTPHTLVHDKAHHTLADLKRQRAAAKLQRPPPEGPESPETAEPGLPGDTVTPQPDCGFRAGGDPPLLKLTAPAVEAPVERRPCCLLM

SEQ ID NO: 3090 - protein, 671 aa, Homo sapiens
MAATFQLPGHQEMPLTFQDVAVYFSQAEGRQLGPQQRALYRDVMLENYGNVASLGFPVPKPELISQLEQGKELWVLNLLGAEEPDILKSCQKDSEVGTKKELSILNQKFSEEVKTPEFVSRRLLRDNAQAAEFREAWGREGKLKERVGNSAGQSLNKPNIHKRVLTEATVGRERSLGERTQECSAFDRNLNLDQNVVRLQRNKTGERVFKCDICSKTFKYNSDLSRHQRSHTGEKPYECGRCGRAFTHSSNLVLHHHIHTGNKPFKCDECGKTFGLNSHLRLHRRIHTGEKPFGCGECGKAFSRSSTLIQHRIIHTGEKPYKCNECGRGFSQSPQLTQHQRIHTGEKPHECSHCGKAFSRSSSLIQHERIHTGEKPHKCNQCGKAFSQSSSLFLHHRVHTGEKPYVCNECGRAFGFNSHLTEHVRIHTGEKPYVCNECGKAFRRSSTLVQHRRVHTGEKPYQCVECGKAFSQSSQLTLHQRVHTGEKPYDCGDCGKAFSRRSTLIQHQKVHSGETRKCRKHGPAFVHGSSLTADGQIPTGEKHGRAFNHGANLILRWTVHTGEKSFGCNEYGKAFSPTSRPTEDQIMHAGEKPYKCQECGNAFSGKSTLIQHQVTHTGQKPCHCSVYGKAFSQSSQLTPPQQTRVGEKPALNDGSKRYFIHIKKIFQERHF

SEQ ID NO: 3091 - protein, 634 aa, Homo sapiens
MAQGVLWILLGLLLWSDPGTASLPLLMDSVIQALAELEQKVPAAKTRHTASAWLMSAPNSGPHNRLYHFLLGAWSLNATELDPCPLSPELLGLTKEVARHDVREGKEYGVVLAPDGSTVAVEPLLAGLEAGLQGRRVINLPLDSMAAPWETGDTFPDVVAIAPDVRATSSPGLRDGSPDVTTADIGANTPDATKGCPDVQASLPDAKAKSPPTMVDSLLAVTLAGNLGLTFLRGSQTQSHPDLGTEGCWDQLSAPRTFTLLDPKASLLTMAFLNGALDGVILGDYLSRTPEPRPSLSHLLSQYYGAGVARDPGFRSNFRRQNGAALTSASILAQQVWGTLVLLQRLEPVHLQLQCMSQEQLAQVAANATKEFTEAFLGCPAIHPRCRWGAAPYRGRPKLLQLPLGFLYVHHTYVPAPPCTDFTRCAANMRSMQRYHQDTQGWGDIGYSFVVGSDGYVYEGRGWHWVGAHTLGHNSRGFGVAIVGNYTAALPTEAALRTVRDTLPSCAVRAGLLRPDYALLGHRQLVRTDCPGDALFDLLRTWPHFTAVSLRSLHYTARRPSVYTSSTRPLPPACNSCARTASARPPTSRRHVYSGNLGPAFAGHSAGNIPDPVTSAYAASAQPQTQPACPFPSS

SEQ ID NO: 3092 - protein, 323 aa, Homo sapiens
MSRPRMRLVVTADDFGYCPRRDEGIVEAFLAGAVTSVSLLVNGAATESAAELARRHSIPTGLHANLSEGRPVGPARRGASSLLGPEGFFLGKMGFREAVAAGDVDLPQVREELEAQLSCFRELLGRAPTHADGHQHVHVLPGVCQVFAEALQAYGVRFTRLPLERGVGGCTWLEAPARAFACAVERDARAAVGPFSRHGLRWTDAFVGLSTCGRHMSAHRVSGALARVLEGTLAGHTLTAELMAHPGYPSVPPTGGCGEGPDAFSCSWERLHELRVLTAPTLRAQLAQDGVQLCALDDLDSKRPGEEVPCEPTLEPFLEPSLL

SEQ ID NO: 3093 - protein, 769 aa, Homo sapiens
MPANWTSPQKSSALAPEDHGSSYEGSVSFRDVAIDFSREEWRHLDPSQRNLYRDVMLETYSHLLSVGYQVPEAEVVMLEQGKEPWALQGERPRQSCPGEKLWDHNQCRKILSYKQVSSQPQKMYPGEKAYECAKFEKIFTQKSQLKVHLKVLAGEKLYVCIECGKAFVQKPEFIIHQKTHMREKPFKCNECGKSFFQVSSLFRHQRIHTGEKLYECSQCGKGFSYNSDLSIHEKIHTGERHHECTDCGKAFTQKSTLKMHQKIHTGERSYICIECGQAFIQKTHLIAHRRIHTGEKPYECSNCGKSFISKSQLQVHQRVHTRVKPYICTEYGKVFSNNSNLVTHKKVQSREKSSICTECGKAFTYRSELIIHQRIHTGEKPYECSDCGKAFTQKSALTVHQRIHTGEKSYICMKCGLAFIQKAHLIAHQIIHTGEKPHKCGHCGKLFTSKSQLHVHKRIHTGEKPYMCNKCGKAFTNRSNLITHQKTHTGEKSYICSKCGKAFTQRSDLITHQRIHTGEKPYECNTCGKAFTQKSHLNIHQKIHTGERQYECHECGKAFNQKSILIVHQKIHTGEKPYVCTECGRAFIRKSNFITHQRIHTGEKPYECSDCGKSFTSKSQLLVHQPVHTGEKPYVCAECGKAFSGRSNLSKHQKTHTGEKPYICSECGKTFRQKSELITHHRIHTGEKPYECSDCGKSFTKKSQLQVHQRIHTGEKPYVCAECGKAFTDRSNLNKHQTTHTGDKPYKCGICGKGFVQKSVFSVHQSSHA

SEQ ID NO: 3094 - protein, 274 aa, Homo sapiens
MPKYCRAPNCSNTAGRLGADNRPVSFYKFPLKDGPRLQAWLQHMGCEHWVPSCHQHLCSEHFTPSCFQWRWGVRYLRPDAVPSIFSRGPPAKSQRRTRSTQKPVSPPPPLQKNTPLPQSPAIPVSGPVRLVVLGPTSGSPKTVATMLLTPLAPAPTPERSQPEVPAQQAQTGLGPVLGALQRRVRRLQRCQERHQAQLQALERLAQQLHGESLLARARRGLQRLTTAQTLGPEESQTFTIICGGPDIAMVLAQDPAPATVDAKPELLDTRIPSA

SEQ ID NO: 3095 - protein, 147 aa, Homo sapiens
MVHFTAEEKAAVTSLWSKMNVEEAGGEALGRLLVVYPWTQRFFDSFGNLSSPSAILGNPKVKAHGKKVLTSFGDAIKNMDNLKPAFAKLSELHCDKLHVDPENFKLLGNVMVIILATHFGKEFTPEVQAAWQKLVSAVAIALAHKYH

SEQ ID NO: 3096 - protein, 141 aa, Homo sapiens
MVHLTPEEKTAVNALWGKVNVDAVGGEALGRLLVVYPWTQRFFESFGDLSSPDAVMGNPKVKAHGKKVLGAFSDGLAHLDNLKGTFSQLSELHCDKLHVDPENFRVCKKVPEALQIGSTCLFYKEYMGKEKSKGTVQGING

SEQ ID NO: 3097 - protein, 550 aa, Homo sapiens
MPLQGSVSFKDVTVDFTQEEWQQLDPAQKALYRDVMLENYCHFVSVGFHMAKPDMIRKLEQGEELWTQRIFPSYSYLEEDGKTEDVLVKFKEYQDRHSRPLIFINHKKLIKERSNIYGKTFTLGKNRISKTILCEYKPDGKVLKNISELVIRNISPIKEKFGDSTGWEKSLLNTKHEKIHPAVNLHKQTERVLSGKQELIQHQKVQAPEQPFDHNECEKSFLMKGMLFTHTRAHRGERTFEYNKDGIAFIEKSSLSVHPSNLMEKKPSAYNKYGKFLCRKPVFIMPQRPQTEEKPFHCPYCGNNFRRKSYLIEHQRIHTGEKPYVCNQCGKAFRQKTALTLHEKTHIEGKPFICIDCGKSFRQKATLTRHHKTHTGEKAYECPQCGSAFRKKSYLIDHQRTHTGEKPYQCNECGKAFIQKTTLTVHQRTHTGEKPYICNECGKSFCQKTTLTLHQRIHTGEKPYICNECGKSFRQKAILTVHHRIHTGEKSNGCPQCGKAFSRKSNLIRHQKTHTGEKPYECKQCGKFFSCKSNLIVHQKTHKVETTGIQ

SEQ ID NO: 3098 - protein, 576 aa, Homo sapiens
MNRKDSKRKSHQECTGKIGGRGRPRQVRRHKTCPSPREISKVMASMNLGLLSEGGCSEDELLEKCIQSFDSAGSLCHEDHMLNMVLAMHSWVLPSADLAARLLTSYQKATGDTQELRRLQICHLVRYWLMRHPEVMHQDPQLEEVIGRFWATVAREGNSAQRRLGDSSDLLSPGGPGPPLPMSSPGLGKKRKVSLLFDHLETGELAQHLTYLEFRSFQAITALLELTELLASHNNYARYRRTWAGCAGFRLPVLGVHLKDLVSLHEAQPDRLPDGRLHLPKLNNLYLRLQELVALQGQHPPCSANEDLLHLLTLSLDLFYTEDEIYELSYAREPRCPKSLPPSPFNAPLVVEWAPGVTPKPDRVTLGRHVEQLVESVFKNYDPEGRGTISQEDFERLSGNFPFACHGLHPPPRQGRGSFSREELTGYLLRASAICSKLGLAFLHTFHEVTFRKPTFCDSCSGFLWGVTKQGYRCRECGLCCHKHCRDQVKVECKKRPGAKGDAGPPGAPVPSTPAPHASCGSEENHSYTLSLEPETGCQLRHAWTQTESPHPSWETDTVPCPVMDPPSTASSKLDS

SEQ ID NO: 3099 - protein, 1233 aa, Homo sapiens
MGGALGPALLLTSLFGAWAGLGPGQGEQGMTVAVVFSSSGPPQAQFRARLTPQSFLDLPLEIQPLTVGVNTTNPSSLLTQICGLLGAAHVHGIVFEDNVDTEAVAQILDFISSQTHVPILSISGGSAVVLTPKEPGSAFLQLGVSLEQQLQVLFKVLEEYDWSAFAVITSLHPGHALFLEGVRAVADASHVSWRLLDVVTLELGPGGPRARTQRLLRQLDAPVFVAYCSREEAEVLFAEAAQAGLVGPGHVWLVPNLALGSTDAPPATFPVGLISVVTESWRLSLRQKVRDGVAILALGAHSYWRQHGTLPAPAGDCRVHPGPVSPAREAFYRHLLNVTWEGRDFSFSPGGYLVQPTMVVIALNRHRLWEMVGRWEHGVLYMKYPVWPRYSASLQPVVDSRHLTVATLEERPFVIVESPDPGTGGCVPNTVPCRRQSNHTFSSGDVAPYTKLCCKGFCIDILKKLARVVKFSYDLYLVTNGKHGKRVRGVWNGMIGEVYYKRADMAIGSLTINEERSEIVDFSVPFVETGISVMVARSNGTVSPSAFLEPYSPAVWVMMFVMCLTVVAITVFMFEYFSPVSYNQNLTRGKKSGGPAFTIGKSVWLLWALVFNNSVPIENPRGTTSKIMVLVWAFFAVIFLASYTANLAAFMIQEQYIDTVSGLSDKKFQRPQDQYPPFRFGTVPNGSTERNIRSNYRDMHTHMVKFNQRSVEDALTSLKMGKLDAFIYDAAVLNYMAGKDEGCKLVTIGSGKVFATTGYGIAMQKDSHWKRAIDLALLQFLGDGETQKLETVWLSGICQNEKNEVMSSKLDIDNMAGVFYMLLVAMGLALLVFAWEHLVYWKLRHSVPNSSQLDFLLAFSRGIYSCFSGVQSLASPPRQASPDLTASSAQASVLKMLQAARDMVTTAGVSSSLDRATRTIENWGGGRRAPPPSPCPTPRSGPSPCLPTPDPPPEPSPTGWGPPDGGRAALVRRAPQPPGRPPTPGPPLSDVSRVSRRPAWEARWPVRTGHCGRHLSASERPLSPARCHYSSFPRADRSGRPFLPLFPELEDLPLLGPEQLARREALLHAAWARGSRPRHASLPSSVAEAFARPSSLPAGCTGPACARPDGHSACRRLAQAQSMCLPIYREACQEGEQAGAPAWQHRQHVCLHAHAHLPFCWGAVCPHLPPCASHGSWLSGAWGPLGHRGRTLGLGTGYRDSGGLDEISRVARGTQGFPGPCTWRRISSLESEV

SEQ ID NO: 3100 - protein, 173 aa, Homo sapiens
MQFPMGPACIFLRKGIAEKQRERPLGQDEIEELREAFLEFDKDRDGFISCKDLGNLMRTMGYMPTEMELIELGQQIRMNLGGRVDFDDFVELMTPKLLAETAGMIGVQEMRDAFKEFDTNGDGEITLVELQQAMQRLLGERLTPREISEVVREADVNGDGTVDFEEFVKMMSR

SEQ ID NO: 3101 - protein, 459 aa, Homo sapiens
MTVELWLRLRGKGLAMLHVTRGVWGSRVRVWPLLPALLGPPRALSSLAAKMGEYRKMWNPREPRDWAQQYRERFIPFSKEQLLRLLIQEFHSSPAEKAALEAFSAHVDFCTLFHYHQILARLQALYDPINPDRETLDQPSLTDPQRLSNEQEVLRALEPLLAQANFSPLSEDTLAYALVVHHPQDEVQVTVNLDQYVYIHFWALGQRVGQMPLKSSVGSRRGFFTKLPPAERRYFKRVVLAARTKRGHLVLKSFKDTPLEGLEQLLPELKVRTPTLQRALLNLMLVVSGVAIFVNVGMVVLTDLKVATSLLLLLFAIFMGLRASKMFGQRRSAQALELAHMLYYRSTSNNSELLSALALRAQDEHTKEALLAHSFLARRPGGTQGSPEETSRWLRSEVENWLLAKSGCEVTFNGTRALAHLQALTPSMGLYPPPGFPKLDPVAPITSEPPQATPSSNIS

SEQ ID NO: 3102 - protein, 218 aa, Homo sapiens
MDGSGEQPRGGGPTSSEQIMKTGALLLQGFIQDRAGRMGGEAPELALDPVPQDASTKKLSECLKRIGDELDSNMELQRMIAAVDTDSPREVFFRVAADMFSDGNFNWGRVVALFYFASKLVLKALCTKVPELIRTIMGWTLDFLRERLLGWIQDQGGWVRLLKPPHPHHRALTTAPAPPSLPPATPLGPWAFWSRSQWCPLPIFRSSDVVYNAFSLRV

SEQ ID NO: 3103 - protein, 483 aa, Homo sapiens
MSIRVTQKSYKVSTSGPRAFSSRSYTSGPGSRISSSSFSRVGSSNFRGGLGGGYGGASGMGGITAVTVNQSLLSPLVLEVDPNIQAVRTQEKEQIKTLNNKFASFIDKVRFLEQQNKMLETKWSLLQQQKTARSNMDNMFESYINNLRRQLETLGQEKLKLEAELGNMQGLVEDFKNKYEDEINKRTEMENEFVLIKKDVDEAYMNKVELESRLEGLTDEINFLRQLYEEEIRELQSQISDTSVVLSMDNSRSLDMDSIIAEVKAQYEDIANRSRAEAESMYQIKYEELQSLAGKHGDDLRRTKTEISEMNRNISRLQAEIEGLKGQRASLEAAIADAEQRGELAIKDANAKLSELEAALQRAKQDMARQLREYQELMNVKLALDIEIATYRKLLEGEESRLESGMQNMSIHTKTTSGYAGGLSSAYGGLTSPGLSYSLGSSFGSGAGSSSFSRTSSSRAVVVKKIETRDGKLVSESSDVLPK

SEQ ID NO: 3104 - protein, 787 aa, Homo sapiens
MAVWIQAQQLQGEALHQMQALYGQHFPIEVRHYLSQWIESQAWDSVDLDNPQENIKATQLLEGLVQELQKKAEHQVGEDGFLLKIKLGHYATQLQNTYDRCPMELVRCIRHILYNEQRLVREANNGSSPAGSLADAMSQKHLQINQTFEELRLVTQDTENELKKLQQTQEYFIIQYQESLRIQAQFGPLAQLSPQERLSRETALQQKQVSLEAWLQREAQTLQQYRVELAEKHQKTLQLLRKQQTIILDDELIQWKRRQQLAGNGGPPEGSLDVLQSWCEKLAEIIWQNRQQIRRAEHLCQQLPIPGPVEEMLAEVNATITDIISALVTSTFIIEKQPPQVLKTQTKFAATVRLLVGGKLNVHMNPPQVKATIISEQQAKSLLKNENTRNDYSGEILNNCCVMEYHQATGTLSAHFRNMSLKRIKRSDRRGAESVTEEKFTILFESQFSVGGNELVFQVKTLSLPVVVIVHGSQDNNATATVLWDNAFAEPGRVPFAVPDKVLWPQLCEALNMKFKAEVQSNRGLTKENLVFLAQKLFNNSSSHLEDYSGLSVSWSQFNRENLPGRNYTFWQWFDGVMEVLKKHLKPHWNDGAILGFVNKQQAHDLLINKPDGTFLLRFSDSEIGGITIAWKFDSQERMFWNLMPFTTRDFSIRSLADRLGDLNYLIYVFPDRPKDEVYSKYYTPVPCESATAKAVDGYVKPQIKQVVPEFVNASADAGGGSATYMDQAPSPAVCPQAHYNMYPQNPDSVLDTDGDFDLEDTMDVARRVEELLGRPMDSQWIPHAQS

SEQ ID NO: 3105 - protein, 790 aa, Homo sapiens
MPLPGGLWWLLCCRRGFTLLHRDYGDGELSGDGDEDEDEETFELRTPSPAGGGRGPLEVTLTQPVRSGPVSNRLQSWEETWSLIPEKGLPEDDPDIVVKGWLYREPRGGGARPWLPPRRAWFVLTRDSLDQFSSSGKGARRLGSLVLTSLCSVTGPERRRKETGLWSVTVSGRKHSVRLCSPRQAEAERWGVALREVIASKAPLETPTQLLLRDIQESCGDPEAVALIYLRNPILRHTSGALYAPLLPLPYGVSAPGPGYAPLREEAVRLFLALQALEGARRPGPLMQGVLQTCRDLPALRDELFLQLAKQTSGPAGPPGLPATQDPAALRYWQLLTCMSCTFRPGGAVRGHLLGHLERTEQALPDSELAEYARFIRKALGRTRGRELVPSLAEISALSQRQELLCTVHCPGAGACAVAIDSHTTAGEVARELVGRLGLARSRNAFALYEQRGAQERALAGGTLVADVLTSLAAEEAGLEDSPDSGWRLCLRLHGPLHPEGLSPDGHELPFLFEQAHALLLRGRPPPPDDTLRALAALRLQSLQRDFSPRVPLPRLDRLLPPPAPPREDPPRPTPRPPPSAALLAGALWSPGLAKRRAERARRGGAGRTAGSIAREGGGGAGTAAAVLGGWKRLRGMGRAEAMAAYLALAAQCPGFGAARYDVLELSTEPGRGAPQKLCLGLGAKAMSLSRPGETEPIHSVSYGHVAACQLMGPHTLALRVGESQLLLQSPQVEEIMQLVNAYLANPSPERPCSSSSPPCQDLPDTSPPSQRPGLDEPQGQSGCLGQLQD

SEQ ID NO: 3106 - protein, 802 aa, Homo sapiens
MAATRAGPRAREIFTSLEYGPVPESHACALAWLDTQDRCLGHYVNGKWLKPEHRNSVPCQDPITGENLASCLQAQAEDVAAAVEAARMAFKGWSAHPGVVRAQHLTRLAEVIQKHQRLLWTLESLVTGRAVREVRDGDVQLAQQLLHYHAIQASTQEEALAGWEPMGVIGLILPPTFSFLEMMWRICPALAVGCTVVALVPPASPAPLLLAQLAGELGPFPGILNVLSGPASLVPILASQPGIRKVAFCGAPEEGRALRRSLAGECAELGLALGTESLLLLTDTADVDSAVEGVVDAAWSDRGPGGLRLLIQESVWDEAMRRLQERMGRLRSGRGLDGAVDMGARGAAACDLVQRFVREAQSQGAQVFQAGDVPSERPFYPPTLVSNLPPASPCAQVEVPWPVVVASPFRTAKEALLVANGTPRGGSASVWSERLGQALELGYGLQVGTVWINAHGLRDPSVPTGGCKESGCSWHGGPDGLYEYLRPSGTPARLSCLSKNLNYDTFGLAVPSTLPAGPEIGPSPAPPYGLFVGGRFQAPGARSSRPIRDSSGNLHGYVAEGGAKDIRGAVEAAHQAFPGWAGQSPGARAALLWALAAALERRKSTLASRLERQGAELKAAEAEVELSARRLRAWGARVQAQGHTLQVAGLRGPVLRLREPLGVLAVVCPDEWPLLAFVSLLAPALAYGNTVVMVPSAACPLLALEVCQDMATVFPAGLANVVTGDRDHLTRCLALHQDVQAMWYFGSAQGSQFVEWASAGNLKPVWASRGCPRAWDQEAEGAGPELGLRVARTKALWLPMGD

SEQ ID NO: 3107 - protein, 267 aa, Homo sapiens
MASLLKVDQEVKLKVDSFRERITSEAEDLVANFFPKKLLELDSFLKEPILNIHDLTQIHSDMNLPVPDPILLTNSHDGLDGPTYKKRRLDECEEAFQGTKVFVMPNGMLKSNQQLVDIIEKVKPEIRLLIEKCNTPSGKGPHICFDLQVKMWVQLLIPRIEDGNNFGVSIQEETVAELRTVESEAASYLDQISRYYITRAKLVSKIAKYPHVEDYRRTVTEIDEKEYISLRLIISELRNQYVTLHDMILKNIEKIKRPRSSNAETLY

SEQ ID NO: 3108 - protein, 1127 aa, Homo sapiens
MSLTSAYQHKLAEKLTILNDRGQGVLIRMYNIKKTCSDPKSKPPFLLEKSMEPSLKYINKKFPNIDVRNSTQHLGPVHREKAEIIRFLTNYYQSFVDVMEFRDHVYELLNTIDACQCHFDINLNFDFTRSYLDLIVTYTSVILLLSRIEDRRILIGMYNCAHEMLHGHGDPSFARLGQMVLEYDHPLKKLTEEFGPHTKAVSGALLSLHFLFVRRNQGAEQWRSAQLLSLISNPPAMINPANSDTMACEYLSVEVMERWIIIGFLLCHGCLNSNSQCQKLWKLCLQGSLYITLIREDVLQVHKVTEDLFSSLKGYGKRVADIKESKEHVIANSGQFHCQRRQFLRMAVKELETVLADEPGLLGPKALFAFMALSFIRDEVTWLVRHTENVTKTKTPEDYADSSIAELLFLLEGIRSLVRRHIKVIQQYHLQYLARFDALVLSDIIQNLSVCPEEESIIMSSFVSILSSLNLKQVDNGEKFEFSGLRLDWFRLQAYTSVAKAPLHLHENPDLAKVMNLIVFHSRMLDSVEKLLVETSDLSTFCFHLRIFEKMFAMTLEESAMLRYAIAFPLICAHFVHCTHEMCPEEYPHLKNHGLHHCNSFLEELAKQTSNCVLEICAEQRNLSEQLLPKHCATTISKAKNKKTRKQRQTPRKGEPERDKPGAESHRKNRSIVTNMDKLHLNLTELALTMNHVYSFSVFEHTIFPSEYLSSHLEARLNRAIVWLAGYNATTQEIVRPSELLAGVKAYIGFIQSLAQFLGADASRVIRNALLQQTQPLDSCGEQTITTLYTNWYLESLLRQASSGTIILSPAMQAFVSLPREGEQNFSAEEFSDISEMRALAELLGPYGMKFLSENLMWHVTSQIVELKKLVVENMDILVQIRSNFSKPDLMASLLPQLTGAENVLKRMTIIGVILSFRAMAQEGLREVFSSHCPFLMGPIECLKEFVTPDTDIKVTLSIFELASAAGVGCDIDPALVAAIANLKADTSSPEEEYKVACLLLIFLAVSLPLLATDPSSFYSIEKDGYNNNIHCLTKAIIQVSAALFTLYNKNIETHLKEFLVVASVSLLQLGQETDKLKTRNRESISLLMRLVVEESSFLTLDMLESCFPYVLLRNAYREVSRAFHLN

SEQ ID NO: 3109 - protein, 1049 aa, Homo sapiens
MGSRTPESPLHAVQLRWGPRRRPPLLPLLLLLLPPPPRVGGFNLDAEAPAVLSGPPGSFFGFSVEFYRPGTDGVSVLVGAPKANTSQPGVLQGGAVYLCPWGASPTQCTPIEFDSKGSRLLESSLSSSEGEEPVEYKSLQWFGATVRAHGSSILACAPLYSWRTEKEPLSDPVGTCYLSTDNFTRILEYAPCRSDFSWAAGQGYCQGGFSAEFTKTGRVVLGGPGSYFWQGQILSATQEQIAESYYPEYLINLVQGQLQTRQASSIYDDSYLGYSVAVGEFSGDDTEDFVAGVPKGNLTYGYVTILNGSDIRSLYNFSGEQMASYFGYAVAATDVNGDGLDDLLVGAPLLMDRTPDGRPQEVGRVYVYLQHPAGIEPTPTLTLTGHDEFGRFGSSLTPLGDLDQDGYNDVAIGAPFGGETQQGVVFVFPGGPGGLGSKPSQVLQPLWAASHTPDFFGSALRGGRDLDGNGYPDLIVGSFGVDKAVVYRGRPIVSASASLTIFPAMFNPEERSCSLEGNPVACINLSFCLNASGKHVADSIGFTVELQLDWQKQKGGVRRALFLASRQATLTQTLLIQNGAREDCREMKIYLRNESEFRDKLSPIHIALNFSLDPQAPVDSHGLRPALHYQSKSRIEDKAQILLDCGEDNICVPDLQLEVFGEQNHVYLGDKNALNLTFHAQNVGEGGAYEAELRVTAPPEAEYSGLVRHPGNFSSLSCDYFAVNQSRLLVCDLGNPMKAGASLWGGLRFTVPHLRDTKKTIQFDFQILSKNLNNSQSDVVSFRLSVEAQAQVTLNGVSKPEAVLFPVSDWHPRDQPQKEEDLGPAVHHVYELINQGPSSISQGVLELSCPQALEGQQLLYVTRVTGLNCTTNHPINPKGLELDPEGSLHHQQKREAPSRSSASSGPQILKCPEAECFRLRCELGPLHQQESQSLQLHFRVWAKTFLQREHQPFSLQCEAVYKALKMPYRILPRQLPQKERQVATAVQWTKAEGSYGVPLWIIILAILFGLLLLGLLIYILYKLGFFKRSLPYGTAMEKAQLKPPATSDA

SEQ ID NO: 3110 - protein, 305 aa, Homo sapiens
MILGSLSRAGPLPLLRQPPIMQPPLDLKQILPFPLEPAPTLGLFSNYSTMDPVQKAVLSHTFGGPLLKTKRPVISCNICQIRFNSQSQAEAHYKGNRHARRVKGIEAAKTRGREPGVREPGDPAPPGSTPTNGDGVAPRPGTKHKTILEARSGLGPIKAYPRLGPPTPGEPEAPAQDRTFHCEICNVKVNSEVQLKQHISSRRHRDGVAGKPNPLLSRHKKSRGAGELAGTLTFSKELPKSLAGGLLPSPLAVAAVMAAAAGSPLSLRPAPAAPLLQGPPITHPLLHPAPGPIRTAHGPILFSPY

SEQ ID NO: 3111 - protein, 233 aa, Homo sapiens
MRLLVLLWGCLLLPGYEALEGPEEISGFEGDTVSLQCTYREELRDHRKYWCRKGGILFSRCSGTIYAEEEGQETMKGRVSIRDSRQELSLIVTLWNLTLQDAGEYWCGVEKRGPDESLLISLFVFPGSSRPPMQLDSTSAEDTSPALSSGSSKPRVSIPMVRILAPVLVLLSLLSAAGLIAFCSHLLLWRKEAQQATETQRNEKFCLSRLNHRTSELDPDEAFEISSLTFLSV

SEQ ID NO: 3112 - protein, 453 aa, Homo sapiens
MARETFPFTSSMLRSLRLQQEWLEWEDRRRAAAQQCRSRRCPSSPRARLTRPHRSCRDPAVHQALFSGNLQQVQALFQDEEAANMIVETVSNQLAWSAEQGFWVLTPKTKQTAPLAIATARGYTDCARHLIRQGAELDARVGGRAALHEACARAQFDCVRLLLTFGAKANVLTEEGTTPLHLCTIPESLQCAKLLLEAGATVNLAAGESQETPLHVAAARGLEQHVALYLEHGADVGLRTSQGETALNTACAGAEGPGSCRRHQAAARRLLEAGADARAAGRKRHTPLHNACANGCGGLAELLLRYGARAEVPNGAGHTPMDCALQAVQDSPNWEPEVLFAALLDYGAQPVRPEMLKHCANFPRALEVLLNAYPCVPSCETWVEAVLPELWKEHEAFYSSALCMVNQPRQLQHLARLAVRARLGSRCRQGATRLPLPPLLRDYLLLRVEGCIQ

SEQ ID NO: 3113 - protein, 2161 aa, Homo sapiens
MTHSPATSEDEERHSASECPEGGSESDSSPDGPGRGPRGTRGQGSGAPGSLASVRGLQGRSMSVPDDAHFSMMVFRIGIPDLHQTKCLRFNPDATIWTAKQQVLCALSESLQDVLNYGLFQPATSGRDANFLEEERLLREYPQSFEKGVPYLEFRYKTRVYKQTNLDEKQLAKLHTKTGLKKFLEYVQLGTSDKVARLLDKGLDPNYHDSDSGETPLTLAAQTEGSVEVIRTLCLGGAHIDFRARDGMTALHKAACARHCLALTALLDLGGSPNYKDRRGLTPLFHTAMVGGDPRCCELLLFNRAQLGIADENGWQEIHQACQRGHSQHLEHLLFYGAEPGAQNASGNTALHICALYNKETCARILLYRGADKDVKNNNGQTPFQVAVIAGNFELGELIRNHREQDVVPFQESPKYAARRRGPPGTGLTVPPALLRANSDTSMALPDWMVFSAPGAASSGAPGPTSGSQGQSQPSAPTTKLSSGTLRSASSPRGARARSPSRGRHPEDAKRQPRGRPSSSGTPREGPAGGTGGSGGPGGSLGSRGRRRKLYSAVPGRSFMAVKSYQAQAEGEISLSKGEKIKVLSIGEGGFWEGQVKGRVGWFPSDCLEEVANRSQESKQESRSDKAKRLFRHYTVGSYDSFDAPSLMDGIGPGSDYIIKEKTVLLQKKDSEGFGFVLRGAKAQTPIEEFTPTPAFPALQYLESVDEGGVAWRAGLRMGDFLIEVNGQNVVKVGHRQVVNMIRQGGNTLMVKVVMVTRHPDMDEAVHKKAPQQAKRLPPPTISLRSKSMTSELEEMEYEQQPAPVPSMEKKRTVYQMALNKLDEILAAAQQTISASESPGPGGLASLGKHRPKGFFATESSFDPHHRAQPSYERPSFLPPGPGLMLRQKSIGAAEDDRPYLAPPAMKFSRSLSVPGSEDIPPPPTTSPPEPPYSTPPVPSSSGRLTPSPRGGPFNPGSGGPLPASSPASFDGPSPPDTRVGSREKSLYHSGPLPPAHHHPPHHHHHHAPPPQPHHHHAHPPHPPEMETGGSPDDPPPRLALGPQPSLRGWRGGGPSPTPGAPSPSHHGSAGGGGGSSQGPALRYFQLPPRAASAAMYVPARSGRGRKGPLVKQTKVEGEPQKGGGLPPAPSPTSPASPQPPPAVAAPSEKNSIPIPTIIIKAPSTSSSGRSSQGSSTEAEPPTQPEPTGGGGGGGSSPSPAPAMSPVPPSPSPVPTPASPSGPATLDFTSQFGAALVGAARREGGWQNEARRRSTLFLSTDAGDEDGGDGGLGTGAAPGPRLRHSKSIDEGMFSAEPYLRLESAGSGAGYGGYGAGSRAYGGGGGSSAFTSFLPPRPLVHPLTGKALDPASPLGLALAARERALKESSEGGGAPQPPPRPPSPRYEAPPPTPHHHSPHAHHEPVLRLWGASPPDPARRELGYRAGLGSQEKSLPASPPAARRSLLHRLPPTAPGVGPLLLQLGTEPPAPHPGVSKPWRSAAPEEPERLPLHVRFLENCQPRAPVTSGRGPPSEDGPGVPPPSPRRSVPPSPTSPRASEENGLPLLVLPPPAPSVDVEDGEFLFVEPLPPPLEFSNSFEKPESPLTPGPPHPLPDTPAPATPLPPVPPPAVAAAPPTLDSTASSLTSYDSEVATLTQGASAAPGDPHPPGPPAPAAPAPAAPQPGPDPPPGTDSGIEEVDSRSSSDHPLETISSASTLSSLSAEGGGSAGGGGGAGAGVASGPELLDTYVAYLDGQAFGGSSTPGPPYPPQLMTPSKLRGRALGASGGLRPGPSGGLRDPVTPTSPTVSVTGAGTDGLLALRACSGPPTAGVAGGPVAVEPEVPPVPLPTASSLPRKLLPWEEGPGPPPPPLPGPLAQPQASALATVKASIISELSSKLQQFGGSSAAGGALPWARGGSGGGGDSHHGGASYVPERTSSLQRQRLSDDSQSSLLSKPVSSLFQNWPKPPLPPLPTGTGVSPTAAAAPGATSPSASSSSTSTRHLQGVEFEMRPPLLRRAPSPSLLPASEHKVSPAPRPSSLPILPSGPLYPGLFDIRGSPTGGAGGSADPFAPVFVPPHPGISGGLGGALSGASRSLSPTRLLSLPPDKPFGAKPLGFWTKFDVADWLEWLGLAEHRAQFLDHEIDGSHLPALTKEDYVDLGVTRVGHRMNIDRALKFFLER

SEQ ID NO: 3114 - protein, 617 aa, Homo sapiens
MIKSQESLTLEDVAVEFTWEEWQLLGPAQKDLYRDVMLENYSNLVSVGYQASKPDALFKLEQGEPWTVENEIHSQICPEIKKVDNHLQMHSQKQRCLKRVEQCHKHNAFGNIIHQRKSDFPLRQNHDTFDLHGKILKSNLSLVNQNKRYEIKNSVGVNGDGKSFLHAKHEQFHNEMNFPEGGNSVNTNSQFIKHQRTQNIDKPHVCTECGKAFLKKSRLIYHQRVHTGEKPHGCSICGKAFSRKSGLTEHQRNHTGEKPYECTECDKAFRWKSQLNAHQKIHTGEKSYICSDCGKGFIKKSRLINHQRVHTGEKPHGCSLCGKAFSKRSRLTEHQRTHTGEKPYECTECDKAFRWKSQLNAHQKAHTGEKSYICRDCGKGFIQKGNLIVHQRIHTGEKPYICNECGKGFIQKGNLLIHRRTHTGEKPYVCNECGKGFSQKTCLISHQRFHTGKTPFVCTECGKSCSHKSGLINHQRIHTGEKPYTCSDCGKAFRDKSCLNRHRRTHTGERPYGCSDCGKAFSHLSCLVYHKGMLHAREKCVGSVKLENPCSESHSLSHTRDLIQDKDSVNMVTLQMPSVAAQTSLTNSAFQAESKVAIVSQPVARSSVSADSRICTE

SEQ ID NO: 3115 - protein, 313 aa, Homo sapiens
MAALTDLSFMYRWFKNCNLVGNLSEKYVFITGCDSGFGNLLAKQLVDRGMQVLAACFTEEGSQKLQRDTSYRLQTTLLDVTKSESIKAAAQWVRDKVGEQGLWALVNNAGVGLPSGPNEWLTKDDFVKVINVNLVGLIEVTLHMLPMVKRARGRVVNMSSSGGRVAVIGGGYCVSKFGVEAFSDSIRRELYYFGVKVCIIEPGNYRTAILGKENLESRMRKLWERLPQETRDSYGEDYFRIYTDKLKNIMQVAEPRVRDVINSMEHAIVSRSPRIRYNPGLDAKLLYIPLAKLPTPVTDFILSRYLPRPADSV

SEQ ID NO: 3116 - protein, 370 aa, Homo sapiens
MGLWALLPGWVSATLLLALAALPAALAANSSGRWWGIVNVASSTNLLTDSKSLQLVLEPSLQLLSRKQRRLIRQNPGILHSVSGGLQSAVRECKWQFRNRRWNCPTAPGPHLFGKIVNRGCRETAFIFAITSAGVTHSVARSCSEGSIESCTCDYRRRGPGGPDWHWGGCSDNIDFGRLFGREFVDSGEKGRDLRFLMNLHNNEAGRTTVFSEMRQECKCHGMSGSCTVRTCWMRLPTLRAVGDVLRDRFDGASRVLYGNRGSNRASRAELLRLEPEDPAHKPPSPHDLVYFEKSPNFCTYSGRLGTAGTAGRACNSSSPALDGCELLCCGRGHRTRTQRVTERCNCTFHWCCHVSCRNCTHTRVLHECL

SEQ ID NO: 3117 - protein, 496 aa, Homo sapiens
MYQPSRGAARRLGPCLRAYQARPQVSGGEEGGRRGGGERPSSKPVRGAERALGSAQAQRHPPPLPTCALQRVDRLGVAGAGGRRCRACRARTSVLPGLRAVRRGQGQAAGRVCVAPDSPRLPVPRGDLKGRGREIRSPAAAPSRSSPAQTRPAGRPQQPARLALGERSWQEGRPVCTRFGPLRPGWQDGHAPSRDGASRTPSGTEDQLYPGTLPFPPLWPHSTTTTSPSSPLFWSPLPPRLPTQRLPQVPPLPLPQIQALSSAWVVLPPGKGEEGPGPELHSGCLDGLRSLFEGPPCPYPGAWIPFQVPGTAHPSPATPSGDPSMEEHLSVMYERLRQELPKLFLQSHDYSLYSLDVEFINEILNIRTKGRTWYILSLTLCRFLAWNYFAHLRLEVLQLTRHPENWTLQARWRLVGLPVHLLFLRFYKRDKDEHYRTYDAYSTFYLNSSGLICRHRLDKLMPSHSPPTPVKKLLVGALVALGLSEPEPDLNLCSKP

SEQ ID NO: 3118 - protein, 653 aa, Homo sapiens
MLLFVEQVASKGTGLNPNAKVWQEIAPGNTDATPVTHGTESSWHEIAATSGAHPEGNAELSEDICKEYEVMYSSSCETTRNTTGIEESTDGMILGPEDLSYQIYDVSGESNSAVSTEDLKECLKKQLEFCFSRENLSKDLYLISQMDSDQFIPIWTVANMEEIKKLTTDPDLILEVLRSSPMVQVDEKGEKVRPSHKRCIVILREIPETTPIEEVKGLFKSENCPKVISCEFAHNSNWYITFQSDTDAQQAFKYLREEVKTFQGKPIMARIKAINTFFAKNGYRLMDSSIYSHPIQTQAQYASPVFMQPVYNPHQQYSVYSIVPQSWSPNPTPYFETPLAPFPNGSFVNGFNSPGSYKTNAAAMNMGRPFQKNRRTLFRGRRRREDDRISRPHPSTAESKAPTPKFDLLASNFPPLPGSSSRMPGELVLENRMSDVVKGVYKEKDNEELTISCPVPADEQTECTSAQQLNMSTSSPCAAELTALSTTQQEKDLIEDSSVQKDGLNQTTIPVSPPSTTKPSRASTASPCNNNINAATAVALQEPRKLSYAEVCQKPPKEPSSVLVQPLRELRSNVVSPTKNEDNGAPENSVEKPHEKPEARASKDYSGFRGNIIPRGAAGKIREQRRQFSHRAIPQGVTRRNGKEQYVPPRSPK

SEQ ID NO: 3119 - protein, 354 aa, Homo sapiens
MSAFDMSHDFFFCLTSEWEIQPRTKRSSLQQGFLKNQIFTGIQMQTRSYSGWKLCENCGEVFSEQFCLKTHMRAQNGGNTFEGNCYGKDSISVHKEASIGQELSKFNPCGKVFTLTPGLAVHLEILNGRQPYKCKECGKGFKYFASLDNHMGIHIGEKLCEFQECERAITTSSHLKQCVAVHTGKKSEKTKNCGKSFTNFSQLSAHAKTHKGEKSFECKECGRSFRNSSSFNVHIQIHTGIKPHKCTECGKAFTRSTHLTQHVRTHTGIKPYECKECGQAFTQYTGLAIHIRNHTGEKPYQCKECGKAFNRSSTLTQHRRIHTGEKPYECVECGKTFITSSHRSKHLKTHSGER

SEQ ID NO: 3120 - protein, 395 aa, Homo sapiens
MTLRRLRKLQQKEEAAATPDPAARTPDSEVAPAAPVPTPGPPAAAATPGPPADELYAALEDYHPAELYRALAVSGGTLPRRKGSGFRWKNLSQSPEQQRKVLTLEKEDNQTFGFEIQTYGLHHREEQRVEMVTFVCRVHESSPAQLAGLTPGDTIASVNGLNVEGIRHREIVDIIKASGNVLRLETLYGTSIRKAELEARLQYLKQTLYEKWGEYRSLMVQEQRLVHGLVVKDPSIYDTLESVRSCLYGAGLLPGSLPFGPLLAVPGRPRGGARRARGDADDAVYHTCFFGDSEPPALPPPPPPARAFGPGPAETPAVGPGPGPRAALSRSASVRCAGPGGGGGGGAPGALWTEAREQALCGPGLRKTKYRSFRRRLLKFIPGLNRSLEEEESQL

SEQ ID NO: 3121 - protein, 493 aa, Homo sapiens
MTCGFNSIGCGFRPGNFSCVSACGPRPSRCCITAAPYRGISCYRGLTGGFGSHSVCGGFRAGSCGRSFGYRSGGVCGPSPPCITTVSVNESLLTPLNLEIDPNAQCVKQEEKEQIKSLNSRFAAFIDKVRFLEQQNKLLETKLQFYQNRECCQSNLEPLFAGYIETLRREAECVEADSGRLASELNHVQEVLEGYKKKYEEEVALRATAENEFVALKKDVDCAYLRKSDLEANVEALIQEIDFLRRLYEEEIRILQSHISDTSVVVKLDNSRDLNMDCIVAEIKAQYDDIATRSRAEAESWYRSKCEEMKATVIRHGETLRRTKEEINELNRMIQRLTAEVENAKCQNSKLEAAVAQSEQQGEAALSDARCKLAELEGALQKAKQDMACLIREYQEVMNSKLGLDIEIATYRRLLEGEEQRLCEGVEAVNVCVSSSRGGVVCGDLCVSGSRPVTGSVCSAPCNGNLVVSTGLCKPCGQLNTTCGGGSCGQGRH

SEQ ID NO: 3122 - protein, 860 aa, Homo sapiens
MARPRGLGRIPELQLVAFPVAVAAEDEAFLPEPLAPRAPRRPRSPPSSPVFFASPSPTFRRRLRLLRSCQDLGRQAWAGAGFEAENGPTPSPGRSPLDSQASPGLVLHAGAATSQRRESFLYRSDSDYDMSPKTMSRNSSVTSEAHAEDLIVTPFAQVLASLRSVRSNFSLLTNVPVPSNKRSPLGGPTPVCKATLSEETCQQLARETLEELDWCLEQLETMQTYRSVSEMASHKFKRMLNRELTHLSEMSRSGNQVSEYISTTFLDKQNEVEIPSPTMKEREKQQAPRPRPSQPPPPPVPHLQPMSQITGLKKLMHSNSLNNSNIPRFGVKTDQEELLAQELENLNKWGLNIFCVSDYAGGRSLTCIMYMIFQERDLLKKFRIPVDTMVTYMLTLEDHYHADVAYHNSLHAADVLQSTHVLLATPALDAVFTDLEILAALFAAAIHDVDHPGVSNQFLINTNSELALMYNDESVLENHHLAVGFKLLQEDNCDIFQNLSKRQRQSLRKMVIDMVLATDMSKHMTLLADLKTMVETKKVTSSGVLLLDNYSDRIQVLRNMVHCADLSNPTKPLELYRQWTDRIMAEFFQQGDRERERGMEISPMCDKHTASVEKSQVGFIDYIVHPLWETWADLVHPDAQEILDTLEDNRDWYYSAIRQSPSPPPEEESRGPGHPPLPDKFQFELTLEEEEEEEISMAQIPCTAQEALTAQGLSGVEEALDATIAWEASPAQESLEVMAQEASLEAELEAVYLTQQAQSTGSAPVAPDEFSSREEFVVAVSHSSPSALALQSPLLPAWRTLSVSEHAPGLPGLPSTAAEVEAQREHQAAKRACSACAGTFGEDTSALPAPGGGGSGGDPT

SEQ ID NO: 3123 - protein, 476 aa, Homo sapiens
MDAVAFEDVAVNFTQEEWALLGPSQKNLYRYVMQETIRNLDCIRMIWEEQNTEDQYKNPRRNLRCHMVERFSESKDSSQCGETFSLIRDSIVNNSICPGEDPCQSAECEEVIMGHLSLNSHIRVDSGHKPHEYQEYGEKPHTHKQRGKAFSYHHSFQSRGRPHTGKKRYECKECGKTFSSRRNLRRHMVVQGGNRPYKCKLCGKAFFWPSLLRMHERTHTGEKPYECKQCSKAFPFYSSYRRHERMHTGEKPYECKQCSKALPDSSSYIRHERTHTGEKPYTCKQCGKAFSVSSSLRRHETTHSAEKPYECKQCGKTFHHLGSFQIHMKRHTGDRPHKCKICGKGFDRPSLVRYHERIHTGEKPYECKQCGKTLSHSSSFRRHMIMHTGGGPHKCKICGKAFVYPSVCQRHEKSHSGEKPYECKQCGKALSHSSSFRRHMVMHTGDGPNKCKVCGKAFVYPSVCQRHEKTHWRETI

SEQ ID NO: 3124 - protein, 511 aa, Homo sapiens
MSRQLTHFPRGERLGFSGCSAVLSGGIGSSSASFRARVKGSASFGSKSLSCLGGSRSLALSAAARRGGGRLGGFVGTAFGSAGLGPKCPSVCPPGGIPQVTVNKSLLAPLNVEMDPEIQRVRAQEREQIKALNNKFASFIDKVRFLEQQNQVLETKWNLLQQLDLNNCRKNLEPIYEGYISNLQKQLEMLSGDGVRLDSELRNMQDLVEDYKKRYEVEINRRTAAENEFVVLKKDVDAAYMNKVELQAKVDSLTDEIKFFKCLYEGEITQIQSHISDTSIVLSMDNNRDLDLDSIIAEVRAQYEEIALKSKAEAETLYQTKIQELQVTAGQHGDDLKLTKAEISELNRLIQRIRSEIGNVKKQCADLETAIADAEQRGDCALKDARAKLDELEGALHQAKEELARMLREYQELVSLKLALDMEIATYRKLLESEECRMSGEYPNSVSISVISSTNAGAGGAGFSMGFGASSSYSYKTAAADVKTKGSCGSELKDPLAKTSGSSCATKKASR

SEQ ID NO: 3125 - protein, 662 aa, Homo sapiens
MGLYRIRVSTGASLYAGSNNQVQLWLVGQHGEAALGKRLWPARGKETELKVEVPEYLGPLLFVKLRKRHLLKDDAWFCNWISVQGPGAGDEVRFPCYRWVEGNGVLSLPEGTGRTVGEDPQGLFQKHREEELEERRKLYRWGNWKDGLILNMAGAKLYDLPVDERFLEDKRVDFEVSLAKGLADLAIKDSLNVLTCWKDLDDFNRIFWCGQSKLAERVRDSWKEDALFGYQFLNGANPVVLRRSAHLPARLVFPPGMEELQAQLEKELEGGTLFEADFSLLDGIKANVILCSQQHLAAPLVMLKLQPDGKLLPMVIQLQLPRTGSPPPPLFLPTDPPMAWLLAKCWVRSSDFQLHELQSHLLRGHLMAEVIVVATMRCLPSIHPIFKLIIPHLRYTLEINVRARTGLVSDMGIFDQIMSTGGGGHVQLLKQAGAFLTYSSFCPPDDLADRGLLGVKSSFYAQDALRLWEIIYRYVEGIVSLHYKTDVAVKDDPELQTWCREITEIGLQGAQDRGFPVSLQARDQVCHFVTMCIFTCTGQHASVHLGQLDWYSWVPNAPCTMRLPPPTTKDATLETVMATLPNFHQASLQMSITWQLGRRQPVMVAVGQHEEEYFSGPEPKAVLKKFREELAALDKEIEIRNAKLDMPYEYLRPSVVENSVAI

SEQ ID NO: 3126 - protein, 551 aa, Homo sapiens
MASALSYVSKFKSFVILFVTPLLLLPLVILMPAKFVRCAYVIILMAIYWCTEVIPLAVTSLMPVLLFPLFQILDSRQVCVQYMKDTNMLFLGGLIVAVAVERWNLHKRIALRTLLWVGAKPARNTATTAMMVPIVEAILQQMEATSAATEAGLELVDKGKAKELPGSQVIFEGPTLGQQEDQERKRLCKAMTLCICYAASIGGTATLTGTGPNVVLLGQMNELFPDSKDLVNFASWFAFAFPNMLVMLLFAWLWLQFVYMRFNFKKSWGCGLESKKNEKAALKVLQEEYRKLGPLSFAEINVLICFFLLVILWFSRDPGFMPGWLTVAWVEGETKYVSDATVAIFVATLLFIVPSQKPKFNFRSQTEEERKTPFYPPPLLDWKVTQEKVPWGIVLLLGGGFALAKGSEASGLSVWMGKQMEPLHAVPPAAITLILSLLVAVFTECTSNVATTTLFLPIFASMSRSIGLNPLYIMLPCTLSASFAFMLPVATPPNAIVFTYGHLKVADMVKTGVIMNIIGVFCVFLAVNTWGRAIFDLDHFPDWANVTHIET

SEQ ID NO: 3127 - protein, 330 aa, Homo sapiens
MAARRSQRRRGRRGEPGTALLVPLALGLGLALACLGLLLAVVSLGSRASLSAQEPAQEELVAEEDQDPSELNPQTEESQDPAPFLNRLVRPRRSAPKGRKTRARRAIAAHYEVHPRPGQDGAQAGVDGTVSGWEEARINSSSPLRYNRQIGEFIVTRAGLYYLYCQSSDALEAWENGERSRKRRAVLTQKQKKQHSVLHLVPINATSKDDSDVTEVMWQPALRRGRGLQAQGYGVRIQDAGVYLLYSQVLFQDVTFTMGQVVSREGQGRQETLFRCIRSMPSHPDRAYNSCYSAGVFHLHQGDILSVIIPRARAKLNLSPHGTFLGFVKL

SEQ ID NO: 3128 - protein, 316 aa, Homo sapiens
MSLGIMEEEDLAEYFRLQYGERLLQMLQKLPNVEGASESPSIWLLEKKKETEIMHQTMVQKKKMFQRRMETLNLRWEELGVKEAQLKAHIQKSEQFIQENDQKRIRAMKKANKERELKCQHMQELTKRKQEMVALRLEHQRLSAKLKDYYIFNKYLEKVVENSEFEEIHEVIARYKTLVSMRHDLMQSAQEGQEKIERAKARLARYMEEKDDEILQQNNELARLQMRFDRARSNVIFWESRWAHIQNTAAKKTLLLGTIKMATLNLFQIVSKHLKEVTEVALEDTHKQLDMIQQFIQDRSDIWAEVKKKEQQRVRI

SEQ ID NO: 3129 - protein, 123 aa, Homo sapiens
MVVQDPLLCDLPIQVTLEEVNSQIALEYGQAMTVRVCKMDGEVMPVVVVQSATVLDLKKAIQRYVQLKQEREGGIQHISWSYVWRTYHLTSAGEKLTEDRKKLRDYGIRNRDEVSFIKKLRQK

SEQ ID NO: 3130 - protein, 371 aa, Homo sapiens
MSAQAQMRALLDQLMGTARDGDETRQRVKFTDDRVCKSHLLDCCPHDILAGTRMDLGECTKIHDLALRADYEIASKERDLFFELDAMDHLESFIAECDRRTELAKKRLAETQEEISAEVSAKAEKVHELNEEIGKLLAKAEQLGAEGNVDESQKILMEVEKVRAKKKEAEEEYRNSMPASSFQQQKLRVCEVCSAYLGLHDNDRRLADHFGGKLHLGFIQIREKLDQLRKTVAEKQEKRNQDRLRRREEREREERLSRRSGSRTRDRRRSRSRDRRRRRSRSTSRERRKLSRSRSRDRHRRHRSRSRSHSRGHRRASRDRSAKYKFSRERASREESWESGRSERGPPDWRLESSNGKMASRRSEEKEAGEI

SEQ ID NO: 3131 - protein, 1748 aa, Homo sapiens
MARAWQHPFLNVFRHFRVDEWKRSAKQGDVAVVTDKTLKGAVYRIRGSVSAANYIQLPKSSTQSLGLTGRYLYVLFRPLPSKHFVIHLDVSSKDNQVIRVSFSNLFKEFKSTATWLQFPLVLEARTPQRDLVGLAPSGARWTCLQLDLQDVLLVYLNRCYGHLKSIRLCASLLVRNLYTSDLCFEPAISGAQWAKLPVTPMPREMAFPVPKGESWHDRYIHVRFPSESLKVPSKPIEKSCSPPEAVLLGPGPQPLPCPVASSKPVRFSVSPVVQTPSPTASGRAALAPRPFPEVSLSQERSDASNADGPGFHSLEPWAQLEASDIHTAAAGTHVLTHESAEVPVARTGSCEGFLPDPVLRLKGVIGFGGHGTRQALWTPDGAAVVYPCHAVIVVLLVDTGEQRFFLGHTDKVSALALDGSSSLLASAQARAPSVMRLWDFQTGRCLCLFRSPMHVVCSLSFSDSGALLCGVGKDHHGRTMVVAWGTGQVGLGGEVVVLAKAHTDFDVQAFRVTFFDETRMASCGQGSVRLWRLRGGVLRSCPVDLGEHHALQFTDLAFKQARDGCPEPSAAMLFVCSRSGHILEIDCQRMVVRHARRLLPTRTPGGPHPQKQTFSSGPGIAISSLSVSPAMCAVGSEDGFLRLWPLDFSSVLLEAEHEGPVSSVCVSPDGLRVLSATSSGHLGFLDTLSRVYHMLARSHTAPVLALAMEQRRGQLATVSQDRTVRIWDLATLQQLYDFTSSEDAPCAVTFHPTRPTFFCGFSSGAVRSFSLEAAEVLVEHTCHRGAVTGLTATPDGRLLFSSCSQGSLAQYSCADPQWHVLRVAADMVCPDAPASPSALAVSRDGRLLAFVGPSRCTVTVMGSASLDELLRVDIGTLDLASSRLDSAMAVCFGPAALGHLLVSTSSNRVVVLDAVSGRIIRELPGVHPEPCPSLTLSEDARFLLIAAGRTIKVWDYATQASPGPQVYIGHSEPVQAVAFSPDQQQVLSAGDAVFLWDVLAPTESDQSFPGAPPACKTGPGAGPLEDAASRASELPRQQVPKPCQASPPRLGVCARPPEGGDGARDTRNSGAPRTTYLASCKAFTPARVSCSPHSAKGTCPPPASGGWLRLKAVVGYSGNGRANMVWRPDTGFFAYTCGRLVVVEDLHSGAQQHWSGHSAEISTLALSHSAQVLASASGRSSTTAHCQIRVWDVSGGLCQHLIFPHSTTVLALAFSPDDRLLVTLGDHDGRTLALWGTATYDLVSSTRLPEPVHGVAFNPWDAGELTCVGQGTVTFWLLQQRGADISLQVRREPVPEAVGAGELTSLCYGAPPLLYCGTSSGQVCVWDTRAGRCFLSWEADDGGIGLLLFSGSRLVSGSSTGRLRLWAVGAVSELRCKGSGASSVFMEHELVLDGAVVSASFDDSVDMGVVGTTAGTLWFVSWAEGTSTRLISGHRSKVNEVVFSPGESHCATCSEDGSVRVWALASMELVIQFQVLNQSCLCLAWSPPCCGRPEQQRLAAGYGDGSLRIFSVSRTAMELKMHPHPVALTTVAFSTDGQTVLSGDKDGLVAVSHPCTGTTFRVLSDHQGAPISTICVTCKECEDLGVEGTDLWLAASGDQRVSVWASDWLRNHCELVDWLSFPMPATTETQGHLPPSLAAFCPWDGALLMYVGPGVYKEVIIYNLCQKQVVEKIPLPFFAMSLSLSPGTHLLAVGFAECMLRLVDCAMGTAQDFAGHDNAVHLCRFTPSARLLFTAARNEILVWEVPGL

SEQ ID NO: 3132 - protein, 1269 aa, Homo sapiens
MTVKLGDGGSGEDGLKKLGKRAADEESLEGEGAGGADAAEESSGTKRDEKTPRAGADGPPAPPGAPQAPSPPQGSPQDQHHFLRSSVRPQSKRPRKDPPSAVGSGNAGGSGPRGKGAEGGGSSSGNVSGVAPAAPAGGSRSSSRNLGSSGGEKEEGKKVRRQWESWSTEDKNTFFEGLYEHGKDFEAIQNNIALKYKKKGKPASMVKNKEQVRHFYYRTWHKITKYIDFDHVFSRGLKKSSQELYGLICYGELRKKIGGCMDDKNATKLNELIQVGATTVRYKGRNLRIKAPMCRALKKLCDPDGLSDEEDQKPVRLPLKVPIELQPRNNHAWARVQSLAQNPRLRMIVELHRKVSSLIEFLKQKWALHEVRVRKTLEERQLQDSCSAPMQEKVTLHLFPGENCTLTPLPGVARVVHSKAFCTVHWQEGGRCKQSAKDAHVLPPAQILGIQSGQGTARGQVKCPRSGAEGKGVGRPPPAADALQSSGESSPESAPGEGAALSLSSPDAPDRPPPRHQDTGPCLEKTPAEGRDSPTREPGALPCACGQLPDLEDELSLLDPLPRYLKSCQDLIVPEQCRCADTRPGSEQPPLGGAASPEVLAPVSKEAADLAPTGPSPRPGPGLLLDVCTKDLADAPAEELQEKGSPAGPPPSQGQPAARPPKEVPASRLAQQLREEGWNLQTSESLTLAEVYLMMGKPSKLQLEYDWLGPGRQDPRPGSLPTALHKQRLLSCLLKLISTEVNPKLALEANTISTASVRPAQEEQSMTPPGKVVTVSSRSPRCPRNQASLRSSKTFPPSSAPCSSGLRNPPRPLLVPGPSSTGSNDSDGGLFAVPTTLPPNSRHGKLFSPSKEAELTFRQHLNSISMQSDFFLPKPRKLRNRHLRKPLVVQRTLLPRPSENQSHNVCSFSILSNSSVTGRGSFRPIQSSLTKAALSRPIVPKVLPPQATSHLASAIDLAATSAGILSGNPLPALDTEGLSGISPLSSDEVTGAISGQDSTGTHQDGDTLPTVGGSDPFVSIPSRPEQEPVADSFQGSSVLSLSELPKAPLQNGLSIPLSSSESSSTRLSPPDVSALLDISLPGPPEDALSQGEPATHISDSIIEIAISSGQYGEGVPLSPAKLNGSDSSKSLPSPSSSPQPHWIASPTHDPQWYPSDSTDSSLSSLFASFISPEKSRKMLPTPIGTNSGTSLLGPSLLDGNSRDSFVSRSLADVAEVVDSQLVCMMNENSIDYISRFNDLAQELSIAEPGRREALFDGGGGGPAVSDLSQ

SEQ ID NO: 3133 - protein, 580 aa, Homo sapiens
MPGWPWGLLLTAGTLFAALSPGPPAPADPCHDEGGAPRGCVPGLVNAALGREVLASSTCGRPATRACDASDPRRAHSPALLTSPGGTASPLCWRSESLPRAPLNVTLTVPLGKAFELVFVSLRFCSAPPASVALLKSQDHGRSWAPLGFFSSHCDLDYGRLPAPANGPAGPGPEALCFPAPLAQPDGSGLLAFSMQDSSPPGLDLDSSPVLQDWVTATDVRVVLTRPSTAGDPRDMEAVVPYSYAATDLQVGGRCKCNGHASRCLLDTQGHLICDCRHGTEGPDCGRCKPFYCDRPWQRATARESHACLACSCNGHARRCRFNMELYRLSGRRSGGVCLNCRHNTAGRHCHYCREGFYRDPGRALSDRRACRACDCHPVGAAGKTCNQTTGQCPCKDGVTGLTCNRCAPGFQQSRSPVAPCVKTPIPGPTEDSSPVQPQDCDSHCKPARGSYRISLKKFCKKDYAVQVAVGARGEARGAWTRFPVAVLAVFRSGEERARRGSSALWVPAGDAACGCPRLLPGRRYLLLGGGPGAAAGGAGGRGPGLIAARGSLVLPWRDAWTRRLRRLQRRERRGRCSAA

SEQ ID NO: 3134 - protein, 1834 aa, Homo sapiens
MKLSVNEAQLGFYLGSLSHLSACPGIDPRSSEDQPESLKTGQMMDESDEDFKELCASFFQRVKKHGIKEVSGERKTQKAASNGTQIRSKLKRTKQTATKTKTLQGPAEKKPPSGSQAPRTKKQRVTKWQASEPAHSVNGEGGVLASAPDPPVLRETAQNTQTGNQQEPSPNLSREKTRENVPNSDSQPPPSCLTTAVPSPSKPRTAQLVLQRMQQFKRADPERLRHASEECSLEAAREENVPKDPQEEMMAGNVYGLGPPAPESDAAVALTLQQEFARVGASAHDDSLEEKGLFFCQICQKNLSAMNVTRREQHVNRCLDEAEKTLRPSVPQIPECPICGKPFLTLKSRTSHLKQCAVKMEVGPQLLLQAVRLQTAQPEGSSSPPMFSFSDHSRGLKRRGPTSKKEPRKRRKVDEAPSEDLLVAMALSRSEMEPGAAVPALRLESAFSERIRPEAENKSRKKKPPVSPPLLLVQDSETTGRQIEDRVALLLSEEVELSSTPPLPASRILKEGWERAGQCPPPPERKQSFLWEGSALTGAWAMEDFYTARLVPPLVPQRPAQGLMQEPVPPLVPPEHSELSERRSPALHGTPTAGCGSRGPSPSASQREHQALQDLVDLAREGLSASPWPGSGGLAGSEGTAGLDVVPGGLPLTGFVVPSQDKHPDRGGRTLLSLGLLVADFGAMVNNPHLSDVQFQTDSGEVLYAHKFVLYARCPLLIQYVNNEGFSAVEDGVLTQRVLLGDVSTEAARTFLHYLYTADTGLPPGLSSELSSLAHRFGVSELVHLCEQVPIATDSEGKPWEEKEAENCESRAENFQELLRSMWADEEEEAETLLKSKDHEEDQENVNEAEMEEIYEFAATQRKLLQEERAAGAGEDADWLEGGSPVSGQLLAGVQVQKQWDKVEEMEPLEPGRDEAATTWEKMGQCALPPPQGQHSGARGAEAPEQEAPEEALGHSSCSSPSRDCQAERKEGSLPHSDDAGDYEQLFSSTQGEISEPSQITSEPEEQSGAVRERGLEVSHRLAPWQASPPHPCRFLLGPPQGGSPRGSHHTSGSSLSTPRSRGGTSQVGSPTLLSPAVPSKQKRDRSILTLSKEPGHQKGKERRSVLECRNKGVLMFPEKSPSIDLTQSNPDHSSSRSQKSSSKLNEEDEVILLLDSDEELELEQTKMKSISSDPLEEKKALEISPRSCELFSIIDVDADQEPSQSPPRSEAVLQQEDEGALPENRGSLGRRGAPWLFCDRESSPSEASTTDTSWLVPATPLASRSRDCSSQTQISSLRSGLAVQAVTQHTPRASVGNREGNEVAQKFSVIRPQTPPPQTPSSCLTPVSPGTSDGRRQGHRSPSRPHPGGHPHSSPLAPHPISGDRAHFSRRFLKHSPPGPSFLNQTPAGEVVEVGDSDDEQEVASHQANRSPPLDSDPPIPIDDCCWHMEPLSPIPIDHWNLERTGPLSTSSPSRRMNEAADSRDCRSPGLLDTTPIRGSCTTQRKLQEKSSGAGSLGNSRPSFLNSALWDVWDGEEQRPPETPPPAQMPSAGGAQKPEGLETPKGANRKKNLPPKVPITPMPQYSIMETPVLKKELDRFGVRPLPKRQMVLKLKEIFQYTHQTLDSDSEDESQSSQPLLQAPHCQTLASQTYKPSRAGVHAQQEATTGPGAHRPKGPAKTKGPRHQRKHHESITPPSRSPTKEAPPGLNDDAQIPASQESVATSVDGSDSSLSSQSSSSCEFGAAFESAGEEEGEGEVSASQAAVQAADTDEALRCYIRSKPALYQKVLLYQPFELRELQAELRQNGLRVSSRRLLDFLDTHCITFTTAATRREKLQGRRRQPRGKKKVERN

SEQ ID NO: 3135 - protein, 1353 aa, Homo sapiens
MASPPHQQLLHHHSTEVSCDSSGDSNSVRVKINPKQLSSNSHPKHCKYSISSSCSSSGDSGGVPRRVGGGGRLRRQKKLPQLFERASSRWWDPKFDSVNLEEACLERCFPQTQRRFRYALFYIGFACLLWSIYFAVHMRSRLIVMVAPALCFLLVCVGFFLFTFTKLYARHYAWTSLALTLLVFALTLAAQFQVLTPVSGRGDSSNLTATARPTDTCLSQVGSFSMCIEVLFLLYTVMHLPLYLSLCLGVAYSVLFETFGYHFRDEACFPSPGAGALHWELLSRGLLHGCIHAIGVHLFVMSQVRSRSTFLKVGQSIMHGKDLEVEKALKERMIHSVMPRIIADDLMKQGDEESENSVKRHATSSPKNRKKKSSIQKAPIAFRPFKMQQIEEVSILFADIVGFTKMSANKSAHALVGLLNDLFGRFDRLCEETKCEKISTLGDCYYCVAGCPEPRADHAYCCIEMGLGMIKAIEQFCQEKKEMVNMRVGVHTGTVLCGILGMRRFKFDVWSNDVNLANLMEQLGVAGKVHISEATAKYLDDRYEMEDGKVIERLGQSVVADQLKGLKTYLISGQRAKESRCSCAEALLSGFEVIDGSQVSSGPRGQGTASSGNVSDLAQTVKTFDNLKTCPSCGITFAPKSEAGAEGGAPQNGCQDEHKNSTKASGGPNPKTQNGLLSPPQEEKLTNSQTSLCEILQEKGRWAGVSLDQSALLPLRFKNIREKTDAHFVDVIKEDSLMKDYFFKPPINQFSLNFLDQELERSYRTSYQEEVIKNSPVKTFASPTFSSLLDVFLSTTVFLTLSTTCFLKYEAATVPPPPAALAVFSAALLLEVLSLAVSIRMVFFLEDVMACTKRLLEWIAGWLPRHCIGAILVSLPALAVYSHVTSEYETNIHFPVFTGSAALIAVVHYCNFCQLSSWMRSSLATVVGAGPLLLLYVSLCPDSSVLTSPLDAVQNFSSERNPCNSSVPRDLRRPASLIGQEVVLVFFLLLLLVWFLNREFEVSYRLHYHGDVEADLHRTKIQSMRDQADWLLRNIIPYHVAEQLKVSQTYSKNHDSGGVIFASIVNFSEFYEENYEGGKECYRVLNELIGDFDELLSKPDYSSIEKIKTIGATYMAASGLNTAQAQDGSHPQEHLQILFEFAKEMMRVVDDFNNNMLWFNFKLRVGFNHGPLTAGVIGTTKLLYDIWGDTVNIASRMDTTGVECRIQVSEESYRVLSKMGYDFDYRGTVNVKGKGQMKTYLYPKCTDHRVIPQHQLSISPDIRVQVDGSIGRSPTDEIANLVPSVQYVDKTSLGSDSSTQAKDAHLSPKRPWKEPVKAEERGRFGKAIEKDDCDETGIEEANELTKLNVSKSV

SEQ ID NO: 3136 - protein, 707 aa, Homo sapiens
MLGSLVLRRKALAPRLLLRLLRSPTLRGHGGASGRNVTTGSLGEPQWLRVATGGRPGTSPALFSGRGAATGGRQGGRFDTKCLAAATWGRLPGPEETLPGQDSWNGVPSRAGLGMCALAAALVVHCYSKSPSNKDAALLEAARANNMQEVSRLLSEGADVNAKHRLGWTALMVAAINRNNSVVQVLLAAGADPNLGDDFSSVYKTAKEQGIHSLEDGGQDGASRHITNQWTSALEFRRWLGLPAGVLITREDDFNNRLNNRASFKGCTALHYAVLADDYRTVKELLDGGANPLQRNEMGHTPLDYAREGEVMKLLRTSEAKYQEKQRKREAEERRRFPLEQRLKEHIIGQESAIATVGAAIRRKENGWYDEEHPLVFLFLGSSGIGKTELAKQTAKYMHKDAKKGFIRLDMSEFQERHEVAKFIGSPPGYVGHEEGGQLTKKLKQCPNAVVLFDEVDKAHPDVLTIMLQLFDEGRLTDGKGKTIDCKDAIFIMTSNVASDEIAQHALQLRQEALEMSRNRIAENLGDVQISDKITISKNFKENVIRPILKAHFRRDEFLGRINEIVYFLPFCHSELIQLVNKELNFWAKRAKQRHNITLLWDREVADVLVDGYNVHYGARSIKHEVERRVVNQLAAAYEQDLLPGGCTLRITVEDSDKQLLKSPELPSPQAEKRLPKLRLEIIDKDSKTRRLDIRAPLHPEKVCNTI

SEQ ID NO: 3137 - protein, 622 aa, Homo sapiens
MSEREERRFVEIPRESVRLMAESTGLELSDEVAALLAEDVCYRLREATQNSSQFMKHTKRRKLTVEDFNRALRWSSVEAVCGYGSQEALPMRPAREGELYFPEDREVNLVELALATNIPKGCAETAVRVHVSYLDGKGNLAPQGSVPSAVSSLTDDLLKYYHQVTRAVLGDDPQLMKVALQDLQTNSKIGALLPYFVYVVSGVKSVSHDLEQLHRLLQVARSLFRNPHLCLGPYVRCLVGSVLYCVLEPLAASINPLNDHWTLRDGAALLLSHIFWTHGDLVSGLYQHILLSLQKILADPVRPLCCHYGAVVGLHALGWKAVERVLYPHLSTYWTNLQAVLDDYSVSNAQVKADGHKVYGAILVAVERLLKMKAQAAEPNRGGPGGRGCRRLDDLPWDSLLFQESSSGGGAEPSFGSGLPLPPGGAGPEDPSLSVTLADIYRELYAFFGDSLATRFGTGQPAPTAPRPPGDKKEPAAAPDSVRKMPQLTASAIVSPHGDESPRGSGGGGPASASGPAASESRPLPRVHRARGAPRQQGPGTGTRDVFQKSRFAPRGAPHFRFIIAGRQAGRRCRGRLFQTAFPAPYGPSPASRYVQKLPMIGRTSRPARRWALSDYSLYLPL

SEQ ID NO: 3138 - protein, 619 aa, Homo sapiens
MADEGKSYSEHDDERVNFPQRKKKGRGPFRWKYGEGNRRSGRGGSGIRSSRLEEDDGDVAMSDAQDGPRVRYNPYTTRPNRRGDTWHDRDRIHVTVRRDRAPPERGGAGTSQDGTSKNWFKITIPYGRKYDKAWLLSMIQSKCSVPFTPIEFHYENTRAQFFVEDASTASALKAVNYKILDRENRRISIIINSSAPPHTILNELKPEQVEQLKLIMSKRYDGSQQALDLKGLRSDPDLVAQNIDVVLNRRSCMAATLRIIEENIPELLSLNLSNNRLYRLDDMSSIVQKAPNLKILNLSGNELKSERELDKIKGLKLEELWLDGNSLCDTFRDQSTYISAIRERFPKLLRLDGHELPPPIAFDVEAPTTLPPCKGSYFGTENLKSLVLHFLQQYYAIYDSGDRQGLLDAYHDGACCSLSIPFIPQNPARSSLAEYFKDSRNVKKLKDPTLRFRLLKHTRLNVVAFLNELPKTQHDVNSFVVDISAQTSTLLCFSVNGVFKEVDGKSRDSLRAFTRTFIAVPASNSGLCIVNDELFVRNASSEEIQRAFAMPAPTPSSSPVPTLSPEQQEMLQAFSTQSGMNLEWSQKCLQDNNWDYTRSAQAFTHLKAKGEIPEVAFMK

SEQ ID NO: 3139 - protein, 246 aa, Homo sapiens
MVKIYRHESLLGFFKGMSFPIASIAVVNSVLFGVYSNTLLVLTATSHQERRAQPPSYMHIFLAGCTGGFLQAYCLAPFDLIKVRLQNQTEPRAQPGSPPPRYQGPVHCAASIFREEGPRGLFRGAWALTLRDTPTVGIYFITYEGLCRQYTPEGQNPSSATVLVAGGFAGIASWVAATPLDMIKSRMQMDGLRRRVYQGMLDCMVSSIRQEGLGVFFRGVTINSARAFPVNAVTFLSYEYLLRWWG

SEQ ID NO: 3140 - protein, 381 aa, Homo sapiens
MALKAEGAALDCFEVTLKCEEGEDEEEAMVVAVIPRPEPMLRVTQQEKTPPPRPSPLEAGSDGCEEPKQQVSWEQEFLVGSSPGGSGRALCMVCGAEIRAPSADTARSHILEQHPHTLDLSPSEKSNILEAWSEGVALLQDVRAEQPSPPNSDSGQDAHPDPDANPDAARMPAEIVVLLDSEDNPSLPKRSRPRGLRPLELPAVPATEPGNKKPRGQRWKEPPGEEPVRKKRGRPMTKNLDPDPEPPSPDSPTETFAAPAEVRHFTDGSFPAGFVLQLFSHTQLRGPDSKDSPKDREVAEGGLPRAESPSPAPPPGLRGTLDLQVIRVRMEEPPAVSLLQDWSRHPQGTKRVGAGDTSDWPTVLSESSTTVAGKPEKGNGV

SEQ ID NO: 3141 - protein, 220 aa, Homo sapiens
MGNCAKRPWRRGPKDPLQWLGSPPRGSCPSPSSSPKEQGDPAPGVQGYSVLNSLVGPACIFLRPSIAATQLDRELRPEEIEELQVAFQEFDRDRDGYIGCRELGACMRTLGYMPTEMELIEISQQISGGKVDFEDFVELMGPKLLAETADMIGVRELRDAFREFDTNGDGRISVGELRAALKALLGERLSQREVDEILQDVDLNGDGLVDFEEFVRMMSR

SEQ ID NO: 3142 - protein, 1615 aa, Homo sapiens
MEAAPPGPPWPLLLLLLLLLALCGCPAPAAASPLLLFANRRDVRLVDAGGVKLESTIVVSGLEDAAAVDFQFSKGAVYWTDVSEEAIKQTYLNQTGAAVQNVVISGLVSPDGLACDWVGKKLYWTDSETNRIEVANLNGTSRKVLFWQDLDQPRAIALDPAHGYMYWTDWGETPRIERAGMDGSTRKIIVDSDIYWPNGLTIDLEEQKLYWADAKLSFIHRANLDGSFRQKVVEGSLTHPFALTLSGDTLYWTDWQTRSIHACNKRTGGKRKEILSALYSPMDIQVLSQERQPFFHTRCEEDNGGCSHLCLLSPSEPFYTCACPTGVQLQDNGRTCKAGAEEVLLLARRTDLRRISLDTPDFTDIVLQVDDIRHAIAIDYDPLEGYVYWTDDEVRAIRRAYLDGSGAQTLVNTEINDPDGIAVDWVARNLYWTDTGTDRIEVTRLNGTSRKILVSEDLDEPRAIALHPVMGLMYWTDWGENPKIECANLDGQERRVLVNASLGWPNGLALDLQEGKLYWGDAKTDKIEVINVDGTKRRTLLEDKLPHIFGFTLLGDFIYWTDWQRRSIERVHKVKASRDVIIDQLPDLMGLKAVNVAKVVGTNPCADRNGGCSHLCFFTPHATRCGCPIGLELLSDMKTCIVPEAFLVFTSRAAIHRISLETNNNDVAIPLTGVKEASALDFDVSNNHIYWTDVSLKTISRAFMNGSSVEHVVEFGLDYPEGMAVDWMGKNLYWADTGTNRIEVARLDGQFRQVLVWRDLDNPRSLALDPTKGYIYWTEWGGKPRIVRAFMDGTNCMTLVDKVGRANDLTIDYADQRLYWTDLDTNMIESSNMLGQERVVIADDLPHPFGLTQYSDYIYWTDWNLHSIERADKTSGRNRTLIQGHLDFVMDILVFHSSRQDGLNDCMHNNGQCGQLCLAIPGGHRCGCASHYTLDPSSRNCSPPTTFLLFSQKSAISRMIPDDQHSPDLILPLHGLRNVKAIDYDPLDKFIYWVDGRQNIKRAKDDGTQPFVLTSLSQGQNPDRQPHDLSIDIYSRTLFWTCEATNTINVHRLSGEAMGVVLRGDRDKPRAIVVNAERGYLYFTNMQDRAAKIERAALDGTEREVLFTTGLIRPVALVVDNTLGKLFWVDADLKRIESCDLSGANRLTLEDANIVQPLGLTILGKHLYWIDRQQQMIERVEKTTGDKRTRIQGRVAHLTGIHAVEEVSLEEFSAHPCARDNGGCSHICIAKGDGTPRCSCPVHLVLLQNLLTCGEPPTCSPDQFACATGEIDCIPGAWRCDGFPECDDQSDEEGCPVCSAAQFPCARGQCVDLRLRCDGEADCQDRSDEADCDAICLPNQFRCASGQCVLIKQQCDSFPDCIDGSDELMCEITKPPSDDSPAHSSAIGPVIGIILSLFVMGGVYFVCQRVVCQRYAGANGPFPHEYVSGTPHVPLNFIAPGGSQHGPFTGIACGKSMMSSVSLMGGRGGVPLYDRNHVTGASSSSSSSTKATLYPPILNPPPSPATDPSLYNMDMFYSSNIPATARPYRPYIIRGMAPPTTPCSTDVCDSDYSASRWKASKYYLDLNSDSDPYPPPPTPHSQYLSAEDSCPPSPATERSYFHLFPPPPSPCTDSS

SEQ ID NO: 3143 - protein, 752 aa, Homo sapiens
MAEPQAESEPLLGGARGGGGDWPAGLTTYRSIQVGPGAAARWDLCIDQAVVFIEDAIQYRSINHRVDASSMWLYRRYYSNVCQRTLSFTIFLILFLAFIETPSSLTSTADVRYRAAPWEPPCGLTESVEVLCLLVFAADLSVKGYLFGWAHFQKNLWLLGYLVVLVVSLVDWTVSLSLVCHEPLRIRRLLRPFFLLQNSSMMKKTLKCIRWSLPEMASVGLLLAIHLCLFTMFGMLLFAGGKQDDGQDRERLTYFQNLPESLTSLLVLLTTANNPDVMIPAYSKNRAYAIFFIVFTVIGSLFLMNLLTAIIYSQFRGYLMKSLQTSLFRRRLGTRAAFEVLSSMVGEGGAFPQAVGVKPQNLLQVLQKVQLDSSHKQAMMEKVRSYGSVLLSAEEFQKLFNELDRSVVKEHPPRPEYQSPFLQSAQFLFGHYYFDYLGNLIALANLVSICVFLVLDADVLPAERDDFILGILNCVFIVYYLLEMLLKVFALGLRGYLSYPSNVFDGLLTVVLLVLEISTLAVYRLPHPGWRPEMVGLLSLWDMTRMLNMLIVFRFLRIIPSMKLMAVVASTVLGLVQNMRAFGGILVVVYYVFAIIGINLFRGVIVALPGNSSLAPANGSAPCGSFEQLEYWANNFDDFAAALVTLWNLMVVNNWQVFLDAYRRYSGPWSKIYFVLWWLVSSVIWVNLFLALILENFLHKWDPRSHLQPLAGTPEATYQMTVELLFRDILEEPGEDELTERLSQHPHLWLCR

SEQ ID NO: 3144 - protein, 744 aa, Homo sapiens
MPEDQAGAAMEEASPYSLLDICLNFLTTHLEKFCSARQDGTLCLQEPGVFPQEVADRLLRTMAFHGLLNDGTVGIFRGNQMRLKRACIRKAKISAVAFRKAFCHHKLVELDATGVNADITITDIISGLGSNKWIQQNLQCLVLNSLTLSLEDPYERCFSRLSGLRALSITNVLFYNEDLAEVASLPRLESLDISNTSITDITALLACKDRLKSLTMHHLKCLKMTTTQILDVVRELKHLNHLDISDDKQFTSDIALRLLEQKDILPNLVSLDVSGRKHVTDKAVEAFIQQRPSMQFVGLLATDAGYSEFLTGEGHLKVSGEANETQIAEALKRYSERAFFVREALFHLFSLTHVMEKTKPEILKLVVTGMRNHPMNLPVQLAASACVFNLTKQDLAAGMPVRLLADVTHLLLKAMEHFPNHQQLQKNCLLSLCSDRILQDVPFNRFEAAKLVMQWLCNHEDQNMQRMAVAIISILAAKLSTEQTAQLGTELFIVRQLLQIVKQKTNQNSVDTTLKFTLSALWNLTDESPTTCRHFIENQGLELFMRVLESFPTESSIQQKVLGLLNNIAEVQELHSELMWKDFIDHISSLLHSVEVEVSYFAAGIIAHLISRGEQAWTLSRSQRNSLLDDLHSAILKWPTPECEMVAYRSFNPFFPLLGCFTTPGVQLWAVWAMQHVCSKNPSRYCSMLIEEGGLQHLYNIKDHEHTDPHVQQIAVAILDSLEKHIVRHGRPPPCKKQPQARLN

SEQ ID NO: 3145 - protein, 2620 aa, Homo sapiens
MESEEEQHMTTLLCMGFSDPATIRKALRLAKNDINEAVALLTNERPGLDYGGYEPMDSGGGPSPGPGGGPRGDGGGDGGGGGPSRGGSTGGGGGFDPPPAYHEVVDAEKNDENGNCSGEGIEFPTTNLYELESRVLTDHWSIPYKREESLGKCLLASTYLARLGLSESDENCRRFMDRCMPEAFKKLLTSSAVHKWGTEIHEGIYNMLMLLIELVAERIKQDPIPTGLLGVLTMAFNPDNEYHFKNRMKVSQRNWAEVFGEGNMFAVSPVSTFQKEPHGWVVDLVNKFGELGGFAAIQAKLHSEDIELGAVSALIQPLGVCAEYLNSSVVQPMLDPVILTTIQDVRSVEEKDLKDKRLVSIPELLSAVKLLCMRFQPDLVTIVDDLRLDILLRMLKSPHFSAKMNSLKEVTKLIEDSTLSKSVKNAIDTDRLLDWLVENSVLSIALEGNIDQAQYCDRIKGIIELLGSKLSLDELTKIWKIQSGQSSTVIENIHTIIAAAAVKFNSDQLNHLFVLIQKSWETESDRVRQKLLSLIGRIGREARFETTSGKVLDVLWELAHLPTLPSSLIQQALEEHLTILSDAYAVKEAIKRSYIIKCIEDIKRPGEWSGLEKNKKDGFKSSQLNNPQFVWVVPALRQLHEITRSFIKQTYQKQDKSIIQDLKKNFEIVKLVTGSLIACHRLAAAVAGPGGLSGSTLVDGRYTYREYLEAHLKFLAFFLQEATLYLGWNRAKEIWECLVTGQDVCELDREMCFEWFTKGQHDLESDVQQQLFKEKILKLESYEITMNGFNLFKTFFENVNLCDHRLKRQGAQLYVEKLELIGMDFIWKIAMESPDEEIANEAIQLIINYSYINLNPRLKKDSVSLHKKFIADCYTRLEAASSALGGPTLTHAVTRATKMLTATAMPTVATSVQSPYRSTKLVIIERLLLLAERYVITIEDFYSVPRTILPHGASFHGHLLTLNVTYESTKDTFTVEAHSNETIGSVRWKIAKQLCSPVDNIQIFTNDSLLTVNKDQKLLHQLGFSDEQILTVKTSGSGTPSGSSADSSTSSSSSSSGVFSSSYAMEQEKSLPGVVMALVCNVFDMLYQLANLEEPRITLRVRKLLLLIPTDPAIQEALDQLDSLGRKKTLLSESSSQSSKSPSLSSKQQHQPSASSILESLFRSFAPGMSTFRVLYNLEVLSSKLMPTADDDMARSCAKSFCENFLKAGGLSLVVNVMQRDSIPSEVDYETRQGVYSICLQLARFLLVGQTMPTLLDEDLTKDGIEALSSRPFRNVSRQTSRQMSLCGTPEKSSYRQLSVSDRSSIRVEEIIPAARVAIQTMEVSDFTSTVACFMRLSWAAAAGRLDLVGSSQPIKESNSLCPAGIRNRLSSSGSNCSSGSEGEPVALHAGICVRQQSVSTKDSLIAGEALSLLVTCLQLRSQQLASFYNLPCVADFIIDILLGSPSAEIRRVACDQLYTLSQTDTSAHPDVQKPNQFLLGVILTAQLPLWSPTSIMRGVNQRLLSQCMEYFDLRCQLLDDLTTSEMEQLRISPATMLEDEITWLDNFEPNRTAECETSEADNILLAGHLRLIKTLLSLCGAEKEMLGSSLIKPLLDDFLFRASRIILNSHSPAGSAAISQQDFHPKCSTANSRLAAYEVLVMLADSSPSNLQIIIKELLSMHHQPDPALTKEFDYLPPVDSRSSSGFVGLRNGGATCYMNAVFQQLYMQPGLPESLLSVDDDTDNPDDSVFYQVQSLFGHLMESKLQYYVPENFWKIFKMWNKELYVREQQDAYEFFTSLIDQMDEYLKKMGRDQIFKNTFQGIYSDQKICKDCPHRYEREEAFMALNLGVTSCQSLEISLDQFVRGEVLEGSNAYYCEKCKEKRITVKRTCIKSLPSVLVIHLMRFGFDWESGRSIKYDEQIRFPWMLNMEPYTVSGMARQDSSSEVGENGRSVDQGGGGSPRKKVALTENYELVGVIVHSGQAHAGHYYSFIKDRRGCGKGKWYKFNDTVIEEFDLNDETLEYECFGGEYRPKVYDQTNPYTDVRRRYWNAYMLFYQRVSDQNSPVLPKKSRVSVVRQEAEDLSLSAPSSPEISPQSSPRPHRPNNDRLSILTKLVKKGEKKGLFVEKMPARIYQMVRDENLKFMKNRDVYSSDYFSFVLSLASLNATKLKHPYYPCMAKVSLQLAIQFLFQTYLRTKKKLRVDTEEWIATIEALLSKSFDACQWLVEYFISSEGRELIKIFLLECNVREVRVAVATILEKTLDSALFYQDKLKSLHQLLEVLLALLDKDVPENCKNCAQYFFLFNTFVQKQGIRAGDLLLRHSALRHMISFLLGASRQNNQIRRWSSAQAREFGNLHNTVALLVLHSDVSSQRNVAPGIFKQRPPISIAPSSPLLPLHEEVEALLFMSEGKPYLLEVMFALRELTGSLLALIEMVVYCCFCNEHFSFTMLHFIKNQLETAPPHELKNTFQLLHEILVIEDPIQVERVKFVFETENGLLALMHHSNHVDSSRCYQCVKFLVTLAQKCPAAKEYFKENSHHWSWAVQWLQKKMSEHYWTPQSNVSNETSTGKTFQRTISAQDTLAYATALLNEKEQSGSSNGSESSPANENGDRHLQQGSESPMMIGELRSDLDDVDP

SEQ ID NO: 3146 - protein, 573 aa, Homo sapiens
MANAEVSVPVGDVVVVPTEGNEGENPEDTKTQVILQLQPVQQGLFIDGHFYNRIYEAGSENNTAVVAVETHTIHKIEEGIDTGTIEANEDMEIAYPITCGESKAILLWKKFVCPGINVKCVKFNDQLISPKHFVHLAGKSTLKDWKRAIRLGGIMLRKMMDSGQIDFYQHDKVCSNTCRSTKFDLLISSARAPVPGQQTSVVQTPTSADGSITQIAISEESMEEAGLEWNSALTAAVTMATEEGVKKDSEEISEDTLMFWKGIADVGLMEEVVCNIQKEIEELLRGVQQRLIQAPFQVTDAAVLNNVAHTFGLMDTVKKVLDNRRNQVEQGEEQFLYTLTDLERQLEEQKKQGQDHRLKSQTVQNVVLMPVSTPKPPKRPRLQRPASTTVLSPSPPVQQPQFTVISPITITPVGQSFSMGNIPVATLSQGSSPVTVHTLPSGPQLFRYATVVSSAKSSSPDTVTIHPSSSLALLSSTAMQDGSTLGNMTTMVSPVELVAMESGLTSAIQAVESTSEDGQTIIEIDPAPDPEAEDTEGKAVILETELRTEEKVVAEMEEHQHQVHNVEIVVLED

SEQ ID NO: 3147 - protein, 417 aa, Homo sapiens
MSSKYPRSVRRCLPLCALTLEAALILLFYFFTHYDASLEDQKGLVASYQVGQDLTVMAALGLGFLTSNFRRHSWSSVAFNLFMLALGVQWAILLDGFLSQFPPGKVVITLFSIRLATMSAMSVLISAGAVLGKVNLAQLVVMVLVEVTALGTLRMVISNIFNTDYHMNLRHFYVFAAYFGLTVAWCLPKPLPKGTEDNDQRATIPSLSAMLGALFLWMFWPSVNSALLRSPIQRKNAMFNTYYALAVSVVTAISGSSLAHPQRKISMTYVHSAVLAGGVAVGTSCHLIPSPWLAMVLGLVAGLISIGGAKCLPVCCNRVLGIHHISVMHSIFSLLGLLGEITYIVLLVLHTVWNGNGMIGFQVLLSIGELSLAIVIALTSGLLTGLLLNLKIWKAPHVAKYFDDQVFWKFPHLAVGF

SEQ ID NO: 3148 - protein, 691 aa, Homo sapiens
MAAAAGDGGGEGGAGLGSAAGLGPGPGLRGQGPSAEAHEGAPDPMPAALHPEEVAARLQRMQRELSNRRKILVKNLPQDSNCQEVHDLLKDYDLKYCYVDRNKRTAFVTLLNGEQAQNAIQMFHQYSFRGKDLIVQLQPTDALLCITNVPISFTSEEFEELVRAYGNIERCFLVYSEVTGHSKGYGFVEYMKKDFAAKARLELLGRQLGASALFAQWMDVNLLASELIHSKCLCIDKLPSDYRDSEELLQIFSSVHKPVFCQLAQDEGSYVGGFAVVEYSTAEQAEEVQQAADGMTIKGSKVQVSFCAPGAPGRSTLAALIAAQRVMHSNQKGLLPEPNPVQIMKSLNNPAMLQVLLQPQLCGRAVKPAVLGTPHSLPHLMNPSISPAFLHLNKAHQSSVMGNTSNLFLQNLSHIPLAQQQLMKFENIHTNNKPGLLGEPPAVVLQTALGIGSVLPLKKELGHHHGEAHKTSSLIPTQTTITAGMGMLPFFPNQHIAGQAGPGHSNTQEKQPATVGMAEGNFSGSQPYLQSFPNLAAGSLLVGHHKQQQSQPKGTEISSGAASKNQTSLLGEPPKEIRLSKNPYLNLASVLPSVCLSSPASKTTLHKTGIASSILDAISQGSESQHALEKCIAYSPPFGDYAQVSSLRNEKRGSSYLISAPEGGSVECVDQHSQGTGAYYMETYLKKKRVY

SEQ ID NO: 3149 - protein, 304 aa, Homo sapiens
METVPPAVDLVLGASACCLACVFTNPLEVVKTRLQLQGELQARGTYPRPYHGFIASVAAVARADGLWGLQKGLAAGLLYQGLMNGVRFYCYSLACQAGLTQQPGGTVVAGAVAGALGAFVGSPAYLIKTQLQAQTVAAVAVGHQHNHQTVLGALETIWRQQGLLGLWQGVGGAVPRVMVGSAAQLATFASAKAWVQKQQWLPEDSWLVALAGGMISSIAVVVVMTPFDVVSTRLYNQPVDTAGRGQLYGGLTDCMVKIWRQEGPLALYKGLGPAYLRLGPHTILSMLFWDELRKLAGRAQHKGT

SEQ ID NO: 3150 - protein, 1392 aa, Homo sapiens
MDTEDDPLLQDVWLEEEQEEEEATGETFLGAQKPGPQPGAGGQCCWRHWPLASRPPASGFWSTLGWAFTNPCCAGLVLFLGCSIPMALSAFMFLYYPPLDIDISYNAFEIRNHEASQRFDALTLALKSQFGSWGRNRRDLADFTSETLQRLISEQLQQLHLGNRSRQASRAPRVIPAASLGGPGPYRDTSAAQKPTANRSGRLRRETPPLEDLAANQSEDPRNQRLSKNGRYQPSIPPHAAVAANQSRARRGASRWDYSRAYVSANTQTHAHWRIELIFLARGDAERNIFTSERLVTIHEIERKIMDHPGFREFCWKPHEVLKDLPLGSYSYCSPPSSLMTYFFPTERGGKIYYDGMGQDLADIRGSLELAMTHPEFYWYVDEGLSADNLKSSLLRSEILFGAPLPNYYSVDDRWEEQRAKFQSFVVTYVAMLAKQSTSKVQVLYGGTDLFDYEVRRTFNNDMLLAFISSSCIAALVYILTSCSVFLSFFGIASIGLSCLVALFLYHVVFGIQYLGILNGVAAFVIVGIGVDDVFVFINTYRQATHLEDPQLRMIHTVQTAGKATFFTSLTTAAAYAANVFSQIPAVHDFGLFMSLIVSCCWLAVLVTMPAALGLWSLYLAPLESSCQTSCHQNCSRKTSLHFPGDVFAAPEQVGGSPAQGPIPYLDDDIPLLEVEEEPVSLELGDVSLVSVSPEGLQPASNTGSRGHLIVQLQELLHHWVLWSAVKSRWVIVGLFVSILILSLVFASRLRPASRAPLLFRPDTNIQVLLDLKYNLSAEGISCITCSGLFQEKPHSLQNNIRTSLEKKRRGSGVPWASRPEATLQDFPGTVYISKVKSQGHPAVYRLSLNASLPAPWQAVSPGDGEVPSFQVYRAPFGNFTKKLTACMSTVGLLQAASPSRKWMLTTLACDAKRGWKFDFSFYVATKEQQHTRKLYFAQSHKPPFHGRVCMAPPGCLLSSSPDGPTKGFFFVPSEKVPKARLSATFGFNPCVNTGCGKPAVRPLVDTGAMVFVVFGIIGVNRTRQVDNHVIGDPGSVVYDSSFDLFKEIGHLCHLCKAIAANSELVKPGGAQCLPSGYSISSFLQMLHPECKELPEPNLLPGQLSHGAVGVREGRVQWISMAFESTTYKGKSSFQTYSDYLRWESFLQQQLQALPEGSVLRRGFQTCEHWKQIFMEIVGVQSALCGLVLSLLICVAAVAVFTTHILLLLPVLLSILGIVCLVVTIMYWSGWEMGAVEAISLSILVGSSVDYCVHLVEGYLLAGENLPPHQAEDARTQRQWRTLEAVRHVGVAIVSSALTTVIATVPLFFCIIAPFAKFGKIVALNTGVSILYTLTVSTALLGIMAPSSFTRTRTSFLKALGAVLLAGALGLGACLVLLQSGYKIPLPAGASL

SEQ ID NO: 3151 - protein, 460 aa, Homo sapiens
MAGYLSESDFVMVEEGFSTRDLLKELTLGASQATTDEVAAFFVADLGAIVRKHFCFLKCLPRVRPFYAVKCNSSPGVLKVLAQLGLGFSCANKAEMELVQHIGIPASKIICANPCKQIAQIKYAAKHGIQLLSFDNEMELAKVVKSHPSAKMVLCIATDDSHSLSCLSLKFGVSLKSCRHLLENAKKHHVEVVGVSFHIGSGCPDPQAYAQSIADARLVFEMGTELGHKMHVLDLGGGFPGTEGAKVRFEEIASVINSALDLYFPEGCGVDIFAELGRYYVTSAFTVAVSIIAKKEVLLDQPGREEENGSTSKTIVYHLDEGVYGIFNSVLFDNICPTPILQKKPSTEQPLYSSSLWGPAVDGCDCVAEGLWLPQLHVGDWLVFDNMGAYTVGMGSPFWGTQACHITYAMSRVAWEALRRQLMAAEQEDDVEGVCKPLSCGWEITDTLCVGPVFTPASIM

SEQ ID NO: 3152 - protein, 1229 aa, Homo sapiens
MGASRDRGLAALWCLGLLGGLARVAGTHYRYLWRGCYPCHLGQAGYPVSAGDQRPDVDECRTHNGGCQHRCVNTPGSYLCECKPGFRLHTDSRTCLAINSCALGNGGCQHHCVQLTITRHRCQCRPGFQLQEDGRHCVRRSPCANRNGSCMHRCQVVRGLARCECHVGYQLAADGKACEDVDECAAGLAQCAHGCLNTQGSFKCVCHAGYELGADGRQCYRIEMEIVNSCEANNGGCSHGCSHTSAGPLCTCPRGYELDTDQRTCIDVDDCADSPCCQQVCTNNPGGYECGCYAGYRLSADGCGCEDVDECASSRGGCEHHCTNLAGSFQCSCEAGYRLHEDRRGCSPLEEPMVDLDGELPFVRPLPHIAVLQDELPQLFQDDDVGADEEEAELRGEHTLTEKFVCLDDSFGHDCSLTCDDCRNGGTCLLGLDGCDCPEGWTGLICNETCPPDTFGKNCSFSCSCQNGGTCDSVTGACRCPPGVSGTNCEDGCPKGYYGKHCRKKCNCANRGRCHRLYGACLCDPGLYGRFCHLTCPPWAFGPGCSEECQCVQPHTQSCDKRDGSCSCKAGFRGERCQAECELGYFGPGCWQACTCPVGVACDSVSGECGKRCPAGFQGEDCGQECPVGTFGVNCSSSCSCGGAPCHGVTGQCRCPPGRTGEDCEADCPEGRWGLGCQEICPACQHAARCDPETGACLCLPGFVGSRCQDVCPAGWYGPSCQTRCSCANDGHCHPATGHCSCAPGWTGFSCQRACDTGHWGPDCSHPCNCSAGHGSCDAISGLCLCEAGYVGPRCEQQCPQGHFGPGCEQRCQCQHGAACDHVSGACTCPAGWRGTFCEHACPAGFFGLDCRSACNCTAGAACDAVNGSCLCPAGRRGPRCAEKCLPRDVRAGCRHSGGCLNGGLCDPHTGRCLCPAGWTGDKCQSPCLRGWFGEACAQRCSCPPGAACHHVTGACRCPPGFTGSGCEQGCPPGRYGPGCEQLCGCLNGGSCDAATGACRCPTGFLGTDCNLTCPQGRFGPNCTHVCGCGQGAACDPVTGTCLCPPGRAGVRCERGCPQNRFGVGCEHTCSCRNGGLCHASNGSCSCGLGWTGRHCELACPPGRYGAACHLECSCHNNSTCEPATGTCRCGPGFYGQACEHRRSGATCNLDCRRGQFGPSCTLHCDCGGGADCDPVSGQCHCVDGYMGPTCREGGPLRLPENPSLAQGSAGTLPASSRPTSRSGGPARH

SEQ ID NO: 3153 - protein, 656 aa, Homo sapiens
MFEAIFPSTPQARLKRDPREKPGLSSFRSTFRQQSSLGLCIPRLMLPKEASPSQRHSSMSSSMARALVLLQSMASRDARCPEWKPHQKPRTLSKSVQTISRYYRKTSEPKDAASLTGFMSKMELRRVFPTHPDCPQFSTRATSMSHCGSPTEADLSGEIDNSSETWRGTQDLFLARRGSDTNVDGYLLPFSKSICEFDYLRKRRKSQTLSPVTSSSVASQSCLRKRMPWYLSVIHEKDHCLSELEIQVQKKDEEILLLQEEREALKMQLKCLLKGKGQETSMSPGRREQLSDASLKLGRLSLLKAFSRHEEELQHWWQMQEESAAPERGKEPDLGGGEEDEGLEGEPDGVEDTGAWGGVSQMGSVHEEGSEEEEEEEGDRDEDSEERELPEEEEIPRRRASSLAESFEEELLAQLEEYEQVILDFQFNLEATRTRYSLATGVIASLQQQVDFQETQLRKINTENETLQKELRERRQQLQAMTDKFSNLREDKKHQEMMGLIEKDNQLLRQQVSELERKLTKRDCVISELDTKVSQLQEQVELDQNHLQRWKQLQEDLQSKKEMIQQAEQHTRVALESSQSRLERLRNKIIQATFSISGTKSLANEISDNDILEALQRIISERSDYYNQLKQKGVKVPPLQQSEAFLTSKSKKGTSK

SEQ ID NO: 3154 - protein, 2047 aa, Homo sapiens
MAASERRAFAHKINRTVAAEVRKQVSRERSGSPHSSRRCSSSLGVPLTEVVEPLDFEDVLLSRPPDAEPGPLRDLVEFPADDLELLLQPRECRTTEPGIPKDEKLDAQVRAAVEMYIEDWVIVHRRYQYLSAAYSPVTTDTQRERQKGLPRQVFEQDASGDERSGPEDSNDSRRGSGSPEDTPRSSGASSIFDLRNLAADSLLPSLLERAAPEDVDRRNETLRRQHRPPALLTLYPAPDEDEAVERCSRPEPPREHFGQRILVKCLSLKFEIEIEPIFGILALYDVREKKKISENFYFDLNSDSMKGLLRAHGTHPAISTLARSAIFSVTYPSPDIFLVIKLEKVLQQGDISECCEPYMVLKEVDTAKNKEKLEKLRLAAEQFCTRLGRYRMPFAWTAVHLANIVSSAGQLDRDSDSEGERRPAWTDRRRRGPQDRASSGDDACSFSGFRPATLTVTNFFKQEAERLSDEDLFKFLADMRRPSSLLRRLRPVTAQLKIDISPAPENPHFCLSPELLHIKPYPDPRGRPTKEILEFPAREVYAPHTSYRNLLYVYPHSLNFSSRQGSVRNLAVRVQYMTGEDPSQALPVIFGKSSCSEFTREAFTPVVYHNKSPEFYEEFKLHLPACVTENHHLLFTFYHVSCQPRPGTALETPVGFTWIPLLQHGRLRTGPFCLPVSVDQPPPSYSVLTPDVALPGMRWVDGHKGVFSVELTAVSSVHPQDPYLDKFFTLVHVLEEGAFPFRLKDTVLSEGNVEQELRASLAALRLASPEPLVAFSHHVLDKLVRLVIRPPIISGQIVNLGRGAFEAMAHVVSLVHRSLEAAQDARGHCPQLAAYVHYAFRLPGTEPSLPDGAPPVTVQAATLARGSGRPASLYLARSKSISSSNPDLAVAPGSVDDEVSRILASKLLHEELALQWVVSSSAVREAILQHAWFFFQLMVKSMALHLLLGQRLDTPRKLRFPGRFLDDITALVGSVGLEVITRVHKDVELAEHLNASLAFFLSDLLSLVDRGFVFSLVRAHYKQVATRLQSSPNPAALLTLRMEFTRILCSHEHYVTLNLPCCPLSPPASPSPSVSSTTSQSSTFSSQAPDPKVTSMFELSGPFRQQHFLAGLLLTELALALEPEAEGAFLLHKKAISAVHSLLCGHDTDPRYAEATVKARVAELYLPLLSIARDTLPRLHDFAEGPGQRSRLASMLDSDTEGEGDIAGTINPSVAMAIAGGPLAPGSRASISQGPPTASRAGCALSAESSRTLLACVLWVLKNTEPALLQRWATDLTLPQLGRLLDLLYLCLAAFEYKGKKAFERINSLTFKKSLDMKARLEEAILGTIGARQEMVRRSRERSPFGNPENVRWRKSVTHWKQTSDRVDKTKDEMEHEALVEGNLATEASLVVLDTLEIIVQTVMLSEARESVLGAVLKVVLYSLGSAQSALFLQHGLATQRALVSKFPELLFEEDTELCADLCLRLLRHCGSRISTIRTHASASLYLLMRQNFEIGHNFARVKMQVTMSLSSLVGTTQNFSEEHLRRSLKTILTYAEEDMGLRDSTFAEQVQDLMFNLHMILTDTVKMKEHQEDPEMLIDLMYRIARGYQGSPDLRLTWLQNMAGKHAELGNHAEAAQCMVHAAALVAEYLALLEDHRHLPVGCVSFQNISSNVLEESAISDDILSPDEEGFCSGKHFTELGLVGLLEQAAGYFTMGGLYEAVNEVYKNLIPILEAHRDYKKLAAVHGKLQEAFTKIMHQSSGWERVFGTYFRVGFYGAHFGDLDEQEFVYKEPSITKLAEISHRLEEFYTERFGDDVVEIIKDSNPVDKSKLDSQKAYIQITYVEPYFDTYELKDRVTYFDRNYGLRTFLFCTPFTPDGRAHGELPEQHKRKTLLSTDHAFPYIKTRIRVCHREETVLTPVEVAIEDMQKKTRELAFATEQDPPDAKMLQMVLQGSVGPTVNQGPLEVAQVFLAEIPEDPKLFRHHNKLRLCFKDFCKKCEDALRKNKALIGPDQKEYHRELERNYCRLREALQPLLTQRLPQLMAPTPPGLRNSLNRASFRKADL

SEQ ID NO: 3155 - protein, 653 aa, Homo sapiens
MADYSTVPPPSSGSAGGGGGGGGGGGVNDAFKDALQRARQIAAKIGGDAGTSLNSNDYGYGGQKRPLEDGDQPDAKKVAPQNDSFGTQLPPMHQQQRSVMTEEYKVPDGMVGFIIGRGGEQISRIQQESGCKIQIAPDSGGLPERSCMLTGTPESVQSAKRLLDQIVEKGRPAPGFHHGDGPGNAVQEIMIPASKAGLVIGKGGETIKQLQERAGVKMVMIQDGPQNTGADKPLRITGDPYKVQQAKEMVLELIRDQGGFREVRNEYGSRIGGNEGIDVPIPRFAVGIVIGRNGEMIKKIQNDAGVRIQFKPDDGTTPERIAQITGPPDRCQHAAEIITDLLRSVQAGNPGGPGPGGRGRGRGQGNWNMGPPGGLQEFNFIVPTGKTGLIIGKGGETIKSISQQSGARIELQRNPPPNADPNMKLFTIRGTPQQIDYARQLIEEKIGGPVNPLGPPVPHGPHGVPGPHGPPGPPGPGTPMGPYNPAPYNPGPPGPAPHGPPAPYAPQGWGNAYPHWQQQAPPDPAKAGTDPNSAAWAAYYAHYYQQQAQPPPAAPAGAPTTTQTNGQGDQQNPAPAGQVDYTKAWEEYYKKMGQAVPAPTGAPPGGQPDYSAAWAEYYRQQAAYYAQTSPQGMPQHPPAPQCRFDPASIELAL

SEQ ID NO: 3156 - protein, 1247 aa, Homo sapiens
MLRLVAACPESCVVCTKDVTLCHQLTYIVAAPMTTRVLIITDGYLSSIESTNLSLLFNLALLSLSRNGIEDVQEDALHGLTMLRTLLLEHNQISSSSLTDHTFSKLHSLQVLVLSNNALRTLRGSWFRNTSGLTRLQLDGNQITNLTDSSFGGTNLHSLRYLDLSNNFISYIGKDAFRPLPQLQEVDLSRNRLAHMPDVFTPLKQLILLSLDKNQWSCTCDLHPLARFLRNYIKSSAHTLRNAKDLNCQPSTAAVAAAQSVLRLSETNCDSKAPNFTLVLKDRSPLLPGPDVALLTVLGFAGAVGLTCLGLVVFNWKLHQGKANEHTSENLCCRTFDEPLCAHEARNYHTKGYCNCHLTQENEIKVMSTVGSRKEMPLLQENSHQATSASESATLDGSFRNLKKKDRGVGSTLFCQDGRLLHSECSEPPGNMRAFNEAGLLTTYNPRKVQKLWNLEPGEVQPQTLQHHIIRTEDISSDIFRRRYATPASALAGESLEKRLTNESWQPPIEKEDNGLHPHRQRHFITSSSSKPCEPEEHYVQKIVQKNRSKYDDPCGLLKQSKPRYFQPNNSLICKYVPCEQFEDYMKEKKPNRRQHSKPEKEQIQINSAIEKFLMSEDNIDLSGLSTKTKKAYSPKRVIFHDPDLVEINRSMMSPKISTPWKRQKNQSNQLTKLDVKKFSNTGERNKGEKWFTNSWVLKRKRTPQSDLKGKIKGQNLKLNLHPFRKVRVHPEKSLSSLPKQCKQVLLPPKKLSKTSETEAKINTVCSADFLQQSESSNYVRLTSKRLPLKHDSKQTPYYQRNTKRAPLLSANNLRVVNQSSIESSCYSAGHIPDGNTSKLPQPTPTDAEHRHSHSQFSTEQMEDATQLESKVLSYLATTWENTGSDVLPFQHSRRATDQGTTESTEHMGQNVSKTSELNQFSLSPRNQTQLLDAHKTDSYNKEYTLDQNEALQHREQNSSHAQLENKEKTLMTKPQISHQIVENCIMDKEENDVEKKLSKTETYDSSLIPQTQSKNNLSFMKTNSIPYQNRIELPKDISTSPVSSQAVWHLTNSSEKGIDSTNALPRNDGTEALEIKIVGKEEKNMLDESKTDSSMLTQISQMTLKGITKERQQTWENGTSEKYILHDASSAEETITAKDLSITSSHETQNRILCSEVDPEVNSNVHNFREVQNIQPDKDSAHKEGAMTVETHEALSFLPGLKDSFEAENEVFLVPSRINEAENSAPKPVLYPPSAEYATTSPLETE

SEQ ID NO: 3157 - protein, 891 aa, Homo sapiens
MAPKQKKKTSRGKKRLKPVLAASEDMEPVNMESMGHPEIYPLVLTTKTQEIFNCRIDEDVTDEQPYKLINKEDIFEDLRNRAAVSDFHPVKKIVQEYPGNELLLVYDKDFKYGLNFYLIATEEGKENYLNPPEVPEEQEEYKEHIPEDVYIYKPPVSKPWVSLGSEKEIEEESVTESTKQITYMISRKRSEFGAPIKFSDQNASSVKDAYIECTAYPDKNFTLKQLEKDVGMQVIPQIKDISTQTKWTYPKNATTQYYPREFSEEEKETLKQSKPLVDFLNNASISVEIALQQNEIMNTFIDDWKYLAEEEGTFGDKTDTHLKEYQSFTDLHSPTEKMITCVSWHPTIYGLIAVSVAVRLSFEDRVHFSGKLLLQPSLILFWSFSDPIHPQLMLESPDDIFCFKFCPSDPNIIAGGCINGQIVMWDITAHADRIENIKAGGSRSKRATLKPMFLLEPESNKEAMYIRHCAVSSIENGHKKVITDIHWLSDTFEINRMGSVFENRSGICCQLVTCSADCTICFWDIRPQKPLTPQTTEKKKEESIEIPFDVPSTFLHLDLSWKPLTKVRLSKGETSLDHCPTKISLNEDHLLCKTQDKMLAQSKTEKAEEMNPYHNLESGMANLLKPIDDFCTKFFVGTEEGEVIYTDWKMEKDPETGRLMSKKPVSHHTIHDGTVHTIQRSPFYNDIILTVGGWNVAIWKEGVMTGPLLQSCCAPKRYTSGHWSLTRPGVFYIGREDGYIDIWDLLEKTHEPAQSQNICITMITYIKPWIFSSKQQFIATADYYGTLHILEIPWTLSRPSTNEMASVNHYFEREVKHLEYVEQRKKIREQEKKEMELEMAKKKVKTYQKSKEQMQAELKMDYESYLELEKTVLINLGLIKVTEKGSYMEVM

SEQ ID NO: 3158 - protein, 620 aa, Homo sapiens
MEKAVNDGSHSEELFCHLKTISEKEDLPRCTSESHLSCLKQDILNEKTELEATLKEAELVTHSVELLLPLFKDTIEKINFENANLSALNLKISEQKEILIKELDTFKSVKLALEHLLRKRDYKQTGDNLSSMLLENLTDNESENTNLKKKVFEKEAHIQELSCLFQSEKANTLKANRFSQSVKVVHERLQIQIHKREAENDKLKEYVKSLETKIAKWNLQSRMNKNEAIVMKEASRQKTVALKKASKVYKQRLDHFTGAIEKLTSQIRDQEAKLSETISASNAWKSHYEKIVIEKTELEVQIETMKKQIINLLEDLKKMEDHGKNSCEEILRKVHSIEYENETLNLENTKLKTTLAALKDEVVSVENELSELQEVEKKQKTLIEMYKTQVQKLQEAAEIVKSRCENLLHKNNQITKTKNKNVEKMRGQMESHLKELERVCDSLTAAERRLHECQESLQCCKGKCADQEHTIRELQGQILKQWEEYSVLAWVDGNHNLLTKLSLEEENCLIQLKCENLQQKLEQMDAENKELEKKLANQEECLKHSNLKFKEKSAEYTALARQLEAALEEGRQKVAEEIEKMSSRESALQIKILDLETELRKKNEEQNQLVCKMNSDPETP

SEQ ID NO: 3159 - protein, 422 aa, Homo sapiens
MPRSFLVKSKKAHSYHQPRSPGPDYSLRLENVPAPSRADSTSNAGGAKAEPRDRLSPESQLTEAPDRASASPDSCEGSVCERSSEFEDFWRPPSPSASPASEKSMCPSLDEAQPFPLPFKPYSWSGLAGSDLRHLVQSYRPCGALERGAGLGLFCEPAPEPGHPAALYGPKRAAGGAGAGAPGSCSAGAGATAGPGLGLYGDFGSAAAGLYERPTAAAGLLYPERGHGLHADKGAGVKVESELLCTRLLLGGGSYKCIKCSKVFSTPHGLEVHVRRSHSGTRPFACEMCGKTFGHAVSLEQHKAVHSQERSFDCKICGKSFKRSSTLSTHLLIHSDTRPYPCQYCGKRFHQKSDMKKHTFIHTGEKPHKCQVCGKAFSQSSNLITHSRKHTGFKPFGCDLCGKGFQRKVDLRRHRETQHGLK

SEQ ID NO: 3160 - protein, 1532 aa, Homo sapiens
MGHSKQIRILLLNEMEKLEKTLFRLEQGYELQFRLGPTLQGKAVTVYTNYPFPGETFNREKFRSLDWENPTEREDDSDKYCKLNLQQSGSFQYYFLQGNEKSGGGYIVVDPILRVGADNHVLPLDCVTLQTFLAKCLGPFDEWESRLRVAKESGYNMIHFTPLQTLGLSRSCYSLANQLELNPDFSRPNRKYTWNDVGQLVEKLKKEWNVICITDVVYNHTAANSKWIQEHPECAYNLVNSPHLKPAWVLDRALWRFSCDVAEGKYKEKGIPALIENDHHMNSIRKIIWEDIFPKLKLWEFFQVDVNKAVEQFRRLLTQENRRVTKSDPNQHLTIIQDPEYRRFGCTVDMNIALTTFIPHDKGPAAIEECCNWFHKRMEELNSEKHRLINYHQEQAVNCLLGNVFYERLAGHGPKLGPVTRKHPLVTRYFTFPFEEIDFSMEESMIHLPNKACFLMAHNGWVMGDDPLRNFAEPGSEVYLRRELICWGDSVKLRYGNKPEDCPYLWAHMKKYTEITATYFQGVRLDNCHSTPLHVAEYMLDAARNLQPNLYVVAELFTGSEDLDNVFVTRLGISSLIREAMSAYNSHEEGRLVYRYGGEPVGSFVQPCLRPLMPAIAHALFMDITHDNECPIVHRSAYDALPSTTIVSMACCASGSTRGYDELVPHQISVVSEERFYTKWNPEALPSNTGEVNFQSGIIAARCAISKLHQELGAKGFIQVYVDQVDEDIVAVTRHSPSIHQSVVAVSRTAFRNPKTSFYSKEVPQMCIPGKIEEVVLEARTIERNTKPYRKDENSINGTPDITVEIREHIQLNESKIVKQAGVATKGPNEYIQEIEFENLSPGSVIIFRVSLDPHAQVAVGILRNHLTQFSPHFKSGSLAVDNADPILKIPFASLASRLTLAELNQILYRCESEEKEDGGGCYDIPNWSALKYAGLQGLMSVLAEIRPKNDLGHPFCNNLRSGDWMIDYVSNRLISRSGTIAEVGKWLQAMFFYLKQIPRYLIPCYFDAILIGAYTTLLDTAWKQMSSFVQNGSTFVKHLSLGSVQLCGVGKFPSLPILSPALMDVPYRLNEITKEKEQCCVSLAAGLPHFSSGIFRCWGRDTFIALRGILLITGRYVEARNIILAFAGTLRHGLIPNLLGEGIYARYNCRDAVWWWLQCIQDYCKMVPNGLDILKCPVSRMYPTDDSAPLPAGTLDQPLFEVIQEAMQKHMQGIQFRERNAGPQIDRNMKDEGFNITAGVDEETGFVYGGNRFNCGTWMDKMGESDRARNRGIPATPRDGSAVEIVGLSKSAVRWLLELSKKNIFPYHEVTVKRHGKAIKVSYDEWNRKIQDNFEKLFHVSEDPSDLNEKHPNLVHKRGIYKDSYGASSPWCDYQLRPNFTIAMVVAPELFTTEKAWKALEIAEKKLLGPLGMKTLDPDDMVYCGIYDNALDNDNYNLAKGFNYHQGPEWLWPIGYFLRAKLYFSRLMGPETTAKTIVLVKNVLSRHYVHLERSPWKGLPELTNENAQYCPFSCETQAWSIATILETLYDL

SEQ ID NO: 3161 - protein, 1135 aa, Homo sapiens
MVDLESEVPPLPPRYRFRDLLLGDQGWQNDDRVQVEFYMNENTFKERLKLFFIKNQRSSLRIRLFNFSLKLLSCLLYIIRVLLENPSQGNEWSHIFWVNRSLPLWGLQVSVALISLFETILLGYLSYKGNIWEQILRIPFILEIINAVPFIISIFWPSLRNLFVPVFLNCWLAKHALENMINDLHRAIQRTQSAMFNQVLILISTLLCLIFTCICGIQHLERIGKKLNLFDSLYFCIVTFSTVGFGDVTPETWSSKLFVVAMICVALVVLPIQFEQLAYLWMERQKSGGNYSRHRAQTEKHVVLCVSSLKIDLLMDFLNEFYAHPRLQDYYVVILCPTEMDVQVRRVLQIPMWSQRVIYLQGSALKDQDLLRAKMDDAEACFILSSRCEVDRTSSDHQTILRAWAVKDFAPNCPLYVQILKPENKFHIKFADHVVCEEEFKYAMLALNCICPATSTLITLLVHTSRGQEGQQSPEQWQKMYGRCSGNEVYHIVLEESTFFAEYEGKSFTYASFHAHKKFGVCLIGVRREDNKNILLNPGPRYIMNSTDICFYINITKEENSAFKNQDQQRKSNVSRSFYHGPSRLPVHSIIASMGTVAIDLQDTSCRSASGPTLSLPTEGSKEIRRPSIAPVLEVADTSSIQTCDLLSDQSEDETTPDEEMSSNLEYAKGYPPYSPYIGSSPTFCHLLHEKVPFCCLRLDKSCQHNYYEDAKAYGFKNKLIIVAAETAGNGLYNFIVPLRAYYRPKKELNPIVLLLDNPPDMHFLDAICWFPMVYYMVGSIDNLDDLLRCGVTFAANMVVVDKESTMSAEEDYMADAKTIVNVQTLFRLFSSLSIITELTHPANMRFMQFRAKDCYSLALSKLEKKERERGSNLAFMFRLPFAAGRVFSISMLDTLLYQSFVKDYMISITRLLLGLDTTPGSGFLCSMKITADDLWIRTYARLYQKLCSSTGDVPIGIYRTESQKLTTSESQISISVEEWEDTKDSKEQGHHRSNHRNSTSSDQSDHPLLRRKSMQWARRLSRKGPKHSGKTAEKITQQRLNLYRRSERQELAELVKNRMKHLGLSTVGYDEMNDHQSTLSYILINPSPDTRIELNDVVYLIRPDPLAYLPNSEPSRRNSICNVTGQDSREETQL

SEQ ID NO: 3162 - protein, 739 aa, Homo sapiens
MPGKMVVILGASNILWIMFAASQAFKIETTPESRYLAQIGDSVSLTCSTTGCESPFFSWRTQIDSPLNGKVTNEGTTSTLTMNPVSFGNEHSYLCTATCESRKLEKGIQVEIYSFPKDPEIHLSGPLEAGKPITVKCSVADVYPFDRLEIDLLKGDHLMKSQEFLEDADRKSLETKSLEVTFTPVIEDIGKVLVCRAKLHIDEMDSVPTVRQAVKELQVYISPKNTVISVNPSTKLQEGGSVTMTCSSEGLPAPEIFWSKKLDNGNLQHLSGNATLTLIAMRMEDSGIYVCEGVNLIGKNRKEVELIVQEKPFTVEISPGPRIAAQIGDSVMLTCSVMGCESPSFSWRTQIDSPLSGKVRSEGTNSTLTLSPVSFENEHSYLCTVTCGHKKLEKGIQVELYSFPRDPEIEMSGGLVNGSSVTVSCKVPSVYPLDRLEIELLKGETILENIEFLEDTDMKSLENKSLEMTFIPTIEDTGKALVCQAKLHIDDMEFEPKQRQSTQTLYVNVAPRDTTVLVSPSSILEEGSSVNMTCLSQGFPAPKILWSRQLPNGELQPLSENATLTLISTKMEDSGVYLCEGINQAGRSRKEVELIIQVTPKDIKLTAFPSESVKEGDTVIISCTCGNVPETWIILKKKAETGDTVLKSIDGAYTIRKAQLKDAGVYECESKNKVGSQLRSLTLDVQGRENNKDYFSPELLVLYFASSLIIPAIGMIIYFARKANMKGSYSLVEAQKSKV

SEQ ID NO: 3163 - protein, 1892 aa, Homo sapiens
MANRRVGRGCWEVSPTERRPPAGLRGPAAEEEASSPPVLSLSHFCRSPFLCFGDVLLGASRTLSLALDNPNEEVAEVKISHFPAADLGFSVSQRCFVLQPKEKIVISVNWTPLKEGRVREIMTFLVNDVLKHQAILLGNAEEQKKKKRSLWDTIKKKKISASTSHNRRVSNIQNVNKTFSVSQKVDRVRSPLQACENLAMNEGGPPTENNSLILEENKIPISPISPAFNECHGATCLPLSVRRSTTYSSLHASENRELLNVHSANVSKVSFNEKAVTETSFNSVNVNGQRGENSKLSLTPNCSSTLNITQSQIHFLSPDSFVNNSHGANNELELVTCLSSDMFMKDNSQPVHLESTIAHEIYQKILSPDSFIKDNYGLNQDLESESVNPILSPNQFLKDNMAYMCTSQQTCKVPLSNENSQVPQSPEDWRKSEVSPRIPECQGSKSPKAIFEELVEMKSNYYSFIKQNNPKFSAVQDISSHSHNKQPKRRPILSATVTKRKATCTRENQTEINKPKAKRCLNSAVGEHEKVINNQKEKEDFHSYLPIIDPILSKSKSYKNEVTPSSTTASVARKRKSDGSMEDANVRVAITEHTEVREIKRIHFSPSEPKTSAVKKTKNVTTPISKRISNREKLNLKKKTDLSIFRTPISKTNKRTKPIIAVAQSSLTFIKPLKTDIPRHPMPFAAKNMFYDERWKEKQEQGFTWWLNFILTPDDFTVKTNISEVNAATLLLGIENQHKISVPRAPTKEEMSLRAYTARCRLNRLRRAACRLFTSEKMVKAIKKLEIEIEARRLIVRKDRHLWKDVGERQKVLNWLLSYNPLWLRIGLETTYGELISLEDNSDVTGLAMFILNRLLWNPDIAAEYRHPTVPHLYRDGHEEALSKFTLKKLLLLVCFLDYAKISRLIDHDPCLFCKDAEFKASKEILLAFSRDFLSGEGDLSRHLGLLGLPVNHVQTPFDEFDFAVTNLAVDLQCGVRLVRTMELLTQNWDLSKKLRIPAISRLQKMHNVDIVLQVLKSRGIELSDEHGNTILSKDIVDRHREKTLRLLWKIAFAFQVDISLNLDQLKEEIAFLKHTKSIKKTISLLSCHSDDLINKKKGKRDSGSFEQYSENIKLLMDWVNAVCAFYNKKVENFTVSFSDGRVLCYLIHHYHPCYVPFDAICQRTTQTVECTQTGSVVLNSSSESDDSSLDMSLKAFDHENTSELYKELLENEKKNFHLVRSAVRDLGGIPAMINHSDMSNTIPDEKVVITYLSFLCARLLDLRKEIRAARLIQTTWRKYKLKTDLKRHQEREKAARIIQLAVINFLAKQRLRKRVNAALVIQKYWRRVLAQRKLLMLKKEKLEKVQNKAASLIQAMWRRYRAKKYLCKVKAACKIQAWYRCWRAHKEYLAILKAVKIIQGCFYTKLERTRFLNVRASAIIIQRKWRAILPAKIAHEHFLMIKRHRAACLIQAHYRGYKGRQVFLRQKSAALIIQKYIRAREAGKHERIKYIEFKKSTVILQALVRGWLVRKRFLEQRAKIRLLHFTAAAYYHLNAVRIQRAYKLYLAVKNANKQVNSVICIQRWFRARLQEKRFIQKYHSIKKIEHEGQECLSQRNRAASVIQKAVRHFLLRKKQEKFTSGIIKIQALWRGYSWRKKNDCTKIKAIRLSLQVVNREIREENKLYKRTALALHYLLTYKHLSAILEALKHLEVVTRLSPLCCENMAQSGAISKIFVLIRSCNRSIPCMEVIRYAVQVLLNVSKYEKTTSAVYDVENCIDILLELLQIYREKPGNKVADKGGSIFTKTCCLLAILLKTTNRASDVRSRSKVVDRIYSLYKLTAHKHKMNTERILYKQKKNSSISIPFIPETPVRTRIVSRLKPDWVLRRDNMEEITNPLQAIQMVMDTLGIPY

SEQ ID NO: 3164 - protein, 352 aa, Homo sapiens
MDCRTKANPDRTFDLVLKVKCHASENEDPVVLWKFPEDFGDQEILQSVPKFCFPFDVERVSQNQVGQHFTFVLTDIESKQRFGFCRLTSGGTICLCILSYLPWFEVYYKLLNTLADYLAKELENDLNETLRSLYNHPVPKANTPVNLSVHSYFIAPDVTGLPTIPESRNLTEYFVAVDVNNMLQLYASMLHERRIVIISSKLSTLTACIHGSAALLYPMYWQHIYIPVLPPHLLDYCCAPMPYLIGIHSSLIERVKNKSLEDVVMLNVDTNTLESPFSDLNNLPSDVVSALKNKLKKQSTATGDGVARAFLRAQAALFGSYRDALRYKPGTRGHINNGCIQSRKEVHCSTQQ

SEQ ID NO: 3165 - protein, 922 aa, Homo sapiens
MKMASTRCKLARYLEDLEDVDLKKFKMHLEDYPPQKGCIPLPRGQTEKADHVDLATLMIDFNGEEKAWAMAVWIFAAINRRDLYEKAKRDEPKWGSDNARVSNPTVICQEDSIEEEWMGLLEYLSRISICKMKKDYRKKYRKYVRSRFQCIEDRNARLGESVSLNKRYTRLRLIKEHRSQQEREQELLAIGKTKTCESPVSPIKMELLFDPDDEHSEPVHTVVFQGAAGIGKTILARKMMLDWASGTLYQDRFDYLFYIHCREVSLVTQRSLGDLIMSCCPDPNPPIHKIVRKPSRILFLMDGFDELQGAFDEHIGPLCTDWQKAERGDILLSSLIRKKLLPEASLLITTRPVALEKLQHLLDHPRHVEILGFSEAKRKEYFFKYFSDEAQARAAFSLIQENEVLFTMCFIPLVCWIVCTGLKQQMESGKSLAQTSKTTTAVYVFFLSSLLQPRGGSQEHGLCAHLWGLCSLAADGIWNQKILFEESDLRNHGLQKADVSAFLRMNLFQKEVDCEKFYSFIHMTFQEFFAAMYYLLEEEKEGRTNVPGSRLKLPSRDVTVLLENYGKFEKGYLIFVVRFLFGLVNQERTSYLEKKLSCKISQQIRLELLKWIEVKAKAKKLQIQPSQLELFYCLYEMQEEDFVQRAMDYFPKIEINLSTRMDHMVSSFCIENCHRVESLSLGFLHNMPKEEEEEEKEGRHLDMVQCVLPSSSHAACSHGLGRCGLSHECCFDISLVLSSNQKLVELDLSDNALGDFGIRLLCVGLKHLLCNLKKLWLVNSGLTSVCCSALSSVLSTNQNLTHLYLRGNTLGDKGIKLLCEGLLHPDCKLQVLELDNCNLTSHCCWDLSTLLTSSQSLRKLSLGNNDLGDLGVMMFCEVLKQQSCLLQNLGLSEMYFNYETKSALETLQEEKPELTVVFEPSW

SEQ ID NO: 3166 - protein, 587 aa, Homo sapiens
MPTALCPRVLAPKESEEPRKMRSPPGENPSPQGELPSPESSRRLFRRFRYQEAAGPREALQRLWDLCGGWLRPERHTKEQILELLVLEQFLAILPREIQSWVRAQEPESGEQAVAAVEALEREPGRPWQWLKHCEDPVVIDDGDSPLDQEQEQLPVEPHSDLAKNQDAQPITLAQCLGLPSRPPSQLSGDPVLQDAFLLQEENVRDTQQVTTLQLPPSRVSPFKDMILCFSEEDWSLLDPAQTGFYGEFIIGEDYGVSMPPNDLAAQPDLSQGEENEPRVPELQDLQGKEVPQVSYLDSPSLQPFQVEERRKREELQVPEFQACPQTVVPQNTYPAGGNPRSLENSLDEEVTIEIVLSSSGDEDSQHGPYCTEELGSPTEKQRSLPASHRSSTEAGGEVQTSKKSYVCPNCGKIFRWRVNFIRHLRSRREQEKPHECSVCGELFSDSEDLDGHLESHEAQKPYRCGACGKSFRLNSHLLSHRRIHLQPDRLQPVEKREQAASEDADKGPKEPLENGKAKLSFQCCECGKAFQRHDHLARHRSHFHLKDKARPFQCRYCVKSFTQNYDLLRHERLHMKRRSKQALNSY

SEQ ID NO: 3167 - protein, 750 aa, Homo sapiens
MAKPRLLVLYFALIVVPAWVSSIVLTGTSEPPDAQTVAPAEDETLQNEADNQENVLSQLLGDYDKVKAMSEGSDCQCKCVVRPLGRDACQRINAGASRKEDFYTVETITSGSSCKCACVAPPSALNPCEGDFRLQKLREADSQDLKLSTIIDMLEGAFYGLDLLKLHSVTTKLVGRVDKLEEEVSKNLTKENEQIKEDMEEIRTEMNKRGKENCSENILDSMPDIRSALQRDAAAAYAHPEYEERFLQEETVSQQINSIELLQTRPLALPEVVKSQRPLQRQVHLRGRPASQPTVIRGITYYKAKVSEEENDIEEQQDEFFSGDNGVDLLIEDQLLRHNGLMTSVTRRPAATRQGHSTAVTSDLNARTAPWSSALPQPSTSDPSIANHASVGPTLQTTSVSPDPTRESVLQPSPQVPATTVAHTATQQPAAPAPPAVSPREALMEAMHTVPVPPTTVRTDSLGKDAPAGWGTTPASPTLSPEEEDDIRNVIGRCKDTLSTITGPTTQNTYGRNEGAWMKDPLAKDERIYVTNYYYGNTLVEFRNLENFKQGRWSNSYKLPYSWIGTGHVVYNGAFYYNRAFTRNIIKYDLKQRYVAAWAMLHDVAYEEATPWRWQGHSDVDFAVDENGLWLIYPALDDEGFSQEVIVLSKLNAADLSTQKETTWRTGLRRNFYGNCFVICGVLYAVDSYNQRNANISYAFDTHTNTQIVPRLLFENEYSYTTQIDYNPKDRLLYAWDNGHQVTYHVIFAY

SEQ ID NO: 3168 - protein, 225 aa, Homo sapiens
MKLGCVLMAWALYLSLGVLWVAQMLLAAGCHAELFPAPILRAVPSAEPQAGSPMTLSCQTKLPLQRSAARLLFSFYKDGRIVQSRGLSSEFQIPTASEDHSGSYWCEAATEDNQVWKQSPQLEIRVQGASSSAAPPTLNPAPQKSAAPGTAPEEAPGPLPPPPTPSSEDPGFSSPLGMPDPHLYHQMGLLLKHMQDVRVLLGHLLMELRELSGHRKPGTTKATAE

SEQ ID NO: 3169 - protein, 264 aa, Homo sapiens
MKLGCVLMAWALYLSLGVLWVAQMLLAASFETLQCEGPVCTEESSCHTEDDLTDAREAGFQVKAYTFSEPFHLIVSYDWLILQGPAKPVFEGDLLVLRCQAWQDWPLTQVTFYRDGSALGPPGPNREFSITVVQKADSGHYHCSGIFQSPGPGIPETASVVAITVQGASSSAAPPTLNPAPQKSAAPGTAPEEAPGPLPPPPTPSSEDPGFSSPLGMPDPHLYHQMGLLLKHMQDVRVLLGHLLMELRELSGHRKPGTTKATAE

SEQ ID NO: 3170 - protein, 382 aa, Homo sapiens
MLDGLKMEENFQSAIDTSASFSSLLGRAVSPKSVCEGCQRVILDRFLLRLNDSFWHEQCVQCASCKEPLETTCFYRDKKLYCKYDYEKLFAVKCGGCFEAIAPNEFVMRAQKSVYHLSCFCCCVCERQLQKGDEFVLKEGQLLCKGDYEKERELLSLVSPAASDSGKSDDEESLCKSAHGAGKGTAEEGKDHKRPKRPRTILTTQQRRAFKASFEVSSKPCRKVRETLAAETGLSVRVVQVWFQNQRAKMKKLARRQQQQQQDQQNTQRLSSAQTNGGGSAGMEGIMNPYTALPTPQQLLAIEQSVYSSDPFRQGLTPPQMPGDHMHPYGAEPLFHDLDSDDTSLSNLGDCFLATSEAGPLQSRVGNPIDHLYSMQNSYFTS

SEQ ID NO: 3171 - protein, 313 aa, Homo sapiens
MSLASGPGPGWLLFSFGMGLVSGSKCPNNCLCQAQEVICTGKQLTEYPLDIPLNTRRLFLNENRITSLPAMHLGLLSDLVYLDCQNNRIREVMDYTFIGVFKLIYLDLSSNNLTSISPFTFSVLSNLVQLNIANNPHLLSLHKFTFANTTSLRYLDLRNTGLQTLDSAALYHLTTLETLFLSGNPWKCNCSFLDFAIFLIVFHMDPSDDLNATCVEPTELTGWPITRVGNPLRYMCITHLDHKDYIFLLLIGFCIFAAGTVAAWLTGVCAVLYQNTRHKSSEEDEDEAGTRVEVSRRIFQTQTSSVQEFPQLI

SEQ ID NO: 3172 - protein, 594 aa, Homo sapiens
MNADFLLPYYTAQSGSSMSMFNTTMGKLQRQLYKGEYDIFKYAPIFESDFIQITKRGEVIDVHNRVRMVTMGIARTSPILPLPDVMLLARPATGCEEYAGHGQATKRKKRKAAKNLELTRLLPLRFVRISVQDHEKQQLRLKFATGRSCYLQLCPALDTRDDLFAYWEKLIYLLRPPMESNSSTCGIPAEDMMWMPVFQEDRRSLGAVNLQGKGDQDQVSIQSLHMVSEVCGATSAAYAGGEGLQNDFNKPTNVLNASIPKTSTELAEEPATGGIKEAAAAGAAAGAATGTVAGALSVAAANSAPGQVSAAIAGAATIGAGGNKGNMALAGTASMAPNSTKVAVAGAAGKSSEHVSSASMSLSREGSVSLAIAGVVLTSRTAAEADMDAAAGPPVSTRQSKSSLSGQHGRERTQASAEGCKEGRERREKDRALGRSSHRRRTGESRHKTRGDKIAQKSSSRSSFSHRANRDDKKEKGCGNPGSSRHRDSHKGVSHTPISKESRTSHKSGRSLWTTSSGSSKGLGRVSSFLRNVRANLTTKVVGTPHGRDVNVMAKMAERSTNVAIAETAEGGQGLETVGSMTPDIMETVTFEAH

SEQ ID NO: 3173 - protein, 981 aa, Homo sapiens
MSEQERIQECLRKEIRSLLISTKDGLSPQELEKEYLLMVGNHLPLRILGYRSTMELVLDMPDVVRVCPGAGGTVILKAIPDESTKGIASLVAKQRSSHKLRNSMHKGRPSIYSGPRSHRRVPYRGRVAPILPAVVKSELKDLLALSPVLLSDFEKAFAKRFGRSFQYMQYGFLSMFEVLNAASDVISVEQTRAGSLLMLKKSVTEEKPRGCPAGKIFTQPFRMKQGSYSTGFPVAKPCFSQPTSNMEPPKQIMSMEKTSKLNVVETSRLNHTEKLNQLENTFKSVIAQIGPGGTISSELKHKIKFVVSKFPEGLFISKLLGEYEVIFKEQLSPKKLGFLNVTELVGALSDILHVEFRKGHQDLLVFDADKKPLPPVQSDKKIEAKACVSSPPRNSLSTAAVKETVWNCPSKKQKEPQQKICKKPNLVVKPLQLQVETNKSELNLAMANHDIPPDAVPNKKLCRLPPLDTSSLIGVFVEYIISPSQFYIRIYSRDSSELLEDMMIEMRRCYSNQLVSDRYVMPECFIQPGHLCCVRISEDKWWYRVIIHRVLEKQEVEVFYPDFGNIGIVQKSSLRFLKCCYTKLPAQAIPCSLAWVRPVEEHWTSKAILQFQKLCGLKPLVGVVDEYVDGILNIFLCDTSSNEDVYFHHVLRTEGHAIVCRENISSKGFSELNPLALYTTSSGGPEDIVLTELGYPSQQHYFNEDRKISPQSKESELRILDEIPTGMPCLESVTIGDDIWDENWLPLQAKMGKGGDAASHLFTASLGGKNQYSSCKEMPQKDWCFSTPKDTWDDSWQPSGLVNGTKVEVHKPEVLGAQEKNTGTNRTQKQLDINGSSDSSTLPKLEEFCTSLTQSEQSADGSQSEPNNSQTQPKQIQLSTAAPCSTTAVDDSAEKPSGSVESSPEILKNEDFSSSRAITLYKDKRQESVDQLSLILSYECQISQKLYIPRSTATAALGAAARLATSRSLLHWYPSVKRMEA

SEQ ID NO: 3174 - protein, 302 aa, Homo sapiens
MEIQELEEIQACQGLWEVFVTLSERARDYLHKTGRFIVIGGIVSPVHDSYGKQGLVSSRHRLIMCQLAVQNSDWIRVDPWECYQDTWQTTCSVLEHHRDLMKRVTGCILSNVNTPSMTPVIGQPQNETPQPIYQNSNVATKPTAAKILGKVGESLSRICCVRPPVERFTFVDENANLGTVMRYEEIELRILLLCGSDLLESFCIPGLWNEADMEVIVGDFGIVVVPRDAADTDRIMNHSSILRKYKNNIMVVKDDINHPMSVVSSTKSRLALQHGDGHVVDYLSQPVIDYILKSQLYINASG

SEQ ID NO: 3175 - protein, 780 aa, Homo sapiens
MASAELQGKYQKLAQEYSKLRAQNQVLKKGVVDEQANSAALKEQLKMKDQSLRKLQQEMDSLTFRNLQLAKRVELLQDELALSEPRGKKNKKSGESSSQLSQEQKSVFDEDLQKKIEENERLHIQFFEADEQHKHVEAELRSRLATLETEAAQHQAVVDGLTRKYMETIEKLQNDKAKLEVKSQTLEKEAKECRLRTEECQLQLKTLHEDLSGRLEESLSIINEKVPFNDTKYSQYNALNVPLHNRRHQLKMRDIAGQALAFVQDLVTALLNFHTYTEQRIQIFPVDSAIDTISPLNQKFSQYLHENASYVRPLEEGMLHLFESITEDTVTVLETTVKLKTFSEHLTSYICFLRKILPYQLKSLEEECESSLCTSALRARNLELSQDMKKMTAVFEKLQTYIALLALPSTEPDGLLRTNYSSVLTNVGAALHGFHDVMKDISKHYSQKAAIEHELPTATQKLITTNDCILSSVVALTNGAGKIASFFSNNLDYFIASLSYGPKAASGFISPLSAECMLQYKKKAAAYMKSLRKPLLESVPYEEALANRRILLSSTESREGLAQQVQQSLEKISKLEQEKEHWMLEAQLAKIKLEKENQRIADKLKNTGSAQLVGLAQENAAVSNTAGQDEATAKAVLEPIQSTSLIGTLTRTSDSEVPDVESREDLIKNHYMARIVELTSQLQLADSKSVHFYAECRALSKRLALAEKSKEALTEEMKLASQNISRLQDELTTTKRSYEDQLSMMSDHLCSMNETLSKQREEIDTLKMSSKGNSKKNKSR

SEQ ID NO: 3176 - protein, 699 aa, Homo sapiens
MKQRFSALQLLKLLLLLQPPLPRALREALCPEPCNCVPDGALRCPGPTAGLTRLSLAYLPVKVIPSQAFRGLNEVIKIEISQIDSLERIEANAFDNLLNLSEILIQNTKNLRYIEPGAFINLPRLKYLSICNTGIRKFPDVTKVFSSESNFILEICDNLHITTIPGNAFQGMNNESVTLKLYGNGFEEVQSHAFNGTTLTSLELKENVHLEKMHNGAFRGATGPKTLDISSTKLQALPSYGLESIQRLIATSSYSLKKLPSRETFVNLLEATLTYPSHCCAFRNLPTKEQNFSHSISENFSKQCESTVRKVNNKTLYSSMLAESELSGWDYEYGFCLPKTPRCAPEPDAFNPCEDIMGYDFLRVLIWLINILAIMGNMTVLFVLLTSRYKLTVPRFLMCNLSFADFCMGLYLLLIASVDSQTKGQYYNHAIDWQTGSGCSTAGFFTVFASELSVYTLTVITLERWHTITYAIHLDQKLRLRHAILIMLGGWLFSSLIAMLPLVGVSNYMKVSICFPMDVETTLSQVYILTILILNVVAFFIICACYIKIYFAVRNPELMATNKDTKIAKKMAILIFTDFTCMAPISFFAISAAFKVPLITVTNSKVLLVLFYPINSCANPFLYAIFTKTFQRDFFLLLSKFGCCKRRAELYRRKDFSAYTSNCKNGFTGSNKPSQSTLKLSTLHCQGTALLDKTRYTEC

SEQ ID NO: 3177 - protein, 286 aa, Homo sapiens
MERRLGVRAWVKENRGSFQPPVCNKLMHQEQLKVMFIGGPNTRKDYHIEEGEEVFYQLEGDMVLRVLEQGKHRDVVIRQGEIFLLPARVPHSPQRFANTVGLVVERRRLETELDGLRYYVGDTMDVLFEKWFYCKDLGTQLAPIIQEFFSSEQYRTGKPIPDQLLKEPPFPLSTRSIMEPMSLDAWLDSHHRELQAGTPLSLFGDTYETQVIAYGQGSSEGLRQNVDVWLWQLEGSSVVTMGGRRLSLAPDDSLLVLAGTSYAWERTQGSVALSVTQDPACKKPLG

SEQ ID NO: 3178 - protein, 700 aa, Homo sapiens
MAGIAAKLAKDREAAEGLGSHDRAIKYLNQDYEALRNECLEAGTLFQDPSFPAIPSALGFKELGPYSSKTRGIEWKRPTEICADPQFIIGGATRTDICQGALGDCWLLAAIASLTLNEEILARVVPLNQSFQENYAGIFHFQFWQYGEWVEVVVDDRLPTKDGELLFVHSAEGSEFWSALLEKAYAKINGCYEALSGGATTEGFEDFTGGIAEWYELKKPPPNLFKIIQKALQKGSLLGCSIDITSAADSEAITFQKLVKGHAYSVTGAEEVESNGSLQKLIRIRNPWGEVEWTGRWNDNCPSWNTIDPEERERLTRRHEDGEFWMSFSDFLRHYSRLEICNLTPDTLTSDTYKKWKLTKMDGNWRRGSTAGGCRNYPNTFWMNPQYLIKLEEEDEDEEDGESGCTFLVGLIQKHRRRQRKMGEDMHTIGFGIYEVPEELSGQTNIHLSKNFFLTNRARERSDTFINLREVLNRFKLPPGEYILVPSTFEPNKDGDFCIRVFSEKKADYQAVDDEIEANLEEFDISEDDIDDGFRRLFAQLAGEDAEISAFELQTILRRVLAKRQDIKSDGFSIETCKIMVDMLDSDGSGKLGLKEFYILWTKIQKYQKIYREIDVDRSGTMNSYEMRKALEEAGFKMPCQLHQVIVARFADDQLIIDFDNFVRCLVRLETLFKIFKQLDPENTGTIELDLISWLCFSVL

SEQ ID NO: 3179 - protein, 619 aa, Homo sapiens
MASGAYNPYIEIIEQPRQRGMRFRYKCEGRSAGSIPGEHSTDNNRTYPSIQIMNYYGKGKVRITLVTKNDPYKPHPHDLVGKDCRDGYYEAEFGQERRPLFFQNLGIRCVKKKEVKEAIITRIKAGINPFNVPEKQLNDIEDCDLNVVRLCFQVFLPDEHGNLTTALPPVVSNPIYDNRAPNTAELRICRVNKNCGSVRGGDEIFLLCDKVQKDDIEVRFVLNDWEAKGIFSQADVHRQVAIVFKTPPYCKAITEPVTVKMQLRRPSDQEVSESMDFRYLPDEKDTYGNKAKKQKTTLLFQKLCQDHVETGFRHVDQDGLELLTSGDPPTLASQSAGITVNFPERPRPGLLGSIGEGRYFKKEPNLFSHDAVVREMPTGVSSQAESYYPSPGPISSGLSHHASMAPLPSSSWSSVAHPTPRSGNTNPLSSFSTRTLPSNSQGIPPFLRIPVGNDLNASNACIYNNADDIVGMEASSMPSADLYGISDPNMLSNCSVNMMTTSSDSMGETDNPRLLSMNLENPSCNSVLDPRDLRQLHQMSSSSMSAGANSNTTVFVSQSDAFEGSDFSCADNSMINESGPSNSTNPNSHGFVQDSQYSGIGSMQNEQLSDSFPYEFFQV

SEQ ID NO: 3180 - protein, 707 aa, Homo sapiens
MSRGYSENNNFLNNNNQMVLDMILYPLIGIPQTINWETIARLVPGLTPKECAKRFDELKSSGSSPVDNQYNSLMAAGESPVETLATYIKSSLLDIHGEFQETPVGHDAVSKTGRHSIASTRNCSSESENCTTHNGGEMTEESEGPNMVIHVCDEAKNLKEDFTCPRDLLISEMKYFAEYLSMDAQRWEEVDISVHCDVHIFNWLIKYIKRNTKENKDCEMPTLEPGNVISILISSEFLKMDSLVEQCIQYCHKNMNAIVATPCNMNCINANLLTRIADLFSHNEVDDLKDKKDKFKSKLFCKKIERLFDPEYLNPDSRSNAATLYRCCLCKKLLTKETERRIPCIPGKINVDRRGNIVYIHIRDKTWDVHEYLNSLFEELKSWRDVYWRLWGTINWLTCSRCYQAFLCIEFSHCQYHSETVVYPTAASSLNTVGTGIYPCCNQKVLRFDPTQLTKGCKVRDHMVTLRDQGEGGDLPSCPTARMLDDLHKYRDVIVVPFSKDTVSDVGVGLCDEKGIECDVLLEPNTPWGPKTGELNAFLSLKNWTLQLKQQSLFSEEEEYTTGSEVTEDEVGDEEEVSKKQRKKEKPKKFTRQPKKQVSSPCAQRKEKALEKSASRDVSPFVMSMQKNKWDATRSLRFNQDAQREDDQRRMTEITGHLIKMRLGDLDRVKSKEAKETDKLRPRDGTVSKSNRKSGLSSVLLMTVLLC

SEQ ID NO: 3181 - protein, 501 aa, Homo sapiens
MGCGLRKLEDPDDSSPGKIFSTLKRPQVETKTEFAYEYVLLDFTLQASSNPEVIKINSILDIVTKVENYYLKGYIVGAIHPVIQPVGQRKHLPASYLYRVVLLRLKLSPKNSAAPSGQRRPRLVIEECPLTSEAQTNDAAKELIEKINVAAKRGMKFVGFISQHYSPSKFCNGTNHDGDIESMLHVRHGSDENCRSWNEGTLSGQSSESGIEEELHHESGQYQMEQNGSPTSSKSRKGEASDNKLYTVFNAFDDDSTSWAYQEGILSMKVTRKGSVISTLDADWLELTTFYYKQGLSLIDSFVFWETSKGEHLPKSLEGFFIYEEEGSGVPGSSRKGNDAIVVEQWTVIEGCEIKTDYGPLLHTLAEFGWLLTSVLPTPVLRHDSEGNLATKQIVFLQRPVMWNSAAQTPDKKASRHIKGEDKNKATSRSIGLDTTSSQPAESRHLPEECRLSPSRECWTKEGRLAQHNSFSGFSSSDNVLRELDDGQFDQEDGVTQVTCM

SEQ ID NO: 3182 - protein, 489 aa, Homo sapiens
MDDDLMLALRLQEEWNLQEAERDHAQESLSLVDASWELVDPTPDLQALFVQFNDQFFWGQLEAVEVKWSVRMTLCAGICSYEGKGGMCSIRLSEPLLKLRPRKDLVETLLHEMIHAYLFVTNNDKDREGHGPEFCKHMHRINSLTGANITVYHTFHDEVDEYRRHWWRCNGPCQHRPPYYGYVKRATNREPSAHDYWWAEHQKTCGGTYIKIKEPENYSKKGKGKAKLGKEPVLAAENKDKPNRGEAQLVIPFSGKGYVLGETSNLPSPGKLITSHAINKTQDLLNQNHSANAVRPNSKIKVKFEQNGSSKNSHLVSPAVSNSHQNVLSNYFPRVSFANQKAFRGVNGSPRISVTVGNIPKNSVSSSSQRRVSSSKISLRNSSKVTESASVMPSQDVSGSEDTFPNKRPRLEDKTVFDNFFIKKEQIKSSGNDPKYSTTTAQNSSSSSSQSKMVNCPVCQNEVLESQINEHLDWCLEGDSIKVKSEESL

SEQ ID NO: 3183 - protein, 669 aa, Homo sapiens
MAYYQEPSVETSIIKFKDQDFTTLRDHCLSMGRTFKDETFPAADSSIGQKLLQEKRLSNVIWKRPQDLPGGPPHFILDDISRFDIQQGGAADCWFLAALGSLTQNPQYRQKILMVQSFSHQYAGIFRFRFWQCGQWVEVVIDDRLPVQGDKCLFVRPRHQNQEFWPCLLEKAYAKLLGSYSDLHYGFLEDALVDLTGGVITNIHLHSSPVDLVKAVKTATKAGSLITCATPSGPTDTAQAMENGLVSLHAYTVTGAEQIQYRRGWEEIISLWNPWGWGEAEWRGRWSDGSQEWEETCDPRKSQLHKKREDGEFWMSCQDFQQKFIAMFICSEIPITLDHGNTLHEGWSQIMFRKQVILGNTAGGPRNDAQFNFSVQEPMEGTNVVVCVTVAVTPSNLKAEDAKFPLDFQVILAGSQRFREKFPPVFFSSFRNTVQSSNNKFRRNFTMTYHLSPGNYVVVAQTRRKSAEFLLRIFLKMPDSDRHLSSHFNLRMKGSPSEHGSQQSIFNRYAQQRLDIDATQLQGLLNQELLTGPPGDMFSLDECRSLVALMELKVNGRLDQEEFARLWKRLVHYQHVFQKVQTSPGVLLSSDLWKAIENTDFLRGIFISRELLHLVTLRYSDSVGRVSFPSLVCFLMRLEAMAKTFRNLSKDGKGLYLTEMEWMSLVMYN

SEQ ID NO: 3184 - protein, 522 aa, Homo sapiens
MDFLLLGLCLYWLLRRPSGVVLCLLGACFQMLPAAPSGCPQLCRCEGRLLYCEALNLTEAPHNLSGLLGLSLRYNSLSELRAGQFTGLMQLTWLYLDHNHICSVQGDAFQKLRRVKELTLSSNQITQLPNTTFRPMPNLRSVDLSYNKLQALAPDLFHGLRKLTTLHMRANAIQFVPVRIFQDCRSLKFLDIGYNQLKSLARNSFAGLFKLTELHLEHNDLVKVNFAHFPRLISLHSLCLRRNKVAIVVSSLDWVWNLEKMDLSGNEIEYMEPHVFETVPHLQSLQLDSNRLTYIEPRILNSWKSLTSITLAGNLWDCGRNVCALASWLNNFQGRYDGNLQCASPEYAQGEDVLDAVYAFHLCEDGAEPTSGHLLSAVTNRSDLGPPASSATTLADGGEGQHDGTFEPATVALPGGEHAENAVQIHKVVTGTMALIFSFLIVVLVLYVSWKCFPASLRQLRQCFVTQRRKQKQKQTMHQMAAMSAQEYYVDYKPNHIEGALVIINEYGSCTCHQQPARECEV

SEQ ID NO: 3185 - protein, 494 aa, Homo sapiens
MDGSGERSLPEPGSQSSAASDDIEIVVNVGGVRQVLYGDLLSQYPETRLAELINCLAGGYDTIFSLCDDYDPGKREFYFDRDPDAFKCVIEVYYFGEVHMKKGICPICFKNEMDFWKVDLKFLDDCCKSHLSEKREELEEIARRVQLILDDLGVDAAEGRWRRCQKCVWKFLEKPESSCPARVVAVLSFLLILVSSVVMCMGTIPELQVLDAEGNRVEHPTLENVETACIGWFTLEYLLRLFSSPNKLHFALSFMNIVDVLAILPFYVSLTLTHLGARMMELTNVQQAVQALRIMRIARIFKLARHSSGLQTLTYALKRSFKELGLLLMYLAVGIFVFSALGYTMEQSHPETLFKSIPQSFWWAIITMTTVGYGDIYPKTTLGKLNAAISFLCGVIAIALPIHPIINNFVRYYNKQRVLETAAKHELELMELNSSSGGEGKTGGSRSDLDNLPPEPAGKEAPSCSSRLKLSHSDTFIPLLTEEKHHRTRLQSCK

SEQ ID NO: 3186 - protein, 202 aa, Homo sapiens
MEAALLGLCNWSTLGVCAALKLPQISAVLAARSARGLSLPSLLLELAGFLVFLRYQCYYGYPPLTYLEYPILIAQDVILLLCIFHFNGNVKQATPYIAVLVSSWFILALQKWIIDLAMNLCTFISAASKFAQLQCLWKTRDSGTVSALTWSLSSYTCATRIITTLMTTNDFTILLRFVIMLALNIWVTVTVLRYRKTAIKAE

SEQ ID NO: 3187 - protein, 475 aa, Homo sapiens
MQKSTNSDTSVETLNSTRQGTGAVQMRIKNANSHHDRLSQSKSMILTDVGKVTEPISRHRRNHSQHILKDVIPPLEQLMVEKEGYLQKAKIADGGKKLRKNWSTSWIVLSSRRIEFYKESKQQALSNMKTGHKPESVDLCGAHIEWAKEKSSRKNVFQITTVSGNEFLLQSDIDFIILDWFHAIKNAIDRLPKDSSCPSRNLELFKIQRSSSTELLSHYDSDIKEQKPEHRKSLMFRLHHSASDTSDKNRVKSRLKKFITRRPSLKTLQEKGLIKDQIFGSHLHKVCERENSTVPWFVKQCIEAVEKRGLDVDGIYRVSGNLATIQKLRFIVNQEEKLNLDDSQWEDIHVVTGALKMFFRELPEPLFPYSFFEQFVEAIKKQDNNTRIEAVKSLVQKLPPPNRDTMKVLFGHLTKIVAKASKNLMSTQSLGIVFGPTLLRAENETGNMAIHMVYQNQIAELMLSEYSKIFGSEED

SEQ ID NO: 3188 - protein, 501 aa, Homo sapiens
MSALRRKFGDDYQVVTTSSSGSGLQPQGPGQDPQQQLVPKKKRQRFVDKNGRCNVQHGNLGSETSRYLSDLFTTLVDLKWRWNLFIFILTYTVAWLFMASMWWVIAYTRGDLNKAHVGNYTPCVANVYNFPSAFLFFIETEATIGYGYRYITDKCPEGIILFLFQSILGSIVDAFLIGCMFIKMSQPKKRAETLMFSEHAVISMRDGKLTLMFRVGNLRNSHMVSAQIRCKLLKSRQTPEGEFLPLDQLELDVGFSTGADQLFLVSPLTICHVIDAKSPFYDLSQRSMQTEQFEIVVILEGIVETTGMTCQARTSYTEDEVLWGHRFFPVISLEEGFFKVDYSQFHATFEVPTPPYSVKEQEEMLLMSSPLIAPAITNSKERHNSVECLDGLDDITTKLPSKLQKITGREDFPKKLLRMSSTTSEKAYSLGDLPMKLQRISSVPGNSEEKLVSKTTKMLSDPMSQSVADLPPKLQKMAGGAARMEGNLPAKLRKMNSDRFT

SEQ ID NO: 3189 - protein, 356 aa, Homo sapiens
MTKSYSESGLMGEPQPQGPPSWTDECLSSQDEEHEADKKEDDLETMNAEEDSLRNGGEEEDEDEDLEEEEEEEEEDDDQKPKRRGPKKKKMTKARLERFKLRRMKANARERNRMHGLNAALDNLRKVVPCYSKTQKLSKIETLRLAKNYIWALSEILRSGKSPDLVSFVQTLCKGLSQPTTNLVAGCLQLNPRTFLPEQNQDMPPHLPTASASFPVHPYSYQSPGLPSPPYGTMDSSHVFHVKPPPHAYSAALEPFFESPLTDCTSPSFDGPLSPPLSINGNFSFKHEPSAEFEKNYAFTMHYPAATLAGAQSHGSIFSGTAAPRCEIPIDNIMSFDSHSHHERVMSAQLNAIFHD

SEQ ID NO: 3190 - protein, 342 aa, Homo sapiens
MAAEEEDEVEWVVESIAGFLRGPDWSIPILDFVEQKCEVFDDEEESKLTYTEIHQEYKELVEKLLEGYLKEIGINEDQFQEACTSPLAKTHTSQAILQPVLAAEDFTIFKAMMVQKNIEMQLQAIRIIQERNGVLPDCLTDGSDVVSDLEHEEMKILREVLRKSKEEYDQEEERKRKKQLSEAKTEEPTVHSSEAAIMNNSQGDGEHFAHPPSEVKMHFANQSIEPLGRKVERSETSSLPQKDLKIPGLEHASIEGPIANLSVLGTEELRQREHYLKQKRDKLMSMRKDMRTKQIQNMEQKGKPTGEVEEMTEKPEMTAEEKQTLLKRRLLAEKLKEEVINK

SEQ ID NO: 3191 - protein, 357 aa, Homo sapiens
MSAFEKPQIIAHIQKGFNYTVFDCKWVPCSAKFVTMGNFARGTGVIQLYEIQHGDLKLLREIEKAKPIKCGTFGATSLQQRYLATGDFGGNLHIWNLEAPEMPVYSVKGHKEIINAIDGIGGLGIGEGAPEIVTGSRDGTVKVWDPRQKDDPVANMEPVQGENKRDCWTVAFGNAYNQEERVVCAGYDNGDIKLFDLRNMALRWETNIKNGVCSLEFDRKDISMNKLVATSLEGKFHVFDMRTQHPTKGFASVSEKAHKSTVWQVRHLPQNRELFLTAGGAGGLHLWKYEYPIQRSKKDSEGIEMGVAGSVSLLQNVTLSTQPISSLDWSPDKRGLCVCSSFDQTVRVLIVTKLNKI

SEQ ID NO: 3192 - protein, 665 aa, Homo sapiens
MEPRVVKPPGQDLVVESLKSRYGLGGSCPDEYDFSNFYQSKYKRRTLTSPGDLDIYSGDKVGSSLKYSDESKHCRTPLGSLFKHVNVNCLDDELDSFHDLKKQETEEELIENDYRVSTSKITKQSFKEIEKVALPTNTTSSRPRTECCSDAGDSPLKPVSCPKSKASDKRSLLPHQISQIYDELFQIHLKLQCETAAQQKFAEELQKRERFLLEREQLLFRHENALSKIKGVEEEVLTRFQIIKEQHDAEVEHLTEVLKEKNKETKRLRSSFDALKELNDTLKKQLNEASEENRKIDIQAKRVQARLDNLQRKYEFMTIQRLKGSSHAVHEMKSLKQEKAPVSKTYKVPLNGQVYELLTVFMDWISDHHLSKVKHEESGMDGKKPQLKFASQRNDIQEKCVKLLPLMTEQLQWMPFVNIKLHEPFVKFIYWSLRQLDAGAQHSTMTSTLRRLGEDIFKGVVTKGIQDNSPQHSVENKPKTAAFFKSSNLPLRFLSTLIVLKTVTQADYLAQAFDSLCLDLKTEEGKTLFLEYQAVPVILSHLRISSKGLLSNVIDSLLQMTVESKSLQPFLEACSNSLFFRTCSVLLRAPKLDLQILEKLSIILQKLSKIKSNKKLFELFTIHLMLQEIQRTTNPEHAFLCINLNSTLFNLGLTKCNSLVSSASP

SEQ ID NO: 3193 - protein, 633 aa, Homo sapiens
MLRRGYKASERRRHLSERLSWHQDQALSSSIYLLREMGPTGFLLREEEPEYMDFRVFLGNPHVCNCSTFPKGGELCKHICWVLLKKFKLPRNHESALQLGLGEREISDLLRGIHRVQTPQPGTNDENEHVEEDGYIKQKEIDSEDICSICQELLLEKKLPVTFCRFGCGNSIHIKCMKILANYQSTSNTSMLKCPLCRKEFAPLKLILEEFKNSSKLVAAAEKERLDKHLGIPCNNCKQFPIEGKCYKCTECIEYHLCQECFDSCCHLSHTFTFREKRNQKWRSLEKRADEVVKYIDTKNEIEEKMSHFQEKQGQVYTPKHIVRSLPLQLITKNSKLLAPGYQCLLCLKAFHLGQHTRLLPCTHKFHRKCIDNWLFHKCNSCPIDGQVIYNPLTWKNSAVNGQAHQSVSNRDIIHLSKQKEPDLFIPGTGLVLKQNRLGILPSIPQCNFDELNTPQSPKDAYENTTIDNLCSIKLDNSNSKKLTYDYKISQHFPRYLQDLPTVSFGKIPSQTLLPPIVHKNIVCPTAMESPCISGKFHTSLSRMTKGCKCNNHNLKKTPATKIREDNKRSTLLPEDFNLIVNWSTAKLSLSKRYSNCMGEITRKCSHLSRQPVSHSVNTKSTELSLIIEGVQL

SEQ ID NO: 3194 - protein, 875 aa, Homo sapiens
MASLDLPYRCPRCGEHKRFRSLSSLRAHLEYSHTYETLYILSKTNSICDGAAAAAAAAAAASGFPLAPEPAALLAVPGARREVFESTSFQGKEQAAGPSPAAPHLLHHHHHHAPLAHFPGDLVPASLPCEELAEPGLVPAAAARYALREIEIPLGELFARKSVASSACSTPPPGPGPGPCPGPASASPASPSPADVAYEEGLARLKIRALEKLEVDRRLERLSEEVEQKIAGQVGRLQAELERKAAELETARQESARLGREKEELEERASELSRQVDVSVELLASLKQDLVHKEQELSRKQQEVVQIDQFLKETAAREASAKLRLQQFIEELLERADRAERQLQVISSSCGSTPSASLGRGGGGGGAGPNARGPGRMREHHVGPAVPNTYAVSRHGSSPSTGASSRVPAASQSSGCYDSDSLELPRPEEGAPEDSGPGGLGTRAQAANGGSERSQPPRSSGLRRQAIQNWQRRPRRHSTEGEEGDVSDVGSRTTESEAEGPLDAPRPGPAMAGPLSSCRLSARPEGGSGRGRRAERVSPSRSNEVISPEILKMRAALFCIFTYLDTRTLLHAAEVCRDWRFVARHPAVWTRVLLENARVCSKFLAMLAQWCTQAHSLTLQNLKPRQRGKKESKEEYARSTRGCLEAGLESLLKAAGGNLLILRISHCPNILTDRSLWLASCYCRALQAVTYRSATDPVGHEVIWALGAGCREIVSLQVAPLHPCQQPTRFSNRCLQMIGRCWPHLRALGVGGAGCGVQGLASLARNCMRLQVLELDHVSEITQEVAAEVCREGLKGLEMLVLTATPVTPKALLHFNSICRNLKSIVVQIGIADYFKEPSSPEAQKLFEDMVTKLQALRRRPGFSKILHIKVEGGC

SEQ ID NO: 3195 - protein, 376 aa, Homo sapiens
MCEEETTALVCDNGSGLCKAGFAGDDAPRAVFPSIVGRPRHQGVMVGMGQKDSYVGDEAQSKRGILTLKYPIEHGIITNWDDMEKIWHHSFYNELRVAPEEHPTLLTEAPLNPKANREKMTQIMFETFNVPAMYVAIQAVLSLYASGRTTGIVLDSGDGVTHNVPIYEGYALPHAIMRLDLAGRDLTDYLMKILTERGYSFVTTAEREIVRDIKEKLCYVALDFENEMATAASSSSLEKSYELPDGQVITIGNERFRCPETLFQPSFIGMESAGIHETTYNSIMKCDIDIRKDLYANNVLSGGTTMYPGIADRMQKEITALAPSTMKIKIIAPPERKYSVWIGGSILASLSTFQQMWISKPEYDEAGPSIVHRKCF

SEQ ID NO: 3196 - protein, 721 aa, Homo sapiens
MELGKGKLLRTGLNALHQAVHPIHGLAWTDGNQVVLTDLRLHSGEVKFGDSKVIGQFECVCGLSWAPPVADDTPVLLAVQHEKHVTVWQLCPSPMESSKWLTSQTCEIRGSLPILPQGCVWHPKCAILTVLTAQDVSIFPNVHSDDSQVKADINTQGRIHCACWTQDGLRLVVAVGSSLHSYIWDSAQKTLHRCSSCLVFDVDSHVCSITATVDSQVAIATELPLDKICGLNASETFNIPPNSKDMTPYALPVIGEVRSMDKEATDSETNSEVSVSSSYLEPLDLTHIHFNQHKSEGNSLICLRKKDYLTGTGQDSSHLVLVTFKKAVTMTRKVTIPGILVPDLIAFNLKAHVVAVASNTCNIILIYSVIPSSVPNIQQIRLENTERPKGICFLTDQLLLILVGKQKLTDTTFLPSSKSDQYAISLIVREIMLEEEPSITSGESQTTYSTFSAPLNKANRKKLIESLSPDFCHQNKGLLLTVNTSSQNGRPGRTLIKEIQSPLSSICDGSIALDAEPVTQPASLPRHSSTPDHTSTLEPPRLPQRKNLQSEKETYQLSKEVEILSRNLVEMQRCLSELTNRLHNGKKSSSVYPLSQDLPYVHIIYQKPYYLGPVVEKRAVLLCDGKLRLSTVQQTFGLSLIEMLHDSHWILLSADSEGFIPLTFTATQEIIIRDGSLSRSDVFRDSFSHSPGAVSSLKVFTGLAAPSLDTTGCCNHVDGMA

SEQ ID NO: 3197 - protein, 206 aa, Homo sapiens
MAATKTASYDEHFRPEKLREWPEPESVSLMEVLAREDIDEAVCAILFKENSIVKVTVPPFVDPLFQRQQEVDEERRTGLQCETGKRHSIKELEEIEKARLHASSPYFTFTSHCVIPKEWHKASARARSKTYKYSPEKLIYADKKQKRKEKKTADLSQAAFERQFLSSKLSQKNKVGERKGLVSRGLGRGWHAGLCSTHEQHILVPE

SEQ ID NO: 3198 - protein, 378 aa, Homo sapiens
MSGAGVAAGTRPPSSPTPGSRRRRQRPSVGVQSLRPQSPQLRQSDPQKRNLDLEKSLQFLQQQHSEMLAKLHEEIEHLKRENKDLHYKLIMNQTSQKKDGPSGNHLSRASAPLGARWVCINGVWVEPGGPSPARLKEGSSRTHRPGGKRGRLAGGSADTVRSPADSLSMSSFQSVKSISNSGKARPQPGSFNKQDSKADVSQKADLEEEPLLHNSKLDKVPGVQGQARKEKAEASNAGAACMGNSQHQGRQMGAGAHPPMILPLPLRKPTTLRQCEVLIRELWNTNLLQTQELRHLKSLLEGSQRPQAAPEEASFPRDQEATHFPKVSTKSLSKKCLSPPVAERAILPALKQTPKNNFAERQKRLQAMQKRRLHRSVL

SEQ ID NO: 3199 - protein, 510 aa, Homo sapiens
MYTSHEDIGYDFEDGPKDKKTLKPHPNIDGGWAWMMVLSSFFVHILIMGSQMALGVLNVEWLEEFHQSRGLTAWVSSLSMGITLIVGPFIGLFINTCGCRQTAIIGGLVNSLGWVLSAYAANVHYLFITFGVAAGLGSGMAYLPAVVMVGRYFQKRRALAQGLSTTGTGFGTFLMTVLLKYLCAEYGWRNAMLIQGAVSLNLCVCGALMRPLSPGKNPNDPGEKDVRGLPAHSTESVKSTGQQGRTEEKDGGLGNEETLCDLQAQECPDQAGHRKNMCALRILKTVSWLTMRVRKGFEDWYSGYFGTASLFTNRMFVAFIFWALFAYSSFVIPFIHLPEIVNLYNLSEQNDVFPLTSIIAIVHIFGKVILGVIADLPCISVWNVFLLANFTLVLSIFILPLMHTYAGLAVICALIGFSSGYFSLMPVVTEDLVGIEHLANAYGIIICANGISALLGPPFAGWIYDITQKYDFSFYICGLLYMIGILFLLIQPCIRIIEQSRRKYMDGAHV

SEQ ID NO: 3200 - protein, 188 aa, Homo sapiens
LYKDGDIHRGFQSLLSEVNRTGTQYLLRTANRLFGEKTCDFLPDFKEYCQKFYQAELEELSFAEDTEECRKHINDWVAEKTEGKISEVLDAGTVDPLTKLVLVNAIYFKGKWNEQFDRKYTRGMLFKTNEEKKTVQMMFKEAKFKMGYADEVHTQVLELPYVEEELSMVILLPDDNTDLAVIKAGGEL

SEQ ID NO: 3201 - protein, 538 aa, Homo sapiens
MAENLKRLVSNETLRTLQEKLDFWLKEYNTNTCDQNLNHCLELIEQVAKVQGQLFGILTAAAQEGGRNDGVETIKSRLLPWLEASFTAASLGKSVDSKVPSLQDTFDRERHKDPSPRDRDMQQLDSNLNSTRSQCNQVQDDLVETEKNLEESKNRSAISLLAAEEEINQLKKQLKSLQAQEDARHRNTDQRSSENRRSEPWSLEERKREQWNSLKQNADQQDTEAMSDYKKQLRNLKEEIAVLSAEKSALQGRSSRSRSPSPAPRSRSCSRSRSASPSTAVKVRRPSPNRSKLSNVARKAALLSRFSDSYSQARLDAQCLLRRCIDKAETVQRIIYIATVEAFHVAKMAFRHFKIHVRKSLTPSYVGSNDFENAVLDYVICHLDLYDSQSSVNDVIRAMNVNPKISFPPVVDFCLLSDFIQEICCIAFAMQALEPPLDIAYGADGEVFNDCKYRRSYDSDFTAPLVLYHVWPALMENDCVIMKGEAVTRRGAFWNSVRSVSRCRSRSLSPICPRSQIGLNTMSRSRSPSPIRCGLPRF

SEQ ID NO: 3202 - protein, 407 aa, Homo sapiens
MDGLPGRALGAACLLLLAAGWLGPEAWGSPTPPPTPAAPPPPPPPGSPGGSQDTCTSCGGFRRPEELGRVDGDFLEAVKRHILSRLQMRGRPNITHAVPKAAMVTALRKLHAGKVREDGRVEIPHLDGHASPGADGQERVSEIISFAETDGLASSRVRLYFFISNEGNQNLFVVQASLWLYLKLLPYVLEKGSRRKVRVKVYFQEQGHGDRWNMVEKRVDLKRSGWHTFPLTEAIQALFERGERRLNLDVQCDSCQELAVVPVFVDPGEESHRPFVVVQARLGDSRHRIRKRGLECDGRTNLCCRQQFFIDFRLIGWNDWIIAPTGYYGNYCEGSCPAYLAGVPGSASSFHTAVVNQYRMRGLNPGTVNSCCIPTKLSTMSMLYFDDEYNIVKRDVPNMIVEECGCA

SEQ ID NO: 3203 - protein, 963 aa, Homo sapiens
MPLQKTNEEVSLSGIDSECTVVQPSPGSQSNARILGVCSDNQLSTTSPETVAAKRLHHVLAASEDKDKMKKEVLQSSRDIMQSKSACEIKQSHQECSTQQTQQKKYLEQLHLPQSKPISPNFKVKTIKLPTLDHTLNETDHSYESHKQQSEIDVQTFTKKQYLKTKKTEASTECSHKQSLAERHYQLPKKEKRVTVQLPTESIQKNQEDKLKMVPRKQREFSGSDRGKLPGSEEKNQGPSMIGRKEERLITERKHEHLKNKSAPKVVKQKVIDAHLDSQTQNFQQTQIQTAESKAEHKKLPQPYNSLQEEKCLEVKGIQEKQVFSNTKDSKQEITQNKSFFSSVKESQRDDGKGALNIVEFLRKREELQQILSRVKQFEAEPNKSGLKTFQTLLNTIPGWLISEDKREYAVHIAMENNLEKVKEEITHIKTQAEDMLVSYENIIQTAMMSSKTGKPGNKPTSLDETSSKVSNVHVSNNKNSEQKENKIAKEKTVQHQVAAHHEATVRSHVKTHQEIKLDDSNIPPPSLKTRPPSPTFITIESTARRTENPTKNELSQSPKKDSYVEPPPRRPMSQKSEIHRANTSPSPPRSRSEQLVRLKDTTAKLSKGAIPCPAATPVPIVEKRSEIIMSPATLRRQIKIETRGRDSPPTITIPVNINHAASGSFRESVDAQEEIRKVEKRATYVHKDGLNSTDHMVPDTESYDAVEIIRKVAVPPRLSEHTQRYEAANRTVQMAENFVNDPENEINRWFREFEHGPVSEAKSNRRVYAKGETNHNIQQESRTFCKEEFGLTSLGNTSFTDFSCKHPRELREKIPVKQPRICSETRSLSEHFSGMDAFESQIVESKMKTSSSHSSEAGKSGCDFKHAPPTYEDVIAGHILDISDSPKEVRKNFQKTWQESGRVFKGLGYATADASATEMRTTFQEESAFISEAAAPRQGNMYTLSKDSLSNGVPSGRQAEFS

SEQ ID NO: 3204 - protein, 663 aa, Homo sapiens
MASGRGASSRWFFTREQLENTPSRRCGVEADKELSCRQQAANLIQEMGQRLNVSQLTINTAIVYMHRFYMHHSFTKFNKNIISSTALFLAAKVEEQARKLEHVIKVAHACLHPLEPLLDTKCDAYLQQTQELVILETIMLQTLGFEITIEHPHTDVVKCTQLVRASKDLAQTSYFMATNSLHLTTFCLQYKPTVIACVCIHLACKWSNWEIPVSTDGKHWWEYVDPTVTLELLDELTHEFLQILEKTPNRLKKIRNWRANQAARKPKVDGQVSETPLLGSSLVQNSILVDSVTGVPTNPSFQKPSTSAFPAPVPLNSGNISVQDSHTSDNLSMLATGMPSTSYGLSSHQEWPQHQDSARTEQLYSQKQETSLSGSQYNINFQQGPSISLHSGLHHRPDKISDHSSVKQEYTHKAGSSKHHGPISTTPGIIPQKMSLDKYREKRKLETLDLDVRDHYIAAQVEQQHKQGQSQAASSSSVTSPIKMKIPIANTEKYMADKKEKSGSLKLRIPIPPTDKSASKEELKMKIKVSSSERHSSSDEGSGKSKHSSPHISRDHKEKHKEHPSSRHHTSSHKHSHSHSGSSSGGSKHSADGIPPTVLRSPVGLSSDGISSSSSSSRKRLHVNDASHNHHSKMSKSSKSSGGLRTSQHPRETGQEASGDQRS

SEQ ID NO: 3205 - protein, 388 aa, Homo sapiens
MLAAFISRVLRRVAQKSARRVLVASRNSSNDATFEIKKCDLYLLEEGPPVTTVLTRAEGLKYYRMMLTVRRMELKADQLYKQKFIRGFCHLCDGQEACCVGLEAGINPSDHVITSYRAHGVCYTRGLSVRSILAELTGRRGGCAKGKGGSMHMYTKNFYGGNGIVGAQGPLGAGIALACKYKGNDEICLTLYGDGAANQGQIAEAFNMAALWKLPCVFICENNLYGMGTSTERAAASPDYYKRGNFIPGLKVDGMDVLCVREATKFAANYCRSGKGPILMELQTYRYHGHSMSDPGVSYRTREEIQEVRSKRDPIIILQDRMVNSKLATVEELKEIGAEVRKEIDDAAQFATTDPEPHLEELGHHIYSSDSSFEVRGANPWIKFKSVS

SEQ ID NO: 3206 - protein, 459 aa, Homo sapiens
MYDRAPRLLKLAEGGSTEAHVGPGSYQVPFLKQQATGSNAPFLSLTARESTFTIASSIEKAVPGPGHYNVSEAQKISRSPTLTRSVDVPSIPSCGKSYGYHINDDGSIIKCFPPACDSTLGPAYYKPQFDVSNATLKYKGIHFGNSSGRQELPKKSGPGPGQYDIVQKKTSYYENVNIKRDQQQNYCSFIPRLYEIIVLQEKKKRFLPMKSITPAPGTYNEPRTALKSLKKTSGLKNIPFGQSAVRFTQDIRTEEMPGPGFYNVLNNTIIASVRNICSKKQKKSAFGSSVPRTFFSVQKEACATPGPADYQEFWHSQGVGISDELPNLTNKYAAFLSRAKRTMKVPDMVIPAPGSYDVHKSYEMSQVKHKYMPPRSLVAKRKHASFLSATPRCLEKVTDGPGPAAYNPVLRKSCPIPLFVKASKRFEESKEITPGPATYEISQEKKKGNLIGEMAADIM

SEQ ID NO: 3207 - protein, 798 aa, Homo sapiens
MALQMFVTYSPWNCLLLLVALECSEASSDLNESANSTAQYASNAWFAAASSEPEEGISVFELDYDYVQIPYEVTLWILLASLAKIGFHLYHRLPGLMPESCLLILVGALVGGIIFGTDHKSPPVMDSSIYFLYLLPPIVLEGGYFMPTRPFFENIGSILWWAVLGALINALGIGLSLYLICQVKAFGLGDVNLLQNLLFGSLISAVDPVAVLAVFEEARVNEQLYMMIFGEALLNDGITVVLYNMLIAFTKMHKFEDIETVDILAGCARFIVVGLGGVLFGIVFGFISAFITRFTQNISAIEPLIVFMFSYLSYLAAETLYLSGILAITACAVTMKKYVEENVSQTSYTTIKYFMKMLSSVSETLIFIFMGVSTVGKNHEWNWAFICFTLAFCQIWRAISVFALFYISNQFRTFPFSIKDQCIIFYSGVRGAGSFSLAFLLPLSLFPRKKMFVTATLVVIYFTVFIQGITVGPLVRYLDVKKTNKKESINEELHIRLMDHLKAGIEDVCGHWSHYQVRDKFKKFDHRYLRKILIRKNLPKSSIVSLYKKLEMKQAIEMVETGILSSTAFSIPHQAQRIQGIKRLSPEDVESIRDILTSNMYQVRQRTLSYNKYNLKPQTSEKQAKEILIRRQNTLRESMRKGHSLPWGKPAGTKNIRYLSYPYGNPQSAGRDTRAAGFSDDDSSDPGSPSITFSACSRIGSLQKQEAQEIIPMKSLHRGRKAFSFGYQRNTSQEEYLGGVRRVALRPKPLFHAVDEEGESGGESEGKASLVEVRSRWTADHGHGRDHHRSHSPLLQKK

SEQ ID NO: 3208 - protein, 345 aa, Homo sapiens
MSSYQKELEKYRDIDEDEILRTLSPEELEQLDCELQEMDPENMLLPAGLRQRDQTKKSPTGPLDREALLQYLEQQALEVKERDDLVPFTGEKKGKPYIQPKREIPAEEQITLEPELEEALAHATDAEMCDIAAILDMYTLMSNKQYYDALCSGEICNTEGISSVVQPDKYKPVPDEPPNPTNIEEILKRVRSNDKELEEVNLNNIQDIPIPMLSELCEAMKANTYVRSFSLVATRSGDPIANAVADMLRENRSLQSLNIESNFISSTGLMAVLKAVRENATLTELRVDNQRQWPGDAVEMEMATVLEQCPSIVRFGYHFTQQGPRARAAQAMTRNNELRRQQKKR

SEQ ID NO: 3209 - protein, 819 aa, Homo sapiens
MDSEYYSGDQSDDGGATPVQDERDSGSDGEDDVNEQHSGSDTGSVERHSENETSDREDGLPKGHHVTDSENDEPLNLNASDSESEELHRQKDSDSESEERAEPPASDSENEDVNQHGSDSESEETRKLPGSDSENEELLNGHASDSENEDVGKHPASDSEIEELQKSPASDSETEDALKPQISDSESEEPPRHQASDSENEEPPKPRMSDSESEELPKPQVSDSESEEPPRHQASDSENEELPKPRISDSESEDPPRHQASDSENEELPKPRISDSESEDPPRNQASDSENEELPKPRVSDSESEGPQKGPASDSETEDASRHKQKPESDDDSDRENKGEDTEMQNDSFHSDSHMDRKKFHSSDSEEEEHKKQKMDSDEDEKEGEEEKVAKRKAAVLSDSEDEEKASAKKSRVVSDADDSDSDAVSDKSGKREKTIASDSEEEAGKELSDKKNEEKDLFGSDSESGNEEENLIADIFGESGDEEEEEFTGFNQEDLEEEKGETQVKEAEDSDSDDNIKRGKHMDFLSDFEMMLQRKKSMSGKRRRNRDGGTFISDADDVVSAMIVKMNEAAEEDRQLNNQKKPALKKLTLLPAVVMHLKKQDLKETFIDSGVMSAIKEWLSPLPDRSLPALKIREELLKILQELPSVSQETLKHSGIGRAVMYLYKHPKESRSNKDMAGKLINEWSRPIFGLTSNYKGMTREEREQRDLEQMPQRRRMNSTGGQTPRRDLEKVLTGEEKALRPGDPGFCARARVPMPSNKDYVVRPKWNVEMESSRFQATSKKGISRLDKQMRKFTDIRKKSRSAHAVKISIEGNKMPL

SEQ ID NO: 3210 - protein, 424 aa, Homo sapiens
MGSLVLTLCALFCLAAYLVSGSPIMNLEQSPLEEDMSLFGDVFSEQDGVDFNTLLQSMKDEFLKTLNLSDIPTQDSAKVDPPEYMLELYNKFATDRTSMPSANIIRSFKNEDLFSQPVSFNGLRKYPLLFNVSIPHHEEVIMAELRLYTLVQRDRMIYDGVDRKITIFEVLESKGDNEGERNMLVLVSGEIYGTNSEWETFDVTDAIRRWQKSGSSTHQLEVHIESKHDEAEDASSGRLEIDTSAQNKHNPLLIVFSDDQSSDKERKEELNEMISHEQLPELDNLGLDSFSSGPGEEALLQMRSNIIYDSTARIRRNAKGNYCKRTPLYIDFKEIGWDSWIIAPPGYEAYECRGVCNYPLAEHLTPTKHAIIQALVHLKNSQKASKACCVPTKLEPISILYLDKGVVTYKFKYEGMAVSECGCR

SEQ ID NO: 3211 - protein, 999 aa, Homo sapiens
MGPAPLPLLLGLFLPALWRRAITEAREEAKPYPLFPGPFPGSLQTDHTPLLSLPHASGYQPALMFSPTQPGRPHTGNVAIPQVTSVESKPLPPLAFKHTVGHIILSEHKGVKFNCSISVPNIYQDTTISWWKDGKELLGAHHAITQFYPDDEVTAIIASFSITSVQRSDNGSYICKMKINNEEIVSDPIYIEVQGLPHFTKQPESMNVTRNTAFNLTCQAVGPPEPVNIFWVQNSSRVNEQPEKSPSVLTVPGLTEMAVFSCEAHNDKGLTVSKGVQINIKAIPSPPTEVSIRNSTAHSILISWVPGFDGYSPFRNCSIQVKEADPLSNGSVMIFNTSALPHLYQIKQLQALANYSIGVSCMNEIGWSAVSPWILASTTEGAPSVAPLNVTVFLNESSDNVDIRWMKPPTKQQDGELVGYRISHVWQSAGISKELLEEVGQNGSRARISVQVHNATCTVRIAAVTRGGVGPFSDPVKIFIPAHGWVDYAPSSTPAPGNADPVLIIFGCFCGFILIGLILYISLAIRKRVQETKFGNAFTEEDSELVVNYIAKKSFCRRAIELTLHSLGVSEELQNKLEDVVIDRNLLILGKILGEGEFGSVMEGNLKQEDGTSLKVAVKTMKLDNSSQREIEEFLSEAACMKDFSHPNVIRLLGVCIEMSSQGIPKPMVILPFMKYGDLHTYLLYSRLETGPKHIPLQTLLKFMVDIALGMEYLSNRNFLHRDLAARNCMLRDDMTVCVADFGLSKKIYSGDYYRQGRIAKMPVKWIAIESLADRVYTSKSDVWAFGVTMWEIATRGMTPYPGVQNHEMYDYLLHGHRLKQPEDCLDELYEIMYSCWRTDPLDRPTFSVLRLQLEKLLESLPDVRNQADVIYVNTQLLESSEGLAQGSTLAPLDLNIDPDSIIASCTPRAAISVVTAEVHDSKPHEGRYILNGGSEEWEDLTSAPSAAVTAEKNSVLPGERLVRNGVSWSHSSMLPLGSSLPDELLFADDSSEGSEVLM

SEQ ID NO: 3212 - protein, 465 aa, Homo sapiens
MGPLKAFLFSPFLLRSQSRGVRLVFLLLTLHLGNCVDKADDEDDEDLTVNKTWVLAPKIHEGDITQILNSLLQGYDNKLRPDIGVRPTVIETDVYVNSIGPVDPINMEYTIDIIFAQTWFDSRLKFNSTMKVLMLNSNMVGKIWIPDTFFRNSRKSDAHWITTPNRLLRIWNDGRVLYTLRLTINAECYLQLHNFPMDEHSCPLEFSSYGYPKNEIEYKWKKPSVEVADPKYWRLYQFAFVGLRNSTEITHTISGDYVIMTIFFDLSRRMGYFTIQTYIPCILTVVLSWVSFWINKDAVPARTSLGITTVLTMTTLSTIARKSLPKVSYVTAMDLFVSVCFIFVFAALMEYGTLHYFTSNQKGKTATKDRKLKNKASMTPGLHPGSTLIPMNNISVPQEDDYGYQCLEGKDCASFFCCFEDCRTGSWREGRIHIRIAKIDSYSRIFFPTAFALFNLVYWVGYLYL

SEQ ID NO: 3213 - protein, 474 aa, Homo sapiens
MWTVQNRESLGLLSFPVMITMVCCAHSTNEPSNMSYVKETVDRLLKGYDIRLRPDFGGPPVDVGMRIDVASIDMVSEVNMDYTLTMYFQQSWKDKRLSYSGIPLNLTLDNRVADQLWVPDTYFLNDKKSFVHGVTVKNRMIRLHPDGTVLYGLRITTTAACMMDLRRYPLDEQNCTLEIESYGYTTDDIEFYWNGGEGAVTGVNKIELPQFSIVDYKMVSKKVEFTTGAYPRLSLSFRLKRNIGYFILQTYMPSTLITILSWVSFWINYDASAARVALGITTVLTMTTISTHLRETLPKIPYVKAIDIYLMGCFVFVFLALLEYAFVNYIFFGKGPQKKGASKQDQSANEKNKLEMNKVQVDAHGNILLSTLEIRNETSGSEVLTSVSDPKATMYSYDSASIQYRKPLSSREAYGRALDRHGVPSKGRIRRRASQLKVKIPDLTDVNSIDKWSRMFFPITFSLFNVVYWLYYVH

SEQ ID NO: 3214 - protein, 528 aa, Homo sapiens
MQGPWVLLLLGLRLQLSLGVIPAEEENPAFWNRQAAEALDAAKKLQPIQKVAKNLILFLGDGLGVPTVTATRILKGQKNGKLGPETPLAMDRFPYLALSKTYNVDRQVPDSAATATAYLCGVKANFQTIGLSAAARFNQCNTTRGNEVISVMNRAKQAGKSVGVVTTTRVQHASPAGTYAHTVNRNWYSDADMPASARQEGCQDIATQLISNMDIDVILGGGRKYMFPMGTPDPEYPADASQNGIRLDGKNLVQEWLAKHQGAWYVWNRTELMQASLDQSVTHLMGLFEPGDTKYEIHRDPTLDPSLMEMTEAALRLLSRNPRGFYLFVEGGRIDHGHHEGVAYQALTEAVMFDDAIERAGQLTSEEDTLTLVTADHSHVFSFGGYTLRGSSIFGLAPSKAQDSKAYTSILYGNGPGYVFNSGVRPDVNESESGSPDYQQQAAVPLSSETHGGEDVAVFARGPQAHLVHGVQEQSFVAHVMAFAACLEPYTACDLAPPACTTDAAHPVAASLPLLAGTLLLLGASAAP

SEQ ID NO: 3215 - protein, 420 aa, Homo sapiens
MEVPPRLSHVPPPLFPSAPATLASRSLSHWRPRPPRQLAPLLPSLAPSSARQGARRAQRHVTAQQPSRLAGGAAIKGGRRRRPDLFRRHFKSSSIQRSAAAAAATRTARQHPPADSSVTMEDMNEYSNIEEFAEGSKINASKNQQDDGKMFIGGLSWDTSKKDLTEYLSRFGEVVDCTIKTDPVTGRSRGFGFVLFKDAASVDKVLELKEHKLDGKLIDPKRAKALKGKEPPKKVFVGGLSPDTSEEQIKEYFGAFGEIENIELPMDTKTNERRGFCFITYTDEEPVKKLLESRYHQIGSGKCEIKVAQPKEVYRQQQQQQKGGRGAAAGGRGGTRGRGRGQGQNWNQGFNNYYDQGYGNYNSAYGGDQNYSGYGGYDYTGYNYGNYGYGQGYADYSGQQSTYGKASRGGGNHQNNYQPY

SEQ ID NO: 3216 - protein, 1101 aa, Homo sapiens
MDECGSRIRRRVSLPKRNRPSLGCIFGAPTAAELVPGDEGKEEEEMVAENRRRKTAGVLPVEVQPLLLSDSPECLVLGGGDTNPDLLRHMPTDRGVGDQPNDSEVDMFGDYDSFTENSFIAQVDDLEQKYMQLPEHKKHATDFATENLCSESIKNKLSITTIGNLTELQTDKHTENQSGYEGVTIEPGADLLYDVPSSQAIYFENLQNSSNDLGDHSMKERDWKSSSHNTVNEELPHNCIEQPQQNDESSSKVRTSSDMNRRKSIKDHLKNAMTGNAKAQTPIFSRSKQLKDTLLSEEINVAKKTVESSSNDLGPFYSLPSKVRDLYAQFKGIEKLYEWQHTCLTLNSVQERKNLIYSLPTSGGKTLVAEILMLQELLCCRKDVLMILPYVAIVQEKISGLSSFGIELGFFVEEYAGSKGRFPPTKRREKKSLYIATIEKGHSLVNSLIETGRIDSLGLVVVDELHMIGEGSRGATLEMTLAKILYTSKTTQIIGMSATLNNVEDLQKFLQAEYYTSQFRPVELKEYLKINDTIYEVDSKAENGMTFSRLLNYKYSDTLKKMDPDHLVALVTEVIPNYSCLVFCPSKKNCENVAEMICKFLSKEYLKHKEKEKCEVIKNLKNIGNGNLCPVLKRTIPFGVAYHHSGLTSDERKLLEEAYSTGVLCLFTCTSTLAAGVNLPARRVILRAPYVAKEFLKRNQYKQMIGRAGRAGIDTIGESILILQEKDKQQVLELITKPLENCYSHLVQEFTKGIQTLFLSLIGLKIATNLDDIYHFMNGTFFGVQQKVLLKEKSLWEITVESLRYLTEKGLLQKDTIYKSEEEVQYNFHITKLGRASFKGTIDLAYCDILYRDLKKGLEGLVLESLLHLIYLTTPYDLVSQCNPDWMIYFRQFSQLSPAEQNVAAILGVSESFIGKKASGQAIGKKVDKNVVNRLYLSFVLYTLLKETNIWTVSEKFNMPRGYIQNLLTGTASFSSCVLHFCEELEEFWVYRALLVELTKKLTYCVKAELIPLMEVTGVLEGRAKQLYSAGYKSLMHLANANPEVLVRTIDHLSRRQAKQIVSSAKMLLHEKAEALQEEVEELLRLPSDFPGAVASSTDKA

SEQ ID NO: 3217 - protein, 870 aa, Homo sapiens
MNSNLPAENLTIAVNMTKTLPTAVTHGFNSTNDPPSMSITRLFPALLECFGIVLCGYIAGRANVITSTQAKGLGNFVSRFALPALLFKNMVVLNFSNVDWSFLYSILIAKASVFFIVCVLTLLVASPDSRFSKAGLFPIFATQSNDFALGYPIVEALYQTTYPEYLQYIYLVAPISLMMLNPIGFIFCEIQKWKDTQNASQNKIKIVGLGLLRVLQNPIVFMVFIGIAFNFILDRKVPVYVENFLDGLGNSFSGSALFYLGLTMVGKIKRLKKSAFVVLILLITAKLLVLPLLCREMVELLDKGDSVVNHTSLSNYAFLYGVFPVAPGVAIFATQFNMEVEIITSGMVISTFVSAPIMYVSAWLLTFPTMDPKPLAYAIQNVSFDISIVSLISLIWSLAILLLSKKYKQLPHMLTTNLLIAQSIVCAGMMIWNFVKEKNFVGQILVFVLLYSSLYSTYLWTGLLAISLFLLKKRERVQIPVGIIIISGWGIPALLVGVLLITGKHNGDSIDSAFFYGKEQMITTAVTLFCSILIAGISLMCMNQTAQAGSYEGFDQSQSHKVVEPGNTAFEESPAPVNEPELFTSSIPETSCCSCSMGNGELHCPSIEPIANTSTSEPVIPSFEKNNHCVSRCNSQSCILAQEEEQYLQSGDQQLTRHVLLCLLLIIGLFANLSSCLWWLFNQEPGRLYVELQFFCAVFNFGQGFISFGIFGLDKHLIILPFKRRLEFLWNNKDTAENRDSPVSEEIKMTCQQFIHYHRDLCIRNIVKERRCGAKTSAGTFCGCDLVSWLIEVGLASDRGEAVIYGDRLVQGGVIQHITNEYEFRDEYLFYRFLQKSPEQSPPAINANTLQQERYKEIEHSSPPSHSPKT

SEQ ID NO: 3218 - protein, 706 aa, Homo sapiens
MDIKHHQNGTRGQRRKQPHTTVQRLLTWGLPVSCSWFLWRQPGEFPVTALLLGAGAGGLLAIGLFQLLVNPMNIYEEQKIMFLYSLVGLGAMGWGTSPHIRCASLLLVPKMLGKEGRLFVLGYALAAIYVGPVANLRHNLNNVIASLGCTVELQINNTRAAWRISTAPLRAMFKDLLSSKELLRAETRNISATFEDLDAQVNSETGYTPEDTMDSGETAQGREARQAPASRLHLSTQKMYELKTKLRCSYVVNQAILSCRRWFDRKHEQCMKHIWVPLLTHLLCLPMKFKFFCGIAKVMEVWCRNRIPVEGNFGQTYDSLNQSIRGLDGEFSANIDFKEEKQAGVLGLNTSWERVSTEVRDYVYRQEARLEWALGLLHVLLSCTFLLVLHASFSYMDSYNHDIRFDNIYISTYFCQIDDRRKKLGKRTLLPLRKAEEKTVIFPCKPTIQASEMSNVVRELLETLPILLLLVVLCGLDWALYSIFDTIRHHSFLQYSFRSSHKLEVKVGGDSMLARLLRKTIGALNTSSETVMESNNMPCLPQPVGLDARAYWRAAVPIGLLVCLCLLQAFGYRLRRVIAAFYFPKREKKRILFLYNDLLKKRAAFTKLRRAAILRRERQQKAPRHPLADILHRGCPLLRRWLCRRCVVCQAPETPESYVCRTLDCEAVYCWSCWDDMRQRCPVCTPREELSSSAFSDSNDDTAYAG

SEQ ID NO: 3219 - protein, 576 aa, Homo sapiens
MGHFEKGQHALLNEGEENEMEIFGYRTQGCRKSLCLAGSIFSFGILPLVFYWRPAWHVWAHCVPCSLQEADTVLLRTTDEFQIYSWKKVIWIYLSALNSAFGLTPDHPLMTDEEYIINRAIRKPDLKVRCIKVQKIRYVWNYLEGQFQKIGSLEDWLSSAKIHQKFGSGLTREEQEIRRLICGPNTIDVEVTPIWKLLIKEVLNPFYIFQLFSVCLWFSEDYKEYAFAIIIMSIISISLTVYDLREQSVKLHHLVESHNSITVSVCGRKAGVQELESRVLVPGDLLILTGNKVLMPCDAVLIEGSCVVDEGMLTGESIPVTKTPLPKMDSSVPWKTQSEADYKRHVLFCGTEVIQAKAACSGTVRAVVLQTGFNTAKGDLVRSILYPKPVNFQLYRDAIRFLLCLVGTATIGMIYTLCVYVLSGEPPEEVVRKALDVITIAVPPALPAALTTGIIYAQRRLKKRGIFCISPQRINVCGQLNLVCFDKTGTLTRDGLDLWGVVSCDRNGFQEVHSFASGQALPWGPLCAAMASCHSLILLDGTIQGDPLDLKMFEATTWVSLCSSENLRSFFNARAT

SEQ ID NO: 3220 - protein, 3177 aa, Homo sapiens
MRKHRHLPLVAVFCLFLSGFPTTHAQQQQADVKNGAAADIIFLVDSSWTIGEEHFQLVREFLYDVVKSLAVGENDFHFALVQFNGNPHTEFLLNTYRTKQEVLSHISNMSYIGGTNQTGKGLEYIMQSHLTKAAGSRAGDGVPQVIVVLTDGHSKDGLALPSAELKSADVNVFAIGVEDADEGALKEIASEPLNMHMFNLENFTSLHDIVGNLVSCVHSSVSPERAGDTETLKDITAQDSADIIFLIDGSNNTGSVNFAVILDFLVNLLEKLPIGTQQIRVGVVQFSDEPRTMFSLDTYSTKAQVLGAVKALGFAGGELANIGLALDFVVENHFTRAGGSRVEEGVPQVLVLISAGPSSDEIRYGVVALKQASVFSFGLGAQAASRAELQHIATDDNLVFTVPEFRSFGDLQEKLLPYIVGVAQRHIVLKPPTIVTQVIEVNKRDIVFLVDGSSALGLANFNAIRDFIAKVIQRLEIGQDLIQVAVAQYADTVRPEFYFNTHPTKREVITAVRKMKPLDGSALYTGSALDFVRNNLFTSSAGYRAAEGIPKLLVLITGGKSLDEISQPAQELKRSSIMAFAIGNKGADQAELEEIAFDSSLVFIPAEFRAAPLQGMLPGLLAPLRTLSGTPEVHSNKRDIIFLLDGSANVGKTNFPYVRDFVMNLVNSLDIGNDNIRVGLVQFSDTPVTEFSLNTYQTKSDILGHLRQLQLQGGSGLNTGSALSYVYANHFTEAGGSRIREHVPQLLLLLTAGQSEDSYLQAANALTRAGILTFCVGASQANKAELEQIAFNPSLVYLMDDFSSLPALPQQLIQPLTTYVSGGVEEVPLAQPESKRDILFLFDGSANLVGQFPVVRDFLYKIIDELNVKPEGTRIAVAQYSDDVKVESRFDEHQSKPEILNLVKRMKIKTGKALNLGYALDYAQRYIFVKSAGSRIEDGVLQFLVLLVAGRSSDRVDGPASNLKQSGVVPFIFQAKNADPAELEQIVLSPAFILAAESLPKIGDLHPQIVNLLKSVHNGAPAPVSGEKDVVFLLDGSEGVRSGFPLLKEFVQRVVESLDVGQDRVRVAVVQYSDRTRPEFYLNSYMNKQDVVNAVRQLTLLGGPTPNTGAALEFVLRNILVSSAGSRITEGVPQLLIVLTADRSGDDVRNPSVVVKRGGAVPIGIGIGNADITEMQTISFIPDFAVAIPTFRQLGTVQQVISERVTQLTREELSRLQPVLQPLPSPGVGGKRDVVFLIDGSQSAGPEFQYVRTLIERLVDYLDVGFDTTRVAVIQFSDDPKVEFLLNAHSSKDEVQNAVQRLRPKGGRQINVGNALEYVSRNIFKRPLGSRIEEGVPQFLVLISSGKSDDEVDDPAVELKQFGVAPFTIARNADQEELVKISLSPEYVFSVSTFRELPSLEQKLLTPITTLTSEQIQKLLASTRYPPPAVESDAADIVFLIDSSEGVRPDGFAHIRDFVSRIVRRLNIGPSKVRVGVVQFSNDVFPEFYLKTYRSQAPVLDAIRRLRLRGGSPLNTGKALEFVARNLFVKSAGSRIEDGVPQHLVLVLGGKSQDDVSRFAQVIRSSGIVSLGVGDRNIDRTELQTITNDPRLVFTVREFRELPNIEERIMNSFGPSAATPAPPGVDTPPPSRPEKKKADIVFLLDGSINFRRDSFQEVLRFVSEIVDTVYEDGDSIQVGLVQYNSDPTDEFFLKDFSTKRQIIDAINKVVYKGGRHANTKVGLEHLRVNHFVPEAGSRLDQRVPQIAFVITGGKSVEDAQDVSLALTQRGVKVFAVGVRNIDSEEVGKIASNSATAFRVGNVQELSELSEQVLETLHDAMHETLCPGVTDAAKACNLDVILGFDGSRDQNVFVAQKGFESKVDAILNRISQMHRVSCSGGRSPTVRVSVVANTPSGPVEAFDFDEYQPEMLEKFRNMRSQHPYVLTEDTLKVYLNKFRQSSPDSVKVVIHFTDGADGDLADLHRASENLRQEGVRALILVGLERVVNLERLMHLEFGRGFMYDRPLRLNLLDLDYELAEQLDNIAEKACCGVPCKCSGQRGDRGPIGSIGPKGIPGEDGYRGYPGDEGGPGERGPPGVNGTQGFQGCPGQRGVKGSRGFPGEKGEVGEIGLDGLDGEDGDKGLPGSSGEKGNPGRRGDKGPRGEKGERGDVGIRGDPGNPGQDSQERGPKGETGDLGPMGVPGRDGVPGGPGETGKNGGFGRRGPPGAKGNKGGPGQPGFEGEQGTRGAQGPAGPAGPPGLIGEQGISGPRGSGGAAGAPGERGRTGPLGRKGEPGEPGPKGGIGNRGPRGETGDDGRDGVGSEGRRGKKGERGFPGYPGPKGNPGEPGLNGTTGPKGIRGRRGNSGPPGIVGQKGDPGYPGPAGPKGNRGDSIDQCALIQSIKDKCPCCYGPLECPVFPTELAFALDTSEGVNQDTFGRMRDVVLSIVNDLTIAESNCPRGARVAVVTYNNEVTTEIRFADSKRKSVLLDKIKNLQVALTSKQQSLETAMSFVARNTFKRVRNGFLMRKVAVFFSNTPTRASPQLREAVLKLSDAGITPLFLTRQEDRQLINALQINNTAVGHALVLPAGRDLTDFLENVLTCHVCLDICNIDPSCGFGSWRPSFRDRRAAGSDVDIDMAFILDSAETTTLFQFNEMKKYIAYLVRQLDMSPDPKASQHFARVAVVQHAPSESVDNASMPPVKVEFSLTDYGSKEKLVDFLSRGMTQLQGTRALGSAIEYTIENVFESAPNPRDLKIVVLMLTGEVPEQQLEEAQRVILQAKCKGYFFVVLGIGRKVNIKEVYTFASEPNDVFFKLVDKSTELNEEPLMRFGRLLPSFVSSENAFYLSPDIRKQCDWFQGDQPTKNLVKFGHKQVNVPNNVTSSPTSNPVTTTKPVTTTKPVTTTTKPVTTTTKPVTIINQPSVKPAAAKPAPAKPVAAKPVATKMATVRPPVAVKPATAAKPVAAKPAAVRPPAAAAAKPVATKPEVPRPQAAKPAATKPATTKPMVKMSREVQVFEITENSAKLHWERAEPPGPYFYDLTVTSAHDQSLVLKQNLTVTDRVIGGLLAGQTYHVAVVCYLRSQVRATYHGSFSTKKSQPPPPQPARSASSSTINLMVSTEPLALTETDICKLPKDEGTCRDFILKWYYDPNTKSCARFWYGGCGGNENKFGSQKECEKVCAPVLAKPGVISVMGT

SEQ ID NO: 3221 - protein, 796 aa, Homo sapiens
MEEEASRSAAATNPGSRLTRWPPPDKREGSAVDPGKRRSLAATPSSSLPCTLIALGLRHEKEANELMEDLFETFQDEMGFSNMEDDGPEEEERVAEPQANFNTPQALRFEELLANLLNEQHQIAKELFEQLKMKKPSAKQQKEVEKVKPQCKEVHQTLILDPAQRKRLQQQMQQHVQLLTQIHLLATCNPNLNPEASSTRICLKELGTFAQSSIALHHQYNPKFQTLFQPCNLMGAMQLIEDFSTHVSIDCSPHKTVKKTANEFPCLPKQVAWILATSKVFMYPELLPVCSLKAKNPQDKILFTKAEDNKYLLTCKTARQLTVRIKNLNMNRAPDNIIKFYKKTKQLPVLGKCCEEIQPHQWKPPIEREEHRLPFWLKASLPSIQEELRHMADGAREVGNMTGTTEINSDQGLEKDNSELGSETRYPLLLPKGVVLKLKPVADRFPKKAWRQKRSSVLKPLLIQPSPSLQPSFNPGKTPAQSTHSEAPPSKMVLRIPHPIQPATVLQTVPGVPPLGVSGGESFESPAALPAMPPEARTSFPLSESQTLLSSAPVPKVMMPSPASSMFRKPYVRRRPSKRRGARAFRCIKPAPVIHPASVIFTVPATTVKIVSLGGGCNMIQPVNAAVAQSPQTIPIATLLVNPTSFPCPLNQPLVASSVSPLIVSGNSVNLPIPSTPEDKAHMNVDIACAVADGENAFQGLEPKLEPQELSPLSATVFPKVEHSPGPPPVDKQCQEGLSENSAYRWTVVKTEEGRQALEPLPQGIQESLNNSSPGDLEEVVKMEPEDATEEISGFL

SEQ ID NO: 3222 - protein, 1251 aa, Homo sapiens
MAGKLRKSHIPGVSIWQLVEEIPEGCSTPDFEQKPVTSALPEGKNAVFRAVVCGEPRPEVRWQNSKGDLSDSSKYKISSSPGSKEHVLQINKLTGEDTDLYRCTAVNAYGEAACSVRLTVIEVGFRKNRKRHREPQEDLRKELMDFRKLLKKRAPPAPKKKMDLEQIWQLLMTADRKDYEKICLKYGIVDYRGMLRRLQEMKKEQEDKMAQYINTISSLRHIRVTKDGNAKFDLELDLKDSQSKIYLYKDGEMIPYGFNNQTKHCLRRLGKRYEFQIQDLRPEDSGIYQVKVEDAVVFSTELEASAIPPRVVVPLAETHCEEQGDAVFECTLSSPCPSAAWHFRHRLLHPSDKYEVYVSPDGLTHRLVVRGARFSDMGPYSLGTGLYTSSAWLVVEAGKDKDLQSTSADHKLQSRRSGKDGRLDIYGERRDATRSSTSRYKPGTGSFSKDAQGPMGHFSQGLADMEVQPGEAATLSCTLTSDLGPGTWFKDGVKLTTQDGVIFKQDGLVHSLFITHVQGTQAGRYTFVAGDQQSEATLTVQDSPTIAPDVTEKLREPLVVKAGKPVIVKIPFQSHLPIQAAWRKDGAEVVGSSDREAQVDLGDGYTRLCLPSAGRKDCGQYSVTLRSEGGSVQAELTLQVIDKPDPPQGPMEVQDCHRAGVCLRWRPPRDNGGRTVECYVVERRQAGRSTWLKVGEAPADSTTFTDAHVEPGRKYTFRVRAVTSEGAGEALESEEILVAPEALPKAPSAPAILSASSQGITLTWTAPRGPGSAHILGYLIERRKKGSNTWTAVNDQPVPERRWTVADVRQGCQYEFRVTAVAPSGPGEPGPPSDAVFARDPMRPPGLVRNLQVTDRSNTSITLSWAGPDTQEGDEAQGYVVELCSSDSLQWLPCHVGTVPVTTYTAKGLRPGEGYFVRVTAVNEGGQSQPSALDTLVQAMPVTVCPKFLVDSSTKDLLTVKVGDTVRVPVSFEAMPMPEVTWLKDGLPLPKRSVTVTKDGLTQLLIPVAGLSDSGLYTVVLRTLQGKEVAHSFRIRVAACPQAPGPIHLQENVPGTVTAEWEPSPDEAQDVPLHYAVFTRSSAHGPWHEAADRIHTNRFTLLGILPGHEYHFRVVAKNELGASKPSDTSQPWCIPRQRDRFTVKAPCYREPDLSQKPRFLVGLRSHLLPQGCECCMSCAVQGSPRPHVTWFKNDRSLEGNPAVYSTDLLGVCSLTIPSVSPKDSGEYKAVAENTLGQAVSTATLIVIEPST

SEQ ID NO: 3223 - protein, 1023 aa, Homo sapiens
MGKGVGRDKYEPAAVSEQGDKKGKKGKKDRDMDELKKEVSMDDHKLSLDELHRKYGTDLSRGLTSARAAEILARDGPNALTPPPTTPEWIKFCRQLFGGFSMLLWIGAILCFLAYSIQAATEEEPQNDNLYLGVVLSAVVIITGCFSYYQEAKSSKIMESFKNMVPQQALVIRNGEKMSINAEEVVVGDLVEVKGGDRIPADLRIISANGCKVDNSSLTGESEPQTRSPDFTNENPLETRNIAFFSTNCVEGTARGIVVYTGDRTVMGRIATLASGLEGGQTPIAAEIEHFIHIITGVAVFLGVSFFILSLILEYTWLEAVIFLIGIIVANVPEGLLATVTVCLTLTAKRMARKNCLVKNLEAVETLGSTSTICSDKTGTLTQNRMTVAHMWFDNQIHEADTTENQSGVSFDKTSATWLALSRIAGLCNRAVFQANQENLPILKRAVAGDASESALLKCIELCCGSVKEMRERYAKIVEIPFNSTNKYQLSIHKNPNTSEPQHLLVMKGAPERILDRCSSILLHGKEQPLDEELKDAFQNAYLELGGLGERVLGFCHLFLPDEQFPEGFQFDTDDVNFPIDNLCFVGLISMIDPPRAAVPDAVGKCRSAGIKVIMVTGDHPITAKAIAKGVGIISEGNETVEDIAARLNIPVSQVNPRDAKACVVHGSDLKDMTSEQLDDILKYHTEIVFARTSPQQKLIIVEGCQRQGAIVAVTGDGVNDSPALKKADIGVAMGIAGSDVSKQAADMILLDDNFASIVTGVEEGRLIFDNLKKSIAYTLTSNIPEITPFLIFIIANIPLPLGTVTILCIDLGTDMVPAISLAYEQAESDIMKRQPRNPKTDKLVNERLISMAYGQIGMIQALGGFFTYFVILAENGFLPIHLLGLRVDWDDRWINDVEDSYGQQWTYEQRKIVEFTCHTAFFVSIVVVQWADLVICKTRRNSVFQQGMKNKILIFGLFEETALAAFLSYCPGMGVALRMYPLKPTWWFCAFPYSLLIFVYDEVRKLIIRRRPGGWVEKETYY

SEQ ID NO: 3224 - protein, 520 aa, Homo sapiens
MQSESGIVPDFEVGEEFHEEPKTYYELKSQPLKSSSSAEHPGASKPPISSSSMTSRILLRQQLMREQMQEQERREQQQKLQAAQFMQQRVPVSQTPAINVSVPTTLPSATQVPMEVLKVQTHLENPTKYHIQQAQRQQVKQYLSTTLANKHANQVLSLPCPNQPGDHVMPPVPGSSAPNSPMAMLTLNSNCEKEGFYKFEEQNRAESECPGMNTHSRASCMQMDDVIDDIISLESSYNEEILGLMDPALQMANTLPVSGNLIDLYGNQGLPPPGLTISNSCPANLPNIKRELTESEARALAKERQKKDNHNLIERRRRFNINDRIKELGTLIPKSNDPDMRWNKGTILKASVDYIRKLQREQQRAKELENRQKKLEHANRHLLLRIQELEMQARAHGLSLIPSTGLCSPDLVNRIIKQEPVLENCSQDLLQHHADLTCTTTLDLTDGTITFNNNLGTGTEANQAYSVPTKMGSKLEDILMDDTLSPVGVTDPLLSSVSPGASKTSSRRSSMSMEETEHTC

SEQ ID NO: 3225 - protein, 698 aa, Homo sapiens
MNPFQKNESKETLFSPVSIEEVPPRPPSPPKKPSPTICGSNYPLSIAFIVVNEFCERFSYYGMKAVLILYFLYFLHWNEDTSTSIYHAFSSLCYFTPILGAAIADSWLGKFKVLSLIGLSLIALGTGGIKPCVAAFGGDQFEEKHAEERTRYFSVFYLSINAGSLISTFITPMLRGDVQCFGEDCYALAFGVPGLLMVIALVVFAMGSKIYNKPPPEGNIVAQVFKCIWFAISNRFKNRSGDIPKRQHWLDWAAEKYPKQLIMDVKALTRVLFLYIPLPMFWALLDQQGSRWTLQAIRMNRNLGFFVLQPDQMQVLNPLLVLIFIPLFDFVIYRLVSKCGINFSSLRKMAVGMILACLAFAVAAAVEIKINEMAPAQPGPQEVFLQVLNLADDEVKVTVVGNENNSLLIESIKSFQKTPHYSKLHLKTKSQDFHFHLKYHNLSLYTEHSVQEKNWYSLVIREDGNSISSMMVKDTESRTTNGMTTVRFVNTLHKDVNISLSTDTSLNVGEDYGVSAYRTVQRGEYPAVHCRTEDKNFSLNLGLLDFGAAYLFVITNNTNQGLQAWKIEDIPANKMSIAWQLPQYALVTAGEVMFSVTGLEFSYSQAPSSMKSVLQAAWLLTIAVGNIIVLVVAQFSGLVQWAEFILFSCLLLVICLIFSIMGYYYVPVKTEDMRGPADKHIPHIQGNMIKLETKKTKL

SEQ ID NO: 3226 - protein, 536 aa, Homo sapiens
MEEPPQEALAEPLKHESPAAPSSAGHTKGQEEDDQKNQAERKADNHTAHRIADQTALRVPSQAESSIFSQATNGVAEQNGHSTPGQAGRRASNPADVSDLRADDQVNQTPSEQTKGKASSQANNVQHEQSDGQVSGLTEERTAEQTERRLPTQAERRTSGQIDGRLAMPSDQRGSRQTDHRMAGQSERRASEQMDRRMSGEAERRTSEQITHRLSKLSERRPSVQIDSGSSVPSDQSPSVQIDSGSSVPSDQRPSVQIDRRMSGKVRRRSSEKTDYRLAGLADPGTSEQTDLRLYGLVDHKTSVKTHHQVYGQATELAEHQAIDQAHSNADQPPVDNAHYTESDQTDHLADRQANHKDQLSYYETRGQSEDRIFPQLGNSKEDKEADYRVQPCKFEDSQVDLNSKPSVEMETQNATTIPPYNPVDARFTSNFQAKDQALFPRLPSISSKLNYTSSQEKTQAIVTKSDEFSEIDQGKGYHIRNQTYRRFPSIVYEDPYQVSLQYMEKHHILQIFQQITENLVYEKPEDPLNFMLCQV

SEQ ID NO: 3227 - protein, 650 aa, Homo sapiens
MASGEHSPGSGAARRPLHSAQAVDVASASNFRAFELLHLHLDLRAEFGPPGPGAGSRGLSGTAVLDLRCLEPEGAAELRLDSHPCLEVTAAALRRERPGSEEPPAEPVSFYTQPFSHYGQALCVSFPQPCRAAERLQVLLTYRVGEGPGVCWLAPEQTAGKKKPFVYTQGQAVLNRAFFPCFDTPAVKYKYSALIEVPDGFTAVMSASTWEKRGPNKFFFQMCQPIPSYLIALAIGDLVSAEVGPRSRVWAEPCLIDAAKEEYNGVIEEFLATGEKLFGPYVWGRYDLLFMPPSFPFGGMENPCLTFVTPCLLAGDRSLADVIIHEISHSWFGNLVTNANWGEFWLNEGFTMYAQRRISTILFGAAYTCLEAATGRALLRQHMDITGEENPLNKLRVKIEPGVDPDDTYNETPYEKGFCFVSYLAHLVGDQDQFDSFLKAYVHEFKFRSILADDFLDFYLEYFPELKKKRVDIIPGFEFDRWLNTPGWPPYLPDLSPGDSLMKPAEELAQLWAAEELDMKAIEAVAISPWKTYQLVYFLDKILQKSPLPPGNVKKLGDTYPSISNARNAELRLRWGQIVLKNDHQEDFWKVKEFLHNQGKQKYTLPLYHAMMGGSEVAQTLAKETFASTASQLHSNVVNYVQQIVAPKGS

SEQ ID NO: 3228 - protein, 297 aa, Homo sapiens
MEEPTAVEGQVQLPSPHQGSLRKAVAAALALDGESTMGHRKKKRKESRPESIIIYRSDNEKTDEEPGESEGGDQPKEEEGDDFLDYPVDDDMWNLPLDSRYVTLTGTITRGKKKGQMVDIHVTLTEKELQELTKPKESSRETTPEGRMACQMGADRGPHVVLWTLICLPVVFILSFVVSFYYGTITWYNIFLVYNEERTFWHKISYCPCLVLFYPVLIMAMASSLGLYAAVVQLSWSWEAWWQAARDMEKGFCGWLCSKLGLEDCSPYSIVELLESDNISSTLSNKDPIQEVETSTV

SEQ ID NO: 3229 - protein, 282 aa, Homo sapiens
MERPSLRALLLGAAGLLLLLLPLSSSSSSDTCGPCEPASCPPLPPLGCLLGETRDACGCCPMCARGEGEPCGGGGAGRGYCAPGMECVKSRKRRKGKAGAAAGGPGVSGVCVCKSRYPVCGSDGTTYPSGCQLRAASQRAESRGEKAITQVSKGTCEQGPSIVTPPKDIWNVTGAQVYLSCEVIGIPTPVLIWNKVKRGHYGVQRTELLPGDRDNLAIQTRGGPEKHEVTGWVLVSPLSKEDAGEYECHASNSQGQASASAKITVVDALHEIPVKKGEGAEL

SEQ ID NO: 3230 - protein, 350 aa, Homo sapiens
MSNITDPQMWDFDDLNFTGMPPADEDYSPCMLETETLNKYVVIIAYALVFLLSLLGNSLVMLVILYSRVGRSVTDVYLLNLALADLLFALTLPIWAASKVNGWIFGTFLCKVVSLLKEVNFYSGILLLACISVDRYLAIVHATRTLTQKRHLVKFVCLGCWGLSMNLSLPFFLFRQAYHPNNSSPVCYEVLGNDTAKWRMVLRILPHTFGFIVPLFVMLFCYGFTLRTLFKAHMGQKHRAMRVIFAVVLIFLLCWLPYNLVLLADTLMRTQVIQESCERRNNIGRALDATEILGFLHSCLNPIIYAFIGQNFRHGFLKILAMHGLVSKEFLARHRVTSYTSSSVNVSSNL

SEQ ID NO: 3231 - protein, 545 aa, Homo sapiens
MMGHRPVLVLSQNTKRESGRKVQSGNINAAKTIADIIRTCLGPKSMMKMLLDPMGGIVMTNDGNAILREIQVQHPAAKSMIEISRTQDEEVGDGTTSVIILAGEMLSVAEHFLEQQMHPTVVISAYRKALDDMISTLKKISIPVDISDSDMMLNIINSSITTKAISRWSSLACNIALDAVKMVQFEENGRKEIDIKKYARVEKIPGGIIEDSCVLRGVMINKDVTHPRMRRYIKNPRIVLLDSSLEYKKGESQTDIEITREEDFTRILQMEEEYIQQLCEDIIQLKPDVVITEKGISDLAQHYLMRANITAIRRVRKTDNNRIARACGARIVSRPEELREDDVGTGAGLLEIKKIGDEYFTFITDCKDPKACTILLRGASKEILSEVERNLQDAMQVCRNVLLDPQLVPGGGASEMAVAHALTEKSKAMTGVEQWPYRAVAQALEVIPRTLIQNCGASTIRLLTSLRAKHTQENCETWGVNGETGTLVDMKELGIWEPLAVKLQTYKTAVETAVLLLRIDDIVSGHKKKGDDQSRQGGAPDAGQE

SEQ ID NO: 3232 - protein, 394 aa, Homo sapiens
MTEQETLALLEVKRSDSPEKSSPQALVPNGRQPEGEGGAESPGAESLRVGSSAGSPTAIEGAEDGLDSTVSEAATLPWGTGPQPSAPFPDPPGWRDIEPEPPESEPLTKLEELPEDDANLLPEKAARAFVPIDLQCIERQPQEDLIVRCEAGEGECRTFMPPRVTHPDPTERKWAEAVVRPPGCSCGGCGSCGDREWLRAVASVGAALILFPCLLYGAYAFLPFDVPRLPTMSSRLIYTLRCGVFATFPIVLGILVYGLSLLCFSALRPFGEPRREVEIHRRYVAQSVQLFILYFFNLAVLSTYLPQDTLKLLPLLTGLFAVSRLIYWLTFAVGRSFRGFGYGLTFLPLLSMLMWNLYYMFVVEPERMLTATESRLDYPDHARSASDYRPRPWG

SEQ ID NO: 3233 - protein, 692 aa, Homo sapiens
MGSAADVRFSLGTTTHAPPGVHRRYSALREESAKDWETSPLPGMLAPAAGPAFDSDPEISDVDEDEPGGLVGSADVVSPSGHSDAQTLAMMLQEQLDAINEEIRMIQEEKESTELRAEEIETRVTSGSMEALNLKQLRKRGSIPTSLTALSLASASPPLSGRSTPKLTSRSAAQDLDRMGVMTLPSDLRKHRRKLLSPVSREENREDKATIKCETSPPSSPRTLRLEKLGHPALSQEEGKSALEDQGSNPSSSNSSQDSLHKGAKRKGIKSSIGRLFGKKEKGRLIQLSRDGATGHVLLTDSEFSMQEPMVPAKLGTQAEKDRRLKKKHQLLEDARRKGMPFAQWDGPTVVSWLELWVGMPAWYVAACRANVKSGAIMSALSDTEIQREIGISNALHRLKLRLAIQEMVSLTSPSAPPTSRTSSGNVWVTHEEMETLETSTKTTLAYGDMNHEWIGNEWLPSLGLPQYRSYFMECLVDARMLDHLTKKDLRVHLKMVDSFHRTSLQYGIMCLKRLNYDRKELEKRREESQHEIKDVLVWTNDQVVHWVQSIGLRDYAGNLHESGVHGALLALDENFDHNTLALILQIPTQNTQARQVMEREFNNLLALGTDRKLDDGDDKVFRRAPSWRKRFRPREHHGRGGMLSASAETLPAGFRVSTLGTLQPPPAPPKKIMPEAHSHYLYGHMLSAFRD

SEQ ID NO: 3234 - protein, 1315 aa, Homo sapiens
MEKYHVLEMIGEGSFGRVYKGRRKYSAQVVALKFIPKLGRSEKELRNLQREIEIMRGLRHPNIVHMLDSFETDKEVVVVTDYAEGELFQILEDDGKLPEDQVQAIAAQLVSALYYLHSHRILHRDMKPQNILLAKGGGIKLCDFGFARAMSTNTMVLTSIKGTPLYMSPELVEERPYDHTADLWSVGCILYELAVGTPPFYATSIFQLVSLILKDPVRWPSTISPCFKNFLQGLLTKDPRQRLSWPDLLYHPFIAGHVTIITEPAGPDLGTPFTSRLPPELQVLKDEQAHRLAPKGNQSRILTQAYKRMAEEAMQKKHQNTGPALEQEDKTSKVAPGTAPLPRLGATPQESSLLAGILASELKSSWAKSGTGEVPSAPRENRTTPDCERAFPEERPEVLGQRSTDVVDLENEEPDSDNEWQHLLETTEPVPIQLKAPLTLLCNPDFCQRIQSQLHEAGGQILKGILEGASHILPAFRVLSSLLSSCSDSVALYSFCREAGLPGLLLSLLRHSQESNSLQQQSWYGTFLQDLMAVIQAYFACTFNLERSQTSDSLQVFQEAANLFLDLLGKLLAQPDDSEQTLRRDSLMCFTVLCEAMDGNSRAISKAFYSSLLTTQQVVLDGLLHGLTVPQLPVHTPQGAPQVSQPLREQSEDIPGAISSALAAICTAPVGLPDCWDAKEQVCWHLANQLTEDSSQLRPSLISGLQHPILCLHLLKVLYSCCLVSEGLCRLLGQEPLALESLFMLIQGKVKVVDWEESTEVTLYFLSLLVFRLQNLPCGMEKLGSDVATLFTHSHVVSLVSAAACLLGQLGQQGVTFDLQPMEWMAAATHALSAPAEVRLTPPGSCGFYDGLLILLLQLLTEQGKASLIRDMSSSEMWTVLWHRFSMVLRLPEEASAQEGELSLSSPPSPEPDWTLISPQGMAALLSLAMATFTQEPQLCLSCLSQHGSILMSILKHLLCPSFLNQLRQAPHGSEFLPVVVLSVCQLLCFPFALDMDADLLIGVLADLRDSEVAAHLLQVCCYHLPLMQVELPISLLTRLALMDPTSLNQFVNTVSASPRTIVSFLSVALLSDQPLLTSDLLSLLAHTARVLSPSHLSFIQELLAGSDESYRPLRSLLGHPENSVRAHTYRLLGHLLQHSMALRGALQSQSGLLSLLLLGLGDKDPVVRCSASFAVGNAAYQAGPLGPALAAAVPSMTQLLGDPQAGIRRNVASALGNLGPEGLGEELLQCEVPQRLLEMACGDPQPNVKEAALIALRSLQQEPGIHQVLVSLGASEKLSLLSLGNQSLPHSSPRPASAKHCRKLIHLLRPAHSM

SEQ ID NO: 3235 - protein, 979 aa, Homo sapiens
MRRPRRPGGLGGSGGLRLLLCLLLLSSRPGGCSAVSAHGCLFDRRLCSHLEVCIQDGLFGQCQVGVGQARPLLQVTSPVLQRLQGVLRQLMSQGLSWHDDLTQYVISQEMERIPRLRPPEPRPRDRSGLAPKRPGPAGELLLQDIPTGSAPAAQHRLPQPPVGKGGAGASSSLSPLQAELLPPLLEHLLLPPQPPHPSLSYEPALLQPYLFHQFGSRDGSRVSEGSPGMVSVGPLPKAEAPALFSRTASKGIFGDHPGHSYGDLPGPSPAQLFQDSGLLYLAQELPAPSRARVPRLPEQGSSSRAEDSPEGYEKEGLGDRGEKPASPAVQPDAALQRLAAVLAGYGVELRQLTPEQLSTLLTLLQLLPKGAGRNPGGVVNVGADIKKTMEGPVEGRDTAELPARTSPMPGHPTASPTSSEVQQVPSPVSSEPPKAARPPVTPVLLEKKSPLGQSQPTVAGQPSARPAAEEYGYIVTDQKPLSLAAGVKLLEILAEHVHMSSGSFINISVVGPALTFRIRHNEQNLSLADVTQQAGLVKSELEAQTGLQILQTGVGQREEAAAVLPQTAHSTSPMRSVLLTLVALAGVAGLLVALAVALCVRQHARQQDKERLAALGPEGAHGDTTFEYQDLCRQHMATKSLFNRAEGPPEPSRVSSVSSQFSDAAQASPSSHSSTPSWCEEPAQANMDISTGHMILAYMEDHLRNRDRLAKEWQALCAYQAEPNTCATAQGEGNIKKNRHPDFLPYDHARIKLKVESSPSRSDYINASPIIEHDPRMPAYIATQGPLSHTIADFWQMVWESGCTVIVMLTPLVEDGVKQCDRYWPDEGASLYHVYEVNLVSEHIWCEDFLVRSFYLKNVQTQETRTLTQFHFLSWPAEGTPASTRPLLDFRRKVNKCYRGRSCPIIVHCSDGAGRTGTYILIDMVLNRMAKGVKEIDIAATLEHVRDQRPGLVRSKDQFEFALTAVAEEVNAILKALPQ

SEQ ID NO: 3236 - protein, 484 aa, Homo sapiens
MVPVQPAEPPEVLKSEPYGEKADVWAVGCILYQMATLSPPFYSTNMLSLATKIVEAVYEPVPEGIYSEKVTDTISRCLTPDAEARPDIVEVSSMISDVMMKYLDNLSTSQLSLEKKLERERRRTQRYFMEANRNTVTCHHELAVLSHETFEKASLSSSSSGAASLKSELSESADLPPEGFQASYGKDEDRACDEILSDDNFNLENAEKDTYSEVDDELDISDNSSSSSSSPLKESTFNILKRSFSASGGERQSQTRDFTGGTGSRPRPALLPLDLLLKVPPHMLRAHIKEIEAELVTGWQSHSLPAVILRNLKDHGPQMGTFLWQASAGIAVSQRKVRQISDPIQQILIQLHKIIYITQLPPALHHNLKRRVIERFKKSLFSQQSNPCNLKSEIKKLSQGSPEPIEPNFFTADYHLLHRSSGGNSLSPNDPTGLPTSIELEEGITYEQMQTVIEEVLEESGYYNFTSNRYHSYPWGTKNHPTKR

SEQ ID NO: 3237 - protein, 164 aa, Homo sapiens
MMLTQAPSSVVRSRNSRNHTVNSGGSCLSASTVAIPAINDSSAAMSACSTISAQPASSMDTQMHSPKKQERVNKRVIWGIEVAEELHWKGWELGKETTRNLVLKNRSLKLQKMKYRYQYKGSRTQCHSLEPRKQALFKTKQNKQKKPLTCHIKASECLKYVQYE

SEQ ID NO: 3238 - protein, 1214 aa, Homo sapiens
MERFRLEKKLPGPDEEAVVDLGKTSSTVNTKFEKEELESHRAVYIGVHVPFSKESRRRHRHRGHKHHHRRRKDKESDKEDGRESPSYDTPSQRVQFILGTEDDDEEHIPHDLFTEMDELCYRDGEEYEWKETARWLKFEEDVEDGGDRWSKPYVATLSLHSLFELRSCILNGTVMLDMRASTLDEIADMVLDNMIASGQLDESIRENVREALLKRHHHQNEKRFTSRIPLVRSFADIGKKHSDPHLLERNGEGLSASRHSLRTGLSASNLSLRGESPLSLLLGHLLPSSRAGTPAGSRCTTPVPTPQNSPPSSPSISRLTSRSSQESQRQAPELLVSPASDDIPTVVIHPPEEDLEAALKGEEQKNEENVDLTPGILASPQSAPGNLDNSKSGEIKGNGSGGSRENSTVDFSKVDMNFMRKIPTGAEASNVLVGEVDFLERPIIAFVRLAPAVLLTGLTEVPVPTRFLFLLLGPAGKAPQYHEIGRSIATLMTDEIFHDVAYKAKDRNDLLSGIDEFLDQVTVLPPGEWDPSIRIEPPKSVPSQEKRKIPVFHNGSTPTLGETPKEAAHHAGPELQRTGRLFGGLILDIKRKAPFFLSDFKDALSLQCLASILFLYCACMSPVITFGGLLGEATEGRISAIESLFGASLTGIAYSLFAGQPLTILGSTGPVLVFEKILYKFCRDYQLSYLSLRTSIGLWTSFLCIVLVATDASSLVCYITRFTEEAFAALICIIFIYEALEKLFDLGETYAFNMHNNLDKLTSYSCVCTEPPNPSNETLAQWKKDNITAHNISWRNLTVSECKKLRGVFLGSACGHHGPYIPDVLFWCVILFFTTFFLSSFLKQFKTKRYFPTKVRSTISDFAVFLTIVIMVTIDYLVGVPSPKLHVPEKFEPTHPERGWIISPLGDNPWWTLLIAAIPALLCTILIFMDQQITAVIINRKEHKLKKGAGYHLDLLMVGVMLGVCSVMGLPWFVAATVLSISHVNSLKVESECSAPGEQPKFLGIREQRVTGLMIFILMGLSVFMTSVLKFIPMPVLYGVFLYMGVSSLKGIQLFDRIKLFGMPAKHQPDLIYLRYVPLWKVHIFTVIQLTCLVLLWVIKVSAAAVVFPMMVLALVFVRKLMDLCFTKRELSWLDDLMPESKKKKEDDKKKKEKEEAERMLQDDDDTVHLPFEGGSLLQIPVKALKYSPDKPVSVKISFEDEPRKKYVDAETSL

SEQ ID NO: 3239 - protein, 686 aa, Homo sapiens
MQLGEQLLVSSVNLPGAHFYPLESARGGSGGSAGHLPSAAPSPQKLDLDKASKKFSGSLSCEAVSGEPAAASAGAPAAMLSDTDAGDAFASAAAVAKPGPPDGRKGSPCGEEELPSAAAAAAAAAAAAAATARYSMDSLSSERYYLQSPGPQGSELAAPCSLFPYQAAAGAPHGPVYPAPNGARYPYGSMLPPGGFPAAVCPPGRAQFGPGAGAGSGAGGSSGGGGGPGTYQYSQGAPLYGPYPGAAAAGSCGGLGGLGVPGSGFRAHVYLCNRPLWLKFHRHQTEMIITKQGRRMFPFLSFNINGLNPTAHYNVFVEVVLADPNHWRFQGGKWVTCGKADNNMQGNKMYVHPESPNTGSHWMRQEISFGKLKLTNNKGANNNNTQMIVLQSLHKYQPRLHIVEVTEDGVEDLNEPSKTQTFTFSETQFIAVTAYQNTDITQLKIDHNPFAKGFRDNYDSSHQIVPGGRYGVQSFFPEPFVNTLPQARYYNGERTVPQTNGLLSPQQSEEVANPPQRWLVTPVQQPGTNKLDISSYESEYTSSTLLPYGIKSLPLQTSHALGYYPDPTFPAMAGWGGRGSYQRKMAAGLPWTSRTSPTVFSEDQLSKEKVKEEIGSSWIETPPSIKSLDSNDSGVYTSACKRRRLSPSNSSNENSPSIKCEDINAEEYSKDTSKGMGGYYAFYTTP

SEQ ID NO: 3240 - protein, 905 aa, Homo sapiens [sequence omitted]

SEQ ID NO: 3241 - protein, 796 aa, Homo sapiens
MVTVGNYCEAEGPVGPAWMQDGLSPCFFFTLVPSTRMALGTLALVLALPCRRRERPAGADSLSWGAGPRISPYVLQLLLATLQAALPLAGLAGRVGTARGAPLPSYLLLASVLESLAGACGLWLLVVERSQARQRLAMGIWIKFRHSPGLLLLWTVAFAAENLALVSWNSPQWWWARADLGQQVRSAAQQSTWRDFGRKLRLLSGYLWPRGSPALQLVVLICLGLMGLERALNVLVPIFYRNIVNLLTEKAPWNSLAWTVTSYVFLKFLQGGGTGSTGFVSNLRTFLWIRVQQFTSRRVELLIFSHLHELSLRWHLGRRTGEVLRIADRGTSSVTGLLSYLVFNVIPTLADIIIGIIYFSMFFNAWFGLIVFLCMSLYLTLTIVVTEWRTKFRRAMNTQENATRARAVDSLLNFETVKYYNAESYEVERYREAIIKYQGLEWKSSASLVLLNQTQNLVIGLGLLAGSLLCAYFVTEQKLQVGDYVLFGTYIIQLYMPLNWFGTYYRMIQTNFIDMENMFDLLKEETEVKDLPGAGPLRFQKGRIEFENVHFSYADGRETLQDVSFTVMPGQTLALVGPSGAGKSTILRLLFRFYDISSGCIRIDGQDISQVTQASLRSHIGVVPQDTVLFNDTIADNIRYGRVTAGNDEVEAAAQAAGIHDAIMAFPEGYRTQVGERGLKLSGGEKQRVAIARTILKAPGIILLDEATSALDTSNERAIQASLAKVCANRTTIVVAHRLSTVVNADQILVIKDGCIVERGRHEALLSRGGVYADMWQLQQGQEETSEDTKPQTMER

SEQ ID NO: 3242 - protein, 567 aa, Homo sapiens
MGRGLLRGLWPLHIVLWTRIASTIPPHVQKSVNNDMIVTDNNGAVKFPQLCKFCDVRFSTCDNQKSCMSNCSITSICEKPQEVCVAVWRKNDENITLETVCHDPKLPYHDFILEDAASPKCIMKEKKKPGETFFMCSCSSDECNDNIIFSEEYNTSNPDLLLVIFQVTGISLLPPLGVAISVIIIFYCYRVNRQQKLSSTWETGKTRKLMEFSEHCAIILEDDRSDISSTCANNINHNTELLPIELDTLVGKGRFAEVYKAKLKQNTSEQFETVAVKIFPYEEYASWKTEKDIFSDINLKHENILQFLTAEERKTELGKQYWLITAFHAKGNLQEYLTRHVISWEDLRKLGSSLARGIAHLHSDHTPCGRPKMPIVHRDLKSSNILVKNDLTCCLCDFGLSLRLDPTLSVDDLANSGQVGTARYMAPEVLESRMNLENVESFKQTDVYSMALVLWEMTSRCNAVGEVKDYEPPFGSKVREHPCVESMKDNVLRDRGRPEIPSFWLNHQGIQMVCETLTECWDHDPEARLTAQCVAERFSELEHLDRLSGRSCSEEKIPEDGSLNTTK

SEQ ID NO: 3243 - protein, 1184 aa, Homo sapiens
MVLLWEPAGAWLALGLALALGPSVAAAAPRQDCTGVECPPLENCIEEALEPGACCATCVQQGCACEGYQYYDCLQGGFVRGRVPAGQSYFVDFGSTECSCPPGGGKISCQFMLCPELPPNCIEAVVVADSCPQCGQVGCVHAGHKYAAGHTVHLPPCRACHCPDAGGELICYQLPGCHGNFSDAEEGDPERHYEDPYSYDQEVAEVEAATALGGEVQAGAVQAGAGGPPAALGGGSQPLSTIQAPPWPAVLPRPTAAAALGPPAPVQAKARRVTEDSEEEEEEEEEREEMAVTEQLAAGGHRGLDGLPTTAPAGPSLPIQEERAEAGARAEAGARPEENLILDAQATSRSTGPEGVTHAPSLGKAALVPTQAVPGSPRDPVKPSPHNILSTSLPDAAWIPPTREVPRKPQVLPHSHVEEDTDPNSVHSIPRSSPEGSTKDLIETCCAAGQQWAIDNDECLEIPESGTEDNVCRTAQRHCCVSYLQEKSCMAGVLGAKEGETCGAEDNDSCGISLYKQCCDCCGLGLRVRAEGQSCESNPNLGYPCNHVMLSCCEGEEPLIVPEVRRPPEPAAAPRRVSEAEMAGREALSLGTEAELPNSLPGDDQDECLLLPGELCQHLCINTVGSYHCACFPGFSLQDDGRTCRPEGHPPQPEAPQEPALKSEFSQVASNTIPLPLPQPNTCKDNGPCKQVCSTVGGSAICSCFPGYAIMADGVSCEDINECVTDLHTCSRGEHCVNTLGSFHCYKALTCEPGYALKDGECEDVDECAMGTHTCQPGFLCQNTKGSFYCQARQRCMDGFLQDPEGNCVDINECTSLSEPCRPGFSCINTVGSYTCQRNPLICARGYHASDDGTKCVDVNECETGVHRCGEGQVCHNLPGSYRCDCKAGFQRDAFGRGCIDVNECWASPGRLCQHTCENTLGSYRCSCASGFLLAADGKRCEDVNECEAQRCSQECANIYGSYQCYCRQGYQLAEDGHTCTDIDECAQGAGILCTFRCLNVPGSYQCACPEQGYTMTANGRSCKDVDECALGTHNCSEAETCHNIQGSFRCLRFECPPNYVQVSKTKCERTTCHDFLECQNSPARITHYQLNFQTGLLVPAHIFRIGPAPAFTGDTIALNIIKGNEEGYFGTRRLNAYTGVVYLQRAVLEPRDFALDVEMKLWRQGSVTTFLAKMHIFFTTFAL

SEQ ID NO: 3244 - protein, 826 aa, Homo sapiens
MAEPSAPESKHKSSLNSSPWSGLMALGNSRHGHHGPGAQCAHKAAGGAAPPKPAPAGLSGGLSQPAGWQSLLSFTILFLAWLAGFSSRLFAVIRFESIIHEFDPWFNYRSTHHLASHGFYEFLNWFDERAWYPLGRIVGGTVYPGLMITAGLIHWILNTLNITVHIRDVCVFLAPTFSGLTSISTFLLTRELWNQGAGLLAACFIAIVPGYISRSVAGSFDNEGIAIFALQFTYYLWVKSVKTGSVFWTMCCCLSYFYMVSAWGGYVFIINLIPLHVFVLLLMQRYSKRVYIAYSTFYIVGLILSMQIPFVGFQPIRTSEHMAAAGVFALLQAYAFLQYLRDRLTKQEFQTLFFLGVSLAAGAVFLSVIYLTYTGYIAPWSGRFYSLWDTGYAKIHIPIIASVSEHQPTTWVSFFFDLHILVCTFPAGLWFCIKNINDERVFVALYAISAVYFAGVMVRLMLTLTPVVCMLSAIAFSNVFEHYLGDDMKRENPPVEDSSDEDDKRNQGNLYDKAGKVRKHATEQEKTEEGLGPNIKSIVTMLMLMLLMMFAVHCTWVTSNAYSSPSVVLASYNHDGTRNILDDFREAYFWLRQNTDEHARVMSWWDYGYQIAGMANRTTLVDNNTWNNSHIALVGKAMSSNETAAYKIMRTLDVDYVLVIFGGVIGYSGDDINKFLWMVRIAEGEHPKDIRESDYFTPQGEFRVDKAGSPTLLNCLMYKMSYYRFGEMQLDFRTPPGFDRTRNAEIGNKDIKFKHLEEAFTSEHWLVRIYKVKAPDNRETLDHKPRVTNIFPKQKYLSKKTTKRKRGYIKNKLVFKKGKKISKKTV

SEQ ID NO: 3245 - protein, 596 aa, Homo sapiens
MPTQRDSSTMSHTVAGGGSGDHSHQVRVKAYYRGDIMITHFEPSISFEGLCNEVRDMCSFDNEQLFTMKWIDEEGDPCTVSSQLELEEAFRLYELNKDSELLIHVFPCVPERPGMPCPGEDKSIYRRGARRWRKLYCANGHTFQAKRFNRRAHCAICTDRIWGLGRQGYKCINCKLLVHKKCHKLVTIECGRHSLPQEPVMPMDQSSMHSDHAQTVIPYNPSSHESLDQVGEEKEAMNTRESGKASSSLGLQDFDLLRVIGRGSYAKVLLVRLKKTDRIYAMKVVKKELVNDDEDIDWVQTEKHVFEQASNHPFLVGLHSCFQTESRLFFVIEYVNGGDLMFHMQRQRKLPEEHARFYSAEISLALNYLHERGIIYRDLKLDNVLLDSEGHIKLTDYGMCKEGLRPGDTTSTFCGTPNYIAPEILRGEDYGFSVDWWALGVLMFEMMAGRSPFDIVGSSDNPDQNTEDYLFQVILEKQIRIPRSLSVKAASVLKSFLNKDPKERLGCHPQTGFADIQGHPFFRNVDWDMMEQKQVVPPFKPNISGEFGLDNFDSQFTNEPVQLTPDDDDIVRKIDQSEFEGFEYINPLLMSAEECV

SEQ ID NO: 3246 - protein, 785 aa, Homo sapiens
MGKKYKNIVLLKGLEVINDYHFRMVKSLLSNDLKLNLKMREEYDKIQIADLMEEKFRGDAGLGKLIKIFEDIPTLEDLAETLKKEKLKVKGPALSRKRKKEVDATSPAPSTSSTVKTEGAEATPGAQKRKKSTKEKAGPKGSKVSEEQTQPPSPAGAGMSTAMGRSPSPKTSLSAPPNSSSTENPKTVAKCQVTPRRNVLQKRPVIVKVLSTTKPFEYETPEMEKKIMFHATVATQTQFFHVKVLNTSLKEKFNGKKIIIISDYLEYDSLLEVNEESTVSEAGPNQTFEVPNKIINRAKETLKIDILHKQASGNIVYGVFMLHKKTVNQKTTIYEIQDDRGKMDVVGTGQCHNIPCEEGDKLQLFCFRLRKKNQMSKLISEMHSFIQIKKKTNPRNNDPKSMKLPQEQRQLPYPSEASTTFPESHLRTPQMPPTTPSSSFFTKKSEDTISKMNDFMRMQILKEGSHFPGPFMTSIGPAESHPHTPQMPPSTPSSSFLTTKSEDTISKMNDFMRMQILKEGSHFPGPFMTSIGPAESHPHTPQMPPSTPSSSFLTTLKPRLKTEPEEVSIEDSAQSDLKEVMVLNATESFVYEPKEQKKMFHATVATENEVFRVKVFNIDLKEKFTPKKIIAIANYVCRNGFLEVYPFTLVADVNADRNMEIPKGLIRSASVTPKINQLCSQTKGSFVNGVFEVHKKNVRGEFTYYEIQDNTGKMEVVVHGRLTTINCEEGDKLKLTCFELAPKSGNTGELRSVIHSHIKVIKTRKNKKDILNPDSSMETSPDFFF

SEQ ID NO: 3247 - protein, 833 aa, Homo sapiens
MNMEIGHPHEGKDDLGDKRVIMGTKFPMELGIRVGLGKEDSRCGESPVVSNKCEGRMAPPETKFPLSKGLEMGLERQNISRTVMQRGSLGVDSVSASQGTKPSLLPGRMGLENESLLAGYTHERIIQPPLGRVCGSSQAAGSRRAPLASGPEGVEELVGKPAFVMEPRQEMEKESTCVLMKPNTEIKLPVEVDIGLTQAEGPDETKNTEPQMGLVIEPPQCQFAQQHEQRKEAGNIESGVEPPDRIRPIYSGKFFDRTPCWPSAGKVIPVGYRVATCLTEKLPRLITPPEAKKYFNFRYPPAGVERVFYGRANDPQIAPYLTHGIRSKISVLANTLINPQPITTFQQKIKDKKESIYLSNRRAPLGKSHDQAPGLPKGMDTTNTTFGTAVIKEYSAKDVVNPPKSYEEVFKEGNEGHDLYVVSHNDYYAGEAKNRKYNPSSFHRCSVYGVPTPHFNDGRAMAKSLYWLHELQMKRGAKFVSKRADDFKEKFQHKLGRVLDPIAETMNVPPDCTFGACLRPEEYGVGDLIHNRLPDEYLRGKDRQRALIAAVRHHLKKVNYQKFDTLLAAFRHYDKKGDGMIDKDELQEACDQANLSLDDKLLDQLFDYCDVDNDGFINYLEFANFLNWKDKMLLKEYEERVIIKGRKPDCVNPTEANVEEPEQTLLIKPEDIVLKEAGSTEKTLRTLLRPSDKVSNYYKTTSSEINAIVGAIPSTCYPICGVPTIRSDIPAPRIRRISDRTNYGEEGSAYSLLYPTIFARKGVFERDFFKTRSKEEIAEILCNIGVKLSDEEFENVWNLASKKHHRGEVCVENIRNVLDELRHADRIKCKTLM

SEQ ID NO: 3248 - protein, 127 aa, Homo sapiens
MSFSGKYQLQSQENFEAFMKAIGLPEELIQKGKDIKGVSEIVQNGKHFKFTITAGSKVIQNEFTVGEECELETMTGEKVKTVVQLEGDNKLVTTFKNIKSVTELNGDIITNTMTLGDIVFKRISKRI

SEQ ID NO: 3249 - protein, 233 aa, Homo sapiens
MPAFSTTAAEYVKSRLPEALKQHLQDYEKDKENSVLSYQTILEQQILSIDREMLEKLTVSYDEAGTTCLIALLSDKDLTVANVGDSRGVLCDKDGNAIPLSHDHKPYQLKERKRIKRAGGFISFNGSWRVQGILAMSRSLGDYPLKNLNVVIPDPDILTFDLDKLQPEFMILASDGLWDAFSNEEAVRFIKERLDEPHFGAKSIVLQSFYRGCPDNITVMVVKFRNSSKTEEQ

SEQ ID NO: 3250 - protein, 174 aa, Homo sapiens
MACLGFQRHKAQLNLATRTWPCTLLFFLLFIPVFCKAMHVAQPAVVLASSRGIASFVCEYASPGKATEVRVTVLRQADSQVTEVCAATYMMGNELTFLDDSICTGTSSGNQVNLTIQGLRAMDTGLYICKVELMYPPPYYLGIGNGTQIYVIAKEKKPSYNRGLCENAPNRARM

SEQ ID NO: 3251 - protein, 982 aa, Homo sapiens
MKEPDDQDTDGEKSVTSKSDGKKSLRSSKSESRSPVQEDNTFLEDDTDETFTKGEGSYLEEDSDEERLEGSLSSFQYGDLQSTTVPQQTPAPAVEEAEEEVKKKISESFFYDYMELASMPFVTLDSNIPLDLLTLVHSFGYDCRKRANLQLLDDSIAIYIAGNQLIFLNLKTKEQIYLRSSSGEGIGVIGVHPHKTYFTVAEKGSFPDIIIYEYPSLRPYRVLRDGTEKGYAYVDFNYSGNLLASVGSNPDYTLTIWNWKEEQPILRTKAFSQEVFKVTFNPDKEEQLTTSGSGHIKFWEMAFTFTGLKLQGSLGRFGKTITTDIEGYMELPDGKVLSGSEWGNMLLWEGGLIKVELCRGTSKSCHNGPINQIMLYEGEVITVGSDGYVRIWDFETIDTADVIDETGLLEIEPINELQVDKNVNLFSMIKMNETGNNFWLAQDANGAIWKLDLSFSNITQDPECLFSFHSGAIEAVAVSPLTYLMATTALDCSVRIYDFASKTPLAQMKFKQGGTALVWVPRMVNFTGAQIIVGFEDGVVRILELYDPKGLTIFAGRKKILDADIQLKQVFKPHTACVTALAYERDGEILATGSKDQTVFFFEVERDYKPIGYINTPGPVCQLMWSPMSHPESTLLIICENGYILEAPLPTIKQEEDDHDVVSYEIKDMCIKCFHFSSVKSKILRLIEIEKRERQRELKEKIREERRNKLAAEMGEDGEKEFQEEEEEKEEEEEEEEPLPEIFIPSTPSPILCGFYSEPGKFWVSLGGYDSGFLYHCEFPPCDESSDFKEQKDEPIDVRYLADTEDNPIQTITFNINKVMMFCGMKNGAIRVYVLNQNDPSLTSLVDYWHFNMHDNNYGCIKSIANSFDDRFLVTAGADGNIFVFNIFSEFMLRKDMKAKVPSPRFGIETEPIPEDIEDPKAYSIENARRKREHDKLMKEVGEIKARKREQIKALRSEFCNLLEMNEKLPKHMQFKRTVSLI

SEQ ID NO: 3252 - protein, 855 aa, Homo sapiens
MSFVRVNRCGPRVGVRKTPKVKKKKTSVKQEWDNTVTDLTVHRATPEDLVRRHEIHKSKNRALVHWELQEKALKRKWRKQKPETLNLEKRRLSIMKEILSDQYQMQDVLEKSDHLIAAAKELFPRRRTGFPNVTVAPDSSQGPIVVNQDPITQSIFNESVIEPQALNDVDGEEEGTVNSQSGESENENELDNSLNSQSNTNTDRFLQQLTEENFELISKLWTDIQQKIATQSQITPPGTPSSALSSGEQRAALNATNAVKRLQTRLQPEESTETLDSSYVVGHVLNSRKQKQLLNKVKRKPNLHALSKPKKNISSGSTTSADLPNRTNSNLDVLKHMIHEVEHEMEEYERWTGREVKGLQSSQGLTGFTLSLVSSLCRLVRYLKESEIQLRKEVETRQQLEQVLGDHRELIDALTAEILRLREENAATQARLQQYMVTTDEQLISLTHAIKNCPVINNRQEIQASESGATGRRVMDSPERPVVNANVSVPLMFREEVAEFPQEELPVKLSQVPDPPDNMNLAKNFPAHIFEPAVLLTPPRQKSNLKFSPLQDVLRRTVQTRPAPRLPPTVEIIEKEQNWEEKTLPIDTDIQNSSEENRLFTQRWRVSHMGEDLENKTQAPFVNLSQPLCNSHSNTQQSRSPTFSEELPVLGDGQQLRTNESLIQRKDIMTRIADLTLQNSAIKAHMNNIIEPRGEQGDGLRELNKQESASDMTSTFPVAQSLTPGSMEERIAELNRQSMEARGKLLQLIEQQKLVGLNLSPPMSPVQLPLRAWTEGAKRTIEVSIPGAEAPESSKCSTVSPVSGINTRRSSGATGNSCSPLNATSGSGRFTPLNPRAKIEKQNEEGWFALSTHVS

SEQ ID NO: 3253 - protein, 1416 aa, Homo sapiens
MRRLLEPCWWILFLKITSSVLHYVVCFPALTEGYVGALHENRHGSAVQIRRRKASGDPYWAYSGAYGPEHWVTSSVSCGGRHQSPIDILDQYARVGEEYQELQLDGFDNESSNKTWMKNTGKTVAILLKDDYFVSGAGLPGRFKAEKVEFHWGHSNGSAGSEHSINGRRFPVEMQIFFYNPDDFDSFQTAISENRIIGAMAIFFQVSPRDNSALDPIIHGLKGVVHHEKETFLDPFVLRDLLPASLGSYYRYTGSLTTPPCSEIVEWIVFRRPVPISYHQLEAFYSIFTTEQQDHVKSVEYLRNNFRPQQRLHDRVVSKSAVRDSWNHDMTDFLENPLGTEASKVCSSPPIHMKVQPLNQTALQVSWSQPETIYHPPIMNYMISYSWTKNEDEKEKTFTKDSDKDLKATISHVSPDSLYLFRVQAVCRNDMRSDFSQTMLFQANTTRIFQGTRIVKTGVPTASPASSADMAPISSGSSTWTSSGIPFSFVSMATGMGPSSSGSQATVASVVTSTLLAGLGFGGGGISSFPSTVWPTRLPTAASASKQAARPVLATTEALASPGPDGDSSPTKDGEGTEEGEKDEKSESEDGEREHEEDGEKDSEKKEKSGVTHAAEERNQTEPSPTPSSPNRTAEGGHQTIPGHEQDHTAVPTDQTGGRRDAGPGLDPDMVTSTQVPPTATEEQYAGSDPKRPEMPSKKPMSRGDRFSEDSRFITVNPAEKNTSGMISRPAPGRMEWIIPLIVVSALTFVCLILLIAVLVYWRKCFQTAHFYVEDSSSPRVVPNESIPIIPIPDDMEAIPVKQFVKHIGELYSNNQHGFSEDFEEVQRCTADMNITAEHSNHPENKHKNRYINILAYDHSRVKLRPLPGKDSKHSDYINANYVDGYNKAKAYIATQGPLKSTFEDFWRMIWEQNTGIIVMITNLVEKGRRKCDQYWPTENSEEYGNIIVTLKSTKIHACYTVRRFSIRNTKVKKGQKGNPKGRQNERVVIQYHYTQWPDMGVPEYALPVLTFVRRSSAARMPETGPVLVHCSAGVGRTGTYIVIDSMLQQIKDKSTVNVLGFLKHIRTQRNYLVQTEEQYIFIHDALLEAILGKETEVSSNQLHSYVNSILIPGVGGKTRLEKQFKLVTQCNAKYVECFSAQKECNKEKNRNSSVVPSERARVGLAPLPGMKGTDYINASYIMGYYRSNEFIITQHPLPHTTKDFWRMIWDHNAQIIVMLPDNQSLAEDEFVYWPSREESMNCEAFTVTLISKDRLCLSNEEQIIIHDFILEATQDDYVLEVRHFQCPKWPNPDAPISSTFELINVIKEEALTRDGPTIVHDEYGAVSAGMLCALTTLSQQLENENAVDVFQVAKMINLMRPGVFTDIEQYQFIYKAMLSLVSTKENGNGPMTVDKNGAVLIADESDPAESMESLV

SEQ ID NO: 3254 - protein, 936 aa, Homo sapiens
MLLAPQGRSFSKKRMGLNRWKRFTRKPSPKPTFGPDSVEHWIKRVEKASEFAVSNAFFTRNSDLPRSPWGQITDLKTSEQIEDHDEIYAEAQELVNDWLDTKLKQELASEEEGDAKNTVSSVTIMPEANGHLKYDKFDDLCGYLEEEEESTTVQKFIDHLLHKNVVDSAMMEDLGRKENQDKKQQKDPRLTMEMRHKQVKENRLRREKELEYQRIEKTLKKSAFLEAQCLVQEEKKRKALEAKKEEEEIQREMVKLRREIIERRRTVKAAWKIEKKRQEENSQNSSEKVMFQSTHILPDEEKMVKERKRKLKEVLIQTFKENQQCQKRYFAAWHKLILDHRIKLGKAGTLSDWKIQLKVLRAWRDYTRFQKLERETQALENDLREENRKQQLATEYNRKQVLRHCFTEWQHWHGAELLKRELALTKEETRKKMDALLQAASLGKLSANGLSGISLPEEATAMVGPPVKNGQETAVPPLWEKPPLGSSGCMLSPPLGRTTTGNLQGSLQNVSLSAPGNKQHKTLGAEPSQQPGSNETLRTTSQKAEPLCLGHFHNRHVFQQQLIEKQKKKLQEQQKTILELKKNLQLAEAQWAAEHALAVTEAQSHLLSKPREEEPRTCQMLVNSPVASPGTEGRSDSRNSLSGLRRKPKQLMTPHPILKAMEERAIQRAECRRILAEKKKKQEEEKLAQLKAQEEERQKREAEEKEAQLERKREEKRLKKMKELEKQKRIKRNQQLEAIAKEHYERVLLRKKGLEPWKRLRMQSKQNIQVAEEHYSLFLQRKYMLTWFQRSQESLARKMAQADQFYSQILLKRVIQSWLQYVIDLQEEVRKFCVHFLQKKIFRAWFNMVREVKIDSQGKHEIAAEHSDRRILWITLRTWKKFVKFMKEERVKEERRQQLRRKVVEILPDFQVPGRYHELYQQSDTWSLSKTSLVNE

SEQ ID NO: 3255 - protein, 367 aa, Homo sapiens
MASLSQLSGHLNYTCGAENSTGASQARPHAYYALSYCALILAIVFGNGLVCMAVLKERALQTTTNYLVVSLAVADLLVATLVMPWVVYLEVTGGVWNFSRICCDVFVTLDVMMCTASILNLCAISIDRYTAVVMPVHYQHGTGQSSCRRVALMITAVWVLAFAVSCPLLFGFNTTGDPTVCSISNPDFVIYSSVVSFYLPFGVTVLVYARIYVVLKQRRRKRILTRQNSQCNSVRPGFPQQTLSPDPAHLELKRYYSICQDTALGGPGFQERGGELKREEKTRNSLMPLREKKATQMVAIVLGAFIVCWLPFFLTHVLNTHCQTCHVSPELYSATTWLGYVNSALNPVIYTTFNIEFRKAFLKILSC

SEQ ID NO: 3256 - protein, 367 aa, Homo sapiens
MLAVGAMEGTRQSAFLLSSPPLAALHSMAEMKTPLYPAAYPPLPAGPPSSSSSSSSSSSPSPPLGTHNPGGLKPPATGGLSSLGSPPQQLSAATPHGINDILSRPSMPVASGAALPSASPSGSSSSSSSSASASSASAAAAAAAAAAAAASSPAGLLAGLPRFSSLSPPPPPPGLYFSPSAAAVAAVGRYPKPLAELPGRTPIFWPGVMQSPPWRDARLACTPHQGSILLDKDGKRKHTRPTFSGQQIFALEKTFEQTKYLAGPERARLAYSLGMTESQVKVWFQNRRTKWRKKHAAEMATAKKKQDSETERLKGASENEEEDDDYNKPLDPNSDDEKITQLLKKHKSSSGGGGGLLLHASEPESSS

SEQ ID NO: 3257 - protein, 3526 aa, Homo sapiens
MNMVKRIMGRPRQEECSPQDNALGLMHLRRLFTELCHPPRHMTQKEQEEKLYMMLPVFNRVFGNAPPNTMTEKFSDLLQFTTQVSRLMVTEIRRRASNKSTEAASRAIVQFLEINQSEEASRGWMLLTTINLLASSGQKTVDCMTTMSVPSTLVKCLYLFFDLPHVPEAVGGAQNELPLAERRGLLQKVFVQILVKLCSFVSPAEELAQKDDLQLLFSAITSWCPPYNLPWRKSAGEVLMTISRHGLSVNVVKYIHEKECLSTCVQNMQQSDDLSPLEIVEMFAGLSCFLKDSSDVSQTLLDDFRIWQGYNFLCDLLLRLEQAKEAESKDALKDLVNLITSLTTYGVSELKPAGITTGAPFLLPGFAVPQPAGKGHSVRNVQAFAVLQNAFLKAKTSFLAQIILDAITNIYMADNANYFILESQHTLSQFAEKISKLPEVQNKYFEMLEFVVFSLNYIPCKELISVSILLKSSSSYHCSIIAMKTLLKFTRHDYIFKDVFREVGLLEVMVNLLHKYAALLKDPTQALNEQGDSRNNSSVEDQKHLALLVMETLTVLLQGSNTNAGIFREFGGARCAHNIVKYPQCRQHALMTIQQLVLSPNGDDDMGTLLGLMHSAPPTELQLKTDILRALLSVLRESHRSRTVFRKVGGFVYITSLLVAMERSLSCPPKNGWEKVNQNQVFELLHTVFCTLTAAMRYEPANSHFFKTEIQYEKLADAVRFLGCFSDLRKISAMNVFPSNTQPFQRLLEEDVISIESVSPTLRHCSKLFIYLYKVATDSFDSRAEQIPPCLTSESSLPSPWGTPALSRKRHAYHSVSTPPVYPPKNVADLKLHVTTSSLQSSDAVIIHPGAMLAMLDLLASVGSVTQPEHALDLQLAVANILQSLVHTERNQQVMCEAGLHARLLQRCSAALADEDHSLHPPLQRMFERLASQALEPMVLREFLRLASPLNCGAWDKKLLKQYRVHKPSSLSYEPEMRSSMITSLEGLGTDNVFSLHEDNHYRISKSLVKSAEGSTVPLTRVKCLVSMTTPHDIRLHGSSVTPAFVEFDTSLEGFGCLFLPSLAPHNAPTNNTVTTGLIDGAVVSGIGSGERFFPPPSGLSYSSWFCIEHFSSPPNNHPVRLLTVVRRANSSEQHYVCLAIVLSAKDRSLIVSTKEELLQNYVDDFSEESSFYEILPCCARFRCGELIIEGQWHHLVLVMSKGMLKNSTAALYIDGQLVNTVKLHYVHSTPGGSGSANPPVVSTVYAYIGTPPAQRQIASLVWRLGPTHFLEEVLPSSNVTTIYELGPNYVGSFQAVCMPCKDAKSEGVVPSPVSLVPEEKVSFGLYALSVSSLTVARIRKVYNKLDSKAIAKQLGISSHENATPVKLIHNSAGHLNGSARTIGAALIGYLGVRTFVPKPVATTLQYVGGAAAILGLVAMASDVEGLYAAVKALVCVVKSNPLASKEMERIKGYQLLAMLLKKKRSLLNSHILHLTFSLVGTVDSGHETSIIPNSTAFQDLLCDFEVWLHAPYELHLSLFEHFIELLTESSEASKNAKLMREFQLIPKLLLTLRDMSLSQPTIAAISNVLSFLLQGFPSSNDLLRFGQFISSTLPTFAVCEKFVVMEINNEEKLDTGTEEEFGGLVSANLILLRNRLLDILLKLIYTSKEKTSINLQACEELVKTLGFDWIMMFMEEHLHSTTVTAAMRILVVLLSNQSILIKFKEGLSGGGWLEQTDSVLTNKIGTVLGFNVGRSAGGRSTVREINRDACHFPGFPVLQSFLPKHTNVPALYFLLMALFLQQPVSELPENLQVSVPVISCRSKQGCQFDLDSIWTFIFGVPASSGTVVSSIHNVCTEAVFLLLGMLRSMLTSPWQSEEEGSWLREYPVTLMQFFRYLYHNVPDLASMWMSPDFLCALAATVFPFNIRPYSEMVTDLDDEVGSPAEEFKAFAADTGMNRSQSEYCNVGTKTYLTNHPAKKFVFDFMRVLIIDNLCLTPASKQTPLIDLLLEASPERSTRTQQKEFQTYILDSVMDHLLAADVLLGEDASLPITSGGSYQVLVNNVFYFTQRVVDKLWQGMFNKESKLLIDFIIQLIAQSKRRSQGLSLDAVYHCLNRTILYQFSRAHKTVPQQVALLDSLRVLTVNRNLILGPGNHDQEFISCLAHCLINLHVGSNVDGFGLEAEARMTTWHIMIPSDIEPDGSYSQDISEGRQLLIKAVNRVWTELIHSKKQVLEELFKVTLPVNERGHVDIATARPLIEEAALKCWQNHLAHEKKCISRGEALAPTTQSKLSRVSSGFGLSKLTGSRRNRKESGLNKHSLSTQEISQWMFTHIAVVRDLVDTQYKEYQERQQNALKYVTEEWCQIECELLRERGLWGPPIGSHLDKWMLEMTEGPCRMRKKMVRNDMFYNHYPYVPETEQETNVASEIPSKQPETPDDIPQKKPARYRRAVSYDSKEYYMRLASGNPAIVQDAIVESSEGEAAQQEPEHGEDTIAKVKGLVKPPLKRSRSAPDGGDEENQEQLQDQIAEGSSIEEEEKTDNATLLRLLEEGEKIQHMYRCARVQGLDTSEGLLLFGKEHFYVIDGFTMTATREIRDIETLPPNMHEPIIPRGARQGPSQLKRTCSIFAYEDIKEVHKRRYLLQPIAVEVFSGDGRNYLLAFQKGIRNKVYQRFLAVVPSLTDSSESVSGQRPNTSVEQGSGLLSTLVGEKSVTQRWERGEISNFQYLMHLNTLAGRSYNDLMQYPVFPWILADYDSEEVDLTNPKTFRNLAKPMGAQTDERLAQYKKRYKDWEDPNGETPAYHYGTHYSSAMIVASYLVRMEPFTQIFLRLQGGHFDLADRMFHSVREAWYSASKHNMADVKELIPEFFYLPEFLFNSNNFDLGCKQNGTKLGDVILPPWAKGDPREFIRVHREALECDYVSAHLHEWIDLIFGYKQQGPAAVEAVNVFHHLFYEGQVDIYNINDPLKETATIGFINNFGQIPKQLFKKPHPPKRVRSRLNGDNAGISVLPGSTSDKIFFHHLDNLRPSLTPVKELKEPVGQIVCTDKGILAVEQNKVLIPPTWNKTFAWGYADLSCRLGTYESDKAMTVYECLSEWGQILCAICPNPKLVITGGTSTVVCVWEMGTSKEKAKTVTLKQALLGHTDTVTCATASLAYHIIVSGSRDRTCIIWDLNKLSFLTQLRGHRAPVSALCINELTGDIVSCAGTYIHVWSINGNPIVSVNTFTGRSQQIICCCMSEMNEWDTQNVIVTGHSDGVVRFWRMEFLQVPETPAPEPAEVLEMQEDCPEAQIGQEAQDEDSSDSEADEQSISQDPKDTPSQPSSTSHRPRAASCRATAAWCTDSGSDDSRRWSDQLSLDEKDGFIFVNYSEGQTRAHLQGPLSHPHPNPIEVRNYSRLKPGYRWERQLVFRSKLTMHTAFDRKDNAHPAEVTALGISKDHSRILVGDSRGRVFSWSVSDQPGRSAADHWVKDEGGDSCSGCSVRFSLTERRHHCRNCGQLFCQKCSRFQSEIKRLKISSPVRVCQNCYYNLQHERGSEDGPRNC

SEQ ID NO: 3258 - protein, 333 aa, Homo sapiens
MLCRLGGRWLRPLPALQLWARDLPLAPVPTSGAKRPTLPVWAVAPVSAVHANGWYEALAASSPVRVAEEVLLGVHAATGLPWWGSILLSTVALRGAVTLPLAAYQHYILAKVENLQPEIKTIARHLNQEVAVRANQLGWSKRDARLTYLKNMRRLISELYVRDNCHPFKATVLVWIQLPMWIFMSFALRNLSTGAAHSEGFSVQEQLATGGILWFPDLTAPDSTWILPISVGVINLLIVEICALQKIGMSRFQTYITYFVRAMSVLMIPIAATVPSSIVLYWLCSSFVGLSQNLLLRSPGFRQLCRIPSTKSDSETPYKDIFAAFNTKFISRK

SEQ ID NO: 3259 - protein, 609 aa, Homo sapiens [sequence omitted]

SEQ ID NO: 3260 - protein, 892 aa, Homo sapiens
MSERAADDVRGEPRRAAAAAGGAAAAAARQQQQQQQQQQPPPPQPQRQQHPPPPPRRTRPEDGGPGAASTSAAAMATVGERRPLPSPEVMLGQSWNLWVEASKLPGKDGTELDESFKEFGKNREVMGLCREDMPIFGFCPAHDDFYLVVCNDCNQVVKPQAFQSHYERRHSSSSKPPLAVPPTSVFSFFPSLSKSKGGSASGSNRSSSGGVLSASSSSSKLLKSPKEKLQLRGNTRPMHPIQQSRVPHGRIMTPSVKVEKIHPKMDGTLLKSAVGPTCPATVSSLVKPGLNCPSIPKPTLPSPGQILNGKGLPAPPTLEKKPEDNSNNRKFLNKRLSEREFDPDIHCGVIDLDTKKPCTRSLTCKTHSLTQRRAVQGRRKRFDVLLAEHKNKTREKELIRHPDSQQPPQPLRDPHPAPPRTSQEPHQNPHGVIPSESKPFVASKPKPHTPSLPRPPGCPAQQGGSAPIDPPPVHESPHPPLPATEPASRLSSEEGEGDDKEESVEKLDCHYSGHHPQPASFCTFGSRQIGRGYYVFDSRWNRLRCALNLMVEKHLNAQLWKKIPPVPSTTSPISTRIPHRTNSVPTSQCGVSYLAAATVSTSPVLLSSTCISPNSKSVPAHGTTLNAQPAASGAMDPVCSMQSRQVSSSSSSPSTPSGLSSVPSSPMSRKPQKLKSSKSLRPKESSGNSTNCQNASSSTSGGSGKKRKNSSPLLVHSSSSSSSSSSSSHSMESFRKNCVAHSGPPYPSTVTSSHSIGLNCVTNKANAVNVRHDQSGRGPPTGSPAESIKRMSVMVNSSDSTLSLGPFIHQSNELPVNSHGSFSHSHTPLDKLIGKKRKCSPSSSSINNSSSKPTKVAKVPAVNNVHMKHTGTIPGAQGLMNSSLLHQPKARP

SEQ ID NO: 3261 - protein, 900 aa, Homo sapiens
MFSRSSRKRLSSRSLTGLGRIERGQPCNACGDQCPGFALHKWRKICLHCKCPQEEHMVTVMPLEMEKTISKLMFDFQRNSTSDDDSGCALEEYAWVPPGLKPEQVHQYYSCLPEEKVPYVNSPGEKLRIKQLLHQLPPHDNEVRYCNSLDEEEKRELKLFSSQRKRENLGRGNVRPFPVTMTGAICEQCGGQINGGDIAVFASRAGHGVCWHPPCFVCTVCNELLVDLIYFYQDGKIYCGRHHAECLKPRCAACDEIIFADECTEAEGRHWHMKHFCCFECETVLGGQRYIMKEGRPYCCHCFESLYAEYCDTCAQHIGIDQGQMTYDGQHWHATETCFCCAHCKKSLLGRPFLPKQGQIFCSRACSAGEDPNGSDSSDSAFQNARAKESRRSAKIGKNKGKTEEPMLNQHSQLQVSSNRLSADVDPLSLQMDMLSLSSQTPSLNRDPIWRSREEPYHYGNKMEQNQTQSPLQLLSQCNIRTSYSPGGQGAGAQPEMWGKHFSNPKRSSSLAMTGHAGSFIKECREDYYPGRLRSQESYSDMSSQSFSETRGSIQVPKYEEEEEEEGGLSTQQCRTRHPISSLKYTEDMTPTEQTPRGSMESLALSNATGLSADGGAKRQEHLSRFSMPDLSKDSGMNVSEKLSNMGTLNSSMQFRSAESVRSLLSAQQYQEMEGNLHQLSNPIGYRDLQSHGRMHQSFDFDGGMAGSKLPGQEGVRIQPMSERTRRRATSRDDNRRFRPHRSRRSRRSRSDNALHLASEREAISRLKDRPPLRAREDYDQFMRQRSFQESMGHGSRRDLYGQCPRTVSDLALQNAFGDRWGPYFAEYDWCSTCSSSSESDNEGYFLGEPIPQPARLRYVTSDELLHKYSSYGLPKSSTLGGRGQLHSRKRQKSKNCIIS

SEQ ID NO: 3262 - protein, 1907 aa, Homo sapiens
MQFVSWATLLTLLVRDLAEMGSPDAAAAVRKDRLHPRQVKLLETLSEYEIVSPIRVNALGEPFPTNVHFKRTRRSINSATDPWPAFASSSSSSTSSQAHYRLSAFGQQFLFNLTANAGFIAPLFTVTLLGTPGVNQTKFYSEEEAELKHCFYKGYVNTNSEHTAVISLCSGMLGTFRSHDGDYFIEPLQSMDEQEDEEEQNKPHIIYRRSAPQREPSTGRHACDTSEHKNRHSKDKKKTRARKWGERINLAGDVAALNSGLATEAFSAYGNKTDNTREKRTHRRTKRFLSYPRFVEVLVVADNRMVSYHGENLQHYILTLMSIDGPSISFNAQTTLKNFCQWQHSKNSPGGIHHDTAVLLTRQDICRAHDKCDTLGLAELGTICDPYRSCSISEDSGLSTAFTIAHELGHVFNMPHDDNNKCKEEGVKSPQHVMAPTLNFYTNPWMWSKCSRKYITEFLDTGYGECLLNEPESRPYPLPVQLPGILYNVNKQCELIFGPGSQVCPYMMQCRRLWCNNVNGVHKGCRTQHTPWADGTECEPGKHCKYGFCVPKEMDVPVTDGSWGSWSPFGTCSRTCGGGIKTAIRECNRPEPKNGGKYCVGRRMKFKSCNTEPCLKQKRDFRDEQCAHFDGKHFNINGLLPNVRWVPKYSGILMKDRCKLFCRVAGNTAYYQLRDRVIDGTPCGQDTNDICVQGLCRQAGCDHVLNSKARRDKCGVCGGDNSSCKTVAGTFNTVHYGYNTVVRIPAGATNIDVRQHSFSGETDDDNYLALSSSKGEFLLNGNFVVTMAKREIRIGNAVVEYSGSETAVERINSTDRIEQELLLQVLSVGKLYNPDVRYSFNIPIEDKPQQFYWNSHGPWQACSKPCQGERKRKLVCTRESDQLTVSDQRCDRLPQPGHITEPCGTDCDLRWHVASRSECSAQCGLGYRTLDIYCAKYSRLDGKTEKVDDGFCSSHPKPSNREKCSGECNTGGWRYSAWTECSKSCDGGTQRRRAICVNTRNDVLDDSKCTHQEKVTIQRCSEFPCPQWKSGDWSECLVTCGKGHKHRQVWCQFGEDRLNDRMCDPETKPTSMQTCQQPECASWQAGPWGQCSVTCGQGYQLRAVKCIIGTYMSVVDDNDCNAATRPTDTQDCELPSCHPPPAAPETRRSTYSAPRTQWRFGSWTPCSATCGKGTRMRYVSCRDENGSVADESACATLPRPVAKEECSVTPCGQWKALDWSSCSVTCGQGRATRQVMCVNYSDHVIDRSECDQDYIPETDQDCSMSPCPQRTPDSGLAQHPFQNEDYRPRSASPSRTHVLGGNQWRTGPWGACSSTCAGGSQRRVVVCQDENGYTANDCVERIKPDEQRACESGPCPQWAYGNWGECTKLCGGGIRTRLVVCQRSNGERFPDLSCEILDKPPDREQCNTHACPHDAAWSTGPWSSCSVSCGRGHKQRNVYCMAKDGSHLESDYCKHLAKPHGHRKCRGGRCPKWKAGAWSQCSVSCGRGVQQRHVGCQIGTHKIARETECNPYTRPESERDCQGPRCPLYTWRAEEWQECTKTCGEGSRYRKVVCVDDNKNEVHGARCDVSKRPVDRESCSLQPCEYVWITGEWSECSVTCGKGYKQRLVSCSEIYTGKENYEYSYQTTINCPGTQPPSVHPCYLRDCPVSATWRVGNWGSCSVSCGVGVMQRSVQCLTNEDQPSHLCHTDLKPEERKTCRNVYNCELPQNCKEVKRLKGASEDGEYFLMIRGKLLKIFCAGMHSDHPKEYVTLVHGDSENFSEVYGHRLHNPTECPYNGSRRDDCQCRKDYTAAGFSSFQKIRIDLTSMQIITTDLQFARTSEGHPVPFATAGDCYSAAKCPQGRFSINLYGTGLSLTESARWISQGNYAVSDIKKSPDGTRVVGKCGGYCGKCTPSSGTGLEVRVL

SEQ ID NO: 3263 - protein, 663 aa, Homo sapiens
MAHLRSPSGFGDPGKKDQKESEEELEEEEEEEEVEEEEEEVEEEEEEVEEEEEEVVEEELVGEEQELEAPETFSEEYLWKVTDIGDYDDDFPDVRPRLASIVSPSLTSTFVPSQSATSTETPSASPPSSTSSHKSFPKIFQTFRKDMSEMSIDRNIHRNLSPGIPVSVQTEESWLQDLSDKVQSRKKASKEKAEPECLASKLREKWVINPEESKLNILYELEFKEDFITLFEPSLRTLPSIGPPSILAYKEESSNLGINFKDEEEETSPKCEFCGSDLRAFFSNVDVSSEPKGHASCCIAFQNLIDYIYEEQIKTKPPKAELIAIDPHAAHGSEVDRLKAKEKALQRKQEQRMARHFAIISREQTHFSEDDSKRLKTISYQLSVDIPEKQIIDDIVFDFQLRNSNMSIICCDSRIACGKVVRNELLEKHYKHGSKFLTSFPDGTTQIFYPSGNLAIIRVPNKVNGFTCIVQEDMPTNPAILAVLDSSGRSSCYHPNGNVWVYINILGGQYSDQAGNRIRAWNWSNSITSSPFVSFKPVFLALNRYIGVRILEQDKISITFLAMGQQARISVGTKVKLPNPEEIPILRYVSGDDLLLLASLIKIRRLFHKLEGCVNFPSSQVWEKLKQPSYLSSLSLKLIALCHSSGIKQDIMKTIRNIINEEI

SEQ ID NO: 3264 - protein, 657 aa, Homo sapiens
MEMETTEPEPDCVVQPPSPPDDFSCQMRLSEKITPLKTCFKKKDQKRLGTGTLRSLRPILNTLLESGSLDGVFRSRNQSTDENSLHEPMMKKAMEINSSCPPAENNMSVLIPDRTNVGDQIPEAHPSTEAPERVVPIQDHSFPSETLSGTVADSTPAHFQTDLLHPVSSDVPTSPDCLDKVIDYVPGIFQENSFTIQYILDTSDKLSTELFQDKSEEASLDLVFELVNQLQYHTHQENGIEICMDFLQGTCIYGRDCLKHHTVLPYHWQIKRTTTQKWQSVFNDSQEHLERFYCNPENDRMRMKYGGQEFWADLNAMNVYETTEFDQLRRLSTPPSSNVNSIYHTVWKFFCRDHFGWREYPESVIRLIEEANSRGLKEVRFMMWNNHYILHNSFFRREIKRRPLFRSCFILLPYLQTLGGVPTQAPPPLEATSSSQIICPDGVTSANFYPETWVYMHPSQDFIQVPVSAEDKSYRIIYNLFHKTVPEFKYRILQILRVQNQFLWEKYKRKKEYMNRKMFGRDRIINERHLFHGTSQDVVDGICKHNFDPRVCGKHATMFGQGSYFAKKASYSHNFSKKSSKGVHFMFLAKVLTGRYTMGSHGMRRPPPVNPGSVTSDLYDSCVDNFFEPQIFVIFNDDQSYPYFVIQYEEVSNTVSI

SEQ ID NO: 3265 - protein, 381 aa, Homo sapiens
MHLLAILFCALWSAVLAENSDDYDLMYVNLDNEIDNGLHPTEDPTPCACGQEHSEWDKLFIMLENSQMRERMLLQATDDVLRGELQRLREELGRLAESLARPCAPGAPAEARLTSALDELLQATRDAGRRLARMEGAEAQRPEEAGRALAAVLEELRQTRADLHAVQGWAARSWLPAGCETAILFPMRSKKIFGSVHPVRPMRLESFSACIWVKATDVLNKTILFSYGTKRNPYEIQLYLSYQSIVFVVGGEENKLVAEAMVSLGRWTHLCGTWNSEEGLTSLWVNGELAATTVEMATGHIVPEGGILQIGQEKNGCCVGGGFDETLAFSGRLTGFNIWDSVLSNEEIRETGGAESCHIRGNIVGWGVTEIQPHGGAQYVS

SEQ ID NO: 3266 - protein, 3092 aa, Homo sapiens
MSDANKAAIAAEKEALNLKLPPIVHLPENIGVDTPTQSKLLKYRRSKEQQQKINQLVIDGAKRNLDRTLGKRTPLLPPPDYPQTMTSEMKKKGFNYIYMKQCVESSPLVPIQQEWLDHMLRLIPESLKEGKEREELLESLINEVSSDFENSMKRYLVQSVLVKPPVKSLEDEGGPLPESPVGLDYSNPWHSSYVQARNQIFSNLHIIHPTMKMLLDLGYTTFADTVLLDFTGIRAKGPIDCESLKTDLSIQTRNAEEKIMNTWYPKVINLFTKKEALEGVKPEKLDAFYSCVSTLMSNQLKDLLRRTVEGFVKLFDPKDQQRLPIFKIELTFDDDKMEFYPTFQDLEDNVLSLVERIAEALQNVQTIPSWLSGTSTPVNLDTELPEHVLHWAVDTLKAAVHRNLEGARKHYETYVEKYNWLLDGTAVENIETFQTEDHTFDEYTEFIEKFLSLASEIMLLPQWIHYTMVRLDCEDLKTGLTNKAKAFANILLNDIASKYRKENECICSEFEAIKEHALKVPETTEEMMDLISYVEKARTVGIEELILRIQESKRQMSYFLDVFLFPQEDLALNATVLMWPRKINPIFDENDELIENAKHKKENELMAKREKLILEIEKESRRMEEFTEFAELERMQQYVTDVRQLQKRIQESEEAVQFINKEEELFKWELTKYPELDKLKVNIEPYQKFFNFVLKWQRSEKRWMDGGFLDLNGESMEADVEEFSREIFKTLKFFQTKLKKELQEKRKAARKRSLEEEKIEEEPKDNATITMCRMRARHWKQISEIVGYDLTPDSGTTLRKVLKLNLTPYLEQFEVISAGASKEFSLEKAMNTMIGTWEDIAFHISLYRDTGVCILSSVDEIQAILDDQIIKTQTMRGSPFIKPFEHEIKAWEDRLIRIQETIDEWLKVQAQWLYLEPIFCSEDIMQQMPEEGRQFQTVDRHWRDIMKFCAKDPKVLAATSLTGLLEKLQNCNELLEKIMKGLNAYLEKKRLFFPRFFFLSNDEMLEILSETKDPLRVQPHLKKCFEGIAKLEFLPNLDIKAMYSSEGERVELIALISTSAARGAVEKWLIQVEDLMLRSVHDVIAAARLAYPESARRDWVREWPGQVVLCISQMFWTSETQEVISGGTEGLKKYYKELQNQLNEIVELVRGKLSKQTRTTLGALVTIDVHARDVVMDMIKMGVSHDTDFLWLAQLRYYWENENARVRIINCNVKYAYEYLGNSPRLVITPLTDRCYRTLIGAFYLNLGGAPEGPAGTGKTETTKDLAKALAVQCVVFNCSDGLDYLAMGKFFKGLASSGAWACFDEFNRIELEVLSVVAQQILCIQRAIQQKLVVFVFEGTELKLNPNCFVAITMNPGYAGRSELPDNLKVLFRTVAMMVPNYALIAEISLYSYGFLNARPLSVKIVMTYRLCSEQLSSQFHYDYGMRAVKAVLVAAGNLKLKYPNENEDILLLRSIKDVNEPKFLSHDIPLFNGITSDLFPGIKLPEADYHEFLECAHEACNVHNLQPVKFFLEKIIQTYEMMIVRHGFMLVGEPFAAKTKVLHVLADTLTLMNEHGYGEEEKVIYRTVNPKSITMGQLFGQFDPVSHEWTDGIVANTFREFALSETPDRKWVVFDGPIDTLWIESMNTVLDDNKKLCLMSGEIIQMSPQMSLIFETMDLSQASPATVSRCGMIYLEPSQLGWEPLVSSWLNSLKGPLCEPEYQALLRGLFAWLIPPSLNQRVELFQLNYLYTTIVSKILKILITFRISNYFKYVPLKTQCTFIKFFLHQQACFIFSLIWSIGGSCDTDGRRVFDTFIRLIILGKDDENPVPDSVGKWECPFDEKGLVYDYMYELKNKGRWVHWNELIKNTNLGDKQIKIQDIIVPTMDTIRYTFLMDLSITYAKPLLFVGPTGTGKSVYVKDKLMNHLEKDQYFPFYINLSARTSANQVQNIIMARLDKRRKGVFGPPMGKKCIIFIDDMNMPALEKYGAQPPIELLRQFFDCGHWYDLKDTSKITLVDIELIAAMGPPGGGRNPVTPRCIRHFNICSINSFSDETMVRIFSSIVAFYLRTHEFPPEYFVIGNQIVNGTMEIYKQSVENLLPTPTKSHYTFNLRDFSRVIRGCLLIERDAVANKHTMIRLFVHEVLRVFYDRLINDDDRRWLFQLTKTVIKDHFKESFHSIFSHLRKQNAPVTEEDLRNLMFGDYMNPDLEGDDRVYIEIPNIHHFSDVVDQCLDEYNQTHKTRMNLVIFRYVLEHLSRICRVLKQSGGNALLVGLGGSGRQSLTRLATSMAKMHIFQPEISKSYGMNEWREDMKSFIAVPVTNRIVDNKSKILEKRLRYLNDHFTYNLYCNICRSLFEKDKLLFSFLLCANLLLARKEIEYQELMFLLTGGVSLKSAEKNPDPTWLQDKSWEEICRASEFPAFRGLRQHFCEHIYEWREIYDSKEPHNAKFPAPMDKNLNELQKIIILRCLRPDKITPAITNYVTDKLGKKFVEPPPFDLTKSYLDSNCTIPLIFVLSPGADPMASLLKFANDKSMSGNKFQAISLGQGQGPIAAKMIKAAIEEGTWVCLQNCHLAVSWMPMLEKICEDFTSETCNSSFRLWLTSYPSSKFPVTILQNGVKMTNEPPTGLRLNLLQSYLTDPVSDPEFFKGCRGKELAWEKLLFGVCFFHALVQERKKFGPLGWNIPYGFNESDLRISIRQLQLFINEYDTIPFEAISYLTGECNYGGRVTDDWDRRLLLTMLADFYNLYIVENPHYKFSPSGNYFAPPKGTYEDYIEFIKKLPFTQHPEIFGLHENVDISKDLQQTKTLFESLLLTQGGSKQTGASGSTDQILLEITKDILNKLPSDFDIEMALRKYPVRYEESMNTVLVQEMERFNNLIITIRNTLRDLEKAIKGVVVMDSALEALSGSLLVGKVPEIWAKRSYPSLKPLGSYITDFLARLNFLQDWYNSGKPCVFWLSGFFFTQAFLTGAMQNYARKYTTPIDLLGYEFEVIPSDTSDTSPEDGVYIHGLYLDGARWDRESGLLAEQYPKLLFDLMPIIWIKPTQKSRIIKSDAYVCPLYKTSERKGTLSTTGHSTNFVIAMLLKTDQPTRHWIKRGVALLCQLDD

SEQ ID NO: 3267 - protein, 811 aa, Homo sapiens
MPSALAIFTCRPNSHPFQERHVYLDEPIKIGRSVARCRPAQNNATFDCKVLSRNHALVWFDHKTGKFYLQDTKSSNGTFINSQRLSRGSEESPPCEILSGDIIQFGVDVTENTRKVTHGCIVSTIKLFLPDGMEARLRSDVIHAPLPSPVDKVAANTPSMYSQELFQLSQYLQEALHREQMLEQKLATLQRLLAITQEASDTSWQALIDEDRLLSRLEVMGNQLQACSKNQTEDSLRKELIALQEDKHNYETTAKESLRRVLQEKIEVVRKLSEVERSLSNTEDECTHLKEMNERTQEELRELANKYNGAVNEIKDLSDKLKVAEGKQEEIQQKGQAEKKELQHKIDEMEEKEQELQAKIEALQADNDFTNERLTALQEHLLSKSGGDCTFIHQFIECQKKLIVEGHLTKAVEETKLSKENQTRAKESDFSDTLSPSKEKSSDDTTDAQMDEQDLNEPLAKVSLLKDDLQGAQSEIEAKQEIQHLRKELIEAQELARTSKQKCFELQALLEEERKAYRNQVEESTKQIQVLQAQLQRLHIDTENLREEKDSEITSTRDELLSARDEILLLHQAAAKVASERDTDIASLQEELKKVRAELERWRKAASEYEKEITSLQNSFQLRCQQCEDQQREEATRLQGELEKLRKEWNALETECHSLKRENVLLSSELQRQEKELHNSQKQSLELTSDLSILQMSRKELENQVGSLKEQHLRDSADLKTLLSKAENQAKDVQKEYEKTQTVLSELKLKFEMTEQEKQSITDELKQCKNNLKLLREKGNNKPWPWMPMLAALVAVTAIVLYVPGLARASP

SEQ ID NO: 3268 - protein, 2602 aa, Homo sapiens
MPVTEKDLAEDAPWKKIQQNTFTRWCNEHLKCVNKRIGNLQTDLSDGLRLIALLEVLSQKRMYRKYHQRPTFRQMQLENVSVALEFLDRESIKLVSIDSKAIVDGNLKLILGLVWTLILHYSISMPVWEDEGDDDAKKQTPKQRLLGWIQNKIPYLPITNFNQNWQDGKALGALVDSCAPGLCPDWESWDPQKPVDNAREAMQQADDWLGVPQVITPEEIIHPDVDEHSVMTYLSQFPKAKLKPGAPLKPKLNPKKARAYGRGIEPTGNMVKQPAKFTVDTISAGQGDVMVFVEDPEGNKEEAQVTPDSDKNKTYSVEYLPKVTGLHKVTVLFAGQHISKSPFEVSVDKAQGDASKVTAKGPGLEAVGNIANKPTYFDIYTAGAGVGDIGVEVEDPQGKNTVELLVEDKGNQVYRCVYKPMQPGPHVVKIFFAGDTIPKSPFVVQVGEACNPNACRASGRGLQPKGVRIRETTDFKVDTKAAGSGELGVTMKGPKGLEELVKQKDFLDGVYAFEYYPSTPGRYSIAITWGGHHIPKSPFEVQVGPEAGMQKVRAWGPGLHGGIVGRSADFVVESIGSEVGSLGFAIEGPSQAKIEYNDQNDGSCDVKYWPKEPGEYAVHIMCDDEDIKDSPYMAFIHPATGGYNPDLVRAYGPGLEKSGCIVNNLAEFTVDPKDAGKAPLKIFAQDGEGQRIDIQMKNRMDGTYACSYTPVKAIKHTIAVVWGGVNIPHSPYRVNIGQGSHPQKVKVFGPGVERSGLKANEPTHFTVDCTEAGEGDVSVGIKCDARVLSEDEEDVDFDIIHNANDTFTVKYVPPAAGRYTIKVLFASQEIPASPFRVKVDPSHDASKVKAEGPGLSKAGVENGKPTHFTVYTKGAGKAPLNVQFNSPLPGDAVKDLDIIDNYDYSHTVKYTPTQQGNMQVLVTYGGDPIPKSPFTVGVAAPLDLSKIKLNGLENRVEVGKDQEFTVDTRGAGGQGKLDVTILSPSRKVVPCLVTPVTGRENSTAKFIPREEGLYAVDVTYDGHPVPGSPYTVEASLPPDPSKVKAHGPGLEGGLVGKPAEFTIDTKGAGTGGLGLTVEGPCEAKIECSDNGDGTCSVSYLPTKPGEYFVNILFEEVHIPGSPFKADIEMPFDPSKVVASGPGLEHGKVGEAGLLSVDCSEAGPGALGLEAVSDSGTKAEVSIQNNKDGTYAVTYVPLTAGMYTLTMKYGGELVPHFPARVKVEPAVDTSRIKVFGPGIEGKDVFREATTDFTVDSRPLTQVGGDHIKAHIANPSGASTECFVTDNADGTYQVEYTPFEKGLHVVEVTYDDVPIPNSPFKVAVTEGCQPSRVQAQGPGLKEAFTNKPNVFTVVTRGAGIGGLGITVEGPSESKINCRDNKDGSCSAEYIPFAPGDYDVNITYGGAHIPGSPFRVPVKDVVDPSKVKIAGPGLGSGVRARVLQSFTVDSSKAGLAPLEVRVLGPRGLVEPVNVVDNGDGTHTVTYTPSQEGPYMVSVKYADEEIPRSPFKVKVLPTYDASKVTASGPGLSSYGVPASLPVDFAIDARDAGEGLLAVQITDQEGKPKRAIVHDNKDGTYAVTYIPDKTGRYMIGVTYGGDDIPLSPYRIRATQTGDASKCLATGPGIASTVKTGEEVGFVVDAKTAGKGKVTCTVLTPDGTEAEADVIENEDGTYDIFYTAAKPGTYVIYVRFGGVDIPNSPFTVMATDGEVTAVEEAPVNACPPGFRPWVTEEAYVPVSDMNGLGFKPFDLVIPFAVRKGEITGEVHMPSGKTATPEIVDNKDGTVTVRYAPTEVGLHEMHIKYMGSHIPESPLQFYVNYPNSGSVSAYGPGLVYGVANKTATFTIVTEDAGEGGLDLAIEGPSKAEISCIDNKDGTCTVTYLPTLPGDYSILVKYNDKHIPGSPFTAKITDDSRRCSQVKLGSAADFLLDISETDLSSLTASIKAPSGRDEPCLLKRLPNNHIGISFIPREVGEHLVSIKKNGNHVANSPVSIMVVQSEIGDARRAKVYGRGLSEGRTFEMSDFIVDTRDAGYGGISLAVEGPSKVDIQTEDLEDGTCKVSYFPTVPGVYIVSTKFADEHVPGSPFTVKISGEGRVKESITRTSRAPSVATVGSICDLNLKIPEINSSDMSAHVTSPSGRVTEAEIVPMGKNSHCVRFVPQEMGVHTVSVKYRGQHVTGSPFQFTVGPLGEGGAHKVRAGGPGLERGEAGVPAEFSIWTREAGAGGLSIAVEGPSKAEITFDDHKNGSCGVSYIAQEPGNYEVSIKFNDEHIPESPYLVPVIAPSDDARRLTVMSLQESGLKVNQPASFAIRLNGAKGKIDAKVHSPSGAVEECHVSELEPDKYAVRFIPHENGVHTIDVKFNGSHVVGSPFKVRVGEPGQAGNPALVSAYGTGLEGGTTGIQSEFFINTTRAGPGTLSVTIEGPSKVKMDCQETPEGYKVMYTPMAPGNYLISVKYGGPNHIVGSPFKAKVTGQRLVSPGSANETSSILVESVTRSSTETCYSAIPKASSDASKVTSKGAGLSKAFVGQKSSFLVDCSKAGSNMLLIGVHGPTTPCEEVSMKHVGNQQYNVTYVVKERGDYVLAVKWGEEHIPGSPFHVTVP

SEQ ID NO: 3269 - protein, 593 aa, Homo sapiens
MTAEDSTAAMSSDSAAGSSAKVPEGVAGAPNEAALLALMERTGYSMVQENGQRKYGGPPPGWEGPHPQRGCEVFVGKIPRDVYEDELVPVFEAVGRIYELRLMMDFDGKNRGYAFVMYCHKHEAKRAVRELNNYEIRPGRLLGVCCSVDNCRLFIGGIPKMKKREEILEEIAKVTEGVLDVIVYASAADKMKNRGFAFVEYESHRAAAMARRKLMPGRIQLWGHQIAVDWAEPEIDVDEDVMETVKILYVRNLMIETTEDTIKKSFGQFNPGCVERVKKIRDYAFVHFTSREDAVHAMNNLNGTELEGSCLEVTLAKPVDKEQYSRYQKAARGGGAAEAAQQPSYVYSCDPYTLAYYGYPYNALIGPNRDYFVKAGSIRGRGRGAAGNRAPGPRGSYLGGYSAGRGIYSRYHEGKGKQQEKGYELVPNLEIPTVNPVAIKPGTVAIPAIGAQYSMFPAAPAPKMIEDGKIHTVEHMISPIAVQPDPASAAAAAAAAAAAAAAVIPTVSTPPPFQGRPITPVYTVAPNVQRIPTAGIYGASYVPFAAPATATIATLQKNAAAAAAMYGGYAGYIPQAFPAAAIQVPIPDVYQTY

SEQ ID NO: 3270 - protein, 791 aa, Homo sapiens
MPVPWFLLSLALGRSPVVLSLERLVGPQDATHCSPVSLEPWGDEERLRVQFLAQQSLSLAPVTAATARTALSGLSGADGRREERGRGKSWVCLSLGGSGNTEPQKKGLSCRLWDSDILCLPGDIVPAPGPVLAPTHLQTELVLRCQKETDCDLCLRVAVHLAVHGHWEEPEDEEKFGGAADSGVEEPRNASLQAQVVLSFQAYPTARCVLLEVQVPAALVQFGQSVGSVVYDCFEAALGSEVRIWSYTQPRYEKELNHTQQLPDCRGLEVWNSIPSCWALPWLNVSADGDNVHLVLNVSEEQHFGLSLYWNQVQGPPKPRWHKNLTGPQIITLNHTDLVPCLCIQVWPLEPDSVRTNICPFREDPRAHQNLWQAARLQLLTLQSWLLDAPCSLPAEAALCWRAPGGDPCQPLVPPLSWENVTVDKVLEFPLLKGHPNLCVQVNSSEKLQLQECLWADSLGPLKDDVLLLETRGPQDNRSLCALEPSGCTSLPSKASTRAARLGEYLLQDLQSGQCLQLWDDDLGALWACPMDKYIHKRWALVWLACLLFAAALSLILLLKKDHAKGWLRLLKQDVRSGAAARGRAALLLYSADDSGFERLVGALASALCQLPLRVAVDLWSRRELSAQGPVAWFHAQRRQTLQEGGVVVLLFSPGAVALCSEWLQDGVSGPGAHGPHDAFRASLSCVLPDFLQGRAPGSYVGACFDRLLHPDAVPALFRTVPVFTLPSQLPDFLGALQQPRAPRSGRLQERAEQVSRALQPALDSYFHPPGTPAPGRGVGPGAGPGAGDGT

SEQ ID NO: 3271 - protein, 981 aa, Homo sapiens
MASSPWGCVCGLLLLLLPLLGTGPALGRGFPRPLENSEIPMIPGAHPKGSVGSEPQAFDVFPENPRADSHRNSDVRHAPAEEMPEKPVASPLGPALYGPKAAQGAQRERLPVTDDLQMAQGPSSHGWTGPLDSQELLQQEAVAPHPVGHPHLTFIPTTPRRQLRVATVPPSLQHEGQEGQWPPRDEGLKAKTKSRVPPTSPSDHQGPPHTLVSHSGTVKRPVLEGQGGFEEHLQEAAQGPHFTQQDPAAPDVGSVPPVEVVYSQEPGAQPDLALARSLPPAEELPVETPKRAGAEVSWEVSSPGPPPKQADLPDAKDSPGPQPTDPPASEAPDRPSKPERAAMNGADPISPQRVRGAVEAPGTPKSLIPGPSDPGPAVNRTESPMGALQPDEAEEWPGRPQSHPPAPPVQAPSTSRRGLIRVTTQRALGQPPPPEPTASSMASAPASSPPANATAPPLRWGPLRRVLSFSWELHVYGVGVLFLLPALLALAALAAAPAGPRLALVAAVLVLVASALRSAYMLTDPYGSQARLGVRGGLVLYNLPFPLLLTALAALTLLGLGAGLPPPLQNPLLLGAVALVHGVGLLATDLLSTWSVLNLLTQGLSCAWGAAVALGTLCLCRRRLLDGPRGWDASPGPRLLAVAGALGLLASGLQLAAALWLYPGPGRVGRFSWAWWGVHFWLRLLELTWALALALAAVAAARPRPPTEHACWAKLMRLACPAPSGKSEVPERPNNCYAGPSNVGAGSLDISKSLIRNPAESGQLATPSSGAWGSAASLGRGPQGGPGLSRNGVGPAPSLSELDLRPPSPINLSRSIDAALFREHLVRDSVFQRCGLRGLASPPPGGALRPRRGSHPKAELDDAGSSLLRGRCRSLSDVRVRGPVPQHVVEAPDGAAAAASGSSLDSFSRGSLKISWNPWRHGLSSVDSLPLDELPSTVQLLPAPTPAPDSTAARQGDGQGEVQPRGKPGESRSASSDTIEL

SEQ ID NO: 3272 - protein, 1119 aa, Homo sapiens
MSTAAFHISSLLEKMTSSDKDFRFMATSDLMSELQKDSIQLDEDSERKVVKMLLRLLEDKNGEVQNLAVKWLGVPLGAFHASLLHCLLPQLSSPRLAVRKRAVGALGHLAAACSTDLFVELADHLLDRLPGPRVPTSPTAIRTLIQCLGSVGRQAGHRLGAHLDRLVPLVEDFCNLDDDELRESCLQAFEAFLRKCPKEMGPHVPNVTSLCLQYIKHDPNYNYDSDEDEEQMETEDSEFSEQESEDEYSDDDDMSWKVRRAAAKCIAALISSRPDLLPDFHCTLAPVLIRRFKEREENVKADVFTAYIVLLRQTQPPKGWLEAMEEPTQTGSNLHMLRGQVPLVVKALQRQLKDRSVRARQGCFSLLTELAGVLPGSLAEHMPVLVSGIIFSLADRSSSSTIRMDALAFLQGLLGTEPAEAFHPHLPILLPPVMACVADSFYKIAAEALVVLQELVRALWPLHRPRMLDPEPYVGEMSAVTLARLRATDLDQEVKERAISCMGHLVGHLGDRLGDDLEPTLLLLLDRLRNEITRLPAIKALTLVAVSPLQLDLQPILAEALHILASFLRKNQRALRLATLAALDALAQSQGLSLPPSAVQAVLAELPALVNESDMHVAQLAVDFLATVTQAQPASLVEVSGPVLSELLRLLRSPLLPAGVLAAAEGFLQALVGTRPPCVDYAKLISLLTAPVYEQAVDGGPGLHKQVFHSLARCVAALSAACPQEAASTASRLVCDARSPHSSTGVKVLAFLSLAEVGQVAGPGHQRELKAVLLEALGSPSEDVRAAASYALGRVGAGSLPDFLPFLLEQIEAEPRRQYLLLHSLREALGAAQPDSLKPYAEDIWALLFQRCEGAEEGTRGVVAECIGKLVLVNPSFLLPRLRKQLAAGRPHTRSTVITAVKFLISDQPHPIDPLLKSFIAVHNKPSLVRDLLDDILPLLYQETKIRRDLIREVEMGPFKHTVDDGLDVRKAAFECMYSLLESCLGQLDICEFLNHVEDGLKDHYDIRMLTFIMVARLATLCPAPVLQRVDRLIEPLRATCTAKVKAGSVKQEFEKQDELKRSAMRAVAALLTIPEVGKSPIMADFSSQIRSNPELAALFESIQKDSASAPSTDSMELS

SEQ ID NO: 3273 - protein, 415 aa, Homo sapiens
MRGANAWAPLCLLLAAATQLSRQQSPERPVFTCGGILTGESGFIGSEGFPGVYPPNSKCTWKITVPEGKVVVLNFRFIDLESDNLCRYDFVDVYNGHANGQRIGRFCGTFRPGALVSSGNKMMVQMISDANTAGNGFMAMFSAAEPNERGDQYCGGLLDRPSGSFKTPNWPDRDYPAGVTCVWHIVAPKNQLIELKFEKFDVERDNYCRYDYVAVFNGGEVNDARRIGKYCGDSPPAPIVSERNELLIQFLSDLSLTADGFIGHYIFRPKKLPTTTEQPVTTTFPVTTGLKPTVALCQQKCRRTGTLEGNYCSSDFVLAGTVITTITRDGSLHATVSIINIYKEGNLAIQQAGKNMSARLTVVCKQCPLLRRGLNYIIMGQVGEDGRGKIMPNSFIMMFKTKNQKLLDALKNKQC

SEQ ID NO: 3274 - protein, 770 aa, Homo sapiens
MDRDLLRQSLNCHGSSLLSLLRSEQQDNPHFRSLLGSAAEPARGPPPQHPLQGRKEKRVDNIEIQKFISKKADLLFALSWKSDAPATSEINEDSEDHYAIMPPLEQFMEIPSMDRRELFFRDIERGDIVIGRISSIREFGFFMVLICLGSGIMRDIAHLEITALCPLRDVPSHSNHGDPLSYYQTGDIIRAGIKDIDRYHEKLAVSLYSSSLPPHLSGIKLGVISSEELPLYYRRSVELNSNSLESYENVMQSSLGFVNPGVVEFLLEKLGIDESNPPSLMRGLQSKNFSEDDFASALRKKQSASWALKCVKIGVDYFKVGRHVDAMNEYNKALEIDKQNVEALVARGALYATKGSLNKAIEDFELALENCPTHRNARKYLCQTLVERGGQLEEEEKFLNAESYYKKALALDETFKDAEDALQKLHKYMQKSLELREKQAEKEEKQKTKKIETSAEKLRKLLKEEKRLKKKRRKSTSSSSVSSADESVSSSSSSSSSGHKRHKKHKRNRSESSRSSRRHSSRASSNQIDQNRKDECYPVPANTSASFLNHKQEVEKLLGKQDRLQYEKTQIKEKDRCPLSSSSLEIPDDFGGRSEDPRDFYNSYKTQAGSSKTEKPYKSERHFSSRRNSSDSFCRNSEDKIYGYRRFEKDIEGRKEHYRRWEPGSVRHSTSPASSEYSWKSVEKYKKYAHSGSRDFSRHEQRYRLNTNQGEYEREDNYGEDIKTEVPEEDALSSKEHSESSVKKNLPQNLLNIFNQIAEFEKEKGNKSKN

SEQ ID NO: 3275 - protein, 1996 aa, Homo sapiens
MMRTTEDFHKPSATLNSNTATKGRYIYLEAFLEGGAPWGFTLKGGLEHGEPLIISKVEEGGKADTLSSKLQAGDEVVHINEVTLSSSRKEAVSLVKGSYKTLRLVVRRDVCTDPGHADTGASNFVSPEHLTSGPQHRKAAWSGGVKLRLKHRRSEPAGRPHSWHTTKSGEKQPDASMMQISQGMIGPPWHQSYHSSSSTSDLSNYDHAYLRRSPDQCSSQGSMESLEPSGAYPPCHLSPAKSTGSIDQLSHFHNKRDSAYSSFSTSSSILEYPHPGISGRERSGSMDNTSARGGLLEGMRQADIRYVKTVYDTRRGVSAEYEVNSSALLLQGREARASANGQGYDKWSNIPRGKGVPPPSWSQQCPSSLETATDNLPPKVGAPLPPARSDSYAAFRHRERPSSWSSLDQKRLCRPQANSLGSLKSPFIEEQLHTVLEKSPENSPPVKPKHNYTQKAQPGQPLLPTSIYPVPSLEPHFAQVPQPSVSSNGMLYPALAKESGYIAPQGACNKMATIDENGNQNGSGRPGFAFCQPLEHDLLSPVEKKPEATAKYVPSKVHFCSVPENEEDASLKRHLTPPQGNSPHSNERKSTHSNKPSSHPHSLKCPQAQAWQAGEDKRSSRLSEPWEGDFQEDHNANLWRRLEREGLGQSLSGNFGKTKSAFSSLQNIPESLRRHSSLELGRGTQEGYPGGRPTCAVNTKAEDPGRKAAPDLGSHLDRQVSYPRPEGRTGASASFNSTDPSPEEPPAPSHPHTSSLGRRGPGPGSASALQGFQYGKPHCSVLEKVSKFEQREQGSQRPSVGGSGFGHNYRPHRTVSTSSTSGNDFEETKAHIRFSESAEPLGNGEQHFKNGELKLEEASRQPCGQQLSGGASDSGRGPQRPDARLLRSQSTFQLSSEPEREPEWRDRPGSPESPLLDAPFSRAYRNSIKDAQSRVLGATSFRRRDLELGAPVASRSWRPRPSSAHVGLRSPEASASASPHTPRERHSVTPAEGDLARPVPPAARRGARRRLTPEQKKRSYSEPEKMNEVGIVEEAEPAPLGPQRNGMRFPESSVADRRRLFERDGKACSTLSLSGPELKQFQQSALADYIQRKTGKRPTSAAGCSLQEPGPLRERAQSAYLQPGPAALEGSGLASASSLSSLREPSLQPRREATLLPATVAETQQAPRDRSSSFAGGRRLGERRRGDLLSGANGGTRGTQRGDETPREPSSWGARAGKSMSAEDLLERSDVLAGPVHVRSRSSPATADKRQDVLLGQDSGFGLVKDPCYLAGPGSRSLSCSERGQEEMLPLFHHLTPRWGGSGCKAIGDSSVPSECPGTLDHQRQASRTPCPRPPLAGTQGLVTDTRAAPLTPIGTPLPSAIPSGYCSQDGQTGRQPLPPYTPAMMHRSNGHTLTQPPGPRGCEGDGPEHGVEEGTRKRVSLPQWPPPSRAKWAHAAREDSLPEESSAPDFANLKHYQKQQSLPSLCSTSDPDTPLGAPSTPGRISLRISESVLRDSPPPHEDYEDEVFVRDPHPKATSSPTFEPLPPPPPPPPSQETPVYSMDDFPPPPPHTVCEAQLDSEDPEGPRPSFNKLSKVTIARERHMPGAAHVVGSQTLASRLQTSIKGSEAESTPPSFMSVHAQLAGSLGGQPAPIQTQSLSHDPVSGTQGLEKKVSPDPQKSSEDIRTEALAKEIVHQDKSLADILDPDSRLKTTMDLMEGLFPRDVNLLKENSVKRKAIQRTVSSSGCEGKRNEDKEAVSMLVNCPAYYSVSAPKAELLNKIKEMPAEVNEEEEQADVNEKKAELIGSLTHKLETLQEAKGSLLTDIKLNNALGEEVEALISELCKPNEFDKYRMFIGDLDKVVNLLLSLSGRLARVENVLSGLGEDASNEERSSLYEKRKILAGQHEDARELKENLDRRERVVLGILANYLSEEQLQDYQHFVKMKSTLLIEQRKLDDKIKLGQEQVKCLLESLPSDFIPKAGALALPPNLTSEPIPAGGCTFSGIFPTLTSPL

SEQ ID NO: 3276 - protein, 417 aa, Homo sapiens
MRLILPVGLIATTLAIAPVRFDREKVFRVKPQDEKQADIIKDLAKTNELDFWYPGATHHVAANMMVDFRVSEKESQAIQSALDQNKMHYEILIHDLQEEIEKQFDVKEDIPGRHSYAKYNNWEKIVAWTEKMMDKYPEMVSRIKIGSTVEDNPLYVLKIGEKNERRKAIFTDCGIHAREWVSPAFCQWFVYQATKTYGRNKIMTKLLDRMNFYILPVFNVDGYIWSWTKNRMWRKNRSKNQNSKCIGTDLNRNFNASWNSIPNTNDPCADNYRGSAPESEKETKAVTNFIRSHLNEIKVYITFHSYSQMLLFPYGYTSKLPPNHEDLAKVAKIGTDVLSTRYETRYIYGPIESTIYPISGSSLDWAYDLGIKHTFAFELRDKGKFGFLLPESRIKPTCRETMLAVKFIAKYILKHTS

SEQ ID NO: 3277 - protein, 1004 aa, Homo sapiens
MVQLYNLHPFGSQQVVPCKLEPDRFCGGGRDALFVAAGCKVEAFAVAGQELCQPRCAFSTLGRVLRLAYSEAGDYLVAIEEKNKATFLRAYVNWRNKRTENSRVCIRMIGHNVEGPFSKAFRDQMYIIEMPLSEAPLCISCCPVKGDLLVGCTNKLVLFSLKYQIINEEFSLLDFERSLIIHIDNITPVEVSFCVGYVAVMSDLEVLIVKLESGPKNGERVHHHPHKTNNRIRRTEEGISNEISQLESDDFVICQKPLELLGEKSEQSGLSVTLESTGLADEKRKYSHFQHLLYRRFAPDISSYVLSDDIKLHSLQLLPIYQTGSLTSDGKNLSQEKELLSLFCFFSLPHVGYLYMVVKSVELMSVYQYPEKSQQAVLTPQFLHVITSNNLQCFTVRCSAAAAREEDPYMDTTLKACPPVSMDVCALRIQLFIGLKAICHFKNHIILLTKAEPEAIPERRQSPKRLLSRKDTSVKIKIPPVAEAGWNLYIVNTISPVQLYKEMVDYSNTYKTVKTQSCIHLLSEAHLLVRAALMDASQLEPGEKAELLEAFKESCGHLGDCYSRLDSQHSHLTLPYYKMSGLSMAEVLARTDWTVEDGLQKYERGLIFYINHSLYENLDEELNEELAAKVVQMFYVAEPKQVPHILCSPSMKNINPLTAMSYLRKLDTSGFSSILVTLTKAAVALKMGDLDMHRNEMKSHSEMKLVCGFILEPRLLIQQRKGQIVPTELALHLKETQPGLLVASVLGLQKNNKIGIEEADSFFKVLCAKDEDTIPQLLVDFWEAQLVACLPDVVLQELFFKLTSQYIWRLSKRQPPDTTPLRTSEDLINACSHYGLIYPWVHVVISSDSLADKNYTEDLSKLQSLICGPSFDIASIIPFLEPLSEDTIAGLSVHVLCRTRLKEYEQCIDILLERCPEAVIPYANHELKEENRTLWWKKLLPELCQRIKCGGEKYQLYLSSLKETLSIVAVELELKDFMNVLPEDGTATFFLPYLLYCSRKKPLT

SEQ ID NO: 3278 - protein, 544 aa, Homo sapiens
MLNMQGAEERDIRRETCPGWVNKNKPALEQDVCKIDSSGIVVKRFQEDEYQDSTFEEKYACEGMKENSPREIAESCLFQEGGFGRITFIHKEAPPEIISQGYNFEKSLLLTSSLVTRLRVSTEESLHQWETSNIQTNDISDQSKCPTLCTQKKSWKCNECGKTFTQSSSLTQHQRTHTGERPYTCEECGKAFSRSSFLVQHQRIHTGVKPYGCEQCGKTFRCRSFLTQHQRIHTGEKPYKCNECGNSFRNHSHLTEHQRIHTGEKPYKCNRCGKAFNQNTHLIHHQRIHTGEKPYICSECGSSFRKHSNLTQHQRIHTGEKPHKCDECGKTFQTKANLSQHQRIHSGEKPYKCKECGKAFCQSPSLIKHQRIHTGEKPYKCKECGKAFTQSTPLTKHQRIHTGERPYKCSECGKAFIQSICLIRHQRSHTGEKPYKCNECGKGFNQNTCLTQHMRIHTGEKPYKCKECGKAFAHSSSLTEHHRTHTGEKLYKCSECEKTFRKYAHLSEHYRIHTGEKPYECIECGKFFRHSSVLFRHQKLHSGD

SEQ ID NO: 3279 - protein, 214 aa, Homo sapiens
MSQRKARGPPAMPGVGHSQTQAKARLLPGADRKRSRLSRTRQDPWEERSWSNQRWSRATPGPRGTRAGGLALGRSEASPENAARERSRVRTLRQAFLALQAALPAVPPDTKLSKLDVLVLAASYIAHLTRTLGHELPGPAWPPFLRGLRYLHPLKKWPMRSRLYAGGLGYSDLDSTTASTPSQRTRDAEVGSQVPGEADALLSTTPLSPALGDK

SEQ ID NO: 3280 - protein, 189 aa, Homo sapiens
MSTVKEAAHRLSKSEMSLYAVLDLKKGASPEDFKKSYSHSALLPHPPFEYHLGRKLALRYHPDKNPGNAQAAEIFKEINAAHAILSDSKKRKIYDQHGSLGIYLYDHFGEEGVRYYFILNSCWFKTLVILCTLLTCCCFCCCCCFCCGALKPPPEQDSGRKYQQNVQSQPPRSGAKCDFRSEENSEDDF

SEQ ID NO: 3281 - protein, 327 aa, Homo sapiens
MADGELNVDSLITRLLEVRGCRPGKIVQMTEAEVRGLCIKSREIFLSQPILLELEAPLKICGDIHGQYTDLLRLFEYGGFPPEANYLFLGDYVDRGKQSLETICLLLAYKIKYPENFFLLRGNHECASINRIYGFYDECKRRFNIKLWKTFTDCFNCLPIAAIVDEKIFCCHGGLSPDLQSMEQIRRIMRPTDVPDTGLLCDLLWSDPDKDVQGWGENDRGVSFTFGADVVSKFLNRHDLDLICRAHQVVEDGYEFFAKRQLVTLFSAPNYCGEFDNAGGMMSVDETLMCSFQILKPSEKKAKYQYGGLNSGRPVTPPRTANPPKKR

SEQ ID NO: 3282 - protein, 684 aa, Homo sapiens
MMDASKELQVLHIDFLNQDNAVSHHTWEFQTSSPVFRRGQVFHLRLVLNQPLQSYHQLKLEFSTGPNPSIAKHTLVVLDPRTPSDHYNWQATLQNESGKEVTVAVTSSPNAILGKYQLNVKTGNHILKSEENILYLLFNPWCKEDMVFMPDEDERKEYILNDTGCHYVGAARSIKCKPWNFGQFEKNVLDCCISLLTESSLKPTDRRDPVLVCRAMCAMMSFEKGQGVLIGNWTGDYEGGTAPYKWTGSAPILQQYYNTKQAVCFGQCWVFAGILTTVLRALGIPARSVTGFDSAHDTERNLTVDTYVNENGEKITSMTHDSVWNFHVWTDAWMKRPDLPKGYDGWQAVDATPQERSQGVFCCGPSPLTAIRKGDIFIVYDTRFVFSEVNGDRLIWLVKMVNGQEELHVISMETTSIGKNISTKAVGQDRRRDITYEYKYPEGSSEERQVMDHAFLLLSSEREHRRPVKENFLHMSVQSDDVLLGNSVNFTVILKRKTAALQNVNILGSFELQLYTGKKMAKLCDLNKTSQIQGQVSEVTLTLDSKTYINSLAILDDEPVIRGFIIAEIVESKEIMASEVFTSFQYPEFSIELPNTGRIGQLLVCNCIFKNTLAIPLTDVKFSLESLGISSLQTSDHGTVQPGETIQSQIKCTPIKTGPKKFIVKLSSKQVKEINAQKIVLITK

SEQ ID NO: 3283 - protein, 836 aa, Homo sapiens
MAGLNCGVSIALLGVLLLGAARLPRGAEAFEIALPRESNITVLIKLGTPTLLAKPCYIVISKRHITMLSIKSGERIVFTFSCQSPENHFVIEIQKNIDCMSGPCPFGEVQLQPSTSLLPTLNRTFIWDVKAHKSIGLELQFSIPRLRQIGPGESCPDGVTHSISGRIDATVVRIGTFCSNGTVSRIKMQEGVKMALHLPWFHPRNVSGFSIANRSSIKRLCIIESVFEGEGSATLMSANYPEGFPEDELMTWQFVVPAHLRASVSFLNFNLSNCERKEERVEYYIPGSTTNPEVFKLEDKQPGNMAGNFNLSLQGCDQDAQSPGILRLQFQVLVQHPQNESNKIYVVDLSNERAMSLTIEPRPVKQSRKFVPGCFVCLESRTCSSNLTLTSGSKHKISFLCDDLTRLWMNVEKTISCTDHRYCQRKSYSLQVPSDILHLPVELHDFSWKLLVPKDRLSLVLVPAQKLQQHTHEKPCNTSFSYLVASAIPSQDLYFGSFCPGGSIKQIQVKQNISVTLRTFAPSFQQEASRQGLTVSFIPYFKEEGVFTVTPDTKSKVYLRTPNWDRGLPSLTSVSWNISVPRDQVACLTFFKERSGVVCQTGRAFMIIQEQRTRAEEIFSLDEDVLPKPSFHHHSFWVNISNCSPTSGKQLDLLFSVTLTPRTVDLTVILIAAVGGGVLLLSALGLIICCVKKKKKKTNKGPAVGIYNDNINTEMPRQPKKFQKGRKDNDSHVYAVIEDTMVYGHLLQDSSGSFLQPEVDTYRPFQGTMGVCPPSPPTICSRAPTAKLATEEPPPRSPPESESEPYTFSHPNNGDVSSKDTDIPLLNTQEPMEPAE

SEQ ID NO: 3284 - protein, 555 aa, Homo sapiens
MEKARPLWANSLQFVFACISYAVGLGNVWRFPYLCQMYGGGSFLVPYIIMLIVEGMPLLYLELAVGQRMRQGSIGAWRTISPYLSGVGVASVVVSFFLSMYYNVINAWAFWYLFHSFQDPLPWSVCPLNGNHTGYDEECEKASSTQYFWYRKTLNISPSLQENGGVQWEPALCLLLAWLVVYLCILRGTESTGKIEQLANPKAWINAATQIFFSLGLGFGSLIAFASYNEPSNNCQKHAIIVSLINSFTSIFASIVTFSIYGFKATFNYENCLKKVSLLLTNTFDLEDGFLTASNLEQVKGYLASAYPSKYSEMFPQIKNCSLESELDTAVQGTGLAFIVYTEAIKNMEVSQLWSVLYFFMLLMLGIGSMLGNTAAILTPLTDSKIISSHLPKEAISGLVCLVNCAIGMVFTMEAGNYWFDIFNDYAATLSLLLIVLVETIAVCYVYGLRRFESDLKAMTGRAVSWYWKVMWAGVSPLLIVSLFVFYLSDYILTGTLKYQAWDASQGQLVTKDYPAYALAVIGLLVASSTMCIPLAALGTFVQRRLKRGDADPVA

SEQ ID NO: 3285 - protein, 299 aa, Homo sapiens
MAELGLNEHHQNEVINYMRFARSKRGLRLKTVDSCFQDLKESRLVEDTFTIDEVSEVLNGLQAVVHSEVESELINTAYTNVLLLRQLFAQAEKWYLKLQTDISELENRELLEQVAEFEKAEITSSNKKPILDVTKPKLAPLNEGGTAELLNKEILRLQEENEKLKSRLKTIEIQATNALDEKSKLEKALQDLQLDQGNQKDFIKAQDLSNLENTVAALKSEFQKTLNDKTENQKSLEENLATAKHDLLRVQEQLHMAEKELEKKFQQTAAYRNMKEILTKKNDQIKDLRKRLAQYEPED

SEQ ID NO: 3286 - protein, 1478 aa, Homo sapiens
MASTNAESQLQRIIRDLQDAVTELSKEFQEAGEPITDDSTSLHKFSYKLEYLLQFDQKEKATLLGNKKDYWDYFCACLAKVKGANDGIRFVKSISELRTSLGKGRAFIRYSLVHQRLADTLQQCFMNTKVTSDWYYARSPFLQPKLSSDIVGQLYELTEVQFDLASRGFDLDAAWPTFARRTLTTGSSAYLWKPPSRSSSMSSLVSSYLQTQEMVSNFDLNSPLNNEALEGFDEMRLELDQLEVREKQLRERMQQLDRENQELRAAVSQQGEQLQTERERGRTAAEDNVRLTCLVAELQKQWEVTQATQNTVKELQTCLQGLELGAAEKEEDYHTALRRLESMLQPLAQELEATRDSLDKKNQHLASFPGWLAMAQQKADTASDTKGRQEPIPSDAAQEMQELGEKLQALERERTKVEEVNRQQSAQLEQLVKELQLKEDARASLERLVKEMAPLQEELSGKGQEADQLWRRLQELLAHTSSWEEELAELRREKKQQQEEKELLEQEVRSLTRQLQFLETQLAQVSQHVSDLEEQKKQLIQDKDHLSQQVGMLERLAGPPGPELPVAGEKNEALVPVNSSLQEAWGKPEEEQRGLQEAQLDDTKVQEGSQEEELRQANRELEKELQNVVGRNQLLEGKLQALQADYQALQQRESAIQGSLASLEAEQASIRHLGDQMEASLLAVRKAKEAMKAQMAEKEAILQSKEGECQQLREEVEQCQQLAEARHRELRALESQCQQQTQLIEVLTAEKGQQGVGPPTDNEARELAAQLALSQAQLEVHQGEVQRLQAQVVDLQAKMRAALDDQDKVQSQLSMAEAVLREHKTLVQQLKEQNEALNRAHVQELLQCSEREGALQEERADEAQQREEELRALQEELSQAKCSSEEAQLEHAELQEQLHRANTDTAELGIQVCALTVEKERVEEALACAVQELQDAKEAASREREGLERQVAGLQQEKESLQEKLKAAKAAAGSLPGLQAQLAQAEQRAQSLQEAAHQELNTLKFQLSAEIMDYQSRLKNAGEECKSLRGQLEEQGRQLQAAEEAVEKLKATQADMGEKLSCTSNHLAECQAAMLRKDKEGAALREDLERTQKELEKATTKIQEYYNKLCQEVTNRERNDQKMLADLDDLNRTKKYLEERLIELLRDKDALWQKSDALEFQQKLSAEERWLGDTEANHCLDCKREFSWMVRRHHCRICGRIFCYYCCNNYVLSKHGGKKERCCRACFQKLSEGPGSPDSSGSGTSQGEPSPALSPASPGPQATGGQGANTDYRPPDDAVFDIITDEELCQIQESGSSLPETPTETDSLDPNAAEQDTTSTSLTPEDTEDMPVGQDSEICLLKSGELMIKVPLTVDEIASFGEGSRELFVRSSTYSLIPITVAEAGLTISWVFSSDPKSISFSVVFQEAEDTPLDQCKVLIPTTRCNSHKENIQGQLKVRTPGIYMLIFDNTFSRFVSKKVFYHLTVDRPVIYDGSDFL

SEQ ID NO: 3287 - protein, 747 aa, Homo sapiens
MQGGEPVSTMKVSESEGKLEGQATAVTPNKNSSCGGGISSSSSSRGGSAKGWQYSDHMENVYGYLMKYTNLVTGWQYRFFVLNNEAGLLEYFVNEQSRNQKPRGTLQLAGAVISPSDEDSHTFTVNAASGEQYKLRATDAKERQHWVSRLQICTQHHTEAIGKNNPPLKSRSFSLASSSNSPISQRRPSQNAISFFNVGHSKLQSLSKRTNLPPDHLVEVREMMSHAEGQQRDLIRRIECLPTSGHLSSLDQDLLMLKATSMATMNCLNDCFHILQLQHASHQKGSLPSGTTIEWLEPKISLSNHYKNGADQPFATDQSKPVAVPEEQPVAESGLLAREPEEINADDEIEDTCDHKEDDLGAVEEQRSVILHLLSQLKLGMDLTRVVLPTFILEKRSLLEMYADFMSHPDLFIAITNGATAEDRMIRFVEYYLTSFHEGRKGAIAKKPYNPIIGETFHCSWKMPKSEVASSVFSSSSTQGVTNHAPLSGESLTQVGSDCYTVRFVAEQVSHHPPVSGFYAECTERKMCVNAHVWTKSKFLGMSIGVTMVGEGILSLLEHGEEYTFSLPCAYARSILTVPWVELGGKVSVNCAKTGYSASITFHTKPFYGGKLHRVTAEVKHNITNTVVCRVQGEWNSVLEFTYSNGETKYVDLTKLAVTKKRVRPLEKQDPFESRRLWKNVTDSLRESEIDKATEHKHTLEERQRTEERHRTETGTPWKTKYFIKEGDGWVYHKPLWKIIPTTQPAE

SEQ ID NO: 3288 - protein, 589 aa, Homo sapiens
MYRWLVRILGTIFRFCDRSVPPARALLKRRRSDSTLFSTVDTDEIPAKRPRLDCFIHQVKNSLYNAASLFGFPFQLTTKPMVTSACNGTRNVAPSGEVFSNSSSCELTGSGSWNNMLKLGNKSPNGISDYPKIRVTVTRDQPRRVLPSFGFTLNSEGCNRRPGGRRHSKGNPESSLMWKPQEQAVTEMISEESGKGLRRPHCTVEEGVQKEEREKYRKLLERLKESGHGNSVCPVTSNYHSSQRSQMDTLKTKGWGEEQNHGVKTTQFVPKQYRLVETRGPLCSLRSEKRCSKGKITDTETMVGIRFENESRRGYQLEPDLSEEVSARLRLGSGSNGLLRRKVSIIETKEKNCSGKERDRRTDDLLELTEDMEKEISNALGHGPQDEILSSAFKLRITRGDIQTLKNYHWLNDEVINFYMNLLVERNKKQGYPALHVFSTFFYPKLKSGGYQAVKRWTKGVNLFEQEIILVPIHRKVHWSLVVIDLRKKCLKYLDSMGQKGHRICEILLQYLQDESKTKRNSDLNLLEWTHHSMKPHEIPQQLNGSDCGMFTCKYADYISRDKPITFTQHQMPLFRKKMVWEILHQQLL

SEQ ID NO: 3289 - protein, 1292 aa, Homo sapiens
MRAVLTWRDKAEHCINDIAFKPDGTQLILAAGSRLLVYDTSDGTLLQPLKGHKDTVYCVAYAKDGKRFASGSADKSVIIWTSKLEGILKYTSWSVMSSLHLHLPFLGLHKTVRVTATDKAPKGQGGRIDCLRPSVQNQPGQKHNDAIQCVSYNPITHQLASCSSSDFGLWSPEQKSVSKHKSSSKIICCSWTNDGQYLALGMFNGIISIRNKNGEEKVKIERPGGSLSPIWSICWNPSSRWESFWMNRENEDAEDVIVNRYIQEIPSTLKSAVYSSQGSEAEEEEPEEEDDSPRDDNLEERNDILAVADWGQKVSFYQLSGKQIGKDRALNFDPCCISYFTKGEYILLGGSDKQVSLFTKDGVRLGTVGEQNSWVWTCQAKPDSNYVVVGCQDGTISFYQLIFSTVHGLYKDRYAYRDSMTDVIVQHLITEQKVRIKCKELVKKIAIYRNRLAIQLPEKILIYELYSEDLSDMHYRVKEKIIKKFECNLLVVCANHIILCQEKRLQCLSFSGVKEREWQMESLIRYIKVIGGPPGREGLLVGLKNGQILKIFVDNLFAIVLLKQATAVRCLDMSASRKKLAVVDENDTCLVYDIDTKELLFQEPNANSVAWNTQCEDMLCFSGGGYLNIKASTFPVHRQKLQGFVVGYNGSKIFCLHVFSISAVEVPQSAPMYQYLDRKLFKEAYQIACLGVTDTDWRELAMEALEGLDFETAKKAFIRVQDLRYLELISSIEERKKRGETNNDLFLADVFSYQGKFHEAAKLYKRSGHENLALEMYTDLCMFEYAKDFLGSGDPKETKMLITKQADWARNIKEPKAAVEMYISAGEHVKAIEICGDHGWVDMLIDIARKLDKAEREPLLLCATYLKKLDSPGYAAETYLKMGDLKSLVQLHVETQRWDEAFALGEKHPEFKDDIYMPYAQWLAENDRFEEAQKAFHKAGRQREAVQVLEQLTNNAVAESRFNDAAYYYWMLSMQCLDIAQDPAQKDTMLGKFYHFQRLAELYHGYHAIHRHTEDPFSVHRPETLFNISRFLLHSLPKDTPSGISKVKILFTLAKQSKALGAYRLARHAYDKLRGLYIPARFQKSIELGTLTIRAKPFHDSEELVPLCYRCSTNNPLLNNLGNVCINCRQPFIFSASSYDVLHLVEFYLEEGITDEEAISLIDLEVLRPKRDDRQLEIANNSSQILRLVETKDSIGDEDPFTAKLSFEQGGSEFVPVVVSRLVLRSMSRRDVLIKRWPPPLRWQYFRSLLPDASITMCPSCFQMFHSEDYELLVLQHGCCPYCRRCKDDPGP

SEQ ID NO: 3290 - protein, 728 aa, Homo sapiens
MRWLLLYYALCFSLSKASAHTVELNNMFGQIQSPGYPDSYPSDSEVTWNITVPDGFRIKLYFMHFNLESSYLCEYDYVKVETEDQVLATFCGRETTDTEQTPGQEVVLSPGSFMSITFRSDFSNEERFTGFDAHYMAVDVDECKEREDEELSCDHYCHNYIGGYYCSCRFGYILHTDNRTCRVECSDNLFTQRTGVITSPDFPNPYPKSSECLYTIELEEGFMVNLQFEDIFDIEDHPEVPCPYDYIKIKVGPKVLGPFCGEKAPEPISTQSHSVLILFHSDNSGENRGWRLSYRAAGNECPELQPPVHGKIEPSQAKYFFKDQVLVSCDTGYKVLKDNVEMDTFQIECLKDGTWSNKIPTCKIVDCRAPGELEHGLITFSTRNNLTTYKSEIKYSCQEPYYKMLNNNTGIYTCSAQGVWMNKVLGRSLPTCLPECGQPSRSLPSLVKRIIGGRNAEPGLFPWQALIVVEDTSRVPNDKWFGSGALLSASWILTAAHVLRSQRRDTTVIPVSKEHVTVYLGLHDVRDKSGAVNSSAARVVLHPDFNIQNYNHDIALVQLQEPVPLGPHVMPVCLPRLEPEGPAPHMLGLVAGWGISNPNVTVDEIISSGTRTLSDVLQYVKLPVVPHAECKTSYESRSGNYSVTENMFCAGYYEGGKDTCLGDSGGAFVIFDDLSQRWVVQGLVSWGGPEECGSKQVYGVYTKVSNYVDWVWEQMGLPQSVVEPQVER

SEQ ID NO: 3291 - protein, 711 aa, Homo sapiens
MNKGWLELESDPGLFTLLVEDFGVKGVQVEEIYDLQSKCQGPVYGFIFLFKWIEERRSRRKVSTLVDDTSVIDDDIVNNMFFAHQLIPNSCATHALLSVLLNCSSVDLGPTLSRMKDFTKGFSPESKGYAIGNAPELAKAHNSHARPEPRHLPEKQNGLSAVRTMEAFHFVSYVPITGRLFELDGLKVYPIDHGPWGEDEEWTDKARRVIMERIGLATAGIKYEARLHVLKVNRQTVLEALQQLIRVTQPELIQTHKSQESQLPEESKSASNKSPLVLEANRAPAASEGNHTDGAEEAAGSCAQAPSHSPPNKPKLVVKPPGSSLNGVHPNPTPIVQRLPAFLDNHNYAKSPMQEEEDLAAGVGRSRVPVRPPQQYSDDEDDYEDDEEDDVQNTNSALRYKGKGTGKPGALSGSADGQLSVLQPNTINVLAEKLKESQKDLSIPLSIKTSSGAGSPAVAVPTHSQPSPTPSNESTDTASEIGSAFNSPLRSPIRSANPTRPSSPVTSHISKVLFGEDDSLLRVDCIRYNRAVRDLGPVISTGLLHLAEDGVLSPLALTEGGKGSSPSIRPIQGSQGSSSPVEKEVVEATDSREKTGMVRPGEPLSGEKYSPKELLALLKCVEAEIANYEACLKEEVEKRKKFKIDDQRRTHNYDEFICTFISMLAQEGMLANLVEQNISVRRRQGVSIGRLHKQRKPDRRKRSRPYKAKRQ

SEQ ID NO: 3292 - protein, 457 aa, Homo sapiens
MAFASIYKLDNLVAILDINRLGQSDPAPLQHQMDIYQKRCEAFGWHAIIVDGHSVEELCKAFGQAKHQPTAIIAKTFKGRGITGVEDKESWHGKPLPKNMAEQIIQEIYSQIQSKKKILATPPQEDAPSVDIANIRMPSLPSYKVGDKIATRKAYGQALAKLGHASDRIIALDGDTKNSTFSEIFKKEHPDRFIECYIAEQNMVSIAVGCATRNRTVPFCSTFAAFFTRAFDQIRMAAISESNINLCGSHCGVSIGEDGPSQMALEDLAMFRSVPTSTVFYPSDGVATEKAVELAANTKGICFIRTSRPENAIIYNNNEDFQVGQAKVVLKSKDDQVTVIGAGVTLHEALAAAELLKKEKINIRVLDPFTIKPLDRKLILDSARATKGRILTVEDHYYEGGIGEAVSSAVVGEPGITVTHLAVNRVPRSGKPAELLKMFGIDRDAIAQAVRGLITKA

SEQ ID NO: 3293 - protein, 1689 aa, Homo sapiens
MGSKRRRATSPSSSVSGDFDDGHHSVSTPGPSRKRRRLSNLPTVDPIAVCHELYNTIRDYKDEQGRLLCELFIRAPKRRNQPDYYEVVSQPIDLMKIQQKLKMEEYDDVNLLTADFQLLFNNAKSYYKPDSPEYKAACKLWDLYLRTRNEFVQKGEADDEDDDEDGQDNQGTVTEGSSPAYLKEILEQLLEAIVVATNPSGRLISELFQKLPSKVQYPDYYAIIKEPIDLKTIAQRIQNGSYKSIHAMAKDIDLLAKNAKTYNEPGSQVFKDANSIKKIFYMKKAEIEHHEMAKSSLRMRTPSNLAAARLTGPSHSKGSLGEERNPTSKYYRNKRAVQGGRLSAITMALQYGSESEEDAALAAARYEEGESEAESITSFMDVSNPFYQLYDTVRSCRNNQGQLIAEPFYHLPSKKKYPDYYQQIKMPISLQQIRTKLKNQEYETLDHLECDLNLMFENAKRYNVPNSAIYKRVLKLQQVMQAKKKELARRDDIEDGDSMISSATSDTGSAKRKSKKNIRKQRMKILFNVVLEAREPGSGRRLCDLFMVKPSKKDYPDYYKIILEPMDLKIIEHNIRNDKYAGEEGMIEDMKLMFRNARHYNEEGSQVYNDAHILEKLLKEKRKELGPLPDDDDMASPKLKLSRKSGISPKKSKYMTPMQQKLNEVYEAVKNYTDKRGRRLSAIFLRLPSRSELPDYYLTIKKPMDMEKIRSHMMANKYQDIDSMVEDFVMMFNNACTYNEPESLIYKDALVLHKVLLETRRDLEGDEDSHVPNVTLLIQELIHNLFVSVMSHQDDEGRCYSDSLAEIPAVDPNFPNKPPLTFDIIRKNVENNRYRRLDLFQEHMFEVLERARRMNRTDSEIYEDAVELQQFFIKIRDELCKNGEILLSPALSYTTKHLHNDVEKERKEKLPKEIEEDKLKREEEKREAEKSEDSSGAAGLSGLHRTYSQDCSFKNSMYHVGDYVYVEPAEANLQPHIVCIERLWEDSAGEKWLYGCWFYRPNETFHLATRKFLEKEVFKSDYYNKVPVSKILGKCVVMFVKEYFKLCPENFRDEDVFVCESRYSAKTKSFKKIKLWTMPISSVRFVPRDVPLPVVRVASVFANADKGDDEKNTDNSEDSRAEDNFNLEKEKEDVPVEMSNGEPGCHYFEQLHYNDMWLKVGDCVFIKSHGLVRPRVGRIEKVWVRDGAAYFYGPIFIHPEETEHEPTKMFYKKEVFLSNLEETCPMTCILGKCAVLSFKDFLSCRPTEIPENDILLCESRYNESDKQMKKFKGLKRFSLSAKVVDDEIYYFRKPIVPQKEPSPLLEKKIQLLEAKFAELEGGDDDIEEMGEEDSEVIEPPSLPQLQTPLASELDLMPYTPPQSTPKSAKGSAKKEGSKRKINMSGYILFSSEMRAVIKAQHPDYSFGELSRLVGTEWRNLETAKKAEYEERAAKVAEQQERERAAQQQQPSASPRAGTPVGALMGVVPPPTPMGMLNQQLTPVAGMMGGYPPGLPPLQGPVDGLVSMGSMQPLHPGGPPPHHLPPGVPGLPGIPPPGVMNQGVAPMVGTPAPGGSPYGQQVGVLGPPGQQAPPPYPGPHPAGPPVIQQPTTPMFVAPPPKTQRLLHSEAYLKYIEGLSAESNSISKWDQTLAARRRDVHLSKEQESRLPSHWLKSKGAHTTMADALWRLRDLMLRDTLNIRQAYNLENV

SEQ ID NO: 3294 - protein, 739 aa, Homo sapiens
MAPWLQLCSVFFTVNACLNGSQLAVAAGGSGRARGADTCGWRGVGPASRNSGLYNITFKYDNCTTYLNPVGKHVIADAQNITISQYACHDQVAVTILWSPGALGIEFLKGFRVILEELKSEGRQCQQLILKDPKQLNSSFKRTGMESQPFLNMKFETDYFVKVVPFPSIKNESNYHPFFFRTRACDLLLQPDNLACKPFWKPRNLNISQHGSDMQVSFDHAPHNFGFRFFYLHYKLKHEGPFKRKTCKQEQTTETTSCLLQNVSPGDYIIELVDDTNTTRKVMHYALKPVHSPWAGPIRAVAITVPLVVISAFATLFTVMCRKKQQENIYSHLDEESSESSTYTAALPRERLRPRPKVFLCYSSKDGQNHMNVVQCFAYFLQDFCGCEVALDLWEDFSLCREGQREWVIQKIHESQFIIVVCSKGMKYFVDKKNYKHKGGGRGSGKGELFLVAVSAIAEKLRQAKQSSSAALSKFIAVYFDYSCEGDVPGILDLSTKYRLMDNLPQLCSHLHSRDHGLQEPGQHTRQGSRRNYFRSKSGRSLYVAICNMHQFIDEEPDWFEKQFVPFHPPPLRYREPVLEKFDSGLVLNDVMCKPGPESDFCLKVEAAVLGATGPADSQHESQHGGLDQDGEARPALDGSAALQPLLHTVKAGSPSDMPRDSGIYDSSVPSSELSLPLMEGLSTDQTETSSLTESVSSSSGLGEEEPPALPSKLLSSGSCKADLGCRSYTDELHAVAPL

SEQ ID NO: 3295 - protein, 340 aa, Homo sapiens
MEPGRTQIKLDPRYTADLLEVLKTNYGIPSACFSQPPTAAQLLRALGPVELALTSILTLLALGSIAIFLEDAVYLYKNTLCPIKRRTLLWKSSAPTVVSVLCCFGLWIPRSLVLVEMTITSFYAVCFYLLMLVMVEGFGGKEAVLRTLRDTPMMVHTGPCCCCCPCCPRLLLTRKKLQLLMLGPFQYAFLKITLTLVGLFLVPDGIYDPADISEGSTALWINTFLGVSTLLALWTLGIISRQARLHLGEQNMGAKFALFQVLLILTALQPSIFSVLANGGQIACSPPYSSKTRSQVMNCHLLILETFLMTVLTRMYYRRKDHKVGYETFSSPDLDLNLKA

SEQ ID NO: 3296 - protein, 972 aa, Homo sapiens
MRPEGAGMELGGGEERLPEESRREHWQLLGNLKTTVEGLVSTNSPNVWSKYGGLERLCRDMQSILYHGLIRDQACRRQTDYWQFVKDIRWLSPHSALHVEKFISVHENDQSSADGASERAVAELWLQHSLQYHCLSAQLRPLLGDRQYIRKFYTDAAFLLSDAHVTAMLQCLEAVEQNNPRLLAQIDASMFARKHESPLLVTKSQSLTALPSSTYTPPNSYAQHSYFGSFSSLHQSVPNNGSERRSTSFPLSGPPRKPQESRGHVSPAEDQTIQAPPVSVSALARDSPLTPNEMSSSTLTSPIEASWVSSQNDSPGDASEGPEYLAIGNLDPRGRTASCQSHSSNAESSSSNLFSSSSSQKPDSAASSLGDQEGGGESQLSSVLRRSSFSEGQTLTVTSGAKKSHIRSHSDTSIASRGAPESCNDKAKLRGPLPYSGQSSEVSTPSSLYMEYEGGRYLCSGEGMFRRPSEGQSLISYLSEQDFGSCADLEKENAHFSISESLIAAIELMKCNMMSQCLEEEEVEEEDSDREIQELKQKIRLRRQQIRTKNLLPMYQEAEHGSFRVTSSSSQFSSRDSAQLSDSGSADEVDEFEIQDADIRRNTASSSKSFVSSQSFSHCFLHSTSAEAVAMGLLKQFEGMQLPAASELEWLVPEHDAPQKLLPIPDSLPISPDDGQHADIYKLRIRVRGNLEWAPPRPQIIFNVHPAPTRKIAVAKQNYRCAGCGIRTDPDYIKRLRYCEYLGKYFCQCCHENAQMAIPSRVLRKWDFSKYYVSNFSKDLLIKIWNDPLFNVQDINSALYRKVKLLNQVRLLRVQLCHMKNMFKTCRLAKELLDSFDTVPGHLTEDLHLYSLNDLTATRKGELGPRLAELTRAGATHVERCMLCQAKGFICEFCQNEDDIIFPFELHKCRTCEECKACYHKACFKSGSCPRCERLQARREALARQSLESYLSDYEEEPAEALALEAAVLEAT

SEQ ID NO: 3297 - protein, 738 aa, Homo sapiens
MRGPSGALWLLLALRTVLGGMEVRWCATSDPEQHKCGNMSEAFREAGIQPSLLCVRGTSADHCVQLIAAQEADAITLDGGAIYEAGKEHGLKPVVGEVYDQEVGTSYYAVAVVRRSSHVTIDTLKGVKSCHTGINRTVGWNVPVGYLVESGRLSVMGCDVLKAVSDYFGGSCVPGAGETSYSESLCRLCRGDSSGEGVCDKSPLERYYDYSGAFRCLAEGAGDVAFVKHSTVLENTDGKTLPSWGQALLSQDFELLCRDGSRADVTEWRQCHLARVPAHAVVVRADTDGGLIFRLLNEGQRLFSHEGSSFQMFSSEAYGQKDLLFKDSTSELVPIATQTYEAWLGHEYLHAMKGLLCDPNRLPPYLRWCVLSTPEIQKCGDMAVAFRRQRLKPEIQCVSAKSPQHCMERIQAEQVDAVTLSGEDIYTAGKTYGLVPAAGEHYAPEDSSNSYYVVAVVRRDSSHAFTLDELRGKRSCHAGFGSPAGWDVPVGALIQRGFIRPKDCDVLTAVSEFFNASCVPVNNPKNYPSSLCALCVGDEQGRNKCVGNSQERYYGYRGAFRCLVENAGDVAFVRHTTVFDNTNGHNSEPWAAELRSEDYELLCPNGARAEVSQFAACNLAQIPPHAVMVRPDTNIFTVYGLLDKAQDLFGDDHNKNGFKMFDSSNYHGQDLLFKDATVRAVPVGEKTTYRGWLGLDYVAALEGMSSQQCSGAAAPAPGAPLLPLLLPALAARLLPPAL

SEQ ID NO: 3298 - protein, 302 aa, Homo sapiens
MRGPSGALWLLLALRTVLGGMEVRWCATSDPEQHKCGNMSEAFREAGIQPSLLCVRGTSADHCVQLIAAQEADAITLDGGAIYEAGKEHGLKPVVGEVYDQEVGTSYYAVAVVRRSSHVTIDTLKGVKSCHTGINRTVGWNVPVGYLVESGRLSVMGCDVLKAVSDYFGGSCVPGAGETSYSESLCRLCRGDSSGEGVCDKSPLERYYDYSGAFRCLAEGAGDVAFVKHSTVLENTDESPSRRQTWTRSEEEEGECPAHEEARRTMRSSAGQAWKWAPVHRPQDESDKGEFGKRAKSRDMLG

SEQ ID NO: 3299 - protein, 736 aa, Homo sapiens
MAVRALKLLTTLLAVVAAASQAEVESEAGWGMVTPDLLFAEGTAAYARGDWPGVVLSMERALRSRAALRALRLRCRTQCAADFPWELDPDWSPSPAQASGAAALRDLSFFGGLLRRAACLRRCLGPPAAHSLSEEMELEFRKRSPYNYLQVAYFKINKLEKAVAAAHTFFVGNPEHMEMQQNLDYYQTMSGVKEADFKDLETQPHMQEFRLGVRLYSEEQPQEAVPHLEAALQEYFVAYEECRALCEGPYDYDGYNYLEYNADLFQAITDHYIQVLNCKQNCVTELASHPSREKPFEDFLPSHYNYLQFAYYNIGNYTQAVECAKTYLLFFPNDEVMNQNLAYYAAMLGEEHTRSIGPRESAKEYRQRSLLEKELLFFAYDVFGIPFVDPDSWTPEEVIPKRLQEKQKSERETAVRISQEIGNLMKEIETLVEEKTKESLDVSRLTREGGPLLYEGISLTMNSKLLNGSQRVVMDGVISDHECQELQRLTNVAATSGDGYRGQTSPHTPNEKFYGVTVFKALKLGQEGKVPLQSAHLYYNVTEKVRRIMESYFRLDTPLYFSYSHLVCRTAIEEVQAERKDDSHPVHVDNCILNAETLVCVKEPPAYTFRDYSAILYLNGDFDGGNFYFTELDAKTVTAEVQPQCGRAVGFSSGTENPHGVKAVTRGQRCAIALWFTLDPRHSERDRVQADDLVKMLFSPEEMDLSQEQPLDAQQGPPEPAQESLSGSESKPKDEL

SEQ ID NO: 3300 - protein, 374 aa, Homo sapiens
MANEVIKCKAAVAWEAGKPLSIEEIEVAPPKAHEVRIKIIATAVCHTDAYTLSGADPEGCFPVILGHEGAGIVESVGEGVTKLKAGDTVIPLYIPQCGECKFCLNPKTNLCQKIRVTQGKGLMPDGTSRFTCKGKTILHYMGTSTFSEYTVVADISVAKIDPLAPLDKVCLLGCGISTGYGAAVNTAKLEPGSVCAVFGLGGVGLAVIMGCKVAGASRIIGVDINKDKFARAKEFGATECINPQDFSKPIQEVLIEMTDGGVDYSFECIGNVKVMRAALEACHKGWGVSVVVGVAASGEEIATRPFQLVTGRTWKGTAFGGWKSVESVPKLVSEYMSKKIKVDEFVTHNLSFDEINKAFELMHSGKSIRTVVKI

SEQ ID NO: 3301 - protein, 464 aa, Homo sapiens
MEIRLPDLALKRIFSFLDLFGLLQVSQVNKHWNRIADSDYLWRSLSLQRWDCSNFTNQHLGTHTWKQFFLHQRRKELRLALAQPHNFIYKVTKNIAFETELAYLSGNRLTVDEQEKSIICSVSPKQELCAWDVQEGTMIWSSPVQEFHFSNLVTLPQMHLAITMDRKKTIKVWNCQDRDALAVLPMPQPCYCMEAYLTKDGPFLMVGDAAGDIYTFTLPGLRDVSKVTAFQYGIVLLHCSPDKKWVFACGTYSRTLPQVFLTESLLRPSEGSVPLSTFLPHKLCASACWTPKVKNRITLMSQSSTGKKTEFITFDLTTKKTGGQTVIQAYEIASFQVAAHLKCPIWMGASDGYMIVFTSGPYLLLFSITGFLLQRFEDHQAAINNFWVDPCYVLTTSENSVHVYMWEEGGRHPYLRSCCHLENTWHDHTTDSCISSVMCDNASIVLRVRKVSDSSILVMYSLNT

SEQ ID NO: 3302 - protein, 2135 aa, Homo sapiens
MPALGPALLQALWAGWVLTLQPLPPTAFTPNGTYLQHLARDPTSGTLYLGATNFLFQLSPGLQLEATVSTGPVLDSRDCLPPVMPDECPQAQPTNNPNQLLLVSPGALVVCGSVHQGVCEQRRLGQLEQLLLRPERPGDTQYVAANDPAVSTVGLVAQGLAGEPLLFVGRGYTSRGVGGGIPPITTRALWPPDPQAAFSYEETAKLAVGRLSEYSHHFVSAFARGASAYFLFLRRDLQAQSRAFRAYVSRVCLRDQHYYSYVELPLACEGGRYGLIQAAAVATSREVAHGEVLFAAFSSAAPPTVGRPPSAAAGASGASALCAFPLDEVDRLANRTRDACYTREGRAEDGTEVAYIEYDVNSDCAQLPVDTLDAYPCGSDHTPSPMASRVPLEATPILEWPGIQLTAVAVTMEDGHTIAFLGDSQGQLHRVYLGPGSDGHPYSTQSIQQGSAVSRDLTFDGTFEHLYVMTQSTLLKVPVASCAQHLDCASCLAHRDPYCGWCVLLGRCSRRSECSRGQGPEQWLWSFQPELGCLQVAAMSPANISREETREVFLSVPDLPPLWPGESYSCHFGEHQSPALLTGSGVMCPSPDPSEAPVLPRGADYVSVSVELRFGAVVIAKTSLSFYDCVAVTELRPSAQCQACVSSRWGCNWCVWQHLCTHKASCDAGPMVASHQSPLVSPDPPARGGPSPSPPTAPKALATPAPDTLPVEPGAPSTATASDISPGASPSLLSPWGPWAGSGSISSPGSTGSPLHEEPSPPSPQNGPGTAVPAPTDFRPSATPEDLLASPLSPSEVAAVPPADPGPEALHPTVPLDLPPATVPATTFPGAMGSVKPALDWLTREGGELPEADEWTGGDAPAFSTSTLLSGDGDSAELEGPPAPLILPSSLDYQYDTPGLWELEEATLGASSCPCVESVQGSTLMPVHVEREIRLLGRNLHLFQDGPGDNECVMELEGLEVVVEARVECEPPPDTQCHVTCQQHQLSYEALQPELRVGLFLRRAGRLRVDSAEGLHVVLYDCSVGHGDCSRCQTAMPQYGCVWCEGERPRCVTREACGEAEAVATQCPAPLIHSVEPLTGPVDGGTRVTIRGSNLGQHVQDVLGMVTVAGVPCAVDAQEYEVSSSLVCITGASGEEVAGATAVEVPGRGRGVSEHDFAYQDPKVHSIFPARGPRAGGTRLTLNGSKLLTGRLEDIRVVVGDQPCHLLPEQQSEQLRCETSPRPTPATLPVAVWFGATERRLQRGQFKYTLDPNITSAGPTKSFLSGGREICVRGQNLDVVQTPRIRVTVVSRMLQPSQGLGRRRRVVPETACSLGPSCSSQQFEEPCHVNSSQLITCRTPALPGLPEDPWVRVEFILDNLVFDFATLNPTPFSYEADPTLQPLNPEDPTMPFRHKPGSVFSVEGENLDLAMSKEEVVAMIGDGPCVVKTLTRHHLYCEPPVEQPLPRHHALREAPDSLPEFTVQMGNLRFSLGHVQYDGESPGAFPVAAQVGLGVGTSLLALGVIIIVLMYRRKSKQALRDYKKVQIQLENLESSVRDRCKKEFTDLMTEMTDLTSDLLGSGIPFLDYKVYAERIFFPGHRESPLHRDLGVPESRRPTVEQGLGQLSNLLNSKLFLTKFIHTLESQRTFSARDRAYVASLLTVALHGKLEYFTDILRTLLSDLVAQYVAKNPKLMLRRTETVVEKLLTNWMSICLYTFVRDSVGEPLYMLFRGIKHQVDKGPVDSVTGKAKYTLNDNRLLREDVEYRPLTLNALLAVGPGAGEAQGVPVKVLDCDTISQAKEKMLDQLYKGVPLTQRPDPRTLDVEWRSGVAGHLILSDEDVTSEVQGLWRRLNTLQHYKVPDGATVALVPCLTKHVLRENQDYVPGERTPMLEDVDEGGIRPWHLVKPSDEPEPPRPRRGSLRGGERERAKAIPEIYLTRLLSMKGTLQKFVDDLFQVILSTSRPVPLAVKYFFDLLDEQAQQHGISDQDTIHIWKTNSLPLRFWINIIKNPQFVFDVQTSDNMDAVLLVIAQTFMDACTLADHKLGRDSPINKLLYARDIPRYKRMVERYYADIRQTVPASDQEMNSVLAELSWNYSGDLGARVALHELYKYINKYYDQIITALEEDGTAQKMQLGYRLQQIAAAVENKVTDL

SEQ ID NO: 3303 - protein, 594 aa, Homo sapiens
MNFNVWNIKEMLSIPSGSGNKKSSNWNNNQNDYSSLSDSQFLFGSQFCPENSETLSAPLDFGAHLRHSKQSQQNYLEGEPSIFTKYQTKPQLFGGDIKDGGLFPPPLSVGKSKGLLEQFEEKKKRAKDKCDSETLYNFVSNVRESILRLQTSVEKSEDHLSSRSQSILDSLETVAKTLQETIQAQNDLVFEAVQDKGNMEQAILEMKKRFEARQGEFIEMKSNLKHLEVLVAQQSQEFQQLCEQLGQLNVPSVLAELKRLISVPPVKDSASQTSPPLAQSLNLTRQEKYTSEKPVLWQAQALPAAWNPGMGSLQPGEFDVWGEGAKNDDLQEEAALPAFGSHERNRHVKDKVVQTNCKNWAVTKTGAKNHGSSVPGHKIPSDRDLVSQGASQLTSLEINFSTSIKNACQKYQAQSMFLCDPREHLVIKQKDGTVEMRGKDKKQQPRKAHRAHRGRLIASKQKQIPIQTCKFNSKYQSPQPAISVPQSPFLGQQEPRAQPLHLQCPRSPRKPVCPILGGTVMPNKTVRAVQGRLLQLSRCSSQDNWLLSSSSQGDHQMSWFSDLNLGCSETPLCKEAGKNLLYDLGFDSSDDDGF

SEQ ID NO: 3304 - protein, 3926 aa, Homo sapiens
MGNEVSLEGGAGDGPLPPGGAGPGPGPGPGPGAGKPPSAPAGGGQLPAAGAARSTAVPPVPGPGPGPGPGPGPGSTSRRLDPKEPLGNQRAASPTPKQASATTPGHESPRETRAQGPAGQEADGPRRTLQVDSRTQRSGRSPSVSPDRGSTPTSPYSVPQIAPLPSSTLCPICKTSDLTSTPSQPNFNTCTQCHNKVCNQCGFNPNPHLTQVKEWLCLNCQMQRALGMDMTTAPRSKSQQQLHSPALSPAHSPAKQPLGKPDQERSRGPGGPQPGSRQAETARATSVPGPAQAAAPPEVGRVSPQPPQPTKPSTAEPRPPAGEAPAKSATAVPAGLGATEQTQEGLTGKLFGLGASLLTQASTLMSVQPEADTQGQPAPSKGTPKIVFNDASKEAGPKPLGSGPGPGPAPGAKTEPGARMGPGSGPGALPKTGGTTSPKHGRAEHQAASKAAAKPKTMPKERAICPLCQAELNVGSKSPANYNTCTTCRLQVCNLCGFNPTPHLVEKTEWLCLNCQTKRLLEGSLGEPTPLPPPTSQQPPVGAPHRASGTSPLKQKGPQGLGQPSGPLPAKASPLSTKASPLPSKASPQAKPLRASEPSKTPSSVQEKKTRVPTKAEPMPKPPPETTPTPATPKVKSGVRRAEPATPVVKAVPEAPKGGEAEDLVGKPYSQDASRSPQSLSDTGYSSDGISSSQSEITGVVQQEVEQLDSAGVTGPHPPSPSEIHKVGSSMRPLLQAQGLAPSERSKPLSSGTGEEQKQRPHSLSITPEAFDSDEELEDILEEDEDSAEWRRRREQQDTAESSDDFGSQLRHDYVEDSSEGGLSPLPPQPPARAAELTDEDFMRRQILEMSAEEDNLEEDDTATSGRGLAKHGTQKGGPRPRPEPSQEPAALPKRRLPHNATTGYEELLPEGGSAEATDGSGTLQGGLRRFKTIELNSTGSYGHELDLGQGPDPSLDREPELEMESLTGSPEDRSRGEHSSTLPASTPSYTSGTSPTSLSSLEEDSDSSPSRRQRLEEAKQQRKARHRSHGPLLPTIEDSSEEEELREEEELLREQEKMREVEQQRIRSTARKTRRDKEELRAQRRRERSKTPPSNLSPIEDASPTEELRQAAEMEELHRSSCSEYSPSPSLDSEAEALDGGPSRLYKSGSEYNLPTFMSLYSPTETPSGSSTTPSSGRPLKSAEEAYEEMMRKAELLQRQQGQAAGARGPHGGPSQPTGPRGLGSFEYQDTTDREYGQAAQPAAEGTPASLGAAVYEEILQTSQSIVRMRQASSRDLAFAEDKKKEKQFLNAESAYMDPMKQNGGPLTPGTSPTQLAAPVSFSTPTSSDSSGGRVIPDVRVTQHFAKETQDPLKLHSSPASPSSASKEIGMPFSQGPGTPATTAVAPCPAGLPRGYMTPASPAGSERSPSPSSTAHSYGHSPTTANYGSQTEDLPQAPSGLAAAGRAAREKPLSASDGEGGTPQPSRAYSYFASSSPPLSPSSPSESPTFSPGKMGPRATAEFSTQTPSPAPASDMPRSPGAPTPSPMVAQGTQTPHRPSTPRLVWQESSQEAPFMVITLASDASSQTRMVHASASTSPLCSPTETQPTTHGYSQTTPPSVSQLPPEPPGPPGFPRVPSAGADGPLALYGWGALPAENISLCRISSVPGTSRVEPGPRTPGTAVVDLRTAVKPTPIILTDQGMDLTSLAVEARKYGLALDPIPGRQSTAVQPLVINLNAQEHTFLATATTVSITMASSVFMAQQKQPVVYGDPYQSRLDFGQGGGSPVCLAQVKQVEQAVQTAPYRSGPRGRPREAKFARYNLPNQVAPLARRDVLITQMGTAQSIGLKPGPVPEPGAEPHRATPAELRSHALPGARKPHTVVVQMGEGTAGTVTTLLPEEPAGALDLTGMRPESQLACCDMVYKLPFGSSCTGTFHPAPSVPEKSMADAAPPGQSSSPFYGPRDPEPPEPPTYRAQGVVGPGPHEEQRPYPQGLPGRLYSSMSDTNLAEAGLNYHAQRIGQLFQGPGRDSAMDLSSLKHSYSLGFADGRYLGQGLQYGSVTDLRHPTDLLAHPLPMRRYSSVSNIYSDHRYGPRGDAVGFQEASLAQYSATTAREISRMCAALNSMDQYGGRHGSGGGGPDLVQYQPQHGPGLSAPQSLVPLRPGLLGNPTFPEGHPSPGNLAQYGPAAGQGTAVRQLLPSTATVRAADGMIYSTINTPIAATLPITTQPASVLRPMVRGGMYRPYASGGITAVPLTSLTRVPMIAPRVPLGPTGLYRYPAPSRFPIASSVPPAEGPVYLGKPAAAKAPGAGGPSRPEMPVGAAREEPLPTTTPAAIKEAAGAPAPAPLAGQKPPADAAPGGGSGALSRPGFEKEEASQEERQRKQQEQLLQLERERVELEKLRQLRLQEELERERVELQRHREEEQLLVQRELQELQTIKHHVLQQQQEERQAQFALQREQLAQQRLQLEQIQQLQQQLQQQLEEQKQRQKAPFPAACEAPGRGPPLAAAELAQNGQYWPPLTHAAFIAMAGPEGLGQPREPVLHRGLPSSASDMSLQTEEQWEASRSGIKKRHSMPRLRDACELESGTEPCVVRRIADSSVQTDDEDGESRYLLSRRRRARRSADCSVQTDDEDSAEWEQPVRRRRSRLPRHSDSGSDSKHDATASSSSAAATVRAMSSVGIQTISDCSVQTEPDQLPRVSPAIHITAATDPKVEIVRYISAPEKTGRGESLACQTEPDGQAQGVAGPQLVGPTAISPYLPGIQIVTPGPLGRFEKKKPDPLEIGYQAHLPPESLSQLVSRQPPKSPQVLYSPVSPLSPHRLLDTSFASSERLNKAHVSPQKHFTADSALRQQTLPRPMKTLQRSLSDPKPLSPTAEESAKERFSLYQHQGGLGSQVSALPPNSLVRKVKRTLPSPPPEEAHLPLAGQASPQLYAASLLQRGLTGPTTVPATKASLLRELDRDLRLVEHESTKLRKKQAELDEEEKEIDAKLKYLELGITQRKESLAKDRGGRDYPPLRGLGEHRDYLSDSELNQLRLQGCTTPAGQFVDFPATAAAPATPSGPTAFQQPRFQPPAPQYSAGSGGPTQNGFPAHQAPTYPGPSTYPAPAFPPGASYPAEPGLPNQQAFRPTGHYAGQTPMPTTQSTLFPVPADSRAPLQKPRQTSLADLEQKVPTNYEVIASPVVPMSSAPSETSYSGPAVSSGYEQGKVPEVPRAGDRGSVSQSPAPTYPSDSHYTSLEQNVPRNYVMIDDISELTKDSTSTAPDSQRLEPLGPGSSGRPGKEPGEPGVLDGPTLPCCYARGEEESEEDSYDPRGKGGHLRSMESNGRPASTHYYGDSDYRHGARVEKYGPGPMGPKHPSKSLAPAAISSKRSKHRKQGMEQKISKFSPIEEAKDVESDLASYPPPAVSSSLVSRGRKFQDEITYGLKKNVYEQQKYYGMSSRDAVEDDRIYGGSSRSRAPSAYSGEKLSSHDFSGWGKGYEREREAVERLQKAGPKPSSLSMAHSRVRPPMRSQASEEESPVSPLGRPRPAGGPLPPGGDTCPQFCSSHSMPDVQEHVKDGPRAHAYKREEGYILDDSHCVVSDSEAYHLGQEETDWFDKPRDARSDRFRHHGGHAVSSSSQKRGPARHSYHDYDEPPEEGLWPHDEGGPGRHASAKEHRHGDHGRHSGRHTGEEPGRRAAKPHARDLGRHEARPHSQPSSAPAMPKKGQPGYPSSAEYSQPSRASSAYHHASDSKKGSRQAHSGPAALQSKAEPQAQPQLQGRQAAPGPQQSQSPSSRQIPSGAASRQPQTQQQQQGLGLQPPQQALTQARLQQQSQPTTRGSAPAASQPAGKPQPGPSTATGPQPAGPPRAEQTNGSKGTAKAPQQGRAPQAQPAPGPGPAGVKAGARPGGTPGAPAGQPGADGESVFSKILPGGAAEQAGKLTEAVSAFGKKFSSFW

SEQ ID NO: 3305 - protein, 839 aa, Homo sapiens
MSVVGIDLGFLNCYIAVARSGGIETIANEYSDRCTPACISLGSRTRAIGNAAKSQIVTNVRNTIHGFKKLHGRSFDDPIVQTERIRLPYELQKMPNGSAGVKVRYLEEERPFAIEQVTGMLLAKLKETSENALKKPVADCVISIPSFFTDAERRSVMAAAQVAGLNCLRLMNETTAVALAYGIYKQDLPPLDEKPRNVVFIDMGHSAYQVLVCAFNKGKLKVLATTFDPYLGGRNFDEALVDYFCDEFKTKYKINVKENSRALLRLYQECEKLKKLMSANASDLPLNIECFMNDLDVSSKMNRAQFEQLCASLLARVEPPLKAVMEQANLQREDISSIEIVGGATRIPAVKEQITKFFLKDISTTLNADEAVARGCALQCAILSPAFKVREFSITDLVPYSITLRWKTSFEDGSGECEVFCKNHPAPFSKVITFHKKEPFELEAFYTNLHEVPYPDARIGSFTIQNVFPQSDGDSSKVKVKVRVNIHGIFSVASASVIEKQNLEGDHSDAPMETETSFKNENKDNMDKMQVDQEEGHQKCHAEHTPEEEIDHTGAKTKSAVSDKQDRLNQTLKKGKVKSIDLPIQSSLCRQLGQDLLNSYIENEGKMIMQDKLEKERNDAKNAVEEYVYDFRDRLGTVYEKFITPEDLSKLSAVLEDTENWLYEDGEDQPKQVYVDKLQELKKYGQPIQMKYMEHEERPKALNDLGKKIQLVMKVIEAYRNKDERYDHLDPTEMEKVEKCISDAMSWLNSKMNAQNKLSLTQDPVVKVSEIVAKSKELDNFCNPIIYKPKPKAEVPEDKPKANSEHNGPMDGQSGTETKSDSTKDSSQHTKSSGEMEVD

SEQ ID NO: 3306 - protein, 1400 aa, Homo sapiens
MELLPPLPQSFLLLLLLPAKPAAGEDWQCPRTPYAASRDFDVKYVVPSFSAGGLVQAMVTYEGDRNESAVFVAIRNRLHVLGPDLKSVQSLATGPAGDPGCQTCAACGPGPHGPPGDTDTKVLVLDPALPALVSCGSSLQGRCFLHDLEPQGTAVHLAAPACLFSAHHNRPDDCPDCVASPLGTRVTVVEQGQASYFYVASSLDAAVAASFSPRSVSIRRLKADASGFAPGFVALSVLPKHLVSYSIEYVHSFHTGAFVYFLTVQPASVTDDPSALHTRLARLSATEPELGDYRELVLDCRFAPKRRRRGAPEGGQPYPVLRVAHSAPVGAQLATELSIAEGQEVLFGVFVTGKDGGPGVGPNSVVCAFPIDLLDTLIDEGVERCCESPVHPGLRRGLDFFQSPSFCPNPPGLEALSPNTSCRHFPLLVSSSFSRVDLFNGLLGPVQVTALYVTRLDNVTVAHMGTMDGRILQVELVRSLNYLLYVSNFSLGDSGQPVQRDVSRLGDHLLFASGDQVFQVPIQGPGCRHFLTCGRCLRAWHFMGCGWCGNMCGQQKECPGSWQQDHCPPKLTEFHPHSGPLRGSTRLTLCGSNFYLHPSGLVPEGTHQVTVGQSPCRPLPKDSSKLRPVPRKDFVEEFECELEPLGTQAVGPTNVSLTVTNMPPGKHFRVDGTSVLRGFSFMEPVLIAVQPLFGPRAGGTCLTLEGQSLSVGTSRAVLVNGTECLLARVSEGQLLCATPPGATVASVPLSLQVGGAQVPGSWTFQYREDPVVLSISPNCGYINSHITICGQHLTSAWHLVLSFHDGLRAVESRCERQLPEQQLCRLPEYVVRDPQGWVAGNLSARGDGAAGFTLPGFRFLPPPHPPSANLVPLKPEEHAIKFEYIGLGAVADCVGINVTVGGESCQHEFRGDMVVCPLPPSLQLGQDGAPLQVCVDGECHILGRVVRPGPDGVPQSTLLGILLPLLLLVAALATALVFSYWWRRKQLVLPPNLNDLASLDQTAGATPLPILYSGSDYRSGLALPAIDGLDSTTCVHGASFSDSEDESCVPLLRKESIQLRDLDSALLAEVKDVLIPHERVVTHSDRVIGKGHFGVVYHGEYIDQAQNRIQCAIKSLSRITEMQQVEAFLREGLLMRGLNHPNVLALIGIMLPPEGLPHVLLPYMCHGDLLQFIRSPQRNPTVKDLISFGLQVARGMEYLAEQKFVHRDLAARNCMLDESFTVKVADFGLARDILDREYYSVQQHRHARLPVKWMALESLQTYRFTTKSDVWSFGVLLWELLTRGAPPYRHIDPFDLTHFLAQGRRLPQPEYCPDSLYQVMQQCWEADPAVRPTFRVLVGEVEQIVSALLGDHYVQLPATYMNLGPSTSHEMNVRPEQPQFSPMPGNVRRPRPLSEPPRPT

SEQ ID NO: 3307 - protein, 499 aa, Homo sapiens
MCELYSKRDTLGLRKKHIGPSCKVFFASDPIKIVRAQRQYMFDENGEQYLDCINNVAHVGHCHPGVVKAALKQMELLNTNSRFLHDNIVEYAKRLSATLPEKLSVCYFTNSGSEANDLALRLARQFRGHQDVITLDHAYHGHLSSLIEISPYKFQKGKDVKKEFVHVAPTPDTYRGKYREDHADSASAYADEVKKIIEDAHNSGRKIAAFIAESMQSCGGQIIPPAGYFQKVAEYVHGAGGVFIADEVQVGFGRVGKHFWSFQMYGEDFVPDIVTMGKPMGNGHPVACVVTTKEIAEAFSSSGMEYFNTYGGNPVSCAVGLAVLDIIENEDLQGNAKRVGNYLTELLKKQKAKHTLIGDIRGIGLFIGIDLVKDHLKRTPATAEAQHIIYKMKEKRVLLSADGPHRNVLKIKPPMCFTEEDAKFMVDQLDRILTVLEEAMGTKTESVTSENTPCKTKMLKEAHIELLRDSTTDSKENPSRKRNGMCTDTHSLLSKRLKT

SEQ ID NO: 3308 - protein, 875 aa, Homo sapiens
MTLARFVLALMLGALPEVVGFDSVLNDSLHHSHRHSPPAGPHYPYYLPTQQRPPRTRPPPPLPRFPRPPRALPAQRPHALQAGHTPRPHPWGCPAGEPWVSVTDFGAPCLRWAEVPPFLERSPPASWAQLRGQRHNFCRSPDGAGRPWCFYGDARGKVDWGYCDCRHGSVRLRGGKNEFEGTVEVYASGVWGTVCSSHWDDSDASVICHQLQLGGKGIAKQTPFSGLGLIPIYWSNVRCRGDEENILLCEKDIWQGGVCPQKMAAAVTCSFSHGPTFPIIRLAGGSSVHEGRVELYHAGQWGTVCDDQWDDADAEVICRQLGLSGIAKAWHQAYFGEGSGPVMLDEVRCTGNELSIEQCPKSSWGEHNCGHKEDAGVSCTPLTDGVIRLAGGKGSHEGRLEVYYRGQWGTVCDDGWTELNTYVVCRQLGFKYGKQASANHFEESTGPIWLDDVSCSGKETRFLQCSRRQWGRHDCSHREDVSIACYPGGEGHRLSLGFPVRLMDGENKKEGRVEVFINGQWGTICDDGWTDKDAAVICRQLGYKGPARARTMAYFGEGKGPIHVDNVKCTGNERSLADCIKQDIGRHNCRHSEDAGVICDYFGKKASGNSNKESLSSVCGLRLLHRRQKRIIGGKNSLRGGWPWQVSLRLKSSHGDGRLLCGATLLSSCWVLTAAHCFKRYGNSTRSYAVRVGDYHTLVPEEFEEEIGVQQIVIHREYRPDRSDYDIALVRLQGPEEQCARFSSHVLPACLPLWRERPQKTASNCYITGWGDTGRAYSRTLQQAAIPLLPKRFCEERYKGRFTGRMLCAGNLHEHKRVDSCQGDSGGPLMCERPGESWVVYGVTSWGYGCGVKDSPGVYTKVSAFVPWIKSVTKL

SEQ ID NO: 3309 - protein, 873 aa, Homo sapiens
MSFIMKLHRHFQRTVILLATFCMVSIIISAYYLYSGYKQENELSETASEVDCGDLQHLPYQLMEVKAMKLFDASRTDPTVLVFVESQYSSLGQDIIMILESSRFQYHIEIAPGKGDLPVLIDKMKGKYILIIYENILKYINMDSWNRSLLDKYCVEYGVGVIGFHKTSEKSVQSFQLKGFPFSIYGNLAVKDCCINPHSPLIRVTKSSKLEKGSLPGTDWTVFQINHSAYQPVIFAKVKTPENLSPSISKGAFYATIIHDLGLHDGIQRVLFGNNLNFWLHKLIFIDAISFLSGKRLTLSLDRYILVDIDDIFVGKEGTRMNTNDVKALLDTQNLLRAQITNFTFNLGFSGKFYHTGTEEEDEGDDCLLGSVDEFWWFPHMWSHMQPHLFHNESSLVEQMILNKKFALEHGIPTDMGYAVAPHHSGVYPVHVQLYEAWKKVWNIKITSTEEYPHLKPARYRRGFIHKNIMVLPRQTCGLFTHTIFYKEYPGGPKELDKSIQGGELFFTVVLNPISIFMTHLSNYGNDRLGLYTFVNLANFVKSWTNLRLQTLPPVQLAHKYFELFPDQKDPLWQNPCDDKRHRDIWSKEKTCDRLPKFLVIGPQKTGTTALYLFLVMHPSILSNSPSPKTFEEVQFFNRNNYHRGIDWYMDFFPVPSNVTTDFLFEKSANYFHSEEAPKRAASLVPKAKIITILIDPSDRAYSWYQHQRSHEDPAALKFSFYEVISAGPRAPSELRALQKRCLVPGWYASHIERWLVYFPPFQLLIIDGQQLRTDPATVMDEVQKFLGVLPHYNYSEALTFDSHKGFWCQLLEEGKTKCLGKSKGRKYPPMDSDSRTFLSSYYRDHNVELSKLLHKLGQPLPSWLRQELQKVR

SEQ ID NO: 3310 - protein, 576 aa, Homo sapiens
MASNNHWFQSSQVPSFAQMLKKNLPVQPATKTITTPTGWSSESYGLSKMASKVTQVTGNFPEPLLSKNLSSISNPVLPPKKIPKEFIMKYKRGEINPVSALHQFAQMQRVQLDLKETVTTGNVMGPYFAFCAVVDGIQYKTGLGQNKKESRSNAAKLALDELLQLDEPEPRILETSGPPPFPAEPVVLSELAYVSKVHYEGRHIQYAKISQIVKERFNQLISNRSEYLKYSSSLAAFIIERAGQHEVVAIGTGEYNYSQDIKPDGRVLHDTHAVVTARRSLLRYFYRQLLLFYSKNPAMMEKSIFCTEPTSNLLTLKQNINICLYMNQLPKGSAQIKSQLRLNPHSISAFEANEELCLHVAVEGKIYLTVYCPKDGVNRISSMSSSDKLTRWEVLGVQGALLSHFIQPVYISSILIGDGNCSDTRGLEIAIKQRVDDALTSKLPMFYLVNRPHISLVPSAYPLQMNLEYKFLSLNWAQGDVSLEIVDGLSGKITESSPFKSGMSMASRLCKAAMLSRFNLLAKEAKKELLEAGTYHAAKCMSASYQEAKCKLKSYLQQHGYGSWIVKSPCIEQFNM

SEQ ID NO: 3311 - protein, 690 aa, Homo sapiens
MFCTKLKDLKITGECPFSLLAPGQVPNESSEEAAGSSESCKATVPICQDIPEKNIQESLPQRKTSRSRVYLHTLAESICKLIFPEFERLNVALQRTLAKHKIKESRKSLEREDFEKTIAEQAVAAGVPVEVIKESLGEEVFKICYEEDENILGVVGGTLKDFLNSFSTLLKQSSHCQEAGKRGRLEDASILCLDKEDDFLHVYYFFPKRTTSLILPGIIKAAAHVLYETEVEVSLMPPCFHNDCSEFVNQPYLLYSVHMKSTKPSLSPSKPQSSLVIPTSLFCKTFPFHFMFDKDMTILQFGNGIRRLMNRRDFQGKPNFEEYFEILTPKINQTFSGIMTMLNMQFVVRVRRWDNSVKKSSRVMDLKGQMIYIVESSAILFLGSPCVDRLEDFTGRGLYLSDIPIHNALRDVVLIGEQARAQDGLKKRLGKLKATLEQAHQALEEEKKKTVDLLCSIFPCEVAQQLWQGQVVQAKKFSNVTMLFSDIVGFTAICSQCSPLQVITMLNALYTRFDQQCGELDVYKVETIGDAYCVAGGLHKESDTHAVQIALMALKMMELSDEVMSPHGEPIKMRIGLHSGSVFAGVVGVKMPRYCLFGNNVTLANKFESCSVPRKINVSPTTYRLLKDCPGFVFTPRSREELPPNFPSEIPGICHFLDAYQQGTNSKPCFQKKDVEDGNANFLGKASGID

SEQ ID NO: 3312 - protein, 329 aa, Homo sapiens
MSVLEENRPFAQQLSNVYFTILSLFCFKLFVKISLAILSHFYIVKGNRKEAARIAAEFYGVTQGQGSWADRSPLHEAASQGRLLALRTLLSQGYNVNAVTLDHVTPLHEACLGDHVACARTLLEAGANVNAITIDGVTPLFNACSQGSPSCAELLLEYGAKAQLESCLPSPTHEAASKGHHECLDILISWGIDVDQEIPHLGTPLYVACMSQQFHCIWKLLYAGADVQKGKYWDTPLHAAAQQSSTEIVNLLLEFGADINAKNTELLRPIDVATSSSMVERILLQHEATPSSLYQLCRLCIRSYIGKPRLHLIPQLQLPTLLKNFLQYR

SEQ ID NO: 3313 - protein, 883 aa, Homo sapiens
MQKIMHISVLLSPVLWGLIFGVSSNSIQIGGLFPRGADQEYSAFRVGMVQFSTSEFRLTPHIDNLEVANSFAVTNAFCSQFSRGVYAIFGFYDKKSVNTITSFCGTLHVSFITPSFPTDGTHPFVIQMRPDLKGALLSLIEYYQWDKFAYLYDSDRGLSTLQAVLDSAAEKKWQVTAINVGNINNDKKDEMYRSLFQDLELKKERRVILDCERDKVNDIVDQVITIGKHVKGYHYIIANLGFTDGDLLKIQFGGANVSGFQIVDYDDSLVSKFIERWSTLEEKEYPGAHTTTIKYTSALTYDAVQVMTEAFRNLRKQRIEISRRGNAGDCLANPAVPWGQGVEIERALKQVQVEGLSGNIKFDQNGKRINYTINIMELKTNGPRKIGYWSEVDKMVVTLTELPSGNDTSGLENKTVVVTTILESPYVMMKKNHEMLEGNERYEGYCVDLAAEIAKHCGFKYKLTIVGDGKYGARDADTKIWNGMVGELVYGKADIAIAPLTITLVREEVIDFSKPFMSLGISIMIKKPQKSKPGVFSFLDPLAYEIWMCIVFAYIGVSVVLFLVSRFSPYEWHTEEFEDGRETQSSESTNEFGIFNSLWFSLGAFMQQGCDISPRSLSGRIVGGVWWFFTLIIISSYTANLAAFLTVERMVSPIESAEDLSKQTEIAYGTLDSGSTKEFFRRSKIAVFDKMWTYMRSAEPSVFVRTTAEGVARVRKSKGKYAYLLESTMNEYIEQRKPCDTMKVGGNLDSKGYGIATPKGSSLRTPVNLAVLKLSEQGVLDKLKNKWWYDKGECGAKDSGSKEKTSALSLSNVAGVFYILVGGLGLAMLVALIEFCYKSRAEAKRMKVAKNAQNINPSSSQNSQNFATYKEGYNVYGIESVKI

SEQ ID NO: 3314 - protein, 519 aa, Homo sapiens
MTCPDKPGQLINWFICSLCVPRVRKLWSSRRPRTRRNLLLGTACAIYLGFLVSQVGRASLQHGQAAEKGPHRSRDTAEPSFPEIPLDGTLAPPESQGNGSTLQPNVVYITLRSKRSKPANIRGTVKPKRRKKHAVASAAPGQEALVGPSLQPQEAAREADAVAPGYAQGANLVKIGERPWRLVRGPGVRAGGPDFLQPSSRESNIRIYSESAPSWLSKDDIRRMRLLADSAVAGLRPVSSRSGARLLVLEGGAPGAVLRCGPSPCGLLKQPLDMSEVFAFHLDRILGLNRTLPSVSRKAEFIQDGRPCPIILWDASLSSASNDTHSSVKLTWGTYQQLLKQKCWQNGRVPKPESGCTEIHHHEWSKMALFDFLLQIYNRLDTNCCGFRPRKEDACVQNGLRPKCDDQGSAALAHIIQRKHDPRHLVFIDNKGFFDRSEDNLNFKLLEGIKEFPASAVSVLKSQHLRQKLLQSLFLDKVYWESQGGRQGIEKLIDVIEHRAKILITYINAHGVKVLPMNE

SEQ ID NO: 3315 - protein, 866 aa, Homo sapiens
MPAVSLPPKENALFKRILRCYEHKQYRNGLKFCKQILSNPKFAEHGETLAMKGLTLNCLGKKEEAYELVRRGLRNDLKSHVCWHVYGLLQRSDKKYDEAIKCYRNALKWDKDNLQILRDLSLLQIQMRDLEGYRETRYQLLQLRPAQRASWIGYAIAYHLLEDYEMAAKILEEFRKTQQTSPDKVDYEYSELLLYQNQVLREAGLYREALEHLCTYEKQICDKLAVEETKGELLLQLCRLEDAADVYRGLQERNPENWAYYKGLEKALKPANMLERLKIYEEAWTKYPRGLVPRRLPLNFLSGEKFKECLDKFLRMNFSKGCPPVFNTLRSLYKDKEKVAIIEELVVGYETSLKSCRLFNPNDDGKEEPPTTLLWVQYYLAQHYDKIGQPSIALEYINTAIESTPTLIELFLVKAKIYKHAGNIKEAARWMDEAQALDTADRFINSKCAKYMLKANLIKEAEEMCSKFTREGTSAVENLNEMQCMWFQTECAQAYKAMNKFGEALKKCHEIERHFIEITDDQFDFHTYCMRKITLRSYVDLLKLEDVLRQHPFYFKAARIAIEIYLKLHDNPLTDENKEHEADTANMSDKELKKLRNKQRRAQKKAQIEEEKKNAEKEKQQRNQKKKKDDDDEEIGGPKEELIPEKLAKVETPLEEAIKFLTPLKNLVKNKIETHLFAFEIYFRKEKFLLMLQSVKRAFAIDSSHPWLHECMIRLFNTAVCESKDLSDTVRTVLKQEMNRLFGATNPKNFNETFLKRNSDSLPHRLSAAKMVYYLDPSSQKRAIELATTLDESLTNRNLQTCMEVLEALYDGSLGDCKEAAEIYRANCHKLFPYALAFMPPGYEEDMKITVNGDSSAEAEELANEI

SEQ ID NO: 3316 - protein, 766 aa, Homo sapiens
MASTRSIELEHFEERDKRPRPGSRRGAPSSSGGSSSSGPKGNGLIPSPAHSAHCSFYRTRTLQALSSEKKAKKARFYRNGDRYFKGLVFAISSDRFRSFDALLIELTRSLSDNVNLPQGVRTIYTIDGSRKVTSLDELLEGESYVCASNEPFRKVDYTKNINPNWSVNIKGGTSRALAAASSVKSEVKESKDFIKPKLVTVIRSGVKPRKAVRILLNKKTAHSFEQVLTDITEAIKLDSGVVKRLCTLDGKQVTCLQDFFGDDDVFIACGPEKFRYAQDDFVLDHSECRVLKSSYSRSSAVKYSGSKSPGPSRRSKSPASVNGTPSSQLSTPKSTKSSSSSPTSPGSFRGLKQISAHGRSSSNVNGGPELDRCISPEGVNGNRCSESSTLLEKYKIGKVIGDGNFAVVKECIDRSTGKEFALKIIDKAKCCGKEHLIENEVSILRRVKHPNIIMLVEEMETATELFLVMELVKGGDLFDAITSSTKYTERDGSAMVYNLANALRYLHGLSIVHRDIKPENLLVCEYPDGTKSLKLGDFGLATVVEGPLYTVCGTPTYVAPEIIAETGYGLKVDIWAAGVITYILLCGFPPFRSENNLQEDLFDQILAGKLEFPAPYWDNITDSAKELISQMLQVNVEARCTAGQILSHPWVSDDASQENNMQAEVTGKLKQHFNNALPKQNSTTTGVSVIMNTALDKEGQIFCSKHCQDSGRPGMEPISPVPPSVEEIPVPGEAVPAPTPPESPTPHPPPAAPGGERAGTWRRHRD

SEQ ID NO: 3317 - protein, 589 aa, Homo sapiens
MSKPGKPTLNHGLVPVDLKSAKEPLPHQTVMKIFSISIIAQGLPFCRRRMKRKLDHGSEVRSFSLGKKPCKVSEYTSTTGLVPCSATPTTFGDLRAANGQGQQRRRITSVQPPTGLQEWLKMFQSWSGPEKLLALDELIDSCEPTQVKHMMQVIEPQFQRDFISLLPKELALYVLSFLEPKDLLQAAQTCRYWRILAEDNLLWREKCKEEGIDEPLHIKRRKVIKPGFIHSPWKSAYIRQHRIDTNWRRGELKSPKVLKGHDDHVITCLQFCGNRIVSGSDDNTLKVWSAVTGKCLRTLVGHTGGVWSSQMRDNIIISGSTDRTLKVWNAETGECIHTLYGHTSTVRCMHLHEKRVVSGSRDATLRVWDIETGQCLHVLMGHVAAVRCVQYDGRRVVSGAYDFMVKVWDPETETCLHTLQGHTNRVYSLQFDGIHVVSGSLDTSIRVWDVETGNCIHTLTGHQSLTSGMELKDNILVSGNADSTVKIWDIKTGQCLQTLQGPNKHQSAVTCLQFNKNFVITSSDDGTVKLWDLKTGEFIRNLVTLESGGSGGVVWRIRASNTKLVCAVGSRNGTEETKLLVLDFDVDMK

SEQ ID NO: 3318 - protein, 373 aa, Homo sapiens
MAQESPKNSAAEIPVTSNGEVDDSREHSFNRDLKHSLPSGLGLSETQITSHGFDNTKEGVIEAGAFQGSPAPPLPSVMSPSRVAASRLAQQGSDLIVPAGGQRTQTKSGPVILADEIKNPAMEKLELVRKWSLNTYKCTRQIISEKLGRGSRTVDLELEAQIDILRDNKKKYENILKLAQTLSTQLFQMVHTQRQLGDAFADLSLKSLELHEEFGYNADTQKLLAKNGETLLGAINFFIASVNTLVNKTIEDTLMTVKQYESARIEYDAYRTDLEELNLGPRDANTLPKIEQSQHLFQAHKEKYDKMRNDVSVKLKFLEENKVKVLHNQLVLFHNAIAAYFAGNQKQLEQTLKQFHIKLKTPGVDAPSWLEEQ

SEQ ID NO: 3319 - protein, 2266 aa, Homo sapiens
MMPGETHSAAPGTAADLSRCQGCASLQQNLNEYVEALITLKQKIINTDNLLTEYQKKCDELQFARRENSNLHHQVEEMLQKISPLQKCQEELGSLKAELEEKKSSLKLYQDTHQEYARVKEECLKSDAQKKKLEAKVKKLQEAAVKQTQDFKQLRNEKKILEKEFKKTQERLDEFSKQKNEKELRHIGTQISSDSYGSIDKRKVKLLLKELWLCVNTTHRLPGEGSRCVPEKPAKAITSSRVPGEDGTLPPTQGSPLRTSNVQTCLTKLSMEIKEDFLCQNVEKQSSSGTNCSSDHVFNENGNLEVLVQSHRDGGSTEFVDHDHFFDEDLQAAIDFFKLPPPLLSPVPSPPPMSSPHPGSLPSSFAPETYFGEYTDSSDNDSVQLRNSAECVSEDDTTESQNYFGSLRKNKGSGTWEEKPKSHEAIQALNTWEVNKVTTSGLETFTATLRESSATHSLVGEKHWTTASRSMSDRKRDILHETKTQMEVREMDKSVQTEKTIHKLTRGLCIERLSASPAQEKEAAPGKSELCSSPLGKRPLNELMESEGKTVLSKMMGSPKSEFTKWTRINEITSEPDRITVSGHFHRLSRELEKEKEDTQGFTLGESPESEDDDSGDGMDVAGLDIETSFSSSSTLVALSVGSNPQSSSGLDCGNDTDITTKVFSTEPHHSEHKLQTKTLNTLHLQSEPPECSIGGNNLENSLCALSPELGASNFNDQKSSGIEYTKVVKGLTKIHSLPRSVFMKATKDGQCESQDPRIELTLNKPDFTSLIGSQAALIKSGLGFVKSTSWHHSDLLRKGGEESLRAKSEHEQKTSHQLQKAMPFLQNRGPTPKPDLLRENNNPVEFKTTASVLPNQVSVITKQTRPEKVQSAKLEHLRPHRVEPTLVTENSGNKTGMSTVAKCDGERDDTTQNITEVAAVKSISPEVSASRRKLDFNSPGGSSPVENSDCSTNSRLSFSPENILIQNQDIVREAAVQGDGQKQRQPQATDLDSSGTHGSEMLPATEVTVSGGFSVEETSCGDTGRSGGEALAVANDSTSTPQNANGLWKLKSTTPGGALPECFGTTDTTFSSAFCRKHGETQDTSQSSLPGTLHCYTGIREGGDDTEVESEAFSCSEGSEQQDAPDDSQKNLGDTDAAVAEVRPSLEVGYLTSALQDFNISTFSELDRLSTSEVVMFLESCQLGDYSSGDSVSECSSKGTLSKEMNKELKASEIGEKYRKQPCEEETLGTCEEWIESEEDDYSLKNTSQLTQCSLETLSEVLTKIRQELQTNSEDCNGKDTGSLLLLNVNNNMTTENLKEKSPFRETTGSSSHASEPTPQAAALDTEGSSPISGMPQNENPQSRPEARSDAGRQTDGGEEDLPEPVEPSALCSDSVMEPSIEQSSNCEAETTFQCQIATVTSEVINVLINKDQNLVIEKGDNWTIISGVAVLPHVDQVTLCDIPGDIPISQDQGELEAGCIPVTSAEKSPEASHTGPAFQEAPCGNNLSCPQEDVSSSGQSTNFDKSRLRNRPVKPSIWISSQIYDQNFETQIVASDHTYYNSKLEPSGKNKNRSKISNKDQSNKPVKTSASSRVETHQSEVAQSFSGEKANTKTQRSQTQTILANADTSTPTDCSPDTLSKIRQEVGPPLPPLLAPLIATPPRTSQPLSPLISSSSPSSPASPVGQVSPFRETPVPPAMSPWPEDPRRASPPDPSPSPSAASASERVVPSPLQFCAATPKHALPVPGRLPPCASGHAAVGGPQENSVKILDTMYPELSARARTLNILKGNIQLTRGPPADCKNLPGPASAMIGFKTITSAATAFVKTGSSSGGDCNQDKSRDLGTQQDSSGKRTLSTSTLRSAKRLRLDTGSPEPETRGVTAEGIHKNLPGNLPPAEVATTNEERSCSSPAVSAVSQLPLSPKETVESHDKAIANALKKIAEFSFDLLPVIRSHVYVGNISKKPVMRDQEKEVVYEFSTTKKHLAECLLHSILSELKIQKISMDHNYIHALCRVYVGICRQLGDLERARLFCYSLLKEDFPESEKLTLFIANMWHDIFLSQSVINKAMQLVARQRAKGEVLNCLRAFLNWEKNAPVDVGFMVSKLLLTIQLCPKTEFQPSEKFGEDLSDNTWEYIFAIDLLCCHQKWIWTHDNIISKELWPVMDKWIKYRKGHANIAYTPDIIIASILRLIGRLGQLGLKEGFPSAVKNISSVIGMFIQHAHDEDIPWGIQLAAVYALCDLSPSNPAEISKILEAWRREASKSVPSAIVSCLEEVSALSTEELG

SEQ ID NO: 3320 - protein, 700 aa, Homo sapiens
MLKMLSFKLLLLAVALGFFEGDAKFGERNEGSGARRRRCLNGNPPKRLKRRDRRMMSQLELLSGGEMLCGGFYPRLSCCLRSDSPGLGRLENKIFSVTNNTECGKLLEEIKCALCSPHSQSLFHSPEREVLERDLVLPLLCKDYCKEFFYTCRGHIPGFLQTTADEFCFYYARKDGGLCFPDFPRKQVRGPASNYLDQMEEYDKVEEISRKHKHNCFCIQEVVSGLRQPVGALHSGDGSQRLFILEKEGYVKILTPEGEIFKEPYLDIHKLVQSGIKGGDERGLLSLAFHPNYKKNGKLYVSYTTNQERWAIGPHDHILRVVEYTVSRKNPHQVDLRTARVFLEVAELHRKHLGGQLLFGPDGFLYIILGDGMITLDDMEEMDGLSDFTGSVLRLDVDTDMCNVPYSIPRSNPHFNSTNQPPEVFAHGLHDPGRCAVDRHPTDININLTILCSDSNGKNRSSARILQIIKGKDYESEPSLLEFKPFSNGPLVGGFVYRGCQSERLYGSYVFGDRNGNFLTLQQSPVTKQWQEKPLCLGTSGSCRGYFSGHILGFGEDELGEVYILSSSKSMTQTHNGKLYKIVDPKRPLMPEECRATVQPAQTLTSECSRLCRNGYCTPTGKCCCSPGWEGDFCRTAKCEPACRHGGVCVRPNKCLCKKGYLGPQCEQVDRNIRRVTRAGILDQIIDMTSYLLDLTSYIV

SEQ ID NO: 3321 - protein, 599 aa, Homo sapiens
MADKLTRIAIVNHDKCKPKKCRQECKKSCPVVRMGKLCIEVTPQSKIAWISETLCIGCGICIKKCPFGALSIVNLPSNLEKETTHRYCANAFKLHRLPIPRPGEVLGLVGTNGIGKSTALKILAGKQKPNLGKYDDPPDWQEILTYFRGSELQNYFTKILEDDLKAIIKPQYVDQIPKAAKGTVGSILDRKDETKTQAIVCQQLDLTHLKERNVEDLSGGELQRFACAVVCIQKADIFMFDEPSSYLDVKQRLKAAITIRSLINPDRYIIVVEHDLSVLDYLSDFICCLYGVPSAYGVVTMPFSVREGINIFLDGYVPTENLRFRDASLVFKVAETANEEEVKKMCMYKYPGMKKKMGEFELAIVAGEFTDSEIMVMLGENGTGKTTFIRMLAGRLKPDEGGEVPVLNVSYKPQKISPKSTGSVRQLLHEKIRDAYTHPQFVTDVMKPLQIENIIDQEVQTLSGGELQRVALALCLGKPADVYLIDEPSAYLDSEQRLMAARVVKRFILHAKKTAFVVEHDFIMATYLADRVIVFDGVPSKNTVANSPQTLLAGMNKFLSQLEITFRRDPNNYRPRINKLNSIKDVEQKKSGNYFFLDD

SEQ ID NO: 3322 - protein, 438 aa, Homo sapiens
MPCTCTWRNWRQWIRPLVAVIYLVSIVVAVPLCVWELQKLEVGIHTKAWFIAGIFLLLTIPISLWVILQHLVHYTQPELQKPIIRILWMVPIYSLDSWIALKYPGIAIYVDTCRECYEAYVIYNFMGFLTNYLTNRYPNLVLILEAKDQQKHFPPLCCCPPWAMGEVLLFRCKLGVLQYTVVRPFTTIVALICELLGIYDEGNFSFSNAWTYLVIINNMSQLFAMYCLLLFYKVLKEELSPIQPVGKFLCVKLVVFVSFWQAVVIALLVKVGVISEKHTWEWQTVEAVATGLQDFIICIEMFLAAIAHHYTFSYKPYVQEAEEGSCFDSFLAMWDVSDIRDDISEQVRHVGRTVRGHPRKKLFPEDQDQNEHTSLLSSSSQDAISIASSMPPSPMGHYQGFGHTVTPQTTPTTAKISDEILSDTIGEKKEPSDKSVDS

SEQ ID NO: 3323 - protein, 530 aa, Homo sapiens
MGSNSGQAGRHIYKSLADDGPFDSVEPPKRPTSRLIMHSMAMFGREFCYAVEAAYVTPVLLSVGLPSSLYSIVWFLSPILGFLLQPVVGSASDHCRSRWGRRRPYILTLGVMMLVGMALYLNGATVVAALIANPRRKLVWAISVTMIGVVLFDFAADFIDGPIKAYLFDVCSHQDKEKGLHYHALFTGFGGALGYLLGAIDWAHLELGRLLGTEFQVMFFFSALVLTLCFTVHLCSISEAPLTEVAKGIPPQQTPQDPPLSSDGMYEYGSIEKVKNGYVNPELAMQGAKNKNHAEQTRRAMTLKSLLRALVNMPPHYRYLCISHLIGWTAFLSNMLFFTDFMGQIVYRGDPYSAHNSTEFLIYERGVEVGCWGLCINSVFSSLYSYFQKVLVSYIGLKGLYFTGYLLFGLGTGFIGLFPNVYSTLVLCSLFGVMSSTLYTVPFNLITEYHREEEKERQQAPGGDPDNSVRGKGMDCATLTCMVQLAQILVGGGLGFLVNTAGTVVVVVITASAVALIGCCFVALFVRYVD

SEQ ID NO: 3324 - protein, 487 aa, Homo sapiens
MGVIGIQLVVTMVMASVMQKIIPHYSLARWLLCNGSLRWYQHPTEEELRILAGKQQKGKTKKDRKYNGHIESKPLTIPKDIDLHLETKSVTEVDTLALHYFPEYQWLVDFTVAATVVYLVTEVYYNFMKPTQEMNISLVWCLLVLSFAIKVLFSLTTHYFKVEDGGERSVCVTFGFFFFVKAMAVLIVTENYLEFGLETGFTNFSDSAMQFLEKQGLESQSPVSKLTFKFFLAIFCSFIGAFLTFPGLRLAQMHLDALNLATEKITQTLLHINFLAPLFMVLLWVKPITKDYIMNPPLGKESIPLMTEATFDTLRLWLIILLCALRLAMMRSHLQAYLNLAQKCVDQMKKEAGRISTVELQKMVARVFYYLCVIALQYVAPLVMLLHTTLLLKTLGNHSWGIYPESISTLPVDNSLLSNSVYSELPSAEGKMKVTVTQITVALSSLKNIFTPLLFRGLLSFLTWWIAACLFSTSLFGLFYHQYLTVA

SEQ ID NO: 3325 - protein, 695 aa, Homo sapiens
MSGAALGLEIVFVFFLALFLLHRYGDFKKQHRLVIIGTLLAWYLCFLIVFILPLDVSTTIYNRCKHAAANSSPPENSNITGLYATANPVPSQHPCFKPWSYIPDGIMPIFWRVVYWTSQFLTWILLPFMQSYARSGGFSITGKIKTALIENAIYYGTYLLIFGAFLIYVAVNPHLHLEWNQLQTIGIAAANTWGLFLLVLLLGYGLVEIPRSYWNGAKRGYLLMKTYFKAAKLMTEKADAEENLEDAMEEVRKVNESIKYNHPLRKCVDTILKKCPTEYQEKMGRNMDDYEDFDEKHSIYPSEKSLVKLHKQVIYSVQRHRRTQVQWQILLEQAFYLEDVAKNETSATHQFVHTFQSPEPENRFIQYFYNPTFEWYWECLLRPWFYKILAVVLSIFSVIVVWSECTFFSTTPVLSLFAVFIQLAEKTYNYIYIEIACFLSIFFLSICVYSTVFRIRVFNYYYLASHHQTDAYSLLFSGMLFCRLTPPLCLNFLGLTHMDSSISHKNTQPTAYTSIMGSMKVLSFIADGFYIYYPMLVVILCIATYFSLGTRCLNLLGFQQFMGDDDMTSDLVNEGKELIRKEKRKRQRQEEGENRRREWKERYGHNREDSTRNRNIHTDPKESNFSDVNTNRSAFKYTRANNRTERDRIELLQDAEPLDFNAETFTDDPLESESGRYQPGGRYLSMSRSDIFNDV

SEQ ID NO: 3326 - protein, 465 aa, Homo sapiens
MTTIPRKGSSHLPGSLHTCKLKLQEDRRQQEKSVIAQPIFVFEKGEQTFKRPAEDTLYEAAEPECNGFPTKRVRSSSFTFHITDSQSQGVRKNNVFMTSALVQSSVDIKSAEQGPVKHSKHVIRPAILQLPQARSCAKVRKTFGHKALESCKTKEKTNNKISEGNSYLLSENLSRARISVQLSTNQDFLGATSVGCQPNEDKCSFKSCSSNFVFGENMVERVLGTQKLTQPQLENDSYAKEKPFKSIPKFPVNFLSSRTDSIKNTSLIESAAAFSSQPSRKCLLEKIDVITGEETEHNVLKINCKLFIFNKTTQSWIERGRGTLRLNDTASTDCGTLQSRLIMRNQGSLRLILNSKLWAQMKIQRANHKNVRITATDLEDYSIKIFLIQASAQDTAYLYAAIHHRLVALQSFNKQRDVNQAESLSETAQQLNCESCDENEDDFIQVTKNGSDPSSWTHRQSVACS

SEQ ID NO: 3327 - protein, 416 aa, Homo sapiens
MKRSKELITKNHSQEETSILRCWKCRKCIASSGCFMEYLENQVIKDKDDSVDAQNICHVWHMNVEALPEWISCLIQKAQWTVGKLNCPFCGARLGGFNFVSTPKCSCGQLAAVHLSKSRTDYQPTQAGRLMRPSVKYLSHPRVQSGCDKEALLTGGGSENRNHRLLNMARNNNDPGRLTEALCLEVRPTYFEMKNEKLLSKASEPKYQLFVPQLVTGRCATRAFHRKSHSLDLNISEKLTLLPTLYEIHSKTTAYSRLNETQPIDLSGLPLQSSKNSYSFQNPSSFDPSMLLQRFSVAPHETQTQRGGEFQCGLEAASVYSDHTNTNNLTFLMDLPSAGRSMPEASDQEEHLSPLDFLHSANFSLGSINQRLNKRERSKLKNLRRKQRRRERWLQKQGKYSGVGLLDHMVSIYLLI

SEQ ID NO: 3328 - protein, 494 aa, Homo sapiens
MVLLAGTGPEGGGARCMTPPPPSPPRGAQVEEDPADYEEFEDFSSLPDTRSIASDDSFYPFEDEEEHGVESAESVPEGVPESVPETATLLRAACANNVGLLRTLVRRGVSVEEAQETDRNGRTGLIVACYHGFVDTVVALAECPHVDVNWQDSEGNTALITAAQAGHAIITNYLLNYFPGLDLERRNAFGFTALMKAAMQGRTDCIRALMLAGADVHARDPRRGMSPQEWATYTGRVDAVRLMQRLLERPCPEQFWEKYRPELPPPPEAARKPAGSKNCLQRLTDCVLSVLTPRSVRGPEDGGVLDHMVRMTTSLYSPAVAIVCQTVCPESPPSVGKRRLAVQEILAARAARGPQAQEEDEVGGAGQRGRTGQEDADSREGSPRAGLPPALGSRGPAAPAPRKASLLPLQRLRRRSVRPGVVVPRVRVSKAPAPTFQPERPARKGSTKDSGHLQIPKWRYKEAKEEKRKAEEAEKKRQAEAQKERRTAPWKKRT

SEQ ID NO: 3329 - protein, 445 aa, Homo sapiens
MMEESGIETTPPGTPPPNPAGLAATAMSSTPVPLAATSSFSSPNVSSMESFPPLAYSTPQPPLPPVRPSAPLPFVPPPAVPSVPPLVTSMPPPVSPSTAAAFGNPPVSHFPPSTSAPNTLLPAPPSGPPISGFSVGSTYDITRGHAGRAPQTPLMPSFSAPSGTGLLPTPITQQASLTSLAQGTGTTSAITFPEEQEDPRITRGQDEASAGGIWGFIKGVAGNPMVKSVLDKTKHSVESMITTLDPGMAPYIKSGGELDIVVTSNKEVKVAAVRDAFQEVFGLAVVVGEAGQSNIAPQPVGYAAGLKGAQERIDSLRRTGVIHEKQTAVSVENFIAELLPDKWFDIGCLVVEDPVHGIHLETFTQATPVPLEFVQQAQSLTPQDYNLRWSGLLVTVGEVLEKSLLNVSRTDWHMAFTGMSRRQMIYSAARAIAGMYKQRLPPRTV

SEQ ID NO: 3330 - protein, 397 aa, Homo sapiens
MRSPSAAWLLGAAILLAASLSCSGTIQGTSRSSKGRSLIGKVDGTSHVTGKGVTVETVFSVDEFSASVLTGKLTTVFLPIVYTIVFVVGLPSNGMALWVFLFRTKKKHPAVIYMANLALADLLSVIWFPLKIAYHIHGNNWIYGEALCNVLIGFFYGNMYCSILFMTCLSVQRYWVIVNPMGHSRKKANIAIGISLAIWLLILLVTIPLYVVKQTIFIPALNITTCHDVLPEQLLVGDMFNYFLSLAIGVFLFPAFLTASAYVLMIRMLRSSAMDENSEKKRKRAIKLIVTVLAMYLICFTPSNLLLVVHYFLIKSQGQSHVYALYIVALCLSTLNSCIDPFVYYFVSHDFRDHAKNALLCRSVRTVKQMQVSLTSKKHSRKSSSYSSSSTTVKTSY

SEQ ID NO: 3331 - protein, 459 aa, Homo sapiens
MLRWLIGGGREPQGLAEKSPLQTIGEEQTQNPYTELLVLKAHHDIVRFLVQLDDYRFASAGDDGIVVVWNAQTGEKLLELNGHTQKITAIITFPSLESCEEKNQLILTASADRTVIVWDGDTTRQVQRISCFQSTVKCLTVLQRLDVWLSGGNDLCVWNRKLDLLCKTSHLSDTGISALVEIPKNCVVAAVGKELIIFRLVAPTEGSLEWDILEVKRLLDHQDNILSLINVNDLSFVTGSHVGELIIWDALDWTMQAYERNFWDPSPQLDTQQEIKLCQKSNDISIHHFTCDEENVFAAVGRGLYVYSLQMKRVIACQKTAHDSNVLHVARLPNRQLISCSEDGSVRIWELREKQQLAAEPVPTGFFNMWGFGRVSKQASQPVKKQQENATSCSLELIGDLIGHSSSVEMFLYFEDHGLVTCSADHLIILWKNGERESGLRSLRLFQKLEENGDLYLAV

SEQ ID NO: 3332 - protein, 894 aa, Homo sapiens
MSPEKSQEESPEEDTERTERKPMVKDAFKDISIYFTKEEWAEMGDWEKTRYRNVKRNYNALITIGLRATRPAFMCHRRQAIKLQVDDTEDSDEEWTPRQQVKPPWMALRVEQRKHQKGMPKASFSNESSLKELSRTANLLNASGSEQAQKPVSPSGEASTSGQHSRLKLELRKKETERKMYSLRERKGHAYKEVSEPQDDDYLYCEMCQNFFIDSCAAHGPPTFVKDSAVDKGHPNRSALSLPPGLRIGPSGIPQAGLGVWNEASDLPLGLHFGPYEGRITEDEEAANNGYSWLITKGRNCYEYVDGKDKSWANWMRYVNCARDDEEQNLVAFQYHRQIFYRTCRVIRPGCELLVWYGDEYGQELGIKWGSKWKKELMAGREPKPEIHPCPSCCLAFSSQKFLSQHVERNHSSQNFPGPSARKLLQPENPCPGDQNQEQQYPDPHSRNDKTKGQEIKERSKLLNKRTWQREISRAFSSPPKGQMGSCRVGKRIMEEESRTGQKVNPGNTGKLFVGVGISRIAKVKYGECGQGFSVKSDVITHQRTHTGEKLYVCRECGRGFSWKSHLLIHQRIHTGEKPYVCRECGRGFSWQSVLLTHQRTHTGEKPYVCRECGRGFSRQSVLLTHQRRHTGEKPYVCRECGRGFSRQSVLLTHQRRHTGEKPYVCRECGRGFSWQSVLLTHQRTHTGEKPYVCRECGRGFSWQSVLLTHQRTHTGEKPYVCRECGRGFSNKSHLLRHQRTHTGEKPYVCRECGRGFRDKSHLLRHQRTHTGEKPYVCRECGRGFRDKSNLLSHQRTHTGEKPYVCRECGRGFSNKSHLLRHQRTHTGEKPYVCRECGRGFRNKSHLLRHQRTHTGEKPYVCRECGRGFSDRSSLCYHQRTHTGEKPYVCREDE

SEQ ID NO: 3333 - protein, 943 aa, Homo sapiens
MGPRKKSVKTCIMNNEIPEEMTADETKDYMNQLSHEVLCHIFRYLPLQDIMCMECLSRKLKEAVTLYLRVVRVVDLCAGRWWEYMPSGFTDASFLTLLKKMPDVEQLYGLHPRYLERRRVRGHEAFSIPGVLEALQACPNLVGVETSHLELVESIWTYMPHVHILGKFRNRNGAFPIPPENKLKIPIGAKIQTLHLVGVNVPEIPCIPMLRHLYMKWVRLTKPQPFKDFLCISLRTFVMRNCAGPTNSLKYVPLVTGLASARNLEHLEMVRVPFLGGLIQHVVEDSWRSGGFRNLHTIVLGACKNALEVDLGYLIITAARRLHEVRIQPSLTKDGVFSALKMAELEFPQFETLHLGYVDEFLLQSRMANADLVKYGLADVVENPGIITDIGMKAVNEVFSCIKYLAIYNCPHLHNPYNWISDHSRWTRLVDINLVRCHALKLDSFGQFIELLPSLEFISLDQMFREPPKGCARVGLSAGTGIGVSSALVSNQNSNNDDNNAQNNNANIHDNNHHHPDDSDEENDFRQDLQPGEQQFAADALNEMEDIVQEDGEVVAESGNNTPAHSQAIIPVDVDEEQAGPSGLQRVVKPTSITVHDSESDDEEDSLELQEVWIPKNGTRRYSEREEKTGESVQSRELSEVAKTKPRHAMKRKRTADKSTSTSDPVIEDDHVQVLVLKSKNLVGVTMTNCGITDLVLKDCPKMMFIHATRCRVLKHLKVENAPIVNRFDYAQCKKLNMDQVLDQILRMPPERNRIIYLRPMQQVDTLTLEQKLFSGPYPYHICIIHEFSNPPNVRNKVRIRSWMDTIANINQELIKYEFFPEATRSEEDLKKYPKYPWGREIYTLEGVVDGAPYSMISDFPWLRSLRAAEPNSFARYDFEDDEESTIYAPRRKGQLSADICMETIGEEISEMRQMKKGVFQRVVAIFIHYCDVNGEPVEDDYI

SEQ ID NO: 3334 - protein, 1098 aa, Homo sapiens
MAERGGDGGESERFNPGELRMAQQQALRFRGPAPPPNAVMRGPPPLMRPPPPFGMMRGPPPPPRPPFGRPPFDPNMPPMPPPGGIPPPMGPPHLQRPPFMPPPMSSMPPPPGMMFPPGMPPVTAPGTPALPPTEEIWVENKTPDGKVYYYNARTRESAWTKPDGVKVIQQSELTPMLAAQAQVQAQAQAQAQAQAQAQAQAQAQAQAQAQAQAQAQAQAQAQAQAQAQAQAQAQAQAQAQAQVQAQVQAQVQAQAVGASTPTTSSPAPAVSTSTSSSTPSSTTSTTTTATSVAQTVSTPTTQDQTPSSAVSVATPTVSVSTPAPTATPVQTVPQPHPQTLPPAVPHSVPQPTTAIPAFPPVMVPPFRVPLPGMPIPLPGVAMMQIVSCPYVKTVATTKTGVLPGMAPPIVPMIHPQVAIAASPATLAGATAVSEWTEYKTADGKTYYYNNRTLESTWEKPQELKEKEKLEEKIKEPIKEPSEEPLPMETEEEDPKEEPIKEIKEEPKEEEMTEEEKAAQKAKPVATAPIPGTPWCVVWTGDERVFFYNPTTRLSMWDRPDDLIGRADVDKIIQEPPHKKGMEELKKLRHPTPTMLSIQKWQFSMSAIKEEQELMEEINEDEPVKAKKRKRDDNKDIDSEKEAAMEAEIKAARERAIVPLEARMKQFKDMLLERGVSAFSTWEKELHKIVFDPRYLLLNPKERKQVFDQYVKTRAEEERREKKNKIMQAKEDFKKMMEEAKFNPRATFSEFAAKHAKDSRFKAIEKMKDREALFNEFVAAARKKEKEDSKTRGEKIKSDFFELLSNHHLDSQSRWSKVKDKVESDPRYKAVDSSSMREDLFKQYIEKIAKNLDSEKEKELERQARIEASLREREREVQKARSEQTKEIDREREQHKREEAIQNFKALLSDMVRSSDVSWSDTRRTLRKDHRWESGSLLEREEKEKLFNEHIEALTKKKREHFRQLLDETSAITLTSTWKEVKKIIKEDPRCIKFSSSDRKKQREFEEYIRDKYITAKADFRTLLKETKFITYRSKKLIQESDQHLKDVEKILQNDKRYLVLDCVPEERRKLIVAYVDDLDRRGPPPPPTASEPTRRSTK

SEQ ID NO: 3335 - protein, 768 aa, Homo sapiens
MDRGQVLEQLLPELTGLLSLLDHEYLSDTTLEKKMAVASILQSLQPLPAKEVSYLYVNTADLHSGPSFVESLFEEFDCDLSDLRDMPEDDGEPSKGASPELAKSPRLRNAADLPPPLPNKPPPEDYYEEALPLGPGKSPEYISSHNGCSPSHSIVDGYYEDADSSYPATRVNGELKSSYNDSDAMSSSYESYDEEEEEGKSPQPRHQWPSEEASMHLVRECRICAFLLRKKRFGQWAKQLTVIREDQLLCYKSSKDRQPHLRLALDTCSIIYVPKDSRHKRHELRFTQGATEVLVLALQSREQAEEWLKVIREVSKPVGGAEGVEVPRSPVLLCKLDLDKRLSQEKQTSDSDSVGVGDNCSTLGRRETCDHGKGKKSSLAELKGSMSRAAGRKITRIIGFSKKKTLADDLQTSSTEEEVPCCGYLNVLVNQGWKERWCRLKCNTLYFHKDHMDLRTHVNAIALQGCEVAPGFGPRHPFAFRILRNRQEVAILEASCSEDMGRWLGLLLVEMGSRVTPEALHYDYVDVETLTSIVSAGRNSFLYARSCQNQWPEPRVYDDVPYEKMQDEEPERPTGAQVKRHASSCSEKSHRVDPQVKVKRHASSANQYKYGKNRAEEDARRYLVEKEKLEKEKETIRTELIALRQEKRELKEAIRSSPGAKLKALEEAVATLEAQCRAKEERRIDLELKLVAVKERLQQSLAGGPALGLSVSSKPKSGETANKPQNSVPEQPLPVNCVSELRKRSPSIVASNQGRVLQKAKEWEMKKT

SEQ ID NO: 3336 - protein, 515 aa, Homo sapiens
MEWKLERTAPRRVRTEEEMLWESIMRVLSKDLKQKRSQDSANVLDSVNATYSDFKSNFAKRLSAEVPVASSPITTRWQQSQTRALSSDSFGEEQSTTYLPEASGSVLKTPPEKETLTLGSRKEQLKTPSKGISETSNSALHFCKAPHAMDRDWKESVASKGQKCLKQLFVTQNVVQQANGKMQLCEQSECVWKGCKDGVRDESFHLKSSGDINDSILQPEVKIHITGLRNDYYLNILDWSFQNLVAIALGSAVYIWNGENHNGIENIDLSLTCNYISSVSWIKEGTCLAVGTSEGEVQLWDVVTKKRLRNMLGHLSVVGALSWNHFILSSGSRLGRVYHHDVRVAQHHVGTLRHKQAVCALKWSPDGRLLSSGCSDGLLTIWPHDPGASAQGQPLKVITQSTAVKAMDWCPWQSGVLAIGGGMKDGRLHILDINAGKSIQTPSTNSQICSLIWLPKTKEIATGQGTPKNDVTVWTCPTVSRSGHRGRVLHLSLSPDQTRVFSAAADGTASVWNCY

SEQ ID NO: 3337 - protein, 440 aa, Homo sapiens
MAVKLGTLLLALALGLAQPASARRKLLVFLLDGFRSDYISDEALESLPGFKEIVSRGVKVDYLTPDFPSLSYPNYYTLMTGRHCEVHQMIGNYMWDPTTNKSFDIGVNKDSLMPLWWNGSEPLWVTLTKAKRKVYMYYWPGCEVEILGVRPTYCLEYKNVPTDINFANAVSDALDSFKSGRADLAAIYHERIDVEGHHYGPASPQRKDALKAVDTVLKYMTKWIQERGLQDRLNVIIFSDHGMTDIFWMDKVIELNKYISLNDLQQVKDRGPVVSLWPAPGKHSEIYNKLSTVEHMTVYEKEAIPSRFYYKKGKFVSPLTLVADEGWFITENREMLPFWMNSTGRREGWQRGWHGYDNELMDMRGIFLAFGPDFKSNFRAAPIRSVDVYNVMCNVVGITPLPNNGSWSRVMCMLKGRASTAPPVWPSHCALALILLFLLA

SEQ ID NO: 3338 - protein, 641 aa, Homo sapiens
MTEKPEFQSQVYNYAKDNNIKQDSFKEENPMETSVSANTDQLGNEYFRQPPPRSPPLIHCSGEMLKFTEKSLAKSIAKESALNPSQPPSFLCKTAVPSKEIQNYGEIPEMSVSYEKEVTAEGVERPEIVSTWSSAGISWRSEACRENCEMPDWEQSAESLQPVQEDMALNEVLQKLKHTNRKQEVRIQELQCSNLYLEKRVKELQMKITKQQVFIDVINKLKENVEELIEDKYKIILEKNDTKKTLQNLEEVLANTQKHLQESRNDKEMLQLQFKKIKANYVCLQERYMTEMQQKNKSVSQYLEMDKTLSKKEEEVERLQQLKKELEKATASALDLLKREKEAQEQEFLSLQEEFQKLEKENLEERQKLKSRLEKLLTQVRNLQFMSENERTKNIKLQQQINEVKNENAKLKQQVARSEEQNYVPKFETAQLKDQLEEVLKSDITKDTKTTHSNLLPDCSPCEERLNPADIKRASQLASKMHSLLALMVGLLTCQDIINSDAEHFKESEKVSDIMLQKLKSLHLKKKTLDKEVIDCDSDEAKSIRDVPTLLGAKLDKYHSLNEELDFLVTSYEEIIECADQRLAISHSQIAHLEERNKHLEDLIRKPREKARKPRSKSLENHPKSMTMMPALFKENRNDLD

SEQ ID NO: 3339 - protein, 948 aa, Homo sapiens
MVFLPLKWSLATMSFLLSSLLALLTVSTPSWCQSTEASPKRSDGTPFPWNKIRLPEYVIPVHYDLLIHANLTTLTFWGTTKVEITASQPTSTIILHSHHLQISRATLRKGAGERLSEEPLQVLEHPRQEQIALLAPEPLLVGLPYTVVIHYAGNLSETFHGFYKSTYRTKEGELRILASTQFEPTAARMAFPCFDEPAFKASFSIKIRREPRHLAISNMPLVKSVTVAEGLIEDHFDVTVKMSTYLVAFIISDFESVSKITKSGVKVSVYAVPDKINQADYALDAAVTLLEFYEDYFSIPYPLPKQDLAAIPDFQSGAMENWGLTTYRESALLFDAEKSSASSKLGITMTVAHELAHQWFGNLVTMEWWNDLWLNEGFAKFMEFVSVSVTHPELKVGDYFFGKCFDAMEVDALNSSHPVSTPVENPAQIREMFDDVSYDKGACILNMLREYLSADAFKSGIVQYLQKHSYKNTKNEDLWDSMASICPTDGVKGMDGFCSRSQHSSSSSHWHQEGVDVKTMMNTWTLQKGFPLITITVRGRNVHMKQEHYMKGSDGAPDTGYLWHVPLTFITSKSDMVHRFLLKTKTDVLILPEEVEWIKFNVGMNGYYIVHYEDDGWDSLTGLLKGTHTAVSSNDRASLINNAFQLVSIGKLSIEKALDLSLYLKHETEIMPVFQGLNELIPMYKLMEKRDMNEVETQFKAFLIRLLRDLIDKQTWTDEGSVSERMLRSQLLLLACVHNYQPCVQRAEGYFRKWKESNGNLSLPVDVTLAVFAVGAQSTEGWDFLYSKYQFSLSSTEKSQIEFALCRTQNKEKLQWLLDESFKGDKIKTQEFPQILTLIGRNPVGYPLAWQFLRKNWNKLVQKFELGSSSIAHMVMGTTNQFSTRTRLEEVKGFFSSLKENGSQLRCVQQTIETIEENIGWMDKNFDKIRVWLQSEKLEHDPEADATG

SEQ ID NO: 3340 - protein, 2468 aa, Homo sapiens
MATVVVEATEPEPSGSIANPAASTSPSLSHRFLDSKFYLLVVVGEIVTEEHLRRAIGNIELGIRSWDTNLIECNLDQELKLFVSRHSARFSPEVPGQKILHHRSDVLETVVLINPSDEAVSTEVRLMITDAARHKLLVLTGQCFENTGELILQSGSFSFQNFIEIFTDQEIGELLSTTHPANKASLTLFCPEEGDWKNSNLDRHNLQDFINIKLNSASILPEMEGLSEFTEYLSESVEVPSPFDILEPPTSGGFLKLSKPCCYIFPGGRGDSALFAVNGFNMLINGGSERKSCFWKLIRHLDRVDSILLTHIGDDNLPGINSMLQRKIAELEEEQSQGSTTNSDWMKNLISPDLGVVFLNVPENLKNPEPNIKMKRSIEEACFTLQYLNKLSMKPEPLFRSVGNTIDPVILFQKMGVGKLEMYVLNPVKSSKEMQYFMQQWTGTNKDKAEFILPNGQEVDLPISYLTSVSSLIVWHPANPAEKIIRVLFPGNSTQYNILEGLEKLKHLDFLKQPLATQKDLTGQVPTPVVKQTKLKQRADSRESLKPAAKPLPSKSVRKESKEETPEVTKVNHVEKPPKVESKEKVMVKKDKPIKTETKPSVTEKEVPSKEEPSPVKAEVAEKQATDVKPKAAKEKTVKKETKVKPEDKKEEKEKPKKEVAKKEDKTPIKKEEKPKKEEVKKEVKKEIKKEEKKEPKKEVKKETPPKEVKKEVKKEEKKEVKKEEKEPKKEIKKLPKDAKKSSTPLSEAKKPAALKPKVPKKEESVKKDSVAAGKPKEKGKIKVIKKEGKAAEAVAAAVGTGATTAAVMAAAGIAAIGPAKELEAERSLMSSPEDLTKDFEELKAEEVDVTKDIKPQLELIEDEEKLKETEPVEAYVIQKEREVTKGPAESPDEGITTTEGEGECEQTPEELEPVEKQGVDDIEKFEDEGAGFEESSETGDYEEKAETEEAEEPEEDGEEHVCVSASKHSPTEDEESAKAEADAYIREKRESVASGDDRAEEDMDEAIEKGEAEQSEEEADEEDKAEDAREEEYEPEKMEAEDYVMAVVDKAAEAGGAEEQYGFLTTPTKQLGAQSPGREPASSIHDETLPGGSESEATASDEENREDQPEEFTATSGYTQSTIEISSEPTPMDEMSTPRDVMSDETNNEETESPSQEFVNITKYESSLYSQEYSKPADVTPLNGFSEGSKTDATDGKDYNASASTISPPSSMEEDKFSRSALRDAYCSEVKASTTLDIKDSISAVSSEKVSPSKSPSLSPSPPSPLEKTPLGERSVNFSLTPNEIKVSAEAEVAPVSPEVTQEVVEEHCASPEDKTLEVVSPSQSVTGSAGHTPYYQSPTDEKSSHLPTEVIEKPPAVPVSFEFSDAKDENERASVSPMDEPVPDSESPIEKVLSPLRSPPLIGSESAYESFLSADDKASGRGAESPFEEKSGKQGSPDQVSPVSEMTSTSLYQDKQEGKSTDFAPIKEDFGQEKKTDDVEAMSSQPALALDERKLGDVSPTQIDVSQFGSFKEDTKMSISEGTVSDKSATPVDEGVAEDTYSHMEGVASVSTASVATSSFPEPTTDDVSPSLHAEVGSPHSTEVDDSLSVSVVQTPTTFQETEMSPSKEECPRPMSISPPDFSPKTAKSRTPVQDHRSEQSSMSIEFGQESPEQSLAMDFSRQSPDHPTVGAGVLHITENGPTEVDYSPSDMQDSSLSHKIPPMEEPSYTQDNDLSELISVSQVEASPSTSSAHTPSQIASPLQEDTLSDVAPPRDMSLYASLTSEKVQSLEGEKLSPKSDISPLTPRESSPLYSPTFSDSTSAVKEKTATCHSSSSPPIDAASAEPYGFRASVLFDTMQHHLALNRDLSTPGLEKDSGGKTPGDFSYAYQKPEETTRSPDEEDYDYESYEKTTRTSDVGGYYYEKIERTTKSPSDSGYSYETIGKTTKTPEDGDYSYEIIEKTTRTPEEGGYSYDISEKTTSPPEVSGYSYEKTERSRRLLDDISNGYDDSEDGGHTLGDPSYSYETTEKITSFPESEGYSYETSTKTTRTPDTSTYCYETAEKITRTPQASTYSYETSDLCYTAEKKSPSEARQDVDLCLVSSCEYKHPKTELSPSFINPNPLEWFASEEPTEESEKPLTQSGGAPPPPGGKQQGRQCDETPPTSVSESAPSQTDSDVPPETEECPSITADANIDSEDESETIPTDKTVTYKHMDPPPAPVQDRSPSPRHPDVSMVDPEALAIEQNLGKALKKDLKEKTKTKKPGTKTKSSSPVKKSDGKSKPLAASPKPAGLKESSDKVSRVASPKKKESVEKAAKPTTTPEVKAARGEEKDKETKNAANASASKSAKTATAGPGTTKTTKSSAVPPGLPVYLDLCYIPNHSNSKNVDVEFFKRVRSSYYVVSGNDPAAEEPSRAVLDALLEGKAQWGSNMQVTLIPTHDSEVMREWYQETHEKQQDLNIMVLASSSTVVMQDESFPACKIEL

SEQ ID NO: 3341 - protein, 243 aa, Homo sapiens
MEQGSGRLEDFPVNVFSVTPYTPSTADIQVSDDDKAGATLLFSGIFLGLVGITFTVMGWIKYQGVSHFEWTQLLGPVLLSVGVTFILIAVCKFKMLSCQLCKESEERVPDSEQTPGGPSFVFTGINQPITFHGATVVQYIPPPYGSPEPMGINTSYLQSVVSPCGLITSGGAAAAMSSPPQYYTIYPQDNSAFVVDEGCLSFTDGGNHRPNPDVDQLEETQLEEEACACFSPPPYEEIYSLPR

SEQ ID NO: 3342 - protein, 1732 aa, Homo sapiens
MAAIGRGRSLKNLRVRGRNDSGEENVPLDLTREPSDNLREILQNVARLQGVSNMRKLGHLNNFTKLLCDIGHSEEKLGFHYEDIIICLRLALLNEAKEVRAAGLRALRYLIQDSSILQKVLKLKVDYLIARCIDIQQSNEVERTQALRLVRKMITVNASLFPSSVTNSLIAVGNDGLQERDRMVRACIAIICELALQNPEVVALRGGLNTILKNVIDCQLSRINEALITTILHLLNHPKTRQYVRADVELERILAPYTDFHYRHSPDTAEGQLKEDREARFLASKMGIIATFRSWAGIINLCKPGNSGIQSLIGVLCIPNMEIRRGLLEVLYDIFRLPLPVVTEEFIEALLSVDPGRFQDSWRLSDGFVAAEAKTILPHRARSRPDLMDNYLALILSAFIRNGLLEGLVEVITNSDDHISVRATILLGELLHMANTILPHSHSHHLHCLPTLMNMAASFDIPKEKRLRASAALNCLKRFHEMKKRGPKPYSLHLDHIIQKAIATHQKRDQYLRVQKDIFILKDTEEALLINLRDSQVLQHKENLEWNWNLIGTILKWPNVNLRNYKDEQLHRFVRRLLYFYKPSSKLYANLDLDFAKAKQLTVVGCQFTEFLLESEEDGQGYLEDLVKDIVQWLNASSGMKPERSLQNNGLLTTLSQHYFLFIGTLSCHPHGVKMLEKCSVFQCLLNLCSLKNQDHLLKLTVSSLDYSRDGLARVILSKILTAATDACRLYATKHLRVLLRANVEFFNNWGIELLVTQLHDKNKTISSEALDILDEACEDKANLHALIQMKPALSHLGDKGLLLLLRFLSIPKGFSYLNERGYVAKQLEKWHREYNSKYVDLIEEQLNEALTTYRKPVDGDNYVRRSNQRLQRPHVYLPIHLYGQLVHHKTGCHLLEVQNIITELCRNVRTPDLDKWEEIKKLKASLWALGNIGSSNWGLNLLQEENVIPDILKLAKQCEVLSIRGTCVYVLGLIAKTKQGCDILKCHNWDAVRHSRKHLWPVVPDDVEQLCNELSSIPSTLSLNSESTSSRHNSESESVPSSMFILEDDRFGSSSTSTFFLDINEDTEPTFYDRSGPIKDKNSFPFFASSKLVKNRILNSLTLPNKKHRSSSDPKGGKLSSESKTSNRRIRTLTEPSVDFNHSDDFTPISTVQKTLQLETSFMGNKHIEDTGSTPSIGENDLKFTKNFGTENHRENTSRERLVVESSTSSHMKIRSQSFNTDTTTSGISSMSSSPSRETVGVDATTMDTDCGSMSTVVSTKTIKTSHYLTPQSNHLSLSKSNSVSLVPPGSSHTLPRRAQSLKAPSIATIKSLADCNFSYTSSRDAFGYATLKRLQQQRMHPSLSHSEALASPAKDVLFTDTITMKANSFESRLTPSRIDFKKKHVGGIRSLRPTITNNLFRFMKALSYASLDKEDLLSPINQNTLQRSSSVRSMVSSATYGGSDDYIGLALPVDINDIFQVKDIPYFQTKNIPPHDDRGARAFAHDAGGLPSGTGGLVKNSFHLLRQQMSLTEIMNSIHSDASLFLESTEDTGLQEHTDDNCLYCVCIEILGFQPSNQLSAICSHSDFQDIPYSDWCEQTIHNPLEVVPSKFSGISGCSDGVSQEGSASSTKSTELLLGVKTIPDDTPMCRILLRKEVLRLVINLSSSVSTKCHETGLLTIKEKYPQTFDDICLYSEVSHLLSHCTFRLPCRRFIQELFQDVQFLQMHEEAEAVLATPPKQPIVDTSAES

SEQ ID NO: 3343 - protein, 484 aa, Homo sapiens
MFPNSILGRPPFTPNHQQHNNFFTLSPTVYSHQQLIDAQFNFQNADLSRAVSLQQLTYGNVSPIQTSASPLFRGRKRLSDEKNLPLDGKRQRFHSPHQEPTVVNQIVPLSGERRYSMPPLFHTHYVPDIVRCVPPFREIAFLEPREITLPEAKDKLSQQILELFETCQQQISDLKKKELCRTQLQREIQLLFPQSRLFLVGSSLNGFGTRSSDGDLCLVVKEEPCFFQVNQKTEARHILTLVHKHFCTRLSGYIERPQLIRAKVPIVKFRDKVSCVEFDLNVNNIVGIRNTFLLRTYAYLENRVRPLVLVIKKWASHHQINDASRGTLSSYSLVLMVLHYLQTLPEPILPSLQKIYPESFSPAIQLHLVHQAPCNVPPYLSKNESNLGDLLLGFLKYYATEFDWNSQMISVREAKAIPRPDGIEWRNKYICVEEPFDGTNTARAVHEKQKFDMIKDQFLKSWHRLKNKRDLNSILPVRAAVLKR

SEQ ID NO: 3344 - protein, 518 aa, Homo sapiens
MAGYKPVAIQTYPILGEKITQDTLYWNNYKTPVQIKEFGAVSKVDFSPQPPYNYAVTASSRIHIYGRYSQEPIKTFSRFKDTAYCATFRQDGRLLVAGSEDGGVQLFDISGRAPLRQFEGHTKAVHTVDFTADKYHVVSGADDYTVKLWDIPNSKEILTFKEHSDYVRCGCASKLNPDLFITGSYDHTVKMFDARTSESVLSVEHGQPVESVLLFPSGGLLVSAGGRYVKVWDMLKGGQLLVSLKNHHKTVTCLCLSSSGQRLLSGSLDRKVKVYSTTSYKVVHSFDYAASILSLALAHEDETIVVGMTNGILSVKHRKSEAKKESLPRRRRPAYRTFIKGKNYMKQRDDILINRPAKKHLELYDRDLKHFRISKALDRVLDPTCTIKTPEITVSIIKELNRRGVLANALAGRDEKEISHVLNFLIRNLSQPRFAPVLINAAEIIIDIYLPVIGQSPVVDKKFLLLQGLVEKEIDYQRELLETLGMMDMLFATMRRKEGTSVLEHTSDGFPENKKIES

SEQ ID NO: 3345 - protein, 1651 aa, Homo sapiens
MELSCSEAPLYGQMMIYAKFDKNVYLPEDAEFYFTYDGSHQRHVMIAERIEDNVLQSSVPGHGLQETVTVSVCLCSEGYSPVTMGSGSVTYVDNMACRLARLLVTQANRLTACSHQTLLTPFALTAGALPALDEELVLALTHLELPLEWTVLGSSSLEVSSHRESLLHLAMRWGLAKLSQFFLCLPGGVQALALPNEEGATPLDLALREGHSKLVEDVTNFQGRWSPSFSRVQLSEEASLHYIHSSETLTLTLNHTAEHLLEADIKLFRKYFWDRAFLVKAFEPEARPEERTAMPSSGAETEEEIKNSVSSRSAAEKEDIKRVKSLVVQHNEHEDQHSLDLDRSFDILKKSKPPSTLLAAGRLSDMLNGGDEVYANCMVIDQVGDLDISYINIEGITATTSPESRGCTLWPQSSKHTLPTETSPSVYPLSENVEGTAHTEAQQSFMSPSSSCASNLNLSFGWHGFEKEQSHLKKRSSSLDALDADSEGEGHSEPSHICYTPGSQSSSRTGIPSGDELDSFETNTEPDFNISRAESLPLSSNLQSKESLLSGVRSRSYSCSSPKISLGKTRLVRELTVCSSSEEQRAYSLSEPPRENRIQEEEWDKYIIPAKSESEKYKVSRTFSFLMNRMTSPRNKSKTKSKDAKDKEKLNRHQFAPGTFSGVLQCLVCDKTLLGKESLQCSNCNANVHKGCKDAAPACTKKFQEKYNKNKPQTILGNSSFRDIPQPGLSLHPSSSVPVGLPTGRRETVGQVHPLSRSVPGTTLESFRRSATSLESESDHNSCRSRSHSDELLQSMGSSPSTESFIMEDVVDSSLWSDLSSDAQEFEAESWSLVVDPSFCNRQEKDVIKRQDVIFELMQTEMHHIQTLFIMSEIFRKGMKEELQLDHSTVDKIFPCLDELLEIHRHFFYSMKERRQESCAGSDRNFVIDRIGDILVQQFSEENASKMKKIYGEFCCHHKEAVNLFKELQQNKKFQNFIKLRNSNLLARRRGIPECILLVTQRITKYPVLVERILQYTKERTEEHKDLRKALCLIKDMIATVDLKVNEYEKNQKWLEILNKIENKTYTKLKNGHVFRKQALMSEERTLLYDGLVYWKTATGRFKDILALLLTDVLLFLQEKDQKYIFAAVDQKPSVISLQKLIAREVANEERGMFLISASSAGPEMYEIHTNSKEERNNWMRRIQQAVESCPEEKGGRTSESDEDKRKAEARVAKIQQCQEILTNQDQQICAYLEEKLHIYAELGELSGFEDVHLEPHLLIKPDPGEPPQAASLLAAALKEAESLQVAVKASQMGAVSQSCEDSCGDSVLADTLSSHDVPGSPTASLVTGGREGRGCSDVDPGIQGVVTDLAVSDAGEKVECRNFPGSSQSEIIQAIQNLTRLLYSLQAALTIQDSHIEIHRLVLQQQEGLSLGHSILRGGPLQDQKSRDADRQHEELANVHQLQHQLQQEQRRWLRRCEQQQRAQATRESWLQERERECQSQEELLLRSRGELDLQLQEYQHSLERLREGQRLVEREQARMRAQQSLLGHWKHGRQRSLPAVLLPGGPEVMELNRSESLCHENSFFINEALVQMSFNTFNKLNPSVIHQDATYPTTQSHSDLVRTSEHQVDLKVDPSQPSNVSHKLWTAAGSGHQILPFHESSKDSCKNGN

SEQ ID NO: 3346 - protein, 904 aa, Homo sapiens
MRQTLPCIYFWGGLLPFGMLCASSTTKCTVSHEVADCSHLKLTQVPDDLPTNITVLNLTHNQLRRLPAANFTRYSQLTSLDVGFNTISKLEPELCQKLPMLKVLNLQHNELSQLSDKTFAFCTNLTELHLMSNSIQKIKNNPFVKQKNLITLDLSHNGLSSTKLGTQVQLENLQELLLSNNKIQALKSEELDIFANSSLKKLELSSNQIKEFSPGCFHAIGRLFGLFLNNVQLGPSLTEKLCLELANTSIRNLSLSNSQLSTTSNTTFLGLKWTNLTMLDLSYNNLNVVGNDSFAWLPQLEYFFLEYNNIQHLFSHSLHGLFNVRYLNLKRSFTKQSISLASLPKIDDFSFQWLKCLEHLNMEDNDIPGIKSNMFTGLINLKYLSLSNSFTSLRTLTNETFVSLAHSPLHILNLTKNKISKIESDAFSWLGHLEVLDLGLNEIGQELTGQEWRGLENIFEIYLSYNKYLQLTRNSFALVPSLQRLMLRRVALKNVDSSPSPFQPLRNLTILDLSNNNIANINDDMLEGLEKLEILDLQHNNLARLWKHANPGGPIYFLKGLSHLHILNLESNGFDEIPVEVFKDLFELKIIDLGLNNLNTLPASVFNNQVSLKSLNLQKNLITSVEKKVFGPAFRNLTELDMRFNPFDCTCESIAWFVNWINETHTNIPELSSHYLCNTPPHYHGFPVRLFDTSSCKDSAPFELFFMINTSILLIFIFIVLLIHFEGWRISFYWNVSVHRVLGFKEIDRQTEQFEYAAYIIHAYKDKDWVWEHFSSMEKEDQSLKFCLEERDFEAGVFELEAIVNSIKRSRKIIFVITHHLLKDPLCKRFKVHHAVQQAIEQNLDSIILVFLEEIPDYKLNHALCLRRGMFKSHCILNWPVQKERIGAFRHKLQVALGSKNSVH

SEQ ID NO: 3347 - protein, 1392 aa, Homo sapiens
MDSDSDSPFNYSWPSFPKMKIRRRTSKQDRSFDILKKSKPPSTLLAAGRLSDMLNGGDEVYANCMVIDQVGDLDISYINIEGITATTSPESRGCTLWPQSSKHTLPTETSPSVYPLSENVEGTAHTEAQQSFMSPSSSCASNLNLSFGWHGFEKEQSHLKKRSSSLDALDADSEGEGHSEPSHICYTPGSQSSSRTGIPSGDELDSFETNTEPDFNISRAESLPLSSNLQSKESLLSGVRSRSYSCSSPKISLGKTRLVRELTVCSSSEEQRAYSLSEPPRENRIQEEEWDKYIIPAKSESEKYKVSRTFSFLMNRMTSPRNKSKTKSKDAKDKEKLNRHQFAPGTFSGVLQCLVCDKTLLGKESLQCSNCNANVHKGCKDAAPACTKKFQEKYNKNKPQTILGNSSFRDIPQPGLSLHPSSSVPVGLPTGRRETVGQVHPLSRSVPGTTLESFRRSATSLESESDHNSCRSRSHSDELLQSMGSSPSTESFIMEDVVDSSLWSDLSSDAQEFEAESWSLVVDPSFCNRQEKDVIKRQDVIFELMQTEMHHIQTLFIMSEIFRKGMKEELQLDHSTVDKIFPCLDELLEIHRHFFYSMKERRQESCAGSDRNFVIDRIGDILVQQFSEENASKMKKIYGEFCCHHKEAVNLFKELQQNKKFQNFIKLRNSNLLARRRGIPECILLVTQRITKYPVLVERILQYTKERTEEHKDLRKALCLIKDMIATVDLKVNEYEKNQKWLEILNKIENKTYTKLKNGHVFRKQALMSEERTLLYDGLVYWKTATGRFKDILALLLTDVLLFLQEKDQKYIFAAVDQKPSVISLQKLIAREVANEERGMFLISASSAGPEMYEIHTNSKEERNNWMRRIQQAVESCPEEKGGRTSESDEDKRKAEARVAKIQQCQEILTNQDQQICAYLEEKLHIYAELGELSGFEDVHLEPHLLIKPDPGEPPQAASLLAAALKEAESLQVAVKASQMGAVSQSCEDSCGDSVLADTLSSHDVPGSPTASLVTGGREGRGCSDVDPGIQGVVTDLAVSDAGEKVECRNFPGSSQSEIIQAIQNLTRLLYSLQAALTIQDSHIEIHRLVLQQQEGLSLGHSILRGGPLQDQKSRDADRQHEELANVHQLQHQLQQEQRRWLRRCEQQQRAQATRESWLQERERECQSQEELLLRSRGELDLQLQEYQHSLERLREGQRLVEREQARMRAQQSLLGHWKHGRQRSLPAVLLPGGPEVMELNRSESLCHENSFFINEALVQMSFNTFNKLNPSVIHQDATYPTTQSHSDLVRTSEHQVDLKVDPSQPSNVSHKLWTAAGSGHQILPFHESSKDSCKNDLDTSHTESPTPHDSNSHRPQLQAFITEAKLNLPTRTMTRQDGETGDGAKENIVYL

SEQ ID NO: 3348 - protein, 451 aa, Homo sapiens
MGKLQSKHAAAARKRRESPEGDSFVASAYASGRKGAEEAERRARDKQELPNGDPKEGPFREDQCPLQVALPAEKAEGREHPGQLLSADDGERAANREGPRGPGGQRLNIDALQCDVSVEEDDRQEWTFTLYDFDNCGKVTREDMSSLMHTIYEVVDASVNHSSGSSKTLRVKLTVSPEPSSKRKEGPPAGQDREPTRCRMEGELAEEPRVADRRLSAHVRRPSTDPQPCSERGPYCVDENTERRNHYLDLAGIENYTSRFGPGSPPVQAKQEPQGRASHLQARSRSQEPDTHAVHHRRSQVLVEHVVPASEPAARALDTQPRPKGPEKQFLKSPKGSGKPPGVPASSKSGKAFSYYLPAVLPPQAPQDGHHLPQPPPPPYGHKRYRQKGREGHSPLKAPHAQPATVEHEVVRDLPPTPAGEGYAVPVIQRHEHHHHHEHHHHHHHHHFHPS

SEQ ID NO: 3349 - protein, 1609 aa, Homo sapiens
MNSPVDPGARQALRKKPPERTPEDLNTIYSYLHGMEILSNLREHQLRLMSARARYERYSGNQVLFCSETIARCWYILLSGSVLVKGSMVLPPCSFGKQFGGKRGCDCLVLEPSEMIVVENAKDNEDSILQREIPARQSRRRFRKINYKGERQTITDDVEVNSYLSLPADLTKMHLTENPHPQVTHVSSSQSGCSIASDSGSSSLSDIYQATESEVGDVDLTRLPEGPVDSEDDEEEDEEIDRTDPLQGRDLVRECLEKEPADKTDDDIEQLLEFMHQLPAFANMTMSVRRELCSVMIFEVVEQAGAIILEDGQELDSWYVILNGTVEISHPDGKVENLFMGNSFGITPTLDKQYMHGIVRTKVDDCQFVCIAQQDYWRILNHVEKNTHKVEEEGEIVMVHEHRELDRSGTRKGHIVIKATPERLIMHLIEEHSIVDPTYIEDFLLTYRTFLESPLDVGIKLLEWFKIDSLRDKVTRIVLLWVNNHFNDFEGDPAMTRFLEEFEKNLEDTKMNGHLRLLNIACAAKAKWRQVVLQKASRESPLQFSLNGGSEKGFGIFVEGVEPGSKAADSGLKRGDQIMEVNGQNFENITFMKAVEILRNNTHLALTVKTNIFVFKELLFRTEQEKSGVPHIPKIAEKKSNRHSIQHVPGDIEQTSQEKGSKKVKANTVSGGRNKIRKILDKTRFSILPPKLFSDGGLSQSQDDSIVGTRHCRHSLAIMPIPGTLSSSSPDLLQPTTSMLDFSNPSDIPDQVIRVFKVDQQSCYIIISKDTTAKEVVFHAVHEFGLTGASDTYSLCEVSVTPEGVIKQRRLPDQFSKLADRIQLNGRYYLKNNMETETLCSDEDAQELVKESQLSMLQLSTIEVATQLSMRDFDLFRNIEPTEYIDDLFKLNSKTGNTHLKRFEDIVNQETFWVASEILTEANQLKRMKIIKHFIKIALHCRECKNFNSMFAIISGLNLASVARLRGTWEKLPSKYEKHLQDLQDIFDPSRNMAKYRNILSSQSMQPPIIPLFPVVKKDMTFLHEGNDSKVDGLVNFEKLRMISKEIRQVVRMTSANMDPAMMFRQRKKRWRSLGSLSQGSTNSNMLDVQGGAHKKRARRSSLLNAKKLYEDAQMARKVKQYLSSLDVETDEEKFQMMSLQWEPAYGTLTKNLSEKRSAKSSEMSPVPMRSAGQTTKAHLHQPHRVSQVLQVPAVNLHPIRKKGQTKDPALNTSLPQKVLGTTEEISGKKHTEDTISVASSLHSSPPASPQGSPHKGYTLIPSAKSDNLSDSSHSEISSRSSIVSNCSVDSMSAALQDERCSSQALAVPESTGALEKTEHASGIGDHSQHGPGWTLLKPSLIKCLAVSSSVSNEEISQEHIIIEAADSGRGSWTSCSSSSHDNFQSLPNPKSWDFLNSYRHTHLDDPIAEVEPTDSEPYSCSKSCSRTCGQCKGSLERKSWTSSSSLSDTYEPNYGTVKQRVLESTPAESSEGLDPKDATDPVYKTVTSSTEKGLIVYCVTSPKKDDRYREPPPTPPGYLGISLADLKEGPHTHLKPPDYSVAVQRSKMMHNSLSRLPPASLSSNLVACVPSKIVTQPQRHNLQPFHPKLGDVTDADSEADENEQVSAV

SEQ ID NO: 3350 - protein, 708 aa, Homo sapiens
MGLTAYGNRRVQPGELPFGANLTLIHTRAQPVICSKLLLTKRVSPISFFLSKFQNSWGEDGWVQLDQLPSPNAVSSDQVHCSAGCTHRKCGWAASKSKEKVPARPHGVCDGVCTDYSQCTQPCPPDTQGNMGFSCRQKTWHKITDTCQTLNALNIFEEDSRLVQPFEDNIKISVYTGKSETITDMLLQKCPTDLSCVIRNIQQSPWIPGNIAVIVQLLHNISTAIWTGVDEAKMQSYSTIANHILNSKSISNWTFIPDRNSSYILLHSVNSFARRLFIDKHPVDISDVFIHTMGTTISGDNIGKNFTFSMRINDTSNEVTGRVLISRDELRKVPSPSQVISIAFPTIGAILEASLLENVTVNGLVLSAILPKELKRISLIFEKISKSEERRTQCVGWHSVENRWDQQACKMIQENSQQAVCKCRPSKLFTSFSILMSPHILESLILTYITYVGLGISICSLILCLSIEVLVWSQVTKTEITYLRHVCIVNIAATLLMADVWFIVASFLSGPITHHKGCVAATFFVHFFYLSVFFWMLAKALLILYGIMIVFHTLPKSVLVASLFSVGYGCPLAIAAITVAATEPGKGYLRPEICWLNWDMTKALLAFVIPALAIVVVNLITVTLVIVKTQRAAIGNSMFQEVRAIVRISKNIAILTPLLGLTWGFGVATVIDDRSLAFHIIFSLLNAFQVSPDASDQVQSERIHEDVL

SEQ ID NO: 3351 - protein, 710 aa, Homo sapiens
MLTFFLVSGGSLWLFVEFVLSLLEKMQTQEILRILRLPELGDLGQFFRSLSATTLVSMGALAAILAYWFTHRPKALQPPCNLLMQSEEVEDSGGARRSVIGSGPQLLTHYYDDARTMYQVFRRGLSISGNGPCLGFRKPKQPYQWLSYQEVADRAEFLGSGLLQHNCKACTDQFIGVFAQNRPEWIIVELACYTYSMVVVPLYDTLGPGAIRYIINTADISTVIVDKPQKAVLLLEHVERKETPGLKLIILMDPFEEALKERGQKCGVVIKSMQAVEHFLLSGLWPRESPGSCGNPKGAMLTHGNVVADFSGFLKVTESQWAPTCADVHISYLPLAHMFERMVQSVVYCHGGRVGFFQGDIRLLSDDMKALCPTIFPVVPRLLNRMYDKIFSQANTPLKRWLLEFAAKRKQAEVRSGIIRNDSIWDELFFNKIQASLGGCVRMIVTGAAPASPTVLGFLRAALGCQVYEGYGQTECTAGCTFTTPGDWTSGHVGAPLPCNHIKLVDVEELNYWACKGEGEICVRGPNVFKGYLKDPDRTKEALDSDGWLHTGDIGKWLPAGTLKIIDRKKHIFKLAQGEYVAPEKIENIYIRSQPVAQIYVHGDSLKAFLVGIVVPDPEVMPSWAQKRGIEGTYADLCTNKDLKKAILEDMVRLGKESGLHSFEQVKAIHIHSDMFSVQNGLLTPTLKAKRPELREYFKKQIEELYSISM

SEQ ID NO: 3352 - protein, 291 aa, Homo sapiens
MEAPASAQTPHPHEPISFGIDQILNSPDQDSAPAPRGPDGASYLGGPPGGRPGATYPSLPASFAGLGAPFEDAGSYSVNLSLAPAGVIRVPAHRPLPGAVPPPLPSALPAMPSVPTVSSLGGLNFPWMESSRRFVKDRFTAAAALTPFTVTRRIGHPYQNRTPPKRKKPRTSFSRVQICELEKRFHRQKYLASAERAALAKSLKMTDAQVKTWFQNRRTKWRRQTAEEREAERQQASRLMLQLQHDAFQKSLNDSIQPDPLCLHNSSLFALQNLQPWEEDSSKVPAVTSLV

SEQ ID NO: 3353 - protein, 1193 aa, Homo sapiens
MMFRSDRMWSCHWKWKPSPLLFLFALYIMCVPHSVWGCANCRVVLSNPSGTFTSPCYPNDYPNSQACMWTLRAPTGYIIQITFNDFDIEEAPNCIYDSLSLDNGESQTKFCGATAKGLSFNSSANEMHVSFSSDFSIQKKGFNASYIRVAVSLRNQKVILPQTSDAYQVSVAKSISIPELSAFTLCFEATKVGHEDSDWTAFSYSNASFTQLLSFGKAKSGYFLSISDSKCLLNNALPVKEKEDIFAESFEQLCLVWNNSLGSIGVNFKRNYETVPCDSTISKVIPGNGKLLLGSNQNEIVSLKGDIYNFRLWNFTMNAKILSNLSCNVKGNVVDWQNDFWNIPNLALKAESNLSCGSYLIPLPAAELASCADLGTLCQDGIIYRISVVIQNILRHPEVKVQSKVAEWLNSTFQNWNYTVYVVNISFHLSAGEDKIKVKRSLEDEPRLVLWALLVYNATNNTNLEGKIIQQKLLKNNESLDEGLRLHTVNVRQLGHCLAMEEPKGYYWPSIQPSEYVLPCPDKPGFSASRICFYNATNPLVTYWGPVDISNCLKEANEVANQILNLTADGQNLTSANITNIVEQVKRIVNKEENIDITLGSTLMNIFSNILSSSDSDLLESSSEALKTIDELAFKIDLNSTSHVNITTRNLALSVSSLLPGTNAISNFSIGLPSNNESYFQMDFESGQVDPLASVILPPNLLENLSPEDSVLVRRAQFTFFNKTGLFQDVGPQRKTLVSYVMACSIGNITIQNLKDPVQIKIKHTRTQEVHHPICAFWDLNKNKSFGGWNTSGCVAHRDSDASETVCLCNHFTHFGVLMDLPRSASQLDARNTKVLTFISYIGCGISAIFSAATLLTYVAFEKLRRDYPSKILMNLSTALLFLNLLFLLDGWITSFNVDGLCIAVAVLLHFFLLATFTWMGLEAIHMYIALVKVFNTYIRRYILKFCIIGWGLPALVVSVVLASRNNNEVYGKESYGKEKGDEFCWIQDPVIFYVTCAGYFGVMFFLNIAMFIVVMVQICGRNGKRSNRTLREEVLRNLRSVVSLTFLLGMTWGFAFFAWGPLNIPFMYLFSIFNSLQGLFIFIFHCAMKENVQKQWRQHLCCGRFRLADNSDWSKTATNIIKKSSDNLGKSLSSSSIGSNSTYLTSKSKSSSTTYFKRNSHTDNVSYEHSFNKSGSLRQCFHGQVLVKTGPC

SEQ ID NO: 3354 - protein, 529 aa, Homo sapiens
MEPDSVIEDKTIELMNTSVMEDQNEDESPKKNTLWQISNGTSSVIVSRKRPSEGNYQKEKDLCIKYFDQWSESDQVEFVEHLISRMCHYQHGHINSYLKPMLQRDFITALPEQGLDHIAENILSYLDARSLCAAELVCKEWQRVISEGMLWKKLIERMVRTDPLWKGLSERRGWDQYLFKNRPTDGPPNSFYRSLYPKIIQDIETIESNWRCGRHNLQRIQCRSENSKGVYCLQYDDEKIISGLRDNSIKIWDKTSLECLKVLTGHTGSVLCLQYDERVIVTGSSDSTVRVWDVNTGEVLNTLIHHNEAVLHLRFSNGLMVTCSKDRSIAVWDMASATDITLRRVLVGHRAAVNVVDFDDKYIVSASGDRTIKVWSTSTCEFVRTLNGHKRGIACLQYRDRLVVSGSSDNTIRLWDIECGACLRVLEGHEELVRCIRFDNKRIVSGAYDGKIKVWDLQAALDPRAPASTLCLRTLVEHSGRVFRLQFDEFQIISSSHDDTILIWDFLNVPPSAQNETRSPSRTYTYISR

SEQ ID NO: 3355 - protein, 435 aa, Homo sapiens
MSSPGTESAGKSLQYRVDHLLSAVENELQAGSEKGDPTERELRVGLEESELWLRFKELTNEMIVTKNGRRMFPVLKVNVSGLDPNAMYSFLLDFVAADNHRWKYVNGEWVPGGKPEPQAPSCVYIHPDSPNFGAHWMKAPVSFSKVKLTNKLNGGGQIMLNSLHKYEPRIHIVRVGGPQRMITSHCFPETQFIAVTAYQNEEITALKIKYNPFAKAFLDAKERSDHKEMMEEPGDSQQPGYSQWGWLLPGTSTLCPPANPHPQFGGALSLPSTHSCDRYPTLRSHRSSPYPSPYAHRNNSPTYSDNSPACLSMLQSHDNWSSLGMPAHPSMLPVSHNASPPTSSSQYPSLWSVSNGAVTPGSQAAAVSNGLGAQFFRGSPAHYTPLTHPVSAPSSSGSPLYEGAAAATDIVDSQYDAAAQGRLIASWTPVSPPSM

SEQ ID NO: 3356 - protein, 639 aa, Homo sapiens
MPQPSVSGMDPPFGDAFRSHTFSEQTLMSTDLLANSSDPDFMYELDREMNYQQNPRDNFLSLEDCKDIENLESFTDVLDNEGALTSNWEQWDTYCEDLTKYTKLTSCDIWGTKEVDYLGLDDFSSPYQDEEVISKTPTLAQLNSEDSQSVSDSLYYPDSLFSVKQNPLPSSFPGKKITSRAAAPVCSSKTLQAEVPLSDCVQKASKPTSSTQIMVKTNMYHNEKVNFHVECKDYVKKAKVKINPVQQSRPLLSQIHTDAAKENTCYCGAVAKRQEKKGMEPLQGHATPALPFKETQELLLSPLPQEGPGSLAAGESSSLSASTSVSDSSQKKEEHNYSLFVSDNLGEQPTKCSPEEDEEDEEDVDDEDHDEGFGSEHELSENEEEEEEEEDYEDDKDDDISDTFSEPGYENDSVEDLKEVTSISSRKRGKRRYFWEYSEQLTPSQQERMLRPSEWNRDTLPSNMYQKNGLHHGKYAVKKSRRTDVEDLTPNPKKLLQIGNELRKLNKVISDLTPVSELPLTARPRSRKEKNKLASRACRLKKKAQYEANKVKLWGLNTEYDNLLFVINSIKQEIVNRVQNPRDERGPNMGQKLEILIKDTLGLPVAGQTSEFVNQVLEKTAEGNPTGGLVGLRIPTSKV

SEQ ID NO: 3357 - protein, 539 aa, Homo sapiens
MVPGARGGGALARAAGRGLLALLLAVSAPLRLQAEELGDGCGHLVTYQDSGTMTSKNYPGTYPNHTVCEKTITVPKGKRLILRLGDLDIESQTCASDYLLFTSSSDQYGPYCGSMTVPKELLLNTSEVTVRFESGSHISGRGFLLTYASSDHPDLITCLERASHYLKTEYSKFCPAGCRDVAGDISGNMVDGYRDTSLLCKAAIHAGIIADELGGQISVLQRKGISRYEGILANGVLSRDGSLSDKRFLFTSNGCSRSLSFEPDGQIRASSSWQSVNESGDQVHWSPGQARLQDQGPSWASGDSSNNHKPREWLEIDLGEKKKITGIRTTGSTQSNFNFYVKSFVMNFKNNNSKWKTYKGIVNNEEKVFQGNSNFRDPVQNNFIPPIVARYVRVVPQTWHQRIALKVELIGCQITQGNDSLVWRKTSQSTSVSTKKEDETITRPIPSEETSTGINITTVAIPLVLLVVLVFAGMGIFAAFRKKKKKGSPYGSAEAQKTDCWKQIKYPFARHQSAEFTISYDNEKEMTQKLDLITSDMAG

SEQ ID NO: 3358 - protein, 491 aa, Homo sapiens
MIATGGVITGLAALKRQDSARSQQHVNLSPSPATQEKKPIRRRPRADVVVVRGKIRLYSPSGFFLILGVLISIIGIAMAVLGYWPQKEHFIDAETTLSTNETQVIRNEGGVVVRFFEQHLHSDKMKMLGPFTMGIGIFIFICANAILHENRDKETKIIHMRDIYSTVIDIHTLRIKEQRQMNGMYTGLMGETEVKQNGSSCASRLAANTIASFSGFRSSFRMDSSVEEDELMLNEGKSSGHLMPPLLSDSSVSVFGLYPPPSKTTDDKTSGSKKCETKSIVSSSISAFTLPVIKLNNCVIDEPSIDNITEDADNLKSRSRNLSMDSLVVPLPNTSESFQPVSTVLPRNNSIGESLSSQYKSSMALGPGAGQLLSPGAARRQFGSNTSLHLLSSHSKSLDLDRGPSTLTVQAEQRKHPSWPRLDRNNSKGYMKLENKEDPMDRLLVPQVAIKKDFTNKEKLLMISRSHNNLSFEHDEFLSNNLKRGTSETRF

SEQ ID NO: 3359 - protein, 438 aa, Homo sapiens
MDVEIQDTPGKISISKRSILSGTVENIDYPHYCDLLRKMNMPFVKGLENRHNYGRFEKKCNPAFLKFHPYPPSVLPDYHLHDPYPPPYGPHYPLFPLRDDVTLGDSCSGFMSPGGDADLNPGIGRTIPTLVDFSDVKPQHRVPRPDTGFQTTIKRQKILSEELQQNRRWNSREVPDISIRARLGGWTSPLKVTPLQPHHEGRSLSHIFTFDEEATCTDEGEPLVQTNKKCNAKDSFYKSSTQKAYEDVPWDKMLPPKLVPEETTLEKTADPISQCFTLKRYKGVPAITQMVGELWDRFQTRSFLAPVKPINFVSSSSRSKYIPLYTGHVQSTNADDVDNPLGDIASLAKQRYSKPLYTNTSRAANIPGYTGKVHFTATHPANSNIPSTTPSPDSELHRVFQKEMAVDLFRHQAPLSRLVTTVRPYNPFNKKDKETIDY

SEQ ID NO: 3360 - protein, 745 aa, Homo sapiens
MKLSPQPSCVNLGMMWTWALWMLPSLCKFSLAALPAKPENISCVYYYRKNLTCTWSPGKETSYTQYTVKRTYAFGEKHDNCTTNSSTSENRASCSFFLPRITIPDNYTIEVEAENGDGVIKSHMTYWRLENIAKTEPPKIFRVKPVLGIKRMIQIEWIKPELAPVSSDLKYTLRFRTVNSTSWMEVNFAKNRKDKNQTYNLTGLQPFTEYVIALRCAVKESKFWSDWSQEKMGMTEEEAPCGLELWRVLKPAEADGRRPVRLLWKKARGAPVLEKTLGYNIWYYPESNTNLTETMNTTNQQLELHLGGESFWVSMISYNSLGKSPVATLRIPAIQEKSFQCIEVMQACVAEDQLVVKWQSSALDVNTWMIEWFPDVDSEPTTLSWESVSQATNWTIQQDKLKPFWCYNISVYPMLHDKVGEPYSIQAYAKEGVPSEGPETKVENIGVKTVTITWKEIPKSERKGIICNYTIFYQAEGGKGFSKTVNSSILQYGLESLKRKTSYIVQVMASTSAGGTNGTSINFKTLSFSVFEIILITSLIGGGLLILIILTVAYGLKKPNKLTHLCWPTVPNPAESSIATWHGDDFKDKLNLKESDDSVNTEDRILKPCSTPSDKLVIDKLVVNFGNVLQEIFTDEARTGQENNLGGEKNGYVTCPFRPDCPLGKSFEELPVSPEIPPRKSQYLRSRMPEGTRPEAKEQLLFSGQSLVPDHLCEEGAPNPYLKNSVTAREFLVSEKLPEHTKGEV

SEQ ID NO: 3361 - protein, 715 aa, Homo sapiens
MARELYHEEFARAGKQAGLQVWRIEKLELVPVPQSAHGDFYVGDAYLVLHTAKTSRGFTYHLHFWLGKECSQDESTAAAIFTVQMDDYLGGKPVQNRELQGYESNDFVSYFKGGLKYKAGGVASGLNHVLTNDLTAKRLLHVKGRRVVRATEVPLSWDSFNKGDCFIIDLGTEIYQWCGSSCNKYERLKANQVATGIRYNERKGRSELIVVEEGSEPSELIKVLGEKPELPDGGDDDDIIADISNRKMAKLYMVSDASGSMRVTVVAEENPFSMAMLLSEECFILDHGAAKQIFVWKGKDANPQERKAAMKTAEEFLQQMNYSKNTQIQVLPEGGETPIFKQFFKDWRDKDQSDGFGKVYVTEKVAQIKQIPFDASKLHSSPQMAAQHNMVDDGSGKVEIWRVENNGRIQVDQNSYGEFYGGDCYIILYTYPRGQIIYTWQGANATRDELTTSAFLTVQLDRSLGGQAVQIRVSQGKEPVHLLSLFKDKPLIIYKNGTSKKGGQAPAPPTRLFQVRRNLASITRIVEVDVDANSLNSNDVFVLKLPQNSGYIWVGKGASQEEEKGAEYVASVLKCKTLRIQEGEEPEEFWNSLGGKKDYQTSPLLETQAEDHPPRLYGCSNKTGRFVIEEIPGEFTQDDLAEDDVMLLDAWEQIFIWIGKDANEVEKKESLKSAKMYLETDPSGRDKRTPIVIIKQGHEPPTFTGWFLGWDSSKW

SEQ ID NO: 3362 - protein, 399 aa, Homo sapiens
MDEDGGGEGGGVPEDLSLEEREELLDIRRRKKELIDDIERLKYEIAEVMTEIDNLTSVEESKTTQRNKQIAMGRKKFNMDPKKGIQFLIENDLLQSSPEDVAQFLYKGEGLNKTVIGDYLGERDEFNIKVLQAFVELHEFADLNLVQALRQFLWSFRLPGEAQKIDRMMEAFASRYCLCNPGVFQSTDTCYVLSFAIIMLNTSLHNHNVRDKPTAERFIAMNRGINEGGDLPEELLRNLYESIKNEPFKIPEDDGNDLTHTFFNPDREGWLLKLGGRVKTWKRRWFILTDNCLYYFEYTTDKEPRGIIPLENLSIREVEDPRKPNCFELYNPSHKGQVIKACKTEADGRVVEGNHVVYRISAPSPEEKEEWMKSIKASISRDPFYDMLATRKRRIANKK

SEQ ID NO: 3363 - protein, 520 aa, Homo sapiens
MAGCTRKLTHLRKRIHRPRRRTTRRWKRWFKFRKRKGEKRPRPNHKAVARRAKLKFSTSEKLHWPEQELAKKSILNAEDSLIIDNKRSISHLSSGVLKDIFTTGTSSYNVLLQSKEEKKYHSQKQSSSTYSKRCRKPSKSPNTSRSKDPRRMKALVPVTSSGTWYCLERRPAVFVTSSVSSPVKFTHDISVTGNGIVLPPKPKSKVKWCHFSTLPKPKPQLSRSFEKGDDFSGKKFCILTAIKPTNLEKEKLRFFKSDYTYNPQFEYANPALPSVLAKHSHASDRFLKQIVVHLTEDLLSRASMTVVNGCPTLTINVSTAREHWLEGMLRHEIGTHYFRGINNLQQPWNSWTGRKKHELKPNNPTEEGLASIHSVLFRKDPFLWRAALLYYTVYQASQMSFCELFKDIGRFVKDPNTRWDYCVRAKRGWTDTSQPGCFSKDQVYLDGILQILRYRDTIDFHLLTALGKVSYEDVDRLKGLAVTENMRVPHFLQDHGRYMEHLEKIMEVNELTDRELKDLI

SEQ ID NO: 3364 - protein, 603 aa, Homo sapiens
MRRKEKRLLQAVALVLAALVLLPNVGLWALYRERQPDGTPGGSGAAVAPAAGQGSHSRQKKTFFLGDGQKLKDWHDKEAIRRDAQRVGNGEQGRPYPMTDAERVDQAYRENGFNIYVSDKISLNRSLPDIRHPNCNSKRYLETLPNTSIIIPFHNEGWSSLLRTVHSVLNRSPPELVAEIVLVDDFSDREHLKKPLEDYMALFPSVRILRTKKREGLIRTRMLGASVATGDVITFLDSHCEANVNWLPPLLDRIARNRKTIVCPMIDVIDHDDFRYETQAGDAMRGAFDWEMYYKRIPIPPELQKADPSDPFESPVMAGGLFAVDRKWFWELGGYDPGLEIWGGEQYEISFKVWMCGGRMEDIPCSRVGHIYRKYVPYKVPAGVSLARNLKRVAEVWMDEYAEYIYQRRPEYRHLSAGDVAVQKKLRSSLNCKSFKWFMTKIAWDLPKFYPPVEPPAAAWGEIRNVGTGLCADTKHGALGSPLRLEGCVRGRGEAAWNNMQVFTFTWREDIRPGDPQHTKKFCFDAISHTSPVTLYDCHSMKGNQLWKYRKDKTLYHPVSGSCMDCSESDHRIFMNTCNPSSLTQQWLFEHTNSTVLEKFNRN

SEQ ID NO: 3365 - protein, 860 aa, Homo sapiens
MGWVGGRRRDSASPPGRSRSAADDINPAPANMEGGGGSVAVAGLGARGSGAAAATVRELLQDGCYSDFLNEDFDVKTYTSQSIHQAVIAEQLAKLAQGISQLDRELHLQVVARHEDLLAQATGIESLEGVLQMMQTRIGALQGAVDRIKAKIVEPYNKIVARTAQLARLQVACDLLRRIIRILNLSKRLQGQLQGGSREITKAAQSLNELDYLSQGIDLSGIEVIENDLLFIARARLEVENQAKRLLEQGLETQNPTQVGTALQVFYNLGTLKDTITSVVDGYCATLEENINSALDIKVLTQPSQSAVRGGPGRSTMPTPGNTAALRASFWTNMEKLMDHIYAVCGQVQHLQKVLAKKRDPVSHICFIEEIVKDGQPEIFYTFWNSVTQALSSQFHMATNSSMFLKQAFEGEYPKLLRLYNDLWKRLQQYSQHIQGNFNASGTTDLYVDLQHMEDDAQDIFIPKKPDYDPEKALKDSLQPYEAAYLSKSLSRLFDPINLVFPPGGRNPPSSDELDGIIKTIASELNVAAVDTNLTLAVSKNVAKTIQLYSVKSEQLLSTQGDASQVIGPLTEGQRRNVAVVNSLYKLHQSVTKVVSSQSSFPLAAEQTIISALKAIHALMENAVQPLLTSVGDAIEAIIITMHQEDFSGSLSSSGKPDVPCSLYMKELQGFIARVMSDYFKHFECLDFVFDNTEAIAQRAVELFIRHASLIRPLGEGGKMRLAADFAQMELAVGPFCRRVSDLGKSYRMLRSFRPLLFQASEHVASSPALGDVIPFSIIIQFLFTRAPAELKSPFQRAEWSHTRFSQWLDDHPSEKDRLLLIRGALEAYVQSVRSREGKEFAPVYPIMVQLLQKAMSALQ

SEQ ID NO: 3366 - protein, 337 aa, Homo sapiens
MLTLPFDESVVMPESQMCRKFSRECEDQKQIKKPESFSKQIVLRGKSIKRAPGEETEKEEEEEDREEEDENGLPRRRGLRKKKTTKLRLERVKFRRQEANARERNRMHGLNDALDNLRKVVPCYSKTQKLSKIETLRLAKNYIWALSEILRIGKRPDLLTFVQNLCKGLSQPTTNLVAGCLQLNARSFLMGQGGEAAHHTRSPYSTFYPPYHSPELTTPPGHGTLDNSKSMKPYNYCSAYESFYESTSPECASPQFEGPLSPPPINYNGIFSLKQEETLDYGKNYNYGMHYCAVPPRGPLGQGAMFRLPTDSHFPYDLHLRSQSLTMQDELNAVFHN

SEQ ID NO: 3367 - protein, 685 aa, Homo sapiens
MLWFSGVGALAERYCRRSPGITCCVLLLLNCSGVPMSLASSFLTGSVAKCENEGEVLQIPFITDNPCIMCVCLNKEVTCKREKCPVLSRDCALAIKQRGACCEQCKGCTYEGNTYNSSFKWQSPAEPCVLRQCQEGVVTESGVRCVVHCKNPLEHLGMCCPTCPGCVFEGVQYQEGEEFQPEGSKCTKCSCTGGRTQCVREVCPILSCPQHLSHIPPGQCCPKCLGQRKVFDLPFGSCLFRSDVYDNGSSFLYDNCTACTCRDSTVVCKRKCSHPGGCDQGQEGCCEECLLRVPPEDIKVCKFGNKIFQDGEMWSSINCTICACVKGRTECRNKQCIPISSCPQGKILNRKGCCPICTEKPGVCTVFGDPHYNTFDGRTFNFQGTCQYVLTKDCSSPASPFQVLVKNDARRTRSFSWTKSVELVLGESRVSLQQHLTVRWNGSRIALPCRAPHFHIDLDGYLLKVTTKAGLEISWDGDSFVEVMAAPHLKGKLCGLCGNYNGHKRDDLIGGDGNFKFDVDDFAESWRVESNEFCNRPQRKPVPELCQGTVKVKLRAHRECQKLKSWEFQTCHSTVDYATFYRSCVTDMCECPVHKNCYCESFLAYTRACQREGIKVHWEPQQNCAATQCKHGAVYDTCGPGCIKTCDNWNEIGPCNKPCVAGCHCPANLVLHKGRCIKPVLCPQR

SEQ ID NO: 3368 - protein, 866 aa, Homo sapiens
MDVNSSKYPSLLLHSQEEKTSTATSKTQTRLEGEVTPNSLSTSYKTVSLPLSSPNIKLNLTSPKRGQKREEGWKEVVRRSKKLSVPASVVSRIMGRGGCNITAIQDVTGAHIDVDKQKDKNGERMITIRGGTESTRYAVQLINALIQDPAKELEDLIPKNHIRTPASTKSIHANFSSGVGTTAASSKNAFPLGAPTLVTSQATTLSTFQPANKLNKNVPTNVRSSFPVSLPLAYPHPHFALLAAQTMQQIRHPRLPMAQFGGTFSPSPNTWGPFPVRPVNPGNTNSSPKHNNTSRLPNQNGTVLPSESAGLATASCPITVSSVVAASQQLCVTNTRTPSSVRKQLFACVPKTSPPATVISSVTSTCSSLPSVSSAPITSGQAPTTFLPASTSQAQLSSQKMESFSAVPPTKEKVSTQDQPMANLCTPSSTANSCSSSASNTPGAPETHPSSSPTPTSSNTQEEAQPSSVSDLSPMSMPFASNSEPAPLTLTSPRMVAADNQDTSNLPQLAVPAPRVSHRMQPRGSFYSMVPNATIHQDPQSIFVTNPVTLTPPQGPPAAVQLSSAVNIMNGSQMHINPANKSLPPTFGPATLFNHFSSLFDSSQVPANQGWGDGPLSSRVATDASFTVQSAFLGNSVLGHLENMHPDNSKAPGFRPPSQRVSTSPVATSAPPTLGQPKGVSASQDRKIPPPIGTERLARIRQGGSVAQAPAGTSFVAPVGHSGIWSFGVNAVSEGLSGWSQSVMGNHPMHQQLSDPSTFSQHQPMERDDSGMVAPSNIFHQPMASGFVDFSKGLPISMYGGTIIPSHPQLADVPGGPLFNGLHNPDPAWNPMIKVIQNSTECTDAQQIWPGTWAPHIGNMHLKYVN

SEQ ID NO: 3369 - protein, 679 aa, Homo sapiens
MISASRAAAARLVGAAASRGPTAARHQDSWNGLSHEAFRLVSRRDYASEAIKGAVVGIDLGTTNSCVAVMEGKQAKVLENAEGARTTPSVVAFTADGERLVGMPAKRQAVTNPNNTFYATKRLIGRRYDDPEVQKDIKNVPFKIVRASNGDAWVEAHGKLYSPSQIGAFVLMKMKETAENYLGHTAKNAVITVPAYFNDSQRQATKDAGQISGLNVLRVINEPTAAALAYGLDKSEDKVIAVYDLGGGTFDISILEIQKGVFEVKSTNGDTFLGGEDFDQALLRHIVKEFKRETGVDLTKDNMALQRVREAAEKAKCELSSSVQTDINLPYLTMDSSGPKHLNMKLTRAQFEGIVTDLIRRTIAPCQKAMQDAEVSKSDIGEVILVGGMTRMPKVQQTVQDLFGRAPSKAVNPDEAVAIGAAIQGGVLAGDVTDVLLLDVTPLSLGIETLGGVFTKLINRNTTIPTKKSQVFSTAADGQTQVEIKVCQGEREMAGDNKLLGQFTLIGIPPAPRGVPQIEVTFDIDANGIVHVSAKDKGTGREQQIVIQSSGGLSKDDIENMVKNAEKYAEEDRRKKERVEAVNMAEGIIHDTETKMEEFKDQLPADECNKLKEEISKMRELLARKDSETGENIRQAASSLQQASLKLFEMAYKKMASEREGSGSSGTGEQKEDQKEEKQ

SEQ ID NO: 3370 - protein, 233 aa, Homo sapiens
MSKLGKFFKGGGSSKSRAAPSPQEALVRLRETEEMLGKKQEYLENRIQREIALAKKHGTQNKRAALQALKRKKRFEKQLTQIDGTLSTIEFQREALENSHTNTEVLRNMGFAAKAMKSVHENMDLNKIDDLMQEITEQQDIAQEISEAFSQRVGFGDDFDEDELMAELEELEQEELNKKMTNIRLPNVPSSSLPAQPNRKPGMSSTARRSRAASSQRAEEEDDDIKQLAAWAT

SEQ ID NO: 3371 - protein, 1894 aa, Homo sapiens
MAPEAGATLRAPRRLSWAALLLLAALLPVASSAAASVDHPLKPRHVKLLSTKMGLKVTWDPPKDATSRPVEHYNIAYGKSLKSLKYIKVNAETYSFLIEDVEPGVVYFVLLTAENHSGVSRPVYRAESPPGGEWIEIDGFPIKGPGPFNETVTEKEVPNKPLRVRVRSSDDRLSVAWKAPRLSGAKSPRRSRGFLLGYGESGRKMNYVPLTRDERTHEIKKLASESVYVVSLQSMNSQGRSQPVYRAALTKRKISEEDELDVPDDISVRVMSSQSVLVSWVDPVLEKQKKVVASRQYTVRYREKGELARWDYKQIANRRVLIENLIPDTVYEFAVRISQGERDGKWSTSVFQRTPESAPTTAPENLNVWPVNGKPTVVAASWDALPETEGKVKEYILSYAPALKPFGAKSLTYPGDTTSALVDGLQPGERYLFKIRATNRRGLGPHSKAFIVAMPTTSKADVEQNTEDNGKPEKPEPSSPSPRAPASSQHPSVPASPQGRNAKDLLLDLKNKILANGGAPRKPQLRAKKAEELDLQSTEITGEEELGSREDSPMSPSDTQDQKRTLRPPSRHGHSVVAPGRTAVRARMPALPRREGVDKPGFSLATQPRPGAPPSASASPAHHASTQGTSHRPSLPASLNDNDLVDSDEDERAVGSLHPKGAFAQPRPALSPSRQSPSSVLRDRSSVHPGAKPASPARRTPHSGAAEEDSSASAPPSRLSPPHGGSSRLLPTQPHLSSPLSKGGKDGEDAPATNSNAPSRSTMSSSVSSHLSSRTQVSEGAEASDGESHGDGDREDGGRQAEATAQTLRARPASGHFHLLRHKPFAANGRSPSRFSIGRGPRLQPSSSPQSTVPSRAHPRVPSHSDSHPKLSSGIHGDEEDEKPLPATVVNDHVPSSSRQPISRGWEDLRRSPQRGASLHRKEPIPENPKSTGADTHPQGKYSSLASKAQDVQQSTDADTEGHSPKAQPGSTDRHASPARPPAARSQQHPSVPRRMTPGRAPQQQPPPPVATSQHHPGPQSRDAGRSPSQPRLSLTQAGRPRPTSQGRSHSSSDPYTASSRGMLPTALQNQDEDAQGSYDDDSTEVEAQDVRAPAHAARAKEAAASLPKHQQVESPTGAGAGGDHRSQRGHAASPARPSRPGGPQSRARVPSRAAPGKSEPPSKRPLSSKSQQSVSAEDDEEEDAGFFKGGKEDLLSSSVPKWPSSSTPRGGKDADGSLAKEEREPAIALAPRGGSLAPVKRPLPPPPGSSPRASHVPSRLPPRSAATVSPVAGTHPWPQYTTRAPPGHFSTTPMLSLRQRMMHARFRNPLSRQPARPSYRQGYNGRPNVEGKVLPGSNGKPNGQRIINGPQGTKWVVDLDRGLVLNAEGRYLQDSHGNPLRIKLGGDGRTIVDLEGTPVVSPDGLPLFGQGRHGTPLANAQDKPILSLGGKPLVGLEVIKKTTHPPTTTMQPTTTTTPLPTTTTPRPTTATTRRTTTTRRTTTRRPTTTVRTTTRTTTTTTPTPTTPIPTCPPGTLERHDDDGNLIMSSNGIPECYAEEDEFSGLETDTAVPTEEAYVIYDEDYEFETSRPPTTTEPSTTATTPRVIPEEGAISSFPEEEFDLAGRKRFVAPYVTYLNKDPSAPCSLTDALDHFQVDSLDEIIPNDLKKSDLPPQHAPRNITVVAVEGCHSFVIVDWDKATPGDVVTGYLVYSASYEDFIRNKWSTQASSVTHLPIENLKPNTRYYFKVQAQNPHGYGPISPSVSFVTESDNPLLVVRPPGGEPIWIPFAFKHDPSYTDCHGRQYVKRTWYRKFVGVVLCNSLRYKIYLSDNLKDTFYSIGDSWGRGEDHCQFVDSHLDGRTGPQSYVEALPTIQGYYRQYRQEPVRFGNIGFGTPYYYVGWYECGVSIPGKW

SEQ ID NO: 3372 - protein, 1366 aa, Homo sapiens
MLSFVDTRTLLLLAVTLCLATCQSLQEETVRKGPAGDRGPRGERGPPGPPGRDGEDGPTGPPGPPGPPGPPGLGGNFAAQYDGKGVGLGPGPMGLMGPRGPPGAAGAPGPQGFQGPAGEPGEPGQTGPAGARGPAGPPGKAGEDGHPGKPGRPGERGVVGPQGARGFPGTPGLPGFKGIRGHNGLDGLKGQPGAPGVKGEPGAPGENGTPGQTGARGLPGERGRVGAPGPAGARGSDGSVGPVGPAGPIGSAGPPGFPGAPGPKGEIGAVGNAGPAGPAGPRGEVGLPGLSGPVGPPGNPGANGLTGAKGAAGLPGVAGAPGLPGPRGIPGPVGAAGATGARGLVGEPGPAGSKGESGNKGEPGSAGPQGPPGPSGEEGKRGPNGEAGSAGPPGPPGLRGSPGSRGLPGADGRAGVMGPPGSRGASGPAGVRGPNGDAGRPGEPGLMGPRGLPGSPGNIGPAGKEGPVGLPGIDGRPGPIGPAGARGEPGNIGFPGPKGPTGDPGKNGDKGHAGLAGARGAPGPDGNNGAQGPPGPQGVQGGKGEQGPPGPPGFQGLPGPSGPAGEVGKPGERGLHGEFGLPGPAGPRGERGPPGESGAAGPTGPIGSRGPSGPPGPDGNKGEPGVVGAVGTAGPSGPSGLPGERGAAGIPGGKGEKGEPGLRGEIGNPGRDGARGAPGAVGAPGPAGATGDRGEAGAAGPAGPAGPRGSPGERGEVGPAGPNGFAGPAGAAGQPGAKGERGAKGPKGENGVVGPTGPVGAAGPAGPNGPPGPAGSRGDGGPPGMTGFPGAAGRTGPPGPSGISGPPGPPGPAGKEGLRGPRGDQGPVGRTGEVGAVGPPGFAGEKGPSGEAGTAGPPGTPGPQGLLGAPGILGLPGSRGERGLPGVAGAVGEPGPLGIAGPPGARGPPGAVGSPGVNGAPGEAGRDGNPGNDGPPGRDGQPGHKGERGYPGNIGPVGAAGAPGPHGPVGPAGKHGNRGETGPSGPVGPAGAVGPRGPSGPQGIRGDKGEPGEKGPRGLPGLKGHNGLQGLPGIAGHHGDQGAPGSVGPAGPRGPAGPSGPAGKDGRTGHPGTVGPAGIRGPQGHQGPAGPPGPPGPPGPPGVSGGGYDFGYDGDFYRADQPRSAPSLRPKDYEVDATLKSLNNQIETLLTPEGSRKNPARTCRDLRLSHPEWSSGYYWIDPNQGCTMDAIKVYCDFSTGETCIRAQPENIPAKNWYRSSKDKKHVWLGETINAGSQFEYNVEGVTSKEMATQLAFMRLLANYASQNITYHCKNSIAYMDEETGNLKKAVILQGSNDVELVAEGNSRFTYTVLVDGCSKKTNEWGKTIIEYKTNKPSRLPFLDIAPLDIGGADQEFFVDIGPVCFK

SEQ ID NO: 3373 - protein, 797 aa, Homo sapiens
MAALAYNLGKREINHYFSVRSAKVLALVAVLLLAACHLASRRYRGNDSCEYLLSSGRFLGEKVWQPHSCMMHKYKISEAKNCLVDKHIAFIGDSRIRQLFYSFVKIINPQFKEEGNKHENIPFEDKTASVKVDFLWHPEVNGSMKQCIKVWTEDSIAKPHVIVAGAATWSIKIHNGSSEALSQYKMNITSIAPLLEKLAKTSDVYWVLQDPVYEDLLSENRKMITNEKIDAYNEAAVSILNSSTRNSKSNVKMFSVSKLIAQETIMESLDGLHLPESSRETTAMILMNVYCNKILKPVDGSCCQPRPPVTLIQKLAACFFTLSIIGYLIFYIIHRNAHRKNKPCTDLESGEEKKNIINTPVSSLEILLQSFCKLGLIMAYFYMCDRANLFMKENKFYTHSSFFIPIIYILVLGVFYNENTKETKVLNREQTDEWKGWMQLVILIYHISGASTFLPVYMHIRVLVAAYLFQTGYGHFSYFWIKGDFGIYRVCQVLFRLNFLVVVLCIVMDRPYQFYYFVPLVTVWFMVIYVTLALWPQIIQKKANGNCFWHFGLLLKLGFLLLFICFLAYSQGAFEKIFSLWPLSKCFELKGNVYEWWFRWRLDRYVVFHGMLFAFIYLALQKRQILSEGKGEPLFSNKISNFLLFISVVSFLTYSIWASSCKNKAECNELHPSVSVVQILAFILIRNIPGYARSVYSSFFAWFGKISLELFICQYHIWLAADTRGILVLIPGNPMLNIIVSTFIFVCVAHEISQITNDLAQIIIPKDNSSLLKRLACIAAFFCGLLILSSIQDKSKH

SEQ ID NO: 3374 - protein, 626 aa, Homo sapiens
MGLLQGLLRVRKLLLVVCVPLLLLPLPVLHPSSEASCAYVLIVTAVYWVSEAVPLGAAALVPAFLYPFFGVLRSNEVAAEYFKNTTLLLVGVICVAAAVEKWNLHKRIALRMVLMAGAKPGMLLLCFMCCTTLLSMWLSNTSTTAMVMPIVEAVLQELVSAEDEQLVAGNSNTEEAEPISLDVKNSQPSLELIFVNEESNADLTTLMHNENLNGVPSITNPIKTANQHQGKKQHPSQEKPQVLTPSPRKQKLNRKYRSHHDQMICKCLSLSISYSATIGGLTTIIGTSTSLIFLEHFNNQYPAAEVVNFGTWFLFSFPISLIMLVVSWFWMHWLFLGCNFKETCSLSKKKKTKREQLSEKRIQEEYEKLGDISYPEMVTGFFFILMTVLWFTREPGFVPGWDSFFEKKGYRTDATVSVFLGFLLFLIPAKKPCFGKKNDGENQEHSLGTEPIITWKDFQKTMPWEIVILVGGGYALASGSKSSGLSTWIGNQMLSLSSLPPWAVTLLACILVSIVTEFVSNPATITIFLPILCSLSETLHINPLYTLIPVTMCISFAVMLPVGNPPNAIVFSYGHCQIKDMVKAGLGVNVIGLVIVMVAINTWGVSLFHLDTYPAWARVSNITDQA

SEQ ID NO: 3375 - protein, 1503 aa, Homo sapiens
MPGPPALRRRLLLLLLVLLIAGSAGAAPLPQTGAGEAPPAAEVSSSFVILCVCSLIILIVLIANCVSCCKDPEIDFKEFEDNFDDEIDFTPPAEDTPSVQSPAEVFTLSVPNISLPAPSQFQPSVEGLKSQVARHSLNYIQEIGNGWFGKVLLGEIYTGTSVARVIVKELKASANPKEQDTFLKNGEPYYILQHPNILQCVGQCVEAIPYLLVFEFCDLGDLKAYLRSEQEHMRGDSQTMLLQRMACEVAAGLAAMHKLHFLHSDLALRNCFLTSDLNVKVGDYGIGFSRYKEDYIETDDKKVFPLRWTAPELVTSFQDRLLTADQTKYSNIWSLGVTLWELFDNAAQPYSNLSNLDVLNQVIRERDTKLPKPQLEQPYSDRWYEVLQFCWLSPEKRPAAEDVHRLLTYLRLQSQRDSEVDFEQQWNALKPNTNSRDSSNNAAFPILDHFARDRLGREMEEVLTVTETSQGLSFEYVWEAAKHDHFDERSRGHLDEGLSYTSIFYPVEVFESSLSDPGPGKQDDSGQDVPLRVPGVVPVFDAHNLSVGSDYYIQLEEKSGSNLELDYPPALLTTDMDNPERTGPELSQLTALRSVELEESSTDEDFFQSSTDPKDSSLPGDLHVTSGPESPFNNIFNDVDKSEDLPSHQKIFDLMELNGVQADFKPATLSSSLDNPKESVITGHFEKEKPRKIFDSEPLCLSDNLMHQDNFDPLNVQELSENFLFLQEKNLLKGSLSSKEHINDLQTELKNAGFTEAMLETSCRNSLDTELQFAENKPGLSLLQENVSTKGDDTDVMLTGDTLSTSLQSSPEVQVPPTSFETEETPRRVPPDSLPTQGETQPTCLDVIVPEDCLHQDISPDAVTVPVEILSTDARTHSLDNRSQDSPGESEETLRLTESDSVLADDILASRVSVGSSLPELGQELHNKPFSEDHHSHRRLEKNLEAVETLNQLNSKDAAKEAGLVSALSSDSTSQDSLLEDSLSAPFPASEPSLETPDSLESVDVHEALLDSLGSHTPQKLVPPDKPADSGYETENLESPEWTLHPAPEGTADSEPATTGDGGHSGLPPNPVIVISDAGDGHRGTEVTPETFTAGSQGSYRDSAYFSDNDSEPEKRSEEVPGTSPSALVLVQEQPLPEPVLPEQSPAAQDSCLEARKSQPDESCLSALHNSSDLELRATPEPAQTGVPQQVHPTEDEASSPWSVLNAELSSGDDFETQDDRPCTLASTGTNTNELLAYTNSALDKSLSSHSEGPKLKEPDIEGKYLGKLGVSGMLDLSEDGMDADEEDENSDDSDEDLRAFNLHSLSSESEDETEHPVPIILSNEDGRHLRSLLKPTAANAPDPLPEDWKKEKKAVTFFDDVTVYLFDQETPTKELGPCGGEACGPDLSGPAPASGSPYLSRCINSESSTDEEGGGFEWDDDFSPDPFMSKTTSNLLSSKPSLQTSKYFSPPPPARSTEQSWPHSAPYSRFSISPANIASFSLTHLTDSDIEQGGSSEDGEKD

SEQ ID NO: 3376 - protein, 388 aa, Homo sapiens
MPQLSQDNQECLQKHFSRPSIWTQFLPLFRAQRYNTDIHQITENEGDLRAVPDIKSFPPAQLPDSPAAPKLFGLLSSPLSSLARFFSHLLRRPPPEAPRRRLDFSPLLPALPAARLSRGHEELPGRLSLLLGAALALPGRPSGGRPLRPPHPVAKPREEDATAGQSSPMPQMGSERMEMRKRQMPAAQDTPGAAPGQPGAGSRGSNACCFCWCCCCSCSCLTVRNQEDQRPTIASHELRADLPTWEESPAPTLEEVNAWAQSFDKLMVTPAGRNAFREFLRTEFSEENMLFWMACEELKKEANKNIIEEKARIIYEDYISILSPKEVSLDSRVREVINRNMVEPSQHIFDDAQLQIYTLMHRDSYPRFMNSAVYKDLLQSLSEKSIEA

SEQ ID NO: 3377 - protein, 414 aa, Homo sapiens [sequence omitted]

SEQ ID NO: 3378 - protein, 1119 aa, Homo sapiens
MAGAPRGGGGGGGGAGEPGGAERAAGTSRRRGLRACDEEFACPELEALFRGYTLRLEQAATLKALAVLSLLAGALALAELLGAPGPAPGLAKGSHPVHCVLFLALLVVTNVRSLQVPQLQQVGQLALLFSLTFALLCCPFALGGPARGSAGAAGGPATAEQGVWQLLLVTFVSYALLPVRSLLAIGFGLVVAASHLLVTATLVPAKRPRLWRTLGANALLFVGVNMYGVFVRILTERSQRKAFLQARSCIEDRLRLEDENEKQERLLMSLLPRNVAMEMKEDFLKPPERIFHKIYIQRHDNVSILFADIVGFTGLASQCTAQELVKLLNELFGKFDELATENHCRRIKILGDCYYCVSGLTQPKTDHAHCCVEMGLDMIDTITSVAEATEVDLNMRVGLHTGRVLCGVLGLRKWQYDVWSNDVTLANVMEAAGLPGKVHITKTTLACLNGDYEVEPGYGHERNSFLKTHNIETFFIVPSHRRKIFPGLILSDIKPAKRMKFKTVCYLLVQLMHCRKMFKAEIPFSNVMTCEDDDKRRALRTASEKLRNRSSFSTNVVYTTPGTRVNRYISRLLEARQTELEMADLNFFTLKYKHVEREQKYHQLQDEYFTSAVVLTLILAALFGLVYLLIFPQSVVVLLLLVFCICFLVACVLYLHITRVQCFPGCLTIQIRTVLCIFIVVLIYSVAQGCVVGCLPWAWSSKPNSSLVVLSSGGQRTALPTLPCESTHHALLCCLVGTLPLAIFFRVSSLPKMILLSGLTTSYILVLELSGYTRTGGGAVSGRSYEPIVAILLFSCALALHARQVDIRLRLDYLWAAQAEEEREDMEKVKLDNRRILFNLLPAHVAQHFLMSNPRNMDLYYQSYSQVGVMFASIPNFNDFYIELDGNNMGVECLRLLNEIIADFDELMEKDFYKDIEKIKTIGSTYMAAVGLAPTSGTKAKKSISSHLSTLADFAIEMFDVLDEINYQSYNDFVLRVGINVGPVVAGVIGARRPQYDIWGNTVNVASRMDSTGVQGRIQVTEEVHRLLRRCPYHFVCRGKVSVKGKGEMLTYFLEGRTDGNGSQIRSLGLDRKMCPFGRAGLQGRRPPVCPMPGVSVRAGLPPHSPGQYLPSAAAGKEA

SEQ ID NO: 3379 - protein, 319 aa, Homo sapiens
MAICPELAQTDKSALANLSDETETLKNSTDEVQTSSSFSSSGGRQSSPLTSGSKLEREKQTPSLEQGDTQSELLDYKNYEKKLSKKWINYLKLKDSNFERHQPDTKLPTEITRVSDEELNALQSYCTMKINLIHRRGDSKKKTSSRHKKLHLGLDVEASERDAFSCTVPDELLNRIYFKNMRTTPKQEAAAKQHISYQCPYCNRKRAELALSAFLKQKKTLLESFLLQERIDEHLHTKDFLTRIGEAHQDFPRLSDDPRIIWKRLTEKSHIRYSGFERSETEQKLQRDGNSACHLPFSLPFLKRLTLIKPELVIVNDNV

SEQ ID NO: 3380 - protein, 357 aa, Homo sapiens
MSGKTKARRAAMFFRRCSEDASGSASGNALLSEDENPDANGVTRSWKIILSTMLTLTFLLVGLLNHQWLKETDVPQKSRQLYAIIAEYGSRLYKYQARLRMPKEQLELLKKESQNLENNFRQILFLIEQIDVLKALLRDMKDGMDNNHNWNTHGDPVEDPDHTEEVSNLVNYVLKKLREDQVEMADYALKSAGASIIEAGTSESYKNNKAKLYWHGIGFLNHEMPPDIILQPDVYPGKCWAFPGSQGHTLIKLATKIIPTAVTMEHISEKVSPSGNISSAPKEFSVYGITKKCEGEEIFLGQFIYNKTGTTVQTFELQHAVSEYLLCVKLNIFSNWGHPKYTCLYRFRVHGTPGKHI

SEQ ID NO: 3381 - protein, 1554 aa, Homo sapiens
MREAAAALVPPPAFAVTPAAAMEEPPPPPPPPPPPPEPETESEPECCLAARQEGTLGDSACKSPESDLEDFSDETNTENLYGTSPPSTPRQMKRMSTKHQRNNVGRPASRSNLKEKMNAPNQPPHKDTGKTVENVEEYSYKQEKKIRAALRTTERDRKKNVQCSFMLDSVGGSLPKKSIPDVDLNKPYLSLGCSNAKLPVSVPMPIARPARQTSRTDCPADRLKFFETLRLLLKLTSVSKKKDREQRGQENTSGFWLNRSNELIWLELQAWHAGRTINDQDFFLYTARQAIPDIINEILTFKVDYGSFAFVRDRAGFNGTSVEGQCKATPGTKIVGYSTHHEHLQRQRVSFEQVKRIMELLEYIEALYPSLQALQKDYEKYAAKDFQDRVQALCLWLNITKDLNQKLRIMGTVLGIKNLSDIGWPVFEIPSPRPSKGNEPEYEGDDTEGELKELESSTDESEEEQISDPRVPEIRQPIDNSFDIQSRDCISKKLERLESEDDSLGWGAPDWSTEAGFSRHCLTSIYRPFVDKALKQMGLRKLILRLHKLMDGSLQRARIALVKNDRPVEFSEFPDPMWGSDYVQLSRTPPSSEEKCSAVSWEELKAMDLPSFEPAFLVLCRVLLNVIHECLKLRLEQRPAGEPSLLSIKQLVRECKEVLKGGLLMKQYYQFMLQEVLEDLEKPDCNIDAFEEDLHKMLMVYFDYMRSWIQMLQQLPQASHSLKNLLEEEWNFTKEITHYIRGGEAQAGKLFCDIAGMLLKSTGSFLEFGLQESCAEFWTSADDSSASDEIRRSVIEISRALKELFHEARERASKALGFAKMLRKDLEIAAEFRLSAPVRDLLDVLKSKQYVKVQIPGLENLQMFVPDTLAEEKSIILQLLNAAAGKDCSKDSDDVLIDAYLLLTKHGDRARDSEDSWGTWEAQPVKVVPQVETVDTLRSMQVDNLLLVVMQSAHLTIQRKAFQQSIEGLMTLCQEQTSSQPVIAKALQQLKNDALELCNRISNAIDRVDHMFTSEFDAEVDESESVTLQQYYREAMIQGYNFGFEYHKEVVRLMSGEFRQKIGDKYISFARKWMNYVLTKCESGRGTRPRWATQGFDFLQAIEPAFISALPEDDFLSLQALMNECIGHVIGKPHSPVTAIHRNSPRPMKVPRCHSDPPNPHLIIPTPEGFRGSSVPENDRLASIAAELQFRSLSRHSSPTEERDEPAYPRGDSSGSTRRSWELRTLISQSKDTASKLGPIEAIQKSVRLFEEKRYREMRRKNIIGQVCDTPKSYDNVMHVGLRKVTFKWQRGNKIGEGQYGKVYTCISVDTGELMAMKEIRFQPNDHKTIKETADELKIFEGIKHPNLVRYFGVELHREEMYIFMEYCDEGTLEEVSRLGLQEHVIRLYSKQITIAINVLHEHGIVHRDIKGANIFLTSSGLIKLGDFGCSVKLKNNAQTMPGEVNSTLGTAAYMAPEVITRAKGEGHGRAADIWSLGCVVIEMVTGKRPWHEYEHNFQIMYKVGMGHKPPIPERLSPEGKDFLSHCLESDPKMRWTASQLLDHSFVKVCTDEE

SEQ ID NO: 3382 - protein, 631 aa, Homo sapiens
MFYAHFVLSKRGPLAKIWLAAHWDKKLTKAHVFECNLESSVESIISPKVKMALRTSGHLLLGVVRIYHRKAKYLLADCNEAFIKIKMAFRPGVVDLPEENREAAYNAITLPEEFHDFDQPLPDLDDIDVAQQFSLNQSRVEEITMREEVGNISILQENDFGDFGMDDREIMREGSAFEDDDMLVSTTTSNLLLESEQSTSNLNEKINHLEYEDQYKDDNFGEGNDGGILDDKLISNNDGGIFDDPPALSEAGVMLPEQPAHDDMDEDDNVSMGGPDSPDSVDPVEPMPTMTDQTTLVPNEEEAFALEPIDITVKETKAKRKRKLIVDSVKELDSKTIRAQLSDYSDIVTTLDLAPPTKKLMMWKETGGVEKLFSLPAQPLWNNRLLKLFTRCLTPLVPEDLRKRRKGGEADNLDEFLKEFENPEVPREDQQQQHQQRDVIDEPIIEEPSRLQESVMEASRTNIDESAMPPPPPQGVKRKAGQIDPEPVMPPQQVEQMEIPPVELPPEEPPNICQLIPELELLPEKEKEKEKEKEDDEEEEDEDASGGDQDQEERRWNKRTQQMLHGLQRALAKTGAESISLLELCRNTNRKQAAAKFYSFLVLKKQQAIELTQEEPYSDIIATPGPRFHII

SEQ ID NO: 3383 - protein, 452 aa, Homo sapiens
MSASLNYKSFSKEQQTMDNLEKQLICPICLEMFTKPVVILPCQHNLCRKCASDIFQASNPYLPTRGGTTMASGGRFRCPSCRHEVVLDRHGVYGLQRNLLVENIIDIYKQESTRPEKKSDQPMCEEHEEERINIYCLNCEVPTCSLCKVFGAHKDCQVAPLTHVFQRQKSELSDGIAILVGSNDRVQGVISQLEDTCKTIEECCRKQKQELCEKFDYLYGILEERKNEMTQVITRTQEEKLEHVRALIKKYSDHLENVSKLVESGIQFMDEPEMAVFLQNAKTLLKKISEASKAFQMEKIEHGYENMNHFTVNLNREEKIIREIDFYREDEDEEEEEGGEGEKEGEGEVGGEAVEVEEVENVQTEFPGEDENPEKASELSQVELQAAPGALPVSSPEPPPALPPAADAPVTQIGFEAPPLQGQAAAPASGSGADSEPARHIFSFSWLNSLNE

SEQ ID NO: 3384 - protein, 264 aa, Homo sapiens
MRTLWMALCALSRLWPGAQAGCAEAGRCCPGRDPACFARGWRLDRVYGTCFCDQACRFTGDCCFDYDRACPARPCFVGEWSPWSGCADQCKPTTRVRRRSVQQEPQNGGAPCPPLEERAGCLEYSTPQGQDCGHTYVPAFITTSAFNKERTRQATSPHWSTHTEDAGYCMEFKTESLTPHCALENWPLTRWMQYLREGYTVCVDCQPPAMNSVSLRCSGDGLDSDGNQTLHWQAIGNPRCQGTWKKVRRVDQCSCPAVHSFIFI

SEQ ID NO: 3385 - protein, 500 aa, Homo sapiens
MPSSGRALLDSPLDSGSLTSLDSSVFCSEGEGEPLALGDCFTVNVGGSRFVLSQQALSCFPHTRLGKLAVVVASYRRPGALAAVPSPLELCDDANPVDNEYFFDRSSQAFRYVLHYYRTGRLHVMEQLCALSFLQEIQYWGIDELSIDSCCRDRYFRRKELSETLDFKKDTEDQESQHESEQDFSQGPCPTVRQKLWNILEKPGSSTAARIFGVISIIFVVVSIINMALMSAELSWLDLQLLEILEYVCISWFTGEFVLRFLCVRDRCRFLRKVPNIIDLLAILPFYITLLVESLSGSQTTQELENVGRIVQVLRLLRALRMLKLGRHSTGLRSLGMTITQCYEEVGLLLLFLSVGISIFSTVEYFAEQSIPDTTFTSVPCAWWWATTSMTTVGYGDIRPDTTTGKIVAFMCILSGILVLALPIAIINDRFSACYFTLKLKEAAVRQREALKKLTKNIATDSYISVNLRDVYARSIMEMLRLKGRERASTRSSGGDDFWF

SEQ ID NO: 3386 - protein, 3707 aa, Homo sapiens
MKGIRKGESRAKESKPWEPGKRRCAKCGRLDFILMKKMGIKSGFTFWNLVFLLTVSCVKGFIYTCGGTLKGLNGTIESPGFPYGYPNGANCTWVIIAEERNRIQIVFQSFALEEEYDYLSLYDGHPHPTNFRTRLTGFHLPPPVTSTKSVFSLRLTSDFAVSAHGFKVYYEELQSSSCGNPGVPPKGVLYGTRFDVGDKIRYSCVTGYILDGHPQLTCIANSVNTASWDFPVPICRAEDACGGTMRGSSGIISSPSFPNEYHNNADCTWTIVAEPGDTISLIFTDFQMEEKYDYLEIEGSEPPTIWLSGMNIPPPIISNKNWLRLHFVTDSNHRYRGFSAPYQGSSTLTHTTSTGELEEHNRTTTGAIAVASTPADVTVSSVTAVTIHRLSEEQRVQVTSLRNSGLDPNTSKDGLSPHPADTQSTRRRPRHAEQIERTKELAVVTHRVKKAIDFKSRGFKLFPGKDNSNKFSILNEGGIKTASNLCPDPGEPENGKRIGSDFSLGSTVQFSCDEDYVLQGAKSITCQRIAEVFAAWSDHRPVCKVKTCGSNLQGPSGTFTSPNFPFQYDSNAQCVWVITAVNTNKVIQINFEEFDLEIGYDTLTIGDGGEVGDPRTVLQVLTGSFVPDLIVSMSSQMWLHLQTDESVGSVGFKVNYKEIEKESCGDPGTPLYGIREGDGFSNRDVLRFECQFGFELIGEKSIVCQENNQWSANIPICIFPCLSNFTAPMGTVLSPDYPEGYGNNLNCIWTIISDPGSRIHLSFNDFDLESQFDFLAVKDGDSPESPILGTFTGAEVPSHLTSNSHILRLEFQADHSMSGRGFNITYNTFGHNECPDPGIPINARRFGDNFQLGSSISVICEEGFIKTQGTETITCILMDGKVMWSGLIPKCGAPCGGHFSAPSGVILSPGWPGYYKDSLNCEWVIEAEPGHSIKITFERFQTELNYDVLEVHDGPNLLSPLLGSYNGTQVPQFLFSSSNFIYLLFTTDNSRSNNGFKIHYESVTVNTYSCLDPGIPVHGRRYGHDFSIGSTVSFSCDSGYRLSHEEPLLCEKNHWWSHPLPTCDALCGGDVRGPSGTILSPGYPEFYPNSLNCTWTVDVTHGKGVQFNFHTFHLEDHHDYLLITENGSFTQPLARLTGSDLPPTINAGLYGNFRAQLRFISDFSISYEGFNITFSEYNLEPCEDPGIPQYGSRIGFNFGIGDTLTFSCSSGYRLEGTSEIICLGGGRRVWSAPLPRCVAECGASATNNEGILLSPNYPLNYENNHECIYSIQVQAGKGINISARTFHLAQGDVLKIYDGKDKTTHLLGAFTGASMRGLTLSSTSNQLWLEFNSDTEGTDEGFQLVYTSFELSHCEDPGIPQFGYKISDQGHFAGSTIIYGCNPGYTLHGSSLLKCMTGERRAWDYPLPSCIAECGGRFKGESSGRILSPGYPFPYDNNLRCMWMIEVDPGNIVSLQFLAFDTEASHDILRVWDGPPENDMLLKEISGSLIPEGIHSTLNIVTIQFDTDFYISKSGFAIQFSSSVATACRDPGVPMNGTRNGDGREPGDTVVFQCDPGYELQGEERITCIQVENRYFWQPSPPVCIAPCGGNLTGSSGFILSPNFPHPYPHSRDCDWTITVNADYVISLAFISFSIEPNYDFLYIYDGPDSNSPLIGSFQDSKLPERIESSSNTMHLAFRSDGSVSYTGFHLEYKAKLRESCFDPGNIMNGTRLGMDYKLGSTVTYYCDAGYVLQGYSTLTCIMGDDGRPGWNRALPSCHAPCGSRSTGSEGTVLSPNYPKNYSVGHNCVYSIAVPKEFVVFGQFVFFQTSLHDVVEVYDGPTQQSSLLSSLSGSHSGESLPLSSGNQITIRFTSVGPITAKGFHFVYQAVPRTSSTQCSSVPEPRFGRRIGNEFAVGSSVLFDCNPGYILHGSIAIRCETVPNSLAQWNDSLPTCIVPCGGILTKRKGTILSPGYPEPYDNNLNCVWKITVPEGAGIQVQVVSFATEHNWDSLDFYDGGDNNAPRLGSYSGTTIPHLLNSTSNNLYLNFQSDISVSAAGFHLEYTAIGLDSCPEPQTPSSGIKIGDRYMVGDVVSFQCDQGYSLQGHSHITCMPGPVRRWNYPIPICLAQCGGAMSDFSGVILSPGFPGNYPSSLDCTWTINLPIGFGVHLQFVNFSTETIHDYLEVRSGSSETSTVIGRLSGPQIPSSLFSTTHETSLYFHSDYSQNKQGFHIVYQAYQLQSCPDPRPFRNGFVIGNDFTVGQTISFECFPGYTLIGNSALTCLHGVSRNWNHPLPRCEALCGGNITAMNGTIYSPGYPDEYPNFQDCFWLVRVPPGNGIYINFTVLQTEPIYDFITVWDGPDQNSPQIGQFSGNTALESVYSTSNQILIKFHSDFTTSGFFVLSYHAYQLRVCQPPPPVPNAEILTEDDEFEIGDIIRYQCLPGFTLVGNAILTCRLGERLQMDGAPPVCQVLCPANELRLDSTGVILSPGYPDSYPNLQMCAWSISVEKGYNITMFVEFFQTEKEFDVLQVYDGPNIQSPVLISLSGDYSSAFNITSNGHEVFLQWSADHGNNKKGFRIRYIAFYCSTPESPPHGYIISQTGGQLNSVVRWACDRGFRLVGKSSAVCRKSSYGYHAWDAPVPACQAISCGIPKAPTNGGILTTDYLVGTRVTYFCNDGYRLSSKELTTAVCQSDGTWSNHNKTPRCVVVTCPSINSFILEHGRWRIVNGSHYEYKTKVVFSCDPGYHGLGPASIECLPNGTWSWRNERPYCQIISCGELPTPPNGNKIGTQTSYGSTAIFTCDLGFMLVGSAVRECLSSGLWSESETRCLAGHCGIPELIVNGQVIGENYGYRDTVVYQCNPGFRLIGSSVRICQQDHNWSGQLPSCVPVSCGHPGSPIYGRTSGNGFNFNDVVTFSCNIGYLMQGPTKAQCQANRQWSHPPPMCKVVNCSDPGIPANSKRESKIEHGNFTYGTVVFYDCNPGYFLFGSSVLICQPNGQWDKPLPECIMIDCGHPGVPPNAVLSGEKYTFGSTVHYSCTGKRSLLGQSSRTCQLNGHWSGSQPHCSGDATGTCGDPGTPGHGSRQESNFRTKSTVRYACDTGYILHGSEERTCLANGSWTGRQPECKAVQCGNPGTTANGKVFRIDGTTFSSSVIYSCMEGYILSGPSVRQCTANGTWSGTLPNCTIISCGDPGIPANGLRYGDDYVVGQNVSYMCQPGYTMELNGSRIRTCTINGTWSGVMPTCRAVTCPTPPQISNGRLEGTNFDWGFSISYICSPGYELSFPAVLTCVGNGTWSGEVPQCLPKFCGDPGIPAQGKREGKSFIYQSEVSFSCNFPFILVGSSTRICQADGTWSGSSPHCIEPTQTSCENPGVPRHGSQNNTFGFQVGSVVQFHCKKGHLLQGSTTRTCLPDLTWSGIQPECIPHSCKQPETPAHANVVGMDLPSHGYTLIYTCQPGFFLAGGTEHRVCRSDNTWTGKVPICEAGSKILVKDPRPALGTPSPKLSVPDDVFAQNYIWKGSYNFKGRKQPMTLTVTSFNASTGRVNATLSNSNMELLLSGVYKSQEARLMLRIYLIKVPAHASVKKMKEENWAMDGFVSAEPDGATYVFQGFIQGKDYGQFGLQRLGLNMSEGSNSSNQPHGTNSSSVAIAILVPFFALIFAGFGFYLYKQRTAPKTQYTGCSVHENNNGQAAFENPMYDTNAKSVEGKAVRFDPNLNTVCTMV

SEQ ID NO: 3387 - protein, 855 aa, Homo sapiens
MAALGVAEAVAAPHPAEGAETAEAVELSRALSRLLPGLEADSKPGRRRALEALRRALEEPGPAADPTAFQGPWARLLLPRLLRCLSDPAEGCRALAVHLLDLGLRRAARPRDALPRLLPALAARLAGPVPARRPPEACEELRLALVQLLGLAVDLCGAALAPHLDDALRALRCSLLDPFAAVRRESCSCAAALAQATPDHFHMQSESLIGPLMQTISHQHWKVRVAAIEATGAVIHFGNGKSVDDVLSHFAQRLFDDVPQVRRAVASVVGGWLLCLRDRYSFFHKLIPLLLSSLNDEVPEVRQLAASLWEDVGLQWQKENEEDLKDKLDFAPPTPPHYPPHERRPVLGCRELVFRNLSKILPALCHDITDWVVGTRVKSAQLLPVLLLHAEDHATQHLEVVLRTLFQACTDEEAAVVQSCTRSAELVGTFVSPEVFLKLILSTLKKTPSASGLLVLASAMRGCPREALQPHLAAIATELAQAHICQASENDLYLERLLLCVQALVSVCHEDCGVASLQLLDVLLTIVALAGATGLRDKAQETMDSLAMVEGVSSCQDLYRKHIGPLLERVTASHLDWTAHSPELLQFSVIVAQSGPALGEALPHVVPTLRACLQPSQDPQMRLKLFSILSTVLLRATDTINSQGQFPSYLETVTKDILAPNLQWHAGRTAAAIRTAAVSCLWALTSSEVLSAEQIRDVQETLMPQVLTTLEEDSKMTRLISCRIINTFLKTSGGMTDPEKLIRIYPELLKRLDDVSNDVRMAAASTLVTWLQCVKGANAKSYYQSSVQYLYRELLVHLDDPERAIQDAILEVLKEGSGLFPDLLVRETEAVIHKHRSATYCEQLLQHVQAVPATQ

SEQ ID NO: 3388 - protein, 497 aa, Homo sapiens
MTVFLSFAFLAAILTHIGCSNQRRSPENSGRRYNRIQHGQCAYTFILPEHDGNCRESTTDQYNTNALQRDAPHVEPDFSSQKLQHLEHVMENYTQWLQKLENYIVENMKSEMAQIQQNAVQNHTATMLEIGTSLLSQTAEQTRKLTDVETQVLNQTSRLEIQLLENSLSTYKLEKQLLQQTNEILKIHEKNSLLEHKILEMEGKHKEELDTLKEEKENLQGLVTRQTYIIQELEKQLNRATTNNSVLQKQQLELMDTVHNLVNLCTKEVLLKGGKREEEKPFRDCADVYQAGFNKSGIYTIYINNMPEPKKVFCNMDVNGGGWTVIQHREDGSLDFQRGWKEYKMGFGNPSGEYWLGNEFIFAITSQRQYMLRIELMDWEGNRAYSQYDRFHIGNEKQNYRLYLKGHTGTAGKQSSLILHGADFSTKDADNDNCMCKCALMLTGGWWFDACGPSNLNGMFYTAGQNHGKLNGIKWHYFKGPSYSLRSTTMMIRPLDF

SEQ ID NO: 3389 - protein, 305 aa, Homo sapiens
MELHYLAKKSNQADLCDARDWSSRGLPGDQADTAATRAALCCQKQCASTPRATEMEGSKLSSSPASPSSSLQNSTLQPDAFPPGLLHSGNNQITAERKVCNCCSQELETSFTYVDKNINLEQRNRSSPSAKGHNHPGELGWENPNEWSQEAAISLISEEEDDTSSEATSSGKSIDYGFISAILFLVTGILLVIISYIVPREVTVDPNTVAAREMERLEKESARLGAHLDRCVIAGLCLLTLGGVILSCLLMMSMWKGELYRRNRFASSKESAKLYGSFNFRMKTSTNENTLELSLVEEDALAVQS

SEQ ID NO: 3390 - protein, 375 aa, Homo sapiens
MDVTSQARGVGLEMYPGTAQPAAPNTTSPELNLSHPLLGTALANGTGELSEHQQYVIGLFLSCLYTIFLFPIGFVGNILILVVNISFREKMTIPDLYFINLAVADLILVADSLIEVFNLHERYYDIAVLCTFMSLFLQVNMYSSVFFLTWMSFDRYIALARAMRCSLFRTKHHARLSCGLIWMASVSATLVPFTAVHLQHTDEACFCFADVREVQWLEVTLGFIVPFAIIGLCYSLIVRVLVRAHRHRGLRPRRQKALRMILAVVLVFFVCWLPENVFISVHLLQRTQPGAAPCKQSFRHAHPLTGHIVNLAAFSNSCLNPLIYSFLGETFRDKLRLYIEQKTNLPALNRFCHAALKAVIPDSTEQSDVRFSSAV

SEQ ID NO: 3391 - protein, 413 aa, Homo sapiens
MSNVSGILETAGVPLVSANWPQPSPPPAVPAGPQMDHMGNSSQGAPWLFLTSALARGVSGIFVWTALVLTCHQIYLHLRSYTVPQEQRYIIRLLLIVPIYAFDSWLSLLLLGDHQYYVYFDSVRDCYEAFVIYSFLSLCFQYLGGEGAIMAEIRGKPIKSSCLYGTCCLRGMTYSIGFLRFCKQATLQFCLVKPVMAVTTIILQAFGKYHDGDFNVRSGYLYVTLIYNASVSLALYALFLFYFTTRELLRPFQPVLKFLTIKAVIFLSFWQGLLLAILERCGVIPEVETSGGNKLGAGTLAAGYQNFIICVEMLFASVALRYAFPCQVYAEKKENSPAPPAPMQSISSGIRETVSPQDIVQDAIHNFSPAYQHYTQQATHEAPRPGTHPSGGSGGSRKSRSLEKRMLIPSEDL

SEQ ID NO: 3392 - protein, 1203 aa, Homo sapiens
MGNLKSVAQEPGPPCGLGLGLGLGLCGKQGPATPAPEPSRAPASLLPPAPEHSPPSSPLTQPPEGPKFPRVKNWEVGSITYDTLSAQAQQDGPCTPRRCLGSLVFPRKLQGRPSPGPPAPEQLLSQARDFINQYYSSIKRSGSQAHEQRLQEVEAEVAATGTYQLRESELVFGAKQAWRNAPRCVGRIQWGKLQVFDARDCRSAQEMFTYICNHIKYATNRGNLRSAITVFPQRCPGRGDFRIWNSQLVRYAGYRQQDGSVRGDPANVEITELCIQHGWTPGNGRFDVLPLLLQAPDDPPELFLLPPELVLEVPLEHPTLEWFAALGLRWYALPAVSNMLLEIGGLEFPAAPFSGWYMSTEIGTRNLCDPHRYNILEDVAVCMDLDTRTTSSLWKDKAAVEINVAVLHSYQLAKVTIVDHHAATASFMKHLENEQKARGGCPADWAWIVPPISGSLTPVFHQEMVNYFLSPAFRYQPDPWKGSAAKGTGITRKKTFKEVANAVKISASLMGTVMAKRVKATILYGSETGRAQSYAQQLGRLFRKAFDPRVLCMDEYDVVSLEHETLVLVVTSTFGNGDPPENGESFAAALMEMSGPYNSSPRPEQHKSYKIRFNSISCSDPLVSSWRRKRKESSNTDSAGALGTLRFCVFGLGSRAYPHFCAFARAVDTRLEELGGERLLQLGQGDELCGQEEAFRGWAQAAFQAACETFCVGEDAKAAARDIFSPKRSWKRQRYRLSAQAEGLQLLPGLIHVHRRKMFQATIRSVENLQSSKSTRATILVRLDTGGQEGLQYQPGDHIGVCPPNRPGLVEALLSRVEDPPAPTEPVAVEQLEKGSPGGPPPGWVRDPRLPPCTLRQALTFFLDITSPPSPQLLRLLSTLAEEPREQQELEALSQDPRRYEEWKWFRCPTLLEVLEQFPSVALPAPLLLTQLPLLQPRYYSVSSAPSTHPGEIHLTVAVLAYRTQDGLGPLHYGVCSTWLSQLKPGDPVPCFIRGAPSFRLPPDPSLPCILVGPGTGIAPFRGFWQERLHDIESKGLQPTPMTLVFGCRCSQLDHLYRDEVQNAQQRGVFGRVLTAFSREPDNPKTYVQDILRTELAAEVHRVLCLERGHMFVCGDVTMATNVLQTVQRILATEGDMELDEAGDVIGVLRDQQRYHEDIFGLTLRTQEVTSRIRTQSFSLQERQLRGAVPWAFDPPGSDTNSP

SEQ ID NO: 3393 - protein, 904 aa, Homo sapiens
MAAIRALQQWCRQQCEGYRDVNICNMTTSFRDGLAFCAILHRHRPDLINFSALKKENIYENNKLAFRVAEEHLGIPALLDAEDMVALKVPDRLSILTYVSQYYNYFHGRSPIGGMAGVKRASEDSEEEPSGKKAPVQAAKLPSPAPARKPPLSPAQTNPVVQRRNEGAGGPPPKTDQALAGSLVSSTCGVCGKHVHLVQRHLADGRLYHRSCFRCKQCSCTLHSGAYKATGEPGTFVCTSHLPAAASASPKLTGLVPRQPGAMGVDSRTSCSPQKAQEANKARPSAWEPAAGNSPARASVPAAPNPAATSATSVHVRSPARPSESRLAPTPTEGKVRPRVTNSSPMGWSSAAPCTAAAASHPAVPPSAPDPRPATPQGGGAPRVAAPQTTLSSSSTSAATVDPPAWTPSASRTQQARNKFFQTSAVPPGTSLSGRGPTPSLVLSKDSSKEQARNFLKQALSALEEAGAPAPGRPSPATAAVPSSQPKTEAPQASPLAKPLQSSSPRVLGLPSRMEPPAPLSTSSTSQASALPPAGRRNLAESSGVGRVGAGSRPKPEAPMAKGKSTTLTQDMSTSLQEGQEDGPAGWRANLKPVDRRSPAERTLKPKEPRALAEPRAGEAPRKVSGSFAGSVHITLTPVRPDRTPRPASPGPSLPARSPSPPRRRRLAVPASLDVCDNWLRPEPPGQEARVQSWKEEEKKPHLQGKPGRPLSPANVPALPGETVTSPVRLHPDYLSPEEIQRQLQDIERRLDALELRGVELEKRLRAAEGDDAEDSLMVDWFWLIHEKQLLLRQESELMYKSKAQRLEEQQLDIEGELRRLMAKPEALKSLQERRREQELLEQYVSTVNDRSDIVDSLDEDRLREQEEDQMLRDMIEKLGLQRKKSKFRLSKIWSPKSKSSPSQ

SEQ ID NO: 3394 - protein, 470 aa, Homo sapiens
MDRGEKIQLKRVFGYWWGTSFLLINIIGAGIFVSPKGVLAYSCMNVGVSLCVWAGCAILAMTSTLCSAEISISFPCSGAQYYFLKRYFGSTVAFLNLWTSLFLGSGVVAGQALLLAEYSIQPFFPSCSVPKLPKKCLALAMLWIVGILTSRGVKEVTWLQIASSVLKVSILSFISLTGVVFLIRGKKENVERFQNAFDAELPDISHLIQAIFQGYFAYSGGACFTLIAGELKKPRTTIPKCIFTALPLVTVVYLLVNISYLTVLTPREILSSDAVAITWADRAFPSLAWIMPFAISTSLFSNLLISIFKSSRPIYLASQEGQLPLLFNTLNSHSSPFTAVLLLVTLGSLAIILTSLIDLINYIFFTGSLWSILLMIGILRRRYQEPNLSIPYKVFLSFPLATIVIDVGLVVIPLVKSPNVHYVYVLLLVLSGLLFYIPLIHFKIRLAWFEKMTCYLQLLFNICLPDVSEE

SEQ ID NO: 3395 - protein, 549 aa, Homo sapiens
MRRPRGEPGPRAPRPTEGATCAGPGESWSPSPNSMLRVLLSAQTSPARLSGLLLIPPVQPCCLGPSKWGDRPVGGGPSAGPVQGLQRLLEQAKSPGELLRWLGQNPSKVRAHHYSVALRRLGQLLGSRPRPPPVEQVTLQDLSQLIIRNCPSFDIHTIHVCLHLAVLLGFPSDGPLVCALEQERRLRLPPKPPPPLQPLLRGGQGLEAALSCPRFLRYPRQHLISSLAEARPEELTPHVMVLLAQHLARHRLREPQLLEAIAHFLVVQETQLSSKVVQKLVLPFGRLNYLPLEQQFMPCLERILAREAGVAPLATVNILMSLCQLRCLPFRALHFVFSPGFINYISGTPHALIVRRYLSLLDTAVELELPGYRGPRLPRRQQVPIFPQPLITDRARCKYSHKDIVAEGLRQLLGEEKYRQDLTVPPGYCTDFLLCASSSGAVLPVRTQDPFLPYPPRSCPQGQAASSATTRDPAQRVVLVLRERWHFCRDGRVLLGSRALRERHLGLMGYQLLPLPFEELESQRGLPQLKSYLRQKLQALGLRWGPEGG

SEQ ID NO: 3396 - protein, 363 aa, Homo sapiens
MQRAGGGSAPGGNGGGGGGGPGTAFSIDSLIGPPPPRSGHLLYTGYPMFMPYRPLVLPQALAPAPLPAGLPPLAPLASFAGRLTNTFCAGLGQAVPSMVALTTALPSFAEPPDAFYGPQELAAAAAAAAATAARNNPEPGGRRPEGGLEADELLPAREKVAEPPPPPPPHFSETFPSLPAEGKVYSSDEEKLEASAGDPAGSEQEEEGSGGDSEDDGFLDSSAGGPGALLGPKPKLKGSLGTGAEEGAPVTAGVTAPGGKSRRRRTAFTSEQLLELEKEFHCKKYLSLTERSQIAHALKLSEVQVKIWFQNRRAKWKRIKAGNVSSRSGEPVRNPKIVVPIPVHVNRFAVRSQHQQMEQGARP

SEQ ID NO: 3397 - protein, 394 aa, Homo sapiens
MALEVGDMEDGQLSDSDSDMTVAPSDRPLQLPKVLGGDSAMRAFQNTATACAPVSHYRAVESVDSSEESFSDSDDDSCLWKRKRQKCFNPPPKPEPFQFGQSSQKPPVAGGKKINNIWGAVLQEQNQDAVATELGILGMEGTIDRSRQSETYNYLLAKKLRKESQEHTKDLDKELDEYMHGGKKMGSKEEENGQGHLKRKRPVKDRLGNRPEMNYKGRYEITAEDSQEKVADEISFRLQEPKKDLIARVVRIIGNKKAIELLMETAEVEQNGGLFIMNGSRRRTPGGVFLNLLKNTPSISEEQIKDIFYIENQKEYENKKAARKRRTQVLGKKMKQAIKSLNFQEDDDTSRETFASDTNEALASLDESQEGHAEAKLEAEEAIEVDHSHDLDIF

SEQ ID NO: 3398 - protein, 597 aa, Homo sapiens
MQWPPPWRRSPLVSATPPPGPTRGLLCPRRVSEAGDSSTEGARTGHRHYVTPAESAMEGRSQPLPSLRPASPTNAPAHGRGSDCTAKEPPLANVCRQNYGAAQDPVEPAGRRSASHVTGSSLGKAEVACGRRWRWAELLADTSWSPAGRATEMKVKMLSRNPDNYVRETKLDLQRVPRNYDPALHPFEVPREYIRALNATKLERVFAKPFLASLDGHRDGVNCLAKHPEKLATVLSGACDGEVRIWNLTQRNCIRTIQAHEGFVRGICTRFCGTSFFTVGDDKTVKQWKMDGPGYGDEEEPLHTILGKTVYTGIDHHWKEAVFATCGQQVDIWDEQRTNPICSMTWGFDSISSVKFNPIETFLLGSCASDRNIVLYDMRQATPLKKVILDMRTNTICWNPMEAFIFTAANEDYNLYTFDMRALDTPVMVHMDHVSAVLDVDYSPTGKEFVSASFDKSIRIFPVDKSRSREVYHTKRMQHVICVKWTSDSKYIMCGSDEMNIRLWKANASEKLGVLTSREKAAKDYNQKLKEKFQHYPHIKRIARHRHLPKSIYSQIQEQRIMKEARRRKEVNRIKHSKPGSVPLVSEKKKHVVAVVK

SEQ ID NO: 3399 - protein, 470 aa, Homo sapiens
MGIWTSGTDIFLSLWEIYVSPRSPGWMDFIQHLGVCCLVALISVGLLSVAACWFLPSIIAAAASWIITCVLLCCSKHARCFILLVFLSCGLREGRNALIAAGTGIVILGHVENIFHNFKGLLDGMTCNLRAKSFSIHFPLLKKYIEAIQWIYGLATPLSVFDDLVSWNQTLAVSLFSPSHVLEAQLNDSKGEVLSVLYQMATTTEVLSSLGQKLLAFAGLSLVLLGTGLFMKRFLGPCGWKYENIYITRQFVQFDERERHQQRPCVLPLNKEERRKYVIIPTFWPTPKERKNLGLFFLPILIHLCIWVLFAAVDYLLYRLIFSVSKQFQSLPGFEVHLKLHGEKQGTQDIIHDSSFNISVFEPNCIPKPKFLLSETWVPLSVILLILVMLGLLSSILMQLKILVSASFYPSVERKRIQYLHAKLLKKRSKQPLGEVKRRLSLYLTKIHFWLPVLKMIRKKQMDMASADKS

SEQ ID NO: 3400 - protein, 1812 aa, Homo sapiens
MAVDSAMELLFLDTFKHPSAEQSSHIDVVRFPCVVYINEVRVIPPGVRAHSSLPDNRAYGETSPHTFQLDLFFNNVSKPSAPVFDRLGSLEYDENTSIIFRPNSKVNTDGLVLRGWYNCLTLAIYGSVDRVISHDRDSPPPPPPPPPPPQPQPSLKRNPKHADGEKEDQFNGSPPRPQPRGPRTPPGPPPPDDDEDDPVPLPVSGDKEEDAPHREDYFEPISPDRNSVPQEGQYSDEGEVEEEQQEEGEEDEDDVDVEEEEDEDEDDRRTVDSIPEEEEEDEEEEGEEDEEGEGDDGYEQISSDEDGIADLERETFKYPNFDVEYTAEDLASVPPMTYDPYDRELVPLLYFSCPYKTTFEIEISRMKDQGPDKENSGAIEASVKLTELLDLYREDRGAKWVTALEEIPSLIIKGLSYLQLKNTKQDSLGQLVDWTMQALNLQVALRQPIALNVRQLKAGTKLVSSLAECGAQGVTGLLQAGVISGLFELLFADHVSSSLKLNAFKALDSVISMTEGMEAFLRGRQNEKSGYQKLLELILLDQTVRVVTAGSAILQKCHFYEVLSEIKRLGDHLAEKTSSLPNHSEPDHDTDAGLERTNPEYENEVEASMDMDLLESSNISEGEIERLINLLEEVFHLMETAPHTMIQQPVKSFPTMARITGPPERDDPYPVLFRYLHSHHFLELVTLLLSIPVTSAHPGVLQATKDVLKFLAQSQKGLLFFMSEYEATNLLIRALCHFYDQDEEEGLQSDGVIDDAFALWLQDSTQTLQCITELFSHFQRCTASEETDHSDLLGTLHNLYLITFNPVGRSAVGHVFSLEKNLQSLITLMEYYSKEALGDSKSKKSVAYNYACILILVVVQSSSDVQMLEQHAASLLKLCKADENNAKLQELGKWLEPLKNLRFEINCIPNLIEYVKQNIDNLMTPEGVGLTTALRVLCNVACPPPPVEGQQKDLKWNLAVIQLFSAEGMDTFIRVLQKLNSILTQPWRLHVNMGTTLHRVTTISMARCTLTLLKTMLTELLRGGSFEFKDMRVPSALVTLHMLLCSIPLSGRLDSDEQKIQNDIIDILLTFTQGVNEKLTISEETLANNTWSLMLKEVLSSILKVPEGFFSGLILLSELLPLPLPMQTTQVIEPHDISVALNTRKLWSMHLHVQAKLLQEIVRSFSGTTCQPIQHMLRRICVQLCDLASPTALLIMRTVLDLIVEDLQSTSEDKEKQYTSQTTRLLALLDALASHKACKLAILHLINGTIKGDERYAEIFQDLLALVRSPGDSVIRQQCVEYVTSILQSLCDQDIALILPSSSEGSISELEQLSNSLPNKELMTSICDCLLATLANSESSYNCLLTCVRTMMFLAEHDYGLFHLKSSLRKNSSALHSLLKRVVSTFSKDTGELASSFLEFMRQILNSDTIGCCGDDNGLMEVEGAHTSRTMSINAAELKQLLQSKEESPENLFLELEKLVLEHSKDDDNLDSLLDSVVGLKQMLESSGDPLPLSDQDVEPVLSAPESLQNLFNNRTAYVLADVMDDQLKSMWFTPFQAEEIDTDLDLVKVDLIELSEKCCSDFDLHSELERSFLSEPSSPGRTKTTKGFKLGKHKHETFITSSGKSEYIEPAKRAHVVPPPRGRGRGGFGQGIRPHDIFRQRKQNTSRPPSMHVDDFVAAESKEVVPQDGIPPPKRPLKVSQKISSRGGFSGNRGGRGAFHSQNRFFTPPASKGNYSRREGTRGSSWSAQNTPRGNYNESRGGQSNFNRGPLPPLRPLSSTGYRPSPRDRASRGRGGLGPSWASANSGSGGSRGKFVSGGSGRGRHVRSFTR

SEQ ID NO: 3401 - protein, 296 aa, Homo sapiens
MTLNNVTMRQGTVGMQPQQQRWSIPADGRHLMVQKEPHQYSHRNRHSATPEDHCRRSWSSDSTDSVISSESGNTYYRVVLIGEQGVGKSTLANIFAGVHDSMDSDCEVLGEDTYERTLMVDGESATIILLDMWENKGENEWLHDHCMQVGDAYLIVYSITDRASFEKASELRIQLRRARQTEDIPIILVGNKSDLVRCREVSVSEGRACAVVFDCKFIETSAAVQHNVKELFEGIVRQVRLRRDSKEKNERRLAYQKRKESMPRKARRFWGKIVAKNNKNMAFKLKSKSCHDLSVL

SEQ ID NO: 3402 - protein, 537 aa, Homo sapiens
MPAPTQLFFPLIRNCELSRIYGTACYCHHKHLCCSSSYIPQSRLRYTPHPAYATFCRPKENWWQYTQGRRYASTPQKFYLTPPQVNSILKANEYSFKVPEFDGKNVSSILGFDSNQLPANAPIEDRRSAATCLQTRGMLLGVFDGHAGCACSQAVSERLFYYIAVSLLPHETLLEIENAVESGRALLPILQWHKHPNDYFSKEASKLYFNSLRTYWQELIDLNTGESTDIDVKEALINAFKRLDNDISLEAQVGDPNSFLNYLVLRVAFSGATACVAHVDGVDLHVANTGDSRAMLGVQEEDGSWSAVTLSNDHNAQNERELERLKLEHPKSEAKSVVKQDRLLGLLMPFRAFGDVKFKWSIDLQKRVIESGPDQLNDNEYTKFIPPNYHTPPYLTAEPEVTYHRLRPQDKFLVLATDGLWETMHRQDVVRIVGEYLTGMHHQQPIAVGGYKVTLGQMHGLLTERRTKMSSVFEDQNAATHLIRHAVGNNEFGTVDHERLSKMLSLPEELARMYRDDITIIVVQFNSHVVGAYQNQE

SEQ ID NO: 3403 - protein, 714 aa, Homo sapiens
MLQNPQEKSQAYPRRRRPGCYAYRQNPEAIAAAAMYTFLPDNFSPAKPKPSKDLKPLLGSAVLGLLLVLAAVVAWCYYSVSLRKAERLRAELLDLKAGGFSIRNQKGEQVFRLAFRSGALDLDSCSRDGALLGCSLTADGLPLHFFIQTVRPKDTVMCYRVRWEEAAPGRAVEHAMFLGDAAAHWYGGAEMRTQHWPIRLDGQQEPQPFVTSDVYSSDAAFGGILERYWLSSRAAAIKVNDSVPFHLGWNSTERSLRLQARYHDTPYKPPAGRAAAPELSYRVCVGSDVTSIHKYMVRRYFNKPSRVPAPEAFRDPIWSTWALYGRAVDQDKVLRFAQQIRLHHFNSSHLEIDDMYTPAYGDFDFDEVKFPNASDMFRRLRDAGFRVTLWVHPFVNYNSSRFGEGVERELFVREPTGRLPALVRWWNGIGAVLDFTHPKARDWFQGHLRRLRSRYSVASFKFDAGEVSYLPRDFSTYRPLPDPSVWSRRYTEMALPFFSLAEVRVGYQSQNISCFFRLVDRDSVWGYDLGLRSLIPAVLTVSMLGYPFILPDMVGGNAVPQRTAGGDVPERELYIRWLEVAAFMPAMQFSIPPWRYDAEVVAIAQKFAALRASLVAPLLLELAGEVTDTGDPIVRPLWWIAPGDETAHRIDSQFLIGDTLLVAPVLEPGKQERDVYLPAGKWRSYKGELFDKTPVLLTDYPVDLDEIAYFTWAS

SEQ ID NO: 3404 - protein, 1288 aa, Homo sapiens
MASVAWAVLKVLLLLPTQTWSPVGAGNPPDCDAPLASALPRSSFSSSSELSSSHGPGFSRLNRRDGAGGWTPLVSNKYQWLQIDLGERMEVTAVATQGGYGSSDWVTSYLLMFSDGGRNWKQYRREESIWGFPGNTNADSVVHYRLQPPFEARFLRFLPLAWNPRGRIGMRIEVYGCAYKSEVVYFDGQSALLYRLDKKPLKPIRDVISLKFKAMQSNGILLHREGQHGNHITLELIKGKLVFFLNSGNAKLPSTIAPVTLTLGSLLDDQHWHSVLIELLDTQVNFTVDKHTHHFQAKGDSSYLDLNFEISFGGIPTPGRSRAFRRKSFHGCLENLYYNGVDVTELAKKHKPQILMMGNVSFSCPQPQTVPVTFLSSRSYLALPGNSGEDKVSVTFQFRTWNRAGHLLFGELRRGSGSFVLFLKDGKLKLSLFQPGQSPRNVTAGAGLNDGQWHSVSFSAKWSHMNVVVDDDTAVQPLVAVLIDSGDTYYFGGCLDNSSGSGCKSPLGGFQGCLRLITIGDKAVDPILVQQGALGSFRDLQIDSCGITDRCLPSYCEHGGECSQSWDTFSCDCLGTGYTGETCHSSLYEQSCEAHKHRGNPSGLYYIDADGSGPLGPFLVYCNMTADAAWTVVQHGGPDAVTLRGAPSGHPRSAVSFAYAAGAGQLRSAVNLAERCEQRLALRCGTARRPDSRDGTPLSWWVGRTNETHTSWGGSLPDAQKCTCGLEGNCIDSQYYCNCDAGRNEWTSDTIVLSQKEHLPVTQIVMTDAGRPHSEAAYTLGPLLCRGDQSFWNSASFNTETSYLHFPAFHGELTADVCFFFKTTVSSGVFMENLGITDFIRIELRAPTEVTFSFDVGNGPCEVTVQSPTPFNDNQWHHVRAERNVKGASLQVDQLPQKMQPAPADGHVRLQLNSQLFIGGTATRQRGFLGCIRSLQLNGVALDLEERATVTPGVEPGCAGHCSTYGHLCRNGGRCREKRRGVTCDCAFSAYDGPFCSNEISAYFATGSSMTYHFQEHYTLSENSSSLVSSLHRDVTLTREMITLSFRTTRTPSLLLYVSSFYEEYLSVILANNGSLQIRYKLDRHQNPDAFTFDFKNMADGQLHQVKINREEAVVMVEVNQSTKKQVILSSGTEFNAVKSLILGKVLEAAGADPDTRRAATSGFTGCLSAVRFGRAAPLKAALRPSGPSRVTVRGHVAPMARCAAGAASGSPARELAPRLAGGAGRSGPADEGEPLVNADRRDSAVIGGVIAVVIFILLCITAIAIRIYQQRKLRKENESKVSKKEEC

SEQ ID NO: 3405 - protein, 369 aa, Homo sapiens
MADSAQAQKLVYLVTGGCGFLGEHVVRMLLQREPRLGELRVFDQHLGPWLEELKTGPVRVTAIQGDVTQAHEVAAAVAGAHVVIHTAGLVDVFGRASPKTIHEVNVQGTRNVIEACVQTGTRFLVYTSSMEVVGPNTKGHPFYRGNEDTPYEAVHRHPYPCSKALAEWLVLEANGRKVRGGLPLVTCALRPTGIYGEGHQIMRDFYRQGLRLGGWLFRAIPASVEHGRVYVGNVAWMHVLAARELEQRATLMGGQVYFCYDGSPYRSYEDFNMEFLGPCGLRLVGARPLLPYWLLVFLAALNALLQWLLRPLVLYAPLLNPYTLAVANTTFTVSTDKAQRHFGYEPLFSWEDSRTRTILWVQAATGSAQ

SEQ ID NO: 3406 - protein, 462 aa, Homo sapiens
MQLRKMQTVKKEQASLDASSNVDKMMVLNSALTEVSEDSTTGEELLLSEGSVGKNKSSACRRKREFIPDEKKDAMYWEKRRKNNEAAKRSREKRRLNDLVLENKLIALGEENATLKAELLSLKLKFGLISSTAYAQEIQKLSNSTAVYFQDYQTSKSNVSSFVDEHEPSMVSSSCISVIKHSPQSSLSDVSEVSSVEHTQESSVQGSCRSPENKFQIIKQEPMELESYTREPRDDRGSYTASIYQNYMGNSFSGYSHSPPLLQVNRSSSNSPRTSETDDGVVGKSSDGEDEQQVPKGPIHSPVELKHVHATVVKVPEVNSSALPHKLRIKAKAMQIKVEAFDNEFEATQKLSSPIDMTSKRHFELEKHSAPSMVHSSLTPFSVQVTNIQDWSLKSEHWHQKELSGKTQNSFKTGVVEMKDSGYKVSDPENLYLKQGIANLSAEVVSLKRLIATQPISASDSG

SEQ ID NO: 3407 - protein, 229 aa, Homo sapiens
MKSSDIDQDLFTDSYCKVCSAQLISESQRVAHYESRKHASKVRLYYMLHPRDGGCPAKRLRSENGSDADMVDKNKCCTLCNMSFTSAVVADSHYQGKIHAKRLKLLLGEKTPLKTTATPLSPLKPPRMDTAPVVASPYQRRDSDRYCGLCAAWFNNPLMAQQHYDGKKHKKNAARVALLEQLGTTLDMGELRGLRRNYRCTICSVSLNSIEQYHAHLKGSKHQTNLKNK

SEQ ID NO: 3408 - protein, 235 aa, Homo sapiens
MKYVFYLGVLAGTFFFADSSVQKEDPAPYLVYLKSHFNPCVGVLIKPSWVLAPAHCYLPNLKVMLGNFKSRVRDGTEQTINPIQIVRYWNYSHSAPQDDLMLIKLAKPAMLNPKVQPLTLATTNVRPGTVCLLSGLDWSQENSGRHPDLRQNLEAPVMSDRECQKTEQGKSHRNSLCVKFVKVFSRIFGEVAVATVICKDKLQGIEVGHFMGGDVGIYTNVYKYVSWIENTAKDK

SEQ ID NO: 3409 - protein, 437 aa, Homo sapiens
MKCLGKRRGQAAAFLPLCWLFLKILQPGHSHLYNNRYAGDKVIRFIPKTEEEAYALKKISYQLKVDLWQPSSISYVSEGTVTDVHIPQNGSRALLAFLQEANIQYKVLIEDLQKTLEKGSSLHTQRNRRSLSGYNYEVYHSLEEIQNWMHHLNKTHSGLIHMFSIGRSYEGRSLFILKLGRRSRLKRAVWIDCGIHAREWIGPAFCQWFVKEALLTYKSDPAMRKMLNHLYFYIMPVFNVDGYHFSWTNDRFWRKTRSRNSRFRCRGVDANRNWKVKWCDEGASMHPCDDTYCGPFPESEPEVKAVANFLRKHRKHIRAYLSFHAYAQMLLYPYSYKYATIPNFRCVESAAYKAVNALQSVYGVRYRYGPASTTLYVSSGSSMDWAYKNGIPYAFAFELRDTGYFGFLLPEMLIKPTCTETMLAVKNITMHLLKKCP

SEQ ID NO: 3410 - protein, 760 aa, Homo sapiens
MSPKKVQIKVEEKEDETEESSSEEEEEVEDKLPRRESLRPKRKRTRDVINEDDPEPEPEDEETRKAREKERRRRLKRGAEEEEIDEEELERLKAELDEKRQIIATVKCKPWKMEKKIEVLKEAKKFVSENEGALGKGKGKRWFAFKMMMAKKWAKFLRDFENFKAACVPWENKIKAIESQFGSSVASYFLFLRWMYGVNMVLFILTFSLIMLPEYLWGLPYGSLPRKTVPRAEEASAANFGVLYDFNGLAQYSVLFYGYYDNKRTIGWMNFRLPLSYFLVGIMCIGYSFLVVLKAMTKNIGDDGGGDDNTFNFSWKVFTSWDYLIGNPETADNKFNSITMNFKEAITEEKAAQVEENVHLIRFLRFLANFFVFLTLGGSGYLIFWAVKRSQEFAQQDPDTLGWWEKNEMNMVMSLLGMFCPTLFDLFAELEDYHPLIALKWLLGRIFALLLGNLYVFILALMDEINNKIEEEKLVKANITLWEANMIKAYNASFSENSTGPPFFVHPADVPRGPCWETMVGQEFVRLTVSDVLTTYVTILIGDFLRACFVRFCNYCWCWDLEYGYPSYTEFDISGNVLALIFNQGMIWMGSFFAPSLPGINILRLHTSMYFQCWAVMCCNVPEARVFKASRSNNFYLGMLLLILFLSTMPVLYMIVSLPPSFDCGPFSGKNRMFEVIGETLEHDFPSWMAKILRQLSNPGLVIAVILVMVLAIYYLNATAKGQKAANLDLKKKMKMQALENKMRNKKMAAARAAAAAGRQ

SEQ ID NO: 3411 - protein, 501 aa, Homo sapiens
MSSSGTPDLPVLLTDLKIQYTKIFINNEWHDSVSGKKFPVFNPATEEELCQVEEGDKEDVDKAVKAARQAFQIGSPWRTMDASERGRLLYKLADLIERDRLLLATMESMNGGKLYSNAYLNDLAGCIKTLRYCAGWADKIQGRTIPIDGNFFTYTRHEPIGVCGQIIPWNFPLVMLIWKIGPALSCGNTVVVKPAEQTPLTALHVASLIKEAGFPPGVVNIVPGYGPTAGAAISSHMDIDKVAFTGSTEVGKLIKEAAGKSNLKRVTLELGGKSPCIVLADADLDNAVEFAHHGVFYHQGQCCIAASRIFVEESIYDEFVRRSVERAKKYILGNPLTPGVTQGPQIDKEQYDKILDLIESGKKEGAKLECGGGPWGNKGYFVQPTVFSNVTDEMRIAKEEIFGPVQQIMKFKSLDDVIKRANNTFYGLSAGVFTKDIDKAITISSALQAGTVWVNCYGVVSAQCPFGGFKMSGNGRELGEYGFHEYTEVKTVTVKISQKNS

SEQ ID NO: 3412 - protein, 1154 aa, Homo sapiens
MQAMEGEVLLPALYEEEEEEEEEEEEVEEEEEQVQKGGSVGSLSVNKHRGLSLTETELEELRAQVLQLVAELEETRELAGQHEDDSLELQGLLEDERLASAQQAEVFTKQIQQLQGELRSLREEISLLEHEKESELKEIEQELHLAQAEIQSLRQAAEDSATEHESDIASLQEDLCRMQNELEDMERIRGDYEMEIASLRAEMEMKSSEPSGSLGLSDYSGLQEELQELRERYHFLNEEYRALQESNSSLTGQLADLESERTQRATERWLQSQTLSMTSAESQTSEMDFLEPDPEMQLLRQQLRDAEEQMHGMKNKCQELCCELEELQHHRQVSEEEQRRLQRELKCAQNEVLRFQTSHSVTQNEELKSRLCTLQKKYDTSQDEQNELLKMQLQLQTELRQLKVMKSTLVENQSEKELLCRLQKLHLQHQNVTCEKEKLLERQQQLQEELQCHEAELQHLRDTVASFKESNEKDTETHAQLQEMKQLYQASKDELERQKHMYDQLEQDLLLCQLELKELKASHPIPEDKGKCANKCDTLLSRLTELQEKYKASQKEMGQLQMEQCELLEDQRRMQEEQGQLQEELHRLTLPLPKSGLLLKSQELLTKLEDLCELQLLYQGMQEEQKKLIQNQDCVLKEQLEIHEELRRFKESHFQEVLENPDDSKLAKSSKCNRNKQSKLLMEQMQALQVMYDAGQAKQELLQQEQGRLLEERKRLQADLQLCLEEMQLLQVQSPSIKMSLESYGKSYGSMVPSNENCRKTYDTTVDDNESYYKSYTSTQTSSKSFLKSYDSSTSASEAYGKSYCTTSNSSITYKKSYGSTSSSDTCQKSFVSSCTDEEPAEPEDMERFEEMVVKVLIKLQAVQAMYQISQEEHSQLQEQMEKLLAKQKDLKEELDACEREFKECMECLEKPMAPQNDKNEIKELQTKLRELQLQYQASMDEQGRLLVVQEQLEGQLQCCQEELRQLREKRPSVVKEARGKNANKNMNKNANGVKMKKVTKPCSDTSESDLETRKSLEVVLYYKASQRKLDGLAKEEEKKEEMEEEKKQVKEEAKEQCGDELVAEPADPEEAKSTEDQEENEEDKEEEEKEEDSEEEEDDADSSLESPEENNPLRLSESKKSSPTPNPPIFSLPLVGLVVISALLWCWWAETSS

SEQ ID NO: 3413 - protein, 590 aa, Homo sapiens
MATPRGRTKKKASFDHSPDSLPLRSSGRQAKKKATETTDEDEDGGSEKKYRKCEKAGCTATCPVCFASASERCAKNGYTSRWYHLSCGEHFCNECFDHYYRSHKDGYDKYTTWKKIWTSNGKTEPSPKAFMADQQLPYWVQCTKPECRKWRQLTKEIQLTPQIAKTYRCGMKPNTAIKPETSDHCSLPEDLEALTPQKCIPHIIVRGLVRIRCVQEVERILYFMTRKGLINTGVLSVGADQYLLPKDYHNKSVIIIGAGPAGLAAARQLHNFGIKVTVLEAKDRIGGRVWDDKSFKGVTVGRGAQIVNGCINNPVALMCEQVSARSWDHNEFFAQFAGDHTLLTPGYSVIIEKLAEGLDIQLKSPVQCIDYSGDEVQVTTTDGTGYSAQKVLVTVPLALLQKGAIQFNPPLSEKKMKAINSLGAGIIEKIALQFPYRFWDSKVQGADFFGHVPPSASKRGLFAVFYDMDPQKKHSVLMSVIAGEAVASVRTLDDKQVLQQCMATLRELFKEQEVPDPTKYFVTRWSTDPWIQMAYSFVKTGGSGEAYDIIAEDIQGTVFFAGEATNRHFPQTVTGAYLSGVREASKIAAF

SEQ ID NO: 3414 - protein, 871 aa, Homo sapiens
MGEGGLPPAFQLLLRACDQGDTETARRLLEPGAAEPAERGAEPEAGAEPAGAEVAGPGAAAAGAVGAPVPVDCSDEAGNTALQFAAAGGHEPLVRFLLRRGASVNSRNHYGWSALMQAARFGHVSVAHLLLDHGADVNAQNRLGASVLTVASRGGHLGVVKLLLEAGAFVDHHHPSGEQLGLGGSRDEPLDITALMAAIQHGHEAVVRLLMEWGADPNHAARTVGWSPLMLAALTGRLGVAQQLVEKGANPDHLSVLEKTAFEVALDCKHRDLVDYLDPLTTVRPKTDEEKRRPDIFHALKMGNFQLVKEIADEDPSHVNLVNGDGATPLMLAAVTGQLALVQLLVERHADVDKQDSVHGWTALMQATYHGNKEIVKYLLNQGADVTLRAKNGYTAFDLVMLLNDPDTELVRLLASVCMQVNKDKGRPSHQPPLPHSKVRQPWSIPVLPDDKGGLKSWWNRMSNRFRKLKLMQTLPRGLSSNQPLPFSDEPEPALDSTMRAAPQDKTSRSALPDAAPVTKDNGPGSTRGEKEDTLLTTMLRNGAPLTRLPSDKLKAVIPPFLPPSSFELWSSDRSRTRHNGKADPMKTALPQRASRGHPVGGGGTDTTPVRPVKFPSLPRSPASSANSGNFNHSPHSSGGSSGVGVSRHGGELLNRSGGSIDNVLSQIAAQRKKAAGLLEQKPSHRSSPVGPAPGSSPSELPASPAGGSAPVGKKLETSKRPPSGTSTTSKSTSPTLTPSPSPKGHTAESSVSSSSSHRQSKSSGGSSSGTITDEDELTGILKKLSLEKYQPIFEEQEVDMEAFLTLTDGDLKELGIKTDGSRQQILAAISELNAGKGRERQILQETIHNFHSSFESSASNTRAPGNSPCA

SEQ ID NO: 3415 - protein, 1796 aa, Homo sapiens
MKIFQRKMRYWLLPPFLAIVYFCTIVQGQVAPPTRLRYNVISHDSIQISWKAPRGKFGGYKLLVTPTSGGKTNQLNLQNTATKAIIQGLMPDQNYTVQIIAYNKDKESKPAQGQFRIKDLEKRKDPKPRVKVVDRGNGSRPSSPEEVKFVCQTPAIADIVILVDGSWSIGRFNFRLVRHFLENLVTAFDVGSEKTRIGLAQYSGDPRIEWHLNAFSTKDEVIEAVRNLPYKGGNTLTGLALNYIFENSFKPEAGSRTGVSKIGILITDGKSQDDIIPPSRNLRESGVELFAIGVKNADVNELQEIASEPDSTHVYNVAEFDLMHTVVESLTRTLCSRVEEQDREIKASAHAITGPPTELITSEVTARSFMVNWTHAPGNVEKYRVVYYPTRGGKPDEVVVDGTVSSTVLKNLMSLTEYQIAVFAIYAHTASEGLRGTETTLALPMASDLLLYDVTENSMRVKWDAVPGASGYLILYAPLTEGLAGDEKEMKIGETHTDIELSGLLPNTEYTVTVYAMFGEEASDPVTGQETTLALSPPRNLRISNVGSNSARLTWDPTSRQINGYRIVYNNADGTEINEVEVDPITTFPLKGLTPLTEYTIAIFSIYDEGQSEPLTGVFTTEEVPAQQYLEIDEVTTDSFRVTWHPLSADEGLHKLMWIPVYGGKTEEVVLKEEQDSHVIEGLEPGTEYEVSLLAVLDDGSESEVVTAVGTTLDSFWTEPATTIVPTTSVTSVFQTGIRNLVVGDETTSSLRVKWDISDSDVQQFRVTYMTAQGDPEEEVIGTVMVPGSQNNLLLKPLLPDTEYKVTVTPIYTDGEGVSVSAPGKTLPSSGPQNLRVSEEWYNRLRITWDPPSSPVKGYRIVYKPVSVPGPTLETFVGADINTILITNLLSGMDYNVKIFASQASGFSDALTGMVKTLFLGVTNLQAKHVEMTSLCAHWQVHRHATAYRVVIESLQDRQKQESTVGGGTTRHCFYGLQPDSEYKISVYTKLQEIEGPSVSIMEKTQSLPTRPPTFPPTIPPAKEVCKAAKADLVFMVDGSWSIGDENFNKIISFLYSTVGALNKIGTDGTQVAMVQFTDDPRTEFKLNAYKTKETLLDAIKHISYKGGNTKTGKAIKYVRDTLFTAESGTRRGIPKVIVVITDGRSQDDVNKISREMQLDGYSIFAIGVADADYSELVSIGSKPSARHVFFVDDFDAFKKIEDELITFVCETASATCPVVHKDGIDLAGFKMMEMFGLVEKDFSSVEGVSMEPGTFNVFPCYQLHKDALVSQPTRYLHPEGLPSDYTISFLFRILPDTPQEPFALWEILNKNSDPLVGVILDNGGKTLTYFNYDQSGDFQTVTFEGPEIRKIFYGSFHKLHIVVSETLVKVVIDCKQVGEKAMNASANITSDGVEVLGKMVRSRGPGGNSAPFQLQMFDIVCSTSWANTDKCCELPGLRDDESCPDLPHSCSCSETNEVALGPAGPPGGPGLRGPKGQQGEPGPKGPDGPRGEIGLPGPQGPPGPQGPSGLSIQGMPGMPGEKGEKGDTGLPGPQGIPGGVGSPGRDGSPGQRGLPGKDGSSGPPGPPGPIGIPGTPGVPGITGSMGPQGALGPPGVPGAKGERGERGDLQSQAMVRSVARQVCEQLIQSHMARYTAILNQIPSHSSSIRTVQGPPGEPGRPGSPGAPGEQGPPGTPGFPGNAGVPGTPGERGLTGIKGEKGNPGVGTQGPRGPPGPAGPSGESRPGSPGPPGSPGPRGPPGHLGVPGPQGPSGQPGYCDPSSCSAYGVRAPHPDQPEFTPVQDELEAMELWGPGV

SEQ ID NO: 3416 - protein, 976 aa, Homo sapiens
MNTQKGSLTINVHRGSLAMSIQRGSLVPRDMDSSGRDMQLRVIPAEVKFLDTMAGRVYRLPITVHNICRWNQKIRFKEPVKPQFKLMLTSLDKELASGLQMTAMVEYHPDKDEDTFDRLLISIENKTTEIPLIGLIPSCQLEIESVVNFGTLVANSKVYSKEITITNHGKAPGIFKAEYHGQLPILIFPTSGIVDAKSSMVIKVDFCADQPRIVDEEAIVILQGQPEMLLSIKAHVVEQIIELLSMSSDRRLECIHFGPVFFGSSKIKHARVYNNSPEPINWVAIIQDDAVGEELGTDIQQRTDIALNNLTYIRKIKNIDTTIIISCLPNEGTLQPYQKTVITFCFTPKLMAVGKKDIGPSYRQDYALFLRFESVGSKDGFLRDDDYKTIKSERFQKVELALTGTGLPVLLQFDPGPVLNFKPCFMGERSEIQCIIKNQCELLPVTYHFKKTANFEIDPEKGKITGGGMVDVMCSFVPHQLGVFKVKQMIEIIGLVAEEDLQSLSVKSFHHVYLAFNSICKASTKKVVMKFDPGILPSIRNPTGKFVVKDLAKRKNYAPVAMLQSAMTRTHNHRSCEEPVKDMLLAFPNDRAATIRSKDHHKHFRPIFTKVPRFNYVNHDFAYTTFEKQQKKLHENYYAMYLKYLRSVRLQKKQAERERMYSYDDTDIGLEPGSGLKSPSLSEAEIEEELSSAANSIRANRLLTTRGIASQEEESVRRKVLKGLKSEPSTPQEKHDCSLMLTPKQIHQVIVGPSVLNFGNICVNSPNTHLLHVINMLPMHVLLQLDTDLEELQKTNQFSYVILPTSSTYISMVFDSPTIGKFWKSFTFTVNNVPSGHILVVAVVQPVTLELSSNELVLRPRGFFMKTCFRGTVRLYNRQNCCAQFQWQPVNTGRGIAFSICPAKGTVEAYSSLECEVTWQQGFSSPEEGEFILHVFQGNALKLKCVAHVIIFLEHGFCFEGYEFVGYTLVYIVTYI

SEQ ID NO: 3417 - protein, 730 aa, Homo sapiens
MSKNSEFINLSFLLDHEKEMILGVLKRDEYLKKVEDKRIRKLKNELLEAKRRSGKTQQEASRVCVHCHRNLGLIFDRGDPCQACSLRVCRECRVAGPNGSWKCTVCDKIAQLRIITGEWFFEEKAKRFKQVNVLGTDVVRQSILRRSPGAEEVQSQEQTRQDAEKSDTSPVAGKKASHDGPKRKGFLLSKFRSATRGEIITPKTDTGRSYSLDLDGQHFRSLKSPPGSDRGSTGSSDLNDQEPGPRTPKSSRSNGVTPGTQSSPAPSTRTVTSVISREYGFENSMDLAAIEGTSQELTKSHRRNTSGTPSIAVSGTSLSSDQSRSELDLSESFTEDSEDTVSIRSKSVPGALDKDSLEETEESIDALVSSQLSTNTHRLASGLSTTSLNSMMSVYSETGDYGNVKVSGEILLHISYCYKTGGLYIFVKNCRNLAIGDEKKQRTDAYVKSYLLPDKSRNNKRKTKIRTGTNPEFNETLKYTISHTQLETRTLQLSVWHYDRFGRNSFLGEVEIPFDSWNFENPTDEWFVLQPKVEFAPDIGLQYKGELTVVLRYIPPEENLMLPPEQLQGNKTFKKGKKKESPVISGGILEVFIKEAKNLTAVKSGGTSDSFVKGYLLPDDSKATKHKTLVIKKSVNPQWNHTFMFSGIHPQDIKNVCLELTIWDKEAFSSNIFLGGVRLNSGSGVSHGKNVDWMDSQGEEQRLWQKMANNPGTPFEGVLMLRSSMGKCRL

SEQ ID NO: 3418 - protein, 1460 aa, Homo sapiens
MVKLDIHTLAHHLKQERLYVNSEKQLIQRLNADVLKTAEKLYRTAWIAKQQRINLDRLIITSAEASPAECCQHAKILEDTQFVDGYKQLGFQETAYGEFLSRLRENPRLIASSLVAGEKLNQENTQSVIYTVFTSLYGNCIMQEDESYLLQVLRYLIEFELKESDNPRRLLRRGTCAFSILFKLFSEGLFSAKLFLTATLHEPIMQLLVEDEDHLETDPNKLIERFSPSQQEKLFGEKGSDRFRQKVQEMVESNEAKLVALVNKFIGYLKQNTYCFPHSLRWIVSQMYKTLSCVDRLEVGEVRAMCTDLLLACFICPAVVNPEQYGIISDAPINEVARFNLMQVGRLLQQLAMTGSEEGDPRTKSSLGKFDKSCVAAFLDVVIGGRAVETPPLSSVNLLEGLSRTVVYITYSQLITLVNFMKSVMSGDQLREDRMALDNLLANLPPAKPGKSSSLEMTPYNTPQLSPATTPANKKNRLPIATRSRSRTNMLMDLHMDHEGSSQETIQEVQPEEVLVISLGTGPQLTPGMMSENEVLNMQLSDGGQGDVPVDENKLHGKPDKTLRFSLCSDNLEGISEGPSNRSNSVSSLDLEGESVSELGAGPSGSNGVEALQLLEHEQATTQDNLDDKLRKFEIRDMMGLTDDRDISETVSETWSTDVLGSDFDPNIDEDRLQEIAGAAAENMLGSLLCLPGSGSVLLDPCTGSTISETTSEAWSVEVLPSDSEAPDLKQEERLQELESCSGLGSTSDDTDVREVSSRPSTPGLSVVSGISATSEDIPNKIEDLRSECSSDFGGKDSVTSPDMDEITHGAHQLTSPPSQSESLLAMFDPLSSHEGASAVVRPKVHYARPSHPPPDPPILEGAVGGNEARLPNFGSHVLTPAEMEAFKQRHSYPERLVRSRSSDIVSSVRRPMSDPSWNRRPGNEERELPPAAAIGATSLVAAPHSSSSSPSKDSSRGETEERKDSDDEKSDRNRPWWRKRFVSAMPKAPIPFRKKEKQEKDKDDLGPDRFSTLTDDPSPRLSAQAQVAEDILDKYRNAIKRTSPSDGAMANYESTEVMGDGESAHDSPRDEALQNISADDLPDSASQAAHPQDSAFSYRDAKKKLRLALCSADSVAFPVLTHSTRNGLPDHTDPEDNEIVCFLKVQIAEAINLQDKNLMAQLQETMRCVCRFDNRTCRKLLASIAEDYRKRAPYIAYLTRCRQGLQTTQAHLERLLQRVLRDKEVANRYFTTVCVRLLLESKEKKIREFIQDFQKLTAADDKTAQVEDFLQFLYGAMAQDVIWQNASEEQLQDAQLAIERSVMNRIFKLAFYPNQDGDILRDQVLHEHIQRLSKVVTANHRALQIPEVYLREAPWPSAQSEIRTISAYKTPRDKVQCILRMCSTIMNLLSLANEDSVPGADDFVPVLVFVLIKANPPCLLSTVQYISSFYASCLSGEESYWWMQFTAAVEFIKTIDDRK

SEQ ID NO: 3419 - protein, 2297 aa, Homo sapiens
MDGDGGRRDVPGTLMEPGRGAGPAGMAEPRAKAARPGPQRFLRRSVVESDQEEPPGLEAAEAPGPQPPQPLQRRVLLLCKTRRLIAERARGRPAAPAPAALVAQPGAPGAPADAGPEPVGTQEPGPDPIAAAVETAPAPDGGPREEAAATVRKEDEGAAEAKPEPGRTRRDEPEEEEDDEDDLKAVATSLDGRFLKFDIELGRGSFKTVYKGLDTETWVEVAWCELQDRKLTKLERQRFKEEAEMLKGLQHPNIVRFYDFWESSAKGKRCIVLVTELMTSGTLKTYLKRFKVMKPKVLRSWCRQILKGLLFLHTRTPPIIHRDLKCDNIFITGPTGSVKIGDLGLATLKRASFAKSVIGTPEFMAPEMYEEHYDESVDVYAFGMCMLEMATSEYPYSECQNAAQIYRKVTCGIKPASFEKVHDPEIKEIIGECICKNKEERYEIKDLLSHAFFAEDTGVRVELAEEDHGRKSTIALRLWVEDPKKLKGKPKDNGAIEFTFDLEKETPDEVAQEMIESGFFHESDVKIVAKSIRDRVALIQWRRERIWPALQPKEQQDVGSPDKARGPPVPLQVQVTYHAQAGQPGPPEPEEPEADQHLLPPTLPTSATSLASDSTFDSGQGSTVYSDSQSSQQSVMLGSLADAAPSPAQCVCSPPVSEGPVLPQSLPSLGAYQQPTAAPGLPVGSVPAPACPPSLQQHFPDPAMSFAPVLPPPSTPMPTGPGQPAPPGQQPPPLAQPTPLPQVLAPQPVVPLQPVPPHLPPYLAPASQVGAPAQLKPLQMPQAPLQPLAQVPPQMPPIPVVPPITPLAGIDGLPPALPDLPTATVPPVPPPQYFSPAVILPSLAAPLPPASPALPLQAVKLPHPPGAPLAMPCRTIVPNAPATIPLLAVAPPGVAALSIHSAVAQLPGQPVYPAAFPQMAPTDVPPSPHHTVQNMRATPPQPALPPQPTLPPQPVLPPQPTLPPQPVLPPQPTRPPQPVLPPQPMLPPQPVLPPQPALPVRPEPLQPHLPEQAAPAATPGSQILLGHPAPYAVDVAAQVPTVPVPPAAVLSPPLPEVLLPAAPELLPQFPSSLATVSASVQSVPTQTATLLPPANPPLPGGPGIASPCPTVQLTVEPVQEEQASQDKPPGLPQSCESYGGSDVTSGKELSDSCEGAFGGGRLEGRAARKHHRRSTRARSRQERASRPRLTILNVCNTGDKMVECQLETHNHKMVTFKFDLDGDAPDEIATYMVEHDFILQAERETFIEQMKDVMDKAEDMLSEDTDADRGSDPGTSPPHLSTCGLGTGEESRQSQANAPVYQQNVLHTGKRWFIICPVAEHPAPEAPESSPPLPLSSLPPEASQGPCRGLTLPCLPWRRAACGAVFLSLFSAESAQSKQPPDSAPYKDQLSSKEQPSFLASQQLLSQAGPSNPPGAPPAPLAPSSPPVTALPQDGAAPATSTMPEPASGTASQAGGPGTPQGLTSELETSQPLAETHEAPLAVQPLVVGLAPCTPAPEAASTRDASAPREPLPPPAPEPSPHSGTPQPALGQPAPLLPAAVGAVSLATSQLPSPPLGPTVPPQPPSALESDGEGPPPRVGFVDSTIKSLDEKLRTLLYQEHVPTSSASAGTPVEVGDRDFTLEPLRGDQPRSEVCGGDLALPPVPKEAVSGRVQLPQPLVEKSELAPTRGAVMEQGTSSSMTAESSPRSMLGYDRDGRQVASDSHVVPSVPQDVPAFVRPARVEPTDRDGGEAGESSAEPPPSDMGTVGGQASHPQTLGARALGSPRKRPEQQDVSSPAKTVGRFSVVSTQDEWTLASPHSLRYSAPPDVYLDEAPSSPDVKLAVRRAQTASSIEVGVGEPVSSDSGDEGPRARPPVQKQASLPVSGSVAGDFVKKATAFLQRPSRAGSLGPETPSRVGMKVPTISVTSFHSQSSYISSDNDSELEDADIKKELQSLREKHLKEISELQSQQKQEIEALYRRLGKPLPPNVGFFHTAPPTGRRRKTSKSKLKAGKLLNPLVRQLKVVASSTGHLADSSRGPPAKDPAQASVGLTADSTGLSGKAVQTQQPCSVRASLSSDICSGLASDGGGARGQGWTVYHPTSERVTYKSSSKPRARFLSGPVSVSIWSALKRLCLGKEHSSRSSTSSLAPGPEPGPQPALHVQAQVNNSNNKKGTFTDDLHKLVDEWTSKTVGAAQLKPTLNQLKQTQKLQDMEAQAGWAAPGEARAMTAPRAGVGMPRLPPAPGPLSTTVIPGAAPTLSVPTPDGALGTARRNQVWFGLRVPPTACCGHSTQPRGGQRVGSKTASFAASDPVRS

SEQ ID NO: 3420 - protein, 690 aa, Homo sapiens
MNLRSVFTVEQQRILQRYYENGMTNQSKNCFQLILQCAQETKLDFSVVRTWVGNKRRKMSSKNSESGTATTGTSLSAPDITVRNVVNIARPSSQQSSWTSANNDVIVTGIYSPASSSSRQGTNKHTDTQITEAHKIPIQKTATKNDTEFQLHIPVQRQVAHCKNASLLLGEKTIILSRQTSVLNAGNSVFNHAKKNYGNSSVQASEMTVPQKPSVCHRPCKIEPVGIQRSYKPEHTGPALHNLCGQKPTIRDPYCRTQNLEIREVFSLAVSDYPQRILGGNAPQKPSSAEGNCLSIAMETGDAEDEYAREEELASMRAQIPSYSRFYESGSSLRAENQSTTLPGPGRNMPNSQMVNIRDMSDNVLYQNRNYHLTPRTSLHTASSTMYSNTNPLRSNFSPHFASSNQLRLSQNQNNYQISGNLTVPWITGCSRKRALQDRTQFSDRDLATLKKYWDNGMTSLGSVCREKIEAVATELNVDCEIVRTWIGNRRRKYRLMGIEVPPPRGGPADFSEQPESGSLSALTPGEEAGPEVGEDNDRNDEVSICLSEGSSQEEPNEVVPNDARAHKEEDHHAVTTDNVKIEIIDDEESDMISNSEVEQVNSFLDYKNEEVKFIENELEIQKQKYFKLQTFVRSLILAMKADDKEQQQALLSDLPPELEEMDFNHASLEPDDTSFSVSSLSEKNVSESL

SEQ ID NO: 3421 - protein, 720 aa, Homo sapiens
MDIQLDPARDDLPLMANTSHILVKHYVLDLDVDFESQVIEGTIVLFLEDGNRFKKQNSSIEEACQSESNKACKFGMPEPCHIPVTNARTFSSEMEYNDFAICSKGEKDTSDKDGNHDNQEHASGISSSKYCCDTGNHGSEDFLLVLDCCDLSVLKVEEVDVAAVPGLEKFTRSPELTVVSEEFRNQIVRELVTLPANRWREQLDYYARCSQAPGCGELLFDTDTWSLQIRKTGAQTATDFPHAIRIWYKTKPEGRSVTWTSDQSGRPCVYTVGSPINNRALFPCQEPPVAMSTWQATVRAAASFVVLMSGENSAKPTQLWEECSSWYYYVTMPMPASTFTIAVGCWTEMKMETWSSNDLATERPFSPSEANFRHVGVCSHMEYPCRFQNASATTQEIIPHRVFAPVCLTGACQETLLRLIPPCLSAAHSVLGAHPFSRLDVLIVPANFPSLGMARPSKDKTGHTSDSGASVIKHGLNPEKIFMQVHYLKGYFLLRFLAKRLGDETYFSFLRKFVHTFHGQLILSQDFLQMLLENIPEEKRLELSVENIYQDWLESSGIPKPLQRERRAGAECGLARQVRAEVTKWIGVNRRPRKRKRREKEEVFEKLLPDQLVLLLEHLLEQKTLSPRTLQSLQRTYHLQDQDAEVRHRWCELIVKHKFTKAYKSVERFLQEDQAMGVYLYGELMVSEDARQQQLARRCFERTKEQMDRSSAQVVAEMLF

SEQ ID NO: 3422 - protein, 1146 aa, Homo sapiens
MGPAPAGEQLRGATGEPEVMEPALEGTGKEGKKASSRKRTLAEPPAKGLLQPVKLSRAELYKEPTNEELNRLRETEILFHSSLLRLQVEELLKEVRLSEKKKDRIDAFLREVNQRVVRVPSVPETELTDQAWLPAGVRVPLHQVPYAVKGCFRFLPPAQVTVVGSYLLGTCIRPDINVDVALTMPREILQDKDGLNQRYFRKRALYLAHLAHHLAQDPLFGSVCFSYTNGCHLKPSLLLRPRGKDERLVTVRLHPCPPPDFFRPCRLLPTKNNVRSAWYRGQSPAGDGSPEPPTPRYNTWVLQDTVLESHLQLLSTILSSAQGLKDGVALLKVWLRQRELDKGQGGFTGFLVSMLVVFLVSTRKIHTTMSGYQVLRSVLQFLATTDLTVNGISLCLSSDPSLPALADFHQAFSVVFLDSSGHLNLCADVTASTYHQVQHEARLSMMLLDSRADDGFHLLLMTPKPMIRAFDHVLHLRPLSRLQAACHRLKLWPELQDNGGDYVSAALGPLTTLLEQGLGARLNLLAHSRPPVPEWDISQDPPKHKDSGTLTLGLLLRPEGLTSVLELGPEADQPEAAKFRQFWGSRSELRRFQDGAIREAVVWEAASMSQKRLIPHQVVTHLLALHADIPETCVHYVGGPLDALIQGLKETSSTGEEALVAAVRCYDDLSRLLWGLEGLPLTVSAVQGAHPVLRYTEVFPPTPVRPAFSFYETLRERSSLLPRLDKPCPAYVEPMTVVCHLEGSGQWPQDAEAVQRVRAAFQLRLAELLTQQHGLQCRATATHTDVLKDGFVFRIRVAYQREPQILKEVQSPEGMISLRDTAASLRLERDTRQLPLLTSALHGLQQQHPAFSGVARLAKRWVRAQLLGEGFADESLDLVAAALFLHPEPFTPPSSPQVGFLRFLFLVSTFDWKNNPLFVNLNNELTVEEQVEIRSGFLAARAQLPVMVIVTPQDRKNSVWTQDGPSAQILQQLVVLAAEALPMLEKQLMDPRGPGDIRTVFRPPLDIYDVLIRLSPRHIPRHRQAVDSPAASFCRGLLSQPGPSSLMPVLGYDPPQLYLTQLREAFGDLALFFYDQHGGEVIGVLWKPTSFQPQPFKASSTKGRMVMSRGGELVMVPNVEAILEDFAVLGEGLVQTVEARSERWTV

SEQ ID NO: 3423 - protein, 316 aa, Homo sapiens
MDWKLEGSTQKVESPVLQGQEGILEETGEDGLPEGFQLLQIDAEGECQEGEILATGSTAWCSKNVQRKQRHWEKIVAAKKSKRKQEKERRKANRAENPGICPQHSKRFLRALTKDKLLEAKHSGPRLCIDLSMTHYMSKKELSRLAGQIRRLYGSNKKADRPFWICLTGFTTDSPLYEECVRMNDGFSSYLLDITEEDCFSLFPLETLVYLTPDSEHALEDVDLNKVYILGGLVDESIQKKVTFQKAREYSVKTARLPIQEYMVRNQNGKNYHSEILAINQVFDILSTYLETHNWPEALKKGVSSGKGYILRNSVE

SEQ ID NO: 3424 - protein, 872 aa, Homo sapiens
MGKKIKKEVEPPPKDVFDPLMIESKKAATVVLMLNSPEEEILAKACEAIYKFALKGEENKTTLLELGAVEPLTKLLTHEDKIVRRNATMIFGILASNNDVKKLLRELDVMNSVIAQLAPEEEVVIHEFASLCLANMSAEYTSKVQIFEHGGLEPLIRLLSSPDPDVKKNSMECIYNLVQDFQCRAKLQELNAIPPILDLLKSEYPVIQLLALKTLGVIANDKESRTMLRDNQGLDHLIKILETKELNDLHIEALAVIANCLEDMDTMVQIQQTGGLKKLLSFAENSTIPDIQKNAAKAITKAAYDPENRKLFHEQEVEKCLVALLGSENDGTKIAASQAISAMCENSGSKDFFNNQGIPQLIQLLKSDNEEVREAAALALANLTTCNPANANAAAEADGIDPLINLLSSKRDGAIANAATVLTNMAMQEPLRLNIQNHDIMHAIISPLRSANTVVQSKAALAVTATACDVEARTELRNSGGLEPLVELLRSKNDEVRKHASWAVMVCAGDELTANELCRLGALDILEEVNVSGTRKNKFSEAAYNKLLNNNLSLKYSQTGYLSSSNIINDGFYDYGRINPGTKLLPLKELCLQEPSDLRAVLLINSKSYVSPPSSMEDKSDVGYGRSISSSSSLRRSSKEKNKKNSYHFSAGFGSPIEDKSEPASGRNTVLSKSATKEKGWRKSKGKKEEEKVKEEEEVMVVPKFVGEGSSDKEWCPPSDPDFSMYVYEVTKSILPITNIKEQIEDLAKYVAEKMGGKIPKEKLPDFSWELHISELKFQLKSNVIPIGHVKKGIFYHRALLFKALADRIGIGCSLVRGEYGRAWNEVMLQNDSRKGVIGGLPAPEMYVIDLMFHPGGLMKLRSREADLYRFI

SEQ ID NO: 3425 - protein, 651 aa, Homo sapiens
MKDYDELLKYYELHETIGTGGFAKVKLACHILTGEMVAIKIMDKNTLGSDLPRIKTEIEALKNLRHQHICQLYHVLETANKIFMVLEYCPGGELFDYIISQDRLSEEETRVVFRQIVSAVAYVHSQGYAHRDLKPENLLFDEYHKLKLIDFGLCAKPKGNKDYHLQTCCGSLAYAAPELIQGKSYLGSEADVWSMGILLYVLMCGFLPFDDDNVMALYKKIMRGKYDVPKWLSPSSILLLQQMLQVDPKKRISMKNLLNHPWIMQDYNYPVEWQSKNPFIHLDDDCVTELSVHHRNNRQTMEDLISLWQYDHLTATYLLLLAKKARGKPVRLRLSSFSCGQASATPFTDIKSNNWSLEDVTASDKNYVAGLIDYDWCEDDLSTGAATPRTSQFTKYWTESNGVESKSLTPALCRTPANKLKNKENVYTPKSAVKNEEYFMFPEPKTPVNKNQHKREILTTPNRYTTPSKARNQCLKETPIKIPVNSTGTDKLMTGVISPERRCRSVELDLNQAHMEETPKRKGAKVFGSLERGLDKVITVLTRSKRKGSARDGPRRLKLHYNVTTTRLVNPDQLLNEIMSILPKKHVDFVQKGYTLKCQTQSDFGKVTMQFELEVCQLQKPDVVGIRRQRLKGDAWVYKRLVEDILSSCKV

SEQ ID NO: 3426 - protein, 496 aa, Homo sapiens
MGKEKTHINIVVIGHVDSGKSTTTGHLIYKCGGIDKRTIEKFEKEAAEMGKGSFKYAWVLDKLKAERERGITIDISLWKFETTKYYITIIDAPGHRDFIKNMITGTSQADCAVLIVAAGVGEFEAGISKNGQTREHALLAYTLGVKQLIVGVNKMDSTEPAYSEKRYDEIVKEVSAYIKKIGYNPATVPFVPISGWHGDNMLEPSPNMPWFKGWKVERKEGNASGVSLLEALDTILPPTRPTDKPLRLPLQDVYKIGGIGTVPVGRVETGILRPGMVVTFAPVNITTEVKSVEMHHEALSEALPGDNVGFNVKNVSVKDIRRGNVCGDSKSDPPQEAAQFTSQVIILNHPGQISAGYSPVIDCHTAHIACKFAELKEKIDRRSGKKLEDNPKSLKSGDAAIVEMVPGKPMCVESFSQYPPLGRFAVRDMRQTVAVGVIKNVEKKSGGAGKALGQRLDARHQGPVEVLQEERRPRPRLPRPALATLSARFTNKLSDP

SEQ ID NO: 3427 - protein, 604 aa, Homo sapiens
MENQAHNTMGTSPCEAELQELMEQIDIMVSNKKMDWERKMRALETRLDLRDQELANAQTCLDQKGQEVGLLRQKLDSLEKCNLAMTQNYEGQLQSLKAQFSKLTNNFEKLRLHQMKQNKVPRKELPHLKEEIPFELSNLNQKLEEFRAKSREWDKQEILYQTHLISLDAQQKLLSEKCNQFQKQAQSYQTQLNGKKQCLEDSSSEIPRLICDPDPNCEINERDEFIIEKLKSAVNEIALSRNKLQDENQKLLQELKMYQRQCQAMEAGLSEVKSELQSRDDLLRIIEMERLQLHRELLKIGECQNAQGNKTRLESSYLPSIKEPERKIKELFSVMQDQPNHEKELNKIRSQLQQVEEYHNSEQERMRNEISDLTEELHQKEITIATVTKKAALLEKQLKMELEIKEKMLAKQKVSDMKYKAVRTENTHLKGMMGDLDPGEYMSMDFTNREQSRHTSINKLQYENERLRNDLAKLHVNGKSTWTNQNTYEETGRYAYQSQIKVEQNEERLSHDCEPNRSTMPPLPPSTFQAKEMTSPLVSDDDVFPLSPPDMSFPASLAAQHFLLEEEKRAKELEKLLNTHIDELQRHTEFTLNKYSKLKQNRHI

SEQ ID NO: 3428 - protein, 776 aa, Homo sapiens
MSEAVRVPSPATPLVVAAPAPEERKGKESEREKLPPIVSAGAGATAGLDRGAKGQISTFSSFISAVSPKKEAAENRSSPAHLVFPNIKNVREPPPICLDVRQKQRTSMDASSSEMKAPVLPEPILPIQPKTVKDFQEDVEKVKSSGDWKAVHDFYLTTFDSFPELNAAFKKDATASFNTIEDSGINAKFVNAVYDTLLNTPQDVQKTVLKGIINSLLREWKGPRTKDDLRAYFILLQNPQFNNTSTYVIYAHLLRQIATLVEADHHFLVHWFKKLSQKRFKQLVERLLQFISLRLFPAKPEEFPPITKCSWWIPSAAKVLALLNTANNLVHPPLIPYTDFYNSTLDHIDLMEEYHTWQNFGNSHRFSFCQYPFVISVAAKKIIIQRDSEQQMINIARQSLVDKVSRRQRPDMNILFLNMKVRRTHLVSDSLDELTRKRADLKKKLKVTFVGEAGLDMGGLTKEWFLLLIRQIFHPDYGMFTYHKDSHCHWFSSFKCDNYSEFRLVGILMGLAVYNSITLDIRFPPCCYKKLLSPPIIPSDQNIPVGICNVTVDDLCQIMPELAHGLSELLSHEGNVEEDFYSTFQVFQEEFGIIKSYNLKPGGDKISVTNQNRKEYVQLYTDFLLNKSIYKQFAAFYYGFHSVCASNALMLLRPEEVEILVCGSPDLDMHALQRSTQYDGYAKTDLTIKYFWDVVLGFPLDLQKKLLHFTTGSDRVPVGGMADLNFKISKNETSTNCLPVAHTCFNQLCLPPYKSKKDLKQKLIIGISNSEGFGLE

SEQ ID NO: 3429 - protein, 619 aa, Homo sapiens
MPWQAFRRFGQKLVRRRTLESGMAETRLARCLSTLDLVALGVGSTLGAGVYVLAGEVAKDKAGPSIVICFLVAALSSVLAGLCYAEFGARVPRSGSAYLYSYVTVGELWAFTTGWNLILSYVIGTASVARAWSSAFDNLIGNHISKTLQGSIALHVPHVLAEYPDFFALGLVLLLTGLLALGASESALVTKVFTGVNLLVLGFVMISGFVKGDVHNWKLTEEDYELAMAELNDTYSLGPLGSGGFVPFGFEGILRGAATCFYAFVGFDCIATTGEEAQNPQRSIPMGIVISLSVCFLAYFAVSSALTLMMPYYQLQPESPLPEAFLYIGWAPARYVVAVGSLCALSTSLLGSMFPMPRVIYAMAEDGLLFRVLARIHTGTRTPIIATVVSGIIAAFMAFLFKLTDLVDLMSIGTLLAYSLVSICVLILRYQPDQETKTGEEVELQEEAITTESEKLTLWGLFFPLNSIPTPLSGQIVYVCSSLLAVLLTALCLVLAQWSVPLLSGDLLWTAVVVLLLLLIIGIIVVIWRQPQSSTPLHFKVPALPLLPLMSIFVNIYLMMQMTAGTWARFGVWMLIGFAIYFGYGIQHSLEEIKSNQPSRKSRAKTVDLDPGTLYVHSV

SEQ ID NO: 3430 - protein, 508 aa, Homo sapiens
MTSTCTNSTRESNSSHTCMPLSKMPISLAHGIIRSTVLVIFLAASFVGNIVLALVLQRKPQLLQVTNRFIFNLLVTDLLQISLVAPWVVATSVPLFWPLNSHFCTALVSLTHLFAFASVNTIVVVSVDRYLSIIHPLSYPSKMTQRRGYLLLYGTWIVAILQSTPPLYGWGQAAFDERNALCSMIWGASPSYTILSVVSFIVIPLIVMIACYSVVFCAARRQHALLYNVKRHSLEVRVKDCVENEDEEGAEKKEEFQDESEFRRQHEGEVKAKEGRMEAKDGSLKAKEGSTGTSESSVEARGSEEVRESSTVASDGSMEGKEGSTKVEENSMKADKGRTEVNQCSIDLGEDDMEFGEDDINFSEDDVEAVNIPESLPPSRRNSNSNPPLPRCYQCKAAKVIFIIIFSYVLSLGPYCFLAVLAVWVDVETQVPQWVITIIIWLFFLQCCIHPYVYGYMHKTIKKEIQDMLKKFFCKEKPPKEDSHPDLPGTEGGTEGKIVPSYDSATFP

SEQ ID NO: 3431 - protein, 719 aa, Homo sapiens
MEKILFYLFLIGIAVKAQICPKRCVCQILSPNLATLCAKKGLLFVPPNIDRRTVELRLADNFVTNIKRKDFANMTSLVDLTLSRNTISFITPHAFADLRNLRALHLNSNRLTKITNDMFSGLSNLHHLILNNNQLTLISSTAFDDVFALEELDLSYNNLETIPWDAVEKMVSLHTLSLDHNMIDNIPKGTFSHLHKMTRLDVTSNKLQKLPPDPLFQRAQVLATSGIISPSTFALSFGGNPLHCNCELLWLRRLSREDDLETCASPPLLTGRYFWSIPEEEFLCEPPLITRHTHEMRVLEGQRATLRCKARGDPEPAIHWISPEGKLISNATRSLVYDNGTLDILITTVKDTGAFTCIASNPAGEATQIVDLHIIKLPHLLNSTNHIHEPDPGSSDISTSTKSGSNTSSSNGDTKLSQDKIVVAEATSSTALLKFNFQRNIPGIRMFQIQYNGTYDDTLVYRMIPPTSKTFLVNNLAAGTMYDLCVLAIYDDGITSLTATRVVGCIQFTTEQDYVRCHFMQSQFLGGTMIIIIGGIIVASVLVFIIILMIRYKVCNNNGQHKVTKVSNVYSQTNGAQIQGCSVTLPQSVSKQAVGHEENAQCCKATSDNVIQSSETCSSQDSSTTTSALPPSWTSSTSVSQKQKRKTGTKPSTEPQNEAVTNVESQNTNRNNSTALQLASRPPDSVTEGPTSKRAHIKPNALLTNVDQIVQETQRLELI

SEQ ID NO: 3432 - protein, 1432 aa, Homo sapiens
MSEKKLETTAQQRKCPEWMNVQNKRCAVEERKACVRKSVFEDDLPFLEFTGSIVYSYDASDCSFLSEDISMSLSDGDVVGFDMEWPPLYNRGKLGKVALIQLCVSESKCYLFHVSSMSVFPQGLKMLLENKAVKKAGVGIEGDQWKLLRDFDIKLKNFVELTDVANKKLKCTETWSLNSLVKHLLGKQLLKDKSIRCSNWSKFPLTEDQKLYAATDAYAGFIIYRNLEILDDTVQRFAINKEEEILLSDMNKQLTSISEEVMDLAKHLPHAFSKLENPRRVSILLKDISENLYSLRRMIIGSTNIETELRPSNNLNLLSFEDSTTGGVQQKQIREHEVLIHVEDETWDPTLDHLAKHDGEDVLGNKVERKEDGFEDGVEDNKLKENMERACLMSLDITEHELQILEQQSQEEYLSDIAYKSTEHLSPNDNENDTSYVIESDEDLEMEMLKHLSPNDNENDTSYVIESDEDLEMEMLKSLENLNSGTVEPTHSKCLKMERNLGLPTKEEEEDDENEANEGEEDDDKDFLWPAPNEEQVTCLKMYFGHSSFKPVQWKVIHSVLEERRDNVAVMATGYGKSLCFQYPPVYVGKIGLVISPLISLMEDQVLQLKMSNIPACFLGSAQSENVLTDIKLGKYRIVYVTPEYCSGNMGLLQQLEADIGITLIAVDEAHCISEWGHDFRDSFRKLGSLKTALPMVPIVALTATASSSIREDIVRCLNLRNPQITCTGFDRPNLYLEVRRKTGNILQDLQPFLVKTSSHWEFEGPTIIYCPSRKMTQQVTGELRKLNLSCGTYHAGMSFSTRKDIHHRFVRDEIQCVIATIAFGMGINKADIRQVIHYGAPKDMESYYQEIGRAGRDGLQSSCHVLWAPADINLNRHLLTEIRNEKFRLYKLKMMAKMEKYLHSSRCRRQIILSHFEDKQVQKASLGIMGTEKCCDNCRSRLDHCYSMDDSEDTSWDFGPQAFKLLSAVDILGEKFGIGLPILFLRGSNSQRLADQYRRHSLFGTGKDQTESWWKAFSRQLITEGFLVEVSRYNKFMKICALTKKGRNWLHKANTESQSLILQANEELCPKKLLLPSSKTVSSGTKEHCYNQVPVELSTEKKSNLEKLYSYKPCDKISSGSNISKKSIMVQSPEKAYSSSQPVISAQEQETQIVLYGKLVEARQKHANKMDVPPAILATNKILVDMAKMRPTTVENVKRIDGVSEGKAAMLAPLLEVIKHFCQTNSVQTDLFSSTKPQEEQKTSLVAKNKICTLSQSMAITYSLFQEKKMPLKSIAESRILPLMTIGMHLSQAVKAGCPLDLERAGLTPEVQKIIADVIRNPPVNSDMSKISLIRMLVPENIDTYLIHMAIEILKHGPDSGLQPSCDVNKRRCFPGSEEICSSSKRSKEEVGINTETSSAERKRRLPVWFAKGSDTSKKLMDKTKRGGLFS

SEQ ID NO: 3433 - protein, 764 aa, Homo sapiens
MRPADLLQLVLLLDLPRDLGGMGCSSPPCECHQEEDFRVTCKDIQRIPSLPPSTQTLKLIETHLRTIPSHAFSNLPNISRIYVSIDVTLQQLESHSFYNLSKVTHIEIRNTRNLTYIDPDALKELPLLKFLGIFNTGLKMFPDLTKVYSTDIFFILEITDNPYMTSIPVNAFQGLCNETLTLKLYNNGFTSVQGYAFNGTKLDAVYLNKNKYLTVIDKDAFGGVYSGPSLLDVSQTSVTALPSKGLEHLKELIARNTWTLKKLPLSLSFLHLTRADLSYPSHCCAFKNQKKIRGILESLMCNESSMQSLRQRKSVNALNSPLHQEYEENLGDSIVGYKEKSKFQDTHNNAHYYVFFEEQEDEIIGFGQELKNPQEETLQAFDSHYDYTICGDSEDMVCTPKSDEFNPCEDIMGYKFLRIVVWFVSLLALLGNVFVLLILLTSHYKLNVPRFLMCNLAFADFCMGMYLLLIASVDLYTHSEYYNHAIDWQTGPGCNTAGFFTVFASELSVYTLTVITLERWYAITFAMRLDRKIRLRHACAIMVGGWVCCFLLALLPLVGISSYAKVSICLPMDTETPLALAYIVFVLTLNIVAFVIVCCCYVKIYITVRNPQYNPGDKDTKIAKRMAVLIFTDFICMAPISFYALSAILNKPLITVSNSKILLVLFYPLNSCANPFLYAIFTKAFQRDVFILLSKFGICKRQAQAYRGQRVPPKNSTDIQVQKVTHEMRQGLHNMEDVYELIENSHLTPKKQGQISEEYMQTVL

SEQ ID NO: 3434 - protein, 622 aa, Homo sapiens
MAENTEGDLNSNLLHAPYHTGDPQLDTAIGQWLRWDKNPKTKEQIENLLRNGMNKELRDRLCCRMTFGTAGLRSAMGAGFCYINDLTVIQSTQGMYKYLERCFSDFKQRGFVVGYDTRGQVTSSCSSQRLAKLTAAVLLAKDVPVYLFSRYVPTPFVPYAVQKLKAVAGVMITASHNRKEDNGYKVYWETGAQITSPHDKEILKCIEECVEPWNGSWNDNLVDTSPLKRDPLQDICRRYMEDLKKICFYRELNSKTTLKFVHTSFHGVGHDYVQLAFKVFGFKPPIPVPEQKDPDPDFSTVKCPNPEEGESVLELSLRLAEKENARVVLATDPDADRLAAAELQENGCWKVFTGNELAALFGWWMFDCWKKNKSRNADVKNVYMLATTVSSKILKAIALKEGFHFEETLPGFKWIGSRIIDLLENGKEVLFAFEESIGFLCGTSVLDKDGVSAAVVVAEMASYLETMNITLKQQLVKVYEKYGYHISKTSYFLCYEPPTIKSIFERLRNFDSPKEYPKFCGTFAILHVRDVTTGYDSSQPNKKSVLPVSKNSQMITFTFQNGCVATLRTSGTEPKIKYYAEMCASPDQSDTALLEEELKKLIDALIENFLQPSKNGLIWRSV

SEQ ID NO: 3435 - protein, 255 aa, Homo sapiens
MVWKWMPLLLLLVCVATMCSAQDRTDLLNVCMDAKHHKTKPGPEDKLHDQCSPWKKNACCTASTSQELHKDTSRLYNFNWDHCGKMEPACKRHFIQDTCLYECSPNLGPWIQQVNQSWRKERFLDVPLCKEDCQRWWEDCHTSHTCKSNWHRGWDWTSGVNKCPAGALCRTFESYFPTPAALCEGLWSHSYKVSNYSRGSGRCIQMWFDSAQGNPNEEVARFYAAAMHVNAGEMLHGTGGLLLSLALMLQLWLLG

SEQ ID NO: 3436 - protein, 1258 aa, Homo sapiens
MASACGAPGPGGALGSQAPSWYHRDLSRAAAEELLARAGRDGSFLVRDSESVAGAFALCVLYQKHVHTYRILPDGEDFLAVQTSQGVPVRRFQTLGELIGLYAQPNQGLVCALLLPVEGEREPDPPDDRDASDGEDEKPPLPPRSGSTSISAPTGPSSPLPAPETPTAPAAESAPNGLSTVSHDYLKGSYGLDLEAVRGGASHLPHLTRTLATSCRRLHSEVDKVLSGLEILSKVFDQQSSPMVTRLLQQQNLPQTGEQELESLVLKLSVLKDFLSGIQKKALKALQDMSSTAPPAPQPSTRKAKTIPVQAFEVKLDVTLGDLTKIGKSQKFTLSVDVEGGRLVLLRRQRDSQEDWTTFTHDRIRQLIKSQRVQNKLGVVFEKEKDRTQRKDFIFVSARKREAFCQLLQLMKNKHSKQDEPDMISVFIGTWNMGSVPPPKNVTSWFTSKGLGKTLDEVTVTIPHDIYVFGTQENSVGDREWLDLLRGGLKELTDLDYRPIAMQSLWNIKVAVLVKPEHENRISHVSTSSVKTGIANTLGNKGAVGVSFMFNGTSFGFVNCHLTSGNEKTARRNQNYLDILRLLSLGDRQLNAFDISLRFTHLFWFGDLNYRLDMDIQEILNYISRKEFEPLLRVDQLNLEREKHKVFLRFSEEEISFPPTYRYERGSRDTYAWHKQKPTGVRTNVPSWCDRILWKSYPETHIICNSYGCTDDIVTSDHSPVFGTFEVGVTSQFISKKGLSKTSDQAYIEFESIEAIVKTASRTKFFIEFYSTCLEEYKKSFENDAQSSDNINFLKVQWSSRQLPTLKPILADIEYLQDQHLLLTVKSMDGYESYGECVVALKSMIGSTAQQFLTFLSHRGEETGNIRGSMKVRVPTERLGTRERLYEWISIDKDEAGAKSKAPSVSRGSQEPRSGSRKPAFTEASCPLSRLFEEPEKPPPTGRPPAPPRAAPREEPLTPRLKPEGAPEPEGVAAPPPKNSFNNPAYYVLEGVPHQLLPPEPPSPARAPVPSATKNKVAITVPAPQLGHHRHPRVGEGSSSDEESGGTLPPPDFPPPPLPDSAIFLPPSLDPLPGPVVRGRGGAEARGPPPPKAHPRPPLPPGPSPASTFLGEVASGDDRSCSVLQMAKTLSEVDYAPAGPARSALLPGPLELQPPRGLPSDYGRPLSFPPPRIRESIQEDLAEEAPCLQGGRASGLGEAGMSAWLRAIGLERYEEGLVHNGWDDLEFLSDITEEDLEEAGVQDPAHKRLLLDTLQLSK

SEQ ID NO: 3437 - protein, 284 aa, Homo sapiens
MDYSYLNSYDSCVAAMEASAYGDFGACSQPGGFQYSPLRPAFPAAGPPCPALGSSNCALGALRDHQPAPYSAVPYKFFPEPSGLHEKRKQRRIRTTFTSAQLKELERVFAETHYPDIYTREELALKIDLTEARVQVWFQNRRAKFRKQERAASAKGAAGAAGAKKGEARCSSEDDDSKESTCSPTPDSTASLPPPPAPGLASPRLSPSPLPVALGSGPGPGPGPQPLKGALWAGVAGGGGGGPGAGAAELLKAWQPAESGPGPFSGVLSSFHRKPGPALKTNLF

SEQ ID NO: 3438 - protein, 416 aa, Homo sapiens
MKRERGALSRASRALRLAPFVYLLLIQTDPLEGVNITSPVRLIHGTVGKSALLSVQYSSTSSDRPVVKWQLKRDKPVTVVQSIGTEVIGTLRPDYRDRIRLFENGSLLLSDLQLADEGTYEVEISITDDTFTGEKTINLTVDVPISRPQVLVASTTVLELSEAFTLNCSHENGTKPSYTWLKDGKPLLNDSRMLLSPDQKVLTITRVLMEDDDLYSCMVENPISQGRSLPVKITVYRRSSLYIILSTGGIFLLVTLVTVCACWKPSKRKQKKLEKQNSLEYMDQNDDRLKPEADTLPRSGEQERKNPMALYILKDKDSPETEENPAPEPRSATEPGPPGYSVSPAVPGRSPGLPIRSARRYPRSPARSPATGRTHSSPPRAPSSPGRSRSASRTLRTAGVHIIREQDEAGPVEISA

SEQ ID NO: 3439 - protein, 1555 aa, Homo sapiens
MSEQTPAEAGAAGAREDACRDYQSSLEDLTFNSKPHINMLTILAEENLPFAKEIVSLIEAQTAKAPSSEKLPVMYLMDSIVKNVGREYLTAFTKNLVATFICVFEKVDENTRKSLFKLRSTWDEIFPLKKLYALDVRVNSLDPAWPIKPLPPNVNTSSIHVNPKFLNKSPEEPSTPGTVVSSPSISTPPIVPDIQKNLTQEQLIRQQLLAKQKQLLELQQKKLELELEQAKAQLAVSLSVQQETSNLGPGSAPSKLHVSQIPPMAVKAPHQVPVQSEKSRPGPSLQIQDLKGTNRDPRLNRISQHSHGKDQSHRKEFLMNTLNQSDTKTSKTIPSEKLNSSKQEKSKSGEKITKKELDQLDSKSKSKSKSPSPLKNKLSHTKDLKNQESESMRLSDMNKRDPRLKKHLQDKTDGKDDDVKEKRKTAEKKDKDEHMKSSEHRLAGSRNKIINGIVQKQDTITEESEKQGTKPGRSSTRKRSRSRSPKSRSPIIHSPKRRDRRSPKRRQRSMSPTSTPKAGKIRQSGAKQSHMEEFTPPSREDRNAKRSTKQDIRDPRRMKKTEEERPQETTNQHSTKSGTEPKENVENWQSSKSAKRWKSGWEENKSLQQVDEHSKPPHLRHRESWSSTKGILSPRAPKQQQHRLSVDANLQIPKELTLASKRELLQKTSERLASGEITQDDFLVVVHQIRQLFQYQEGVREEQRSPFNDRFPLKRPRYEDSDKPFVDSPASRFAGLDTNQRLTALAEDRPLFDGPSRPSVARDGPTKMIFEGPNKLSPRIDGPPTPASLRFDGSPGQMGGGGPLRFEGPQGQLGGGCPLRFEGPPGPVGTPLRFEGPIGQAGGGGFRFEGSPGLRFEGSPGGLRFEGPGGQPVGGLRFEGHRGQPVGGLRFEGPHGQPVGGLRFDNPRGQPVGGLRFEGGHGPSGAAIRFDGPHGQPGGGIRFEGPLLQQGVGMRFEGPHGQSVAGLRFEGQHNQLGGNLRFEGPHGQPGVGIRFEGPLVQQGGGMRFEGPSVPGGGLRIEGPLGQGGPRFEGCHALRFDGQPGQPSLLPRFDGLHGQPGPRFERTPGQPGPQRFDGPPGQQVQPRFDGVPQRFDGPQHQQASRFDIPLGLQGTRFDNHPSQRLESVSFNQTGPYNDPPGNAFNAPSQGLQFQRHEQIFDSPQGPNFNGPHGPGNQSFSNPLNRASGHYFDEKNLQSSQFGNFGNIPAPMTVGNIQASQQVLSGVAQPVAFGQGQQFLPVHPQNPGFVQNPSGALPKAYPDNHLSQVDVNELFSKLLKTGILKLSQTDSATTQVSEVTAQPPPEEEEDQNEDQDVPDLTNFTVEELKQRYDSVINRLYTGIQCYSCGMRFTTSQTDVYADHLDWHYRQNRTEKDVSRKVTHRRWYYSLTDWIEFEEIADLEERAKSQFFEKVHEEVVLKTQEAAKEKEFQSVPAGPAGAVESCEICQEQFEQYWDEEEEEWHLKNAIRVDGKIYHPSCYEDYQNTSSFDCTPSPSKTPVENPLNIMLNIVKNELQEPCDSPKVKEERIDTPPACTEESIATPSEIKTENDTVESV

SEQ ID NO: 3440 - protein, 214 aa, Homo sapiens [sequence omitted]

SEQ ID NO: 3441 - protein, 643 aa, Homo sapiens
MLLPCHWVLDATFSDGSLGQWVKNTCATYALSPVVLPPQPQPRKKATDKDYSAFHLGHLREVRLFLRGGTSDQRMDSLVLCPTYFKLWRTLSGSPGLQLSDLHFGSQPEGKFSLRRAVSVKQREEPQDWPLNEKRTLWKDSDLPTWRRGTGYTLSLPAVSPGKRLWGEKAGSLPESEPLFTYTLDEKVDKLVQFLLLKYQAKEPLTRAEMQMNVINTYTGYFPMIFRKAREFIEILFGISLTEVDPDHFYVFVNTLDLTCEGSLSDEQGMPQNRLLILILSVIFIKGNCASEEVIWEVLNAIGPWSALAGFADVLSRLALWESEGPEAFCEESGLRSAEGSVLDLANPQGLAGHRQEDGRRGLTEASPQQKKGGEDEDMPAAGMPPLPQSPPEIPPQGPPKISPQGPPQSPPQSPLDSCSSPLLWTRLDEESSSEEEDTATWHALPESESLPRYALDEKVAELVQFLLLKYQTKEPVTKAEMLTTVIKKYKDYFPMIFGKAHEFIELIFGIALTDMDPDNHSYFFEDTLDLTYEGSLIDDQGMPKNCLLILILSMIFIKGSCVPEEVIWEVLSAIGPIQRPAREVLEFLSKLSSIIPSAFPSWYMDALKDMEDRAQAIIDTTDDATAMASASPSVMSTNFCPE

SEQ ID NO: 3442 - protein, 1076 aa, Homo sapiens
MKSRFSTIDLRAVLAELNASLLGMRVNNVYDVDNKTYLIRLQKPDFKATLLLESGIRIHTTEFEWPKNMMPSSFAMKCRKHLKSRRLVSAKQLGVDRIVDFQFGSDEAAYHLIIELYDRGNIVLTDYEYVILNILRFRTDEADDVKFAVRERYPLDHARAAEPLLTLERLTEIVASAPKGELLKRVLNPLLPYGPALIEHCLLENGFSGNVKVDEKLETKDIEKVLVSLQKAEDYMKTTSNFSGKGYIIQKREIKPSLEADKPVEDILTYEEFHPFLFSQHSQCPYIEFESFDKAVDEFYSKIEGQKIDLKALQQEKQALKKLDNVRKDHENRLEALQQAQEIDKLKGELIEMNLQIVDRAIQVVRSALANQIDWTEIGLIVKEAQAQGDPVASAIKELKLQTNHVTMLLRNPYLLSEEEDDDVDGDVNVEKNETEPPKGKKKKQKNKQLQKPQKNKPLLVDVDLSLSAYANAKKYYDHKRYAAKKTQKTVEAAEKAFKSAEKKTKQTLKEVQTVTSIQKARKVYWFEKFLWFISSENYLIIGGRDQQQNEIIVKRYLTPGDIYVHADLHGATSCVIKNPTGEPIPPRTLTEAGTMALCYSAAWDARVITSAWWVYHHQVSKTAPTGEYLTTGSFMIRGKKNFLPPSYLMMGFSFLFKVDESCVWRHQGERKVRVQDEDMETLASCTSELISEEMEQLDGGDTSSDEDKEEHETPVEVELMTQVDQEDITLQSGRDELNEELIQEESSEDEGEYEEVRKDQDSVGEMKDEGEETLNYPDTTIDLSHLQPQRSIQKLASKEESSNSSDSKSQSRRHLSAKERREMKKKKLPSDSGDLEALEGKDKEKESTVHIETHQNTSKNVAAVQPMKRGQKSKMKKMKEKYKDQDEEDRELIMKLLGSAGSNKEEKGKKGKKGKTKDEPVKKQPQKPRGGQRVSDNIKKETPFLEVITHELQDFAVDDPHDDKEEQDLDQQGNEENLFDSLTGQPHPEDVLLFAIPICAPYTTMTNYKYKVKLTPGVQKKGKAAKTALNSFMHSKEATAREKDLFRSVKDTDLSRNIPGKVKVSAPNLLNVKRK

SEQ ID NO: 3443 - protein, 806 aa, Homo sapiens
MSASPDDLSTGGRLQNMTVDECFQSRNTVLQGQPFGGVPTVLCLNIALWVLVLVVYSFLRKAAWDYGRLALLIHNDSLTSLIYGEQSEKTSPSETSLEMERRDKGFCSWFFNSITMKDEDLINKCGDDARIYIVFQYHLIIFVLIICIPSLGIILPINYTGSVLDWSSHFARTTIVNVSTESKLLWLHSLLSFFYFITNFMFMAHHCLGFAPRNSQKVTRTLMITYVPKDIEDPELIIKHFHEAYPGSVVTRVHFCYDVRNLIDLDDQRRHAMRGRLFYTAKAKKTGKVMIRIHPCARLCFCKCWTCFKEVDAEQYYSELEEQLTDEFNAELNRVPLKRLDLIFVTFQDSRMAKRVRKDYKYVQCGVQPQQSSVTTIVKSYYWRVTMAPHPKDIIWKHLSVRRFFWWARFIAINTFLFFLFFFLTTPAIIMNTIDMYNVTRPIEKLQNPIVTQFFPSVMLWGFTVILPLIVYFSAFLEAHWTRSSQNLVMVHKCYIFLVFMVVILPSMGLTSLDVFLRWLFDIYYLEQASIRFQCVFLPDNGAFFVNYVITAALLGTGMELLRLGSLFCYSTRLFFSRSEPERVNIRKNQAIDFQFGREYAWMMNVFSVVMAYSITCPIIVPFGLLYLCMKHLTDRYNMYYSFAPTKLNEQIHMAAVSQAIFAPLLGLFWMLFFSILRLGSLHAITIFSLSTLLIAMVIAFVGIFLGKLRMVADYEPEEEEIQTVFDMEPSSTSSTPTSLLYVATVLQEPELNLTPASSPARHTYGTMNNQPEEGEEESGLRGFARELDSAQFQEGLELEGQNQYH

SEQ ID NO: 3444 - protein, 710 aa, Homo sapiens
MEEMEEELKCPVCGSFYREPIILPCSHNLCQACARNILVQTPESESPQSHRAAGSGVSDYDYLDLDKMSLYSEADSGYGSYGGFASAPTTPCQKSPNGVRVFPPAMPPPATHLSPALAPVPRNSCITCPQCHRSLILDDRGLRGFPKNRVLEGVIDRYQQSKAAALKCQLCEKAPKEATVMCEQCDVFYCDPCRLRCHPPRGPLAKHRLVPPAQGRVSRRLSPRKVSTCTDHELENHSMYCVQCKMPVCYQCLEEGKHSSHEVKALGAMWKLHKSQLSQALNGLSDRAKEAKEFLVQLRNMVQQIQENSVEFEACLVAQCDALIDALNRRKAQLLARVNKEHEHKLKVVRDQISHCTVKLRQTTGLMEYCLEVIKENDPSGFLQISDALIRRVHLTEDQWGKGTLTPRMTTDFDLSLDNSPLLQSIHQLDFVQVKASSPVPATPILQLEECCTHNNSATLSWKQPPLSTVPADGYILELDDGNGGQFREVYVGKETMCTVDGLHFNSTYNARVKAFNKTGVSPYSKTLVLQTSEVAWFAFDPGSAHSDIILSNDNLTVTCSSYDDRVVLGKTGFSKGIHYWELTVDRYDNHPDPAFGVARMDVMKDVMLGKDDKAWAMYVDNNRSWFMHNNSHTNRTEGGITKGATIGVLLDLNRKNLTFFINDEQQGPIAFDNVEGLFFPAVSLNRNVQVTLHTGLPVPDFYSSRASIA

SEQ ID NO: 3445 - protein, 320 aa, Homo sapiens
MGDIPAVGLSSWKASPGKVTEAVKEAIDAGYRHFDCAYFYHNEREVGAGIRCKIKEGAVRREDLFIATKLWCTCHKKSLVETACRKSLKALKLNYLDLYLIHWPMGFKPPHPEWIMSCSELSFCLSHPRVQDLPLDESNMVIPSDTDFLDTWEAMEDLVITGLVKNIGVSNFNHEQLERLLNKPGLRFKPLTNQIECHPYLTQKNLISFCQSRDVSVTAYRPLGGSCEGVDLIDNPVIKRIAKEHGKSPAQILIRFQIQRNVIVIPGSITPSHIKENIQVFDFELTQHDMDNILSLNRNLRLAMFPITKNHKDYPFHIEY

SEQ ID NO: 3446 - protein, 754 aa, Homo sapiens
MIVFLVFKHLFSLRLITMFFLLHFIVLINVKDFALTQGSMITPSCQKGYFPCGNLTKCLPRAFHCDGKDDCGNGADEENCGDTSGWATIFGTVHGNANSVALTQECFLKQYPQCCDCKETELECVNGDLKSVPMISNNVTLLSLKKNKIHSLPDKVFIKYTKLKKIFLQHNCIRHISRKAFFGLCNLQILYLNHNCITTLRPGIFKDLHQLTWLILDDNPITRISQRLFTGLNSLFFLSMVNNYLEALPKQMCAQMPQLNWVDLEGNRIKYLTNSTFLSCDSLTVLFLPRNQIGFVPEKTFSSLKNLGELDLSSNTITELSPHLFKDLKLLQKLNLSSNPLMYLHKNQFESLKQLQSLDLERIEIPNINTRMFQPMKNLSHIYFKNFRYCSYAPHVRICMPLTDGISSFEDLLANNILRIFVWVIAFITCFGNLFVIGMRSFIKAENTTHAMSIKILCCADCLMGVYLFFVGIFDIKYRGQYQKYALLWMESVQCRLMGFLAMLSTEVSVLLLTYLTLEKFLVIVFPFSNIRPGKRQTSVILICIWMAGFLIAVIPFWNKDYFGNFYGKNGVCFPLYYDQTEDIGSKGYSLGIFLGVNLLAFLIIVFSYITMFCSIQKTALQTTEVRNCFGREVAVANRFFFIVFSDAICWIPVFVVKILSLFRVEIPDTMTSWIVIFFLPVNSALNPILYTLTTNFFKDKLKQLLHKHQRKSIFKIKKKSLSTSIVWIEDSSSLKLGVLNKITLGDSIMKPVS

SEQ ID NO: 3447 - protein, 337 aa, Homo sapiens
MNEPLDYLANASDFPDYAAAFGNCTDENIPLKMHYLPVIYGIIFLVGFPGNAVVISTYIFKMRPWKSSTIIMLNLACTDLLYLTSLPFLIHYYASGENWIFGDFMCKFIRFSFHFNLYSSILFLTCFSIFRYCVIIHPMSCFSIHKTRCAVVACAVVWIISLVAVIPMTFLITSTNRTNRSACLDLTSSDELNTIKWYNLILTATTFCLPLVIVTLCYTTIIHTLTHGLQTDSCLKQKARRLTILLLLAFYVCFLPFHILRVIRIESRLLSISCSIENQIHEAYIVSRPLAALNTFGNLLLYVVVSDNFQQAVCSTVRCKVSGNLEQAKKISYSNNP

SEQ ID NO: 3448 - protein, 328 aa, Homo sapiens
MASRCSEPYPEVSRIPTVRGCNGSLSGALSCCEDSARGSGPPKAPTVAEGPSSCLRRNVISERERRKRMSLSCERLRALLPQFDGRREDMASVLEMSVQFLRLASALGPSQEQHAILASSKEMWHSLQEDVLQLTLSSQIQAGVPDPGTGASSGTRTPDVKAFLESPWSLDPASASPEPVPHILASSRQWDPASCTSLGTDKCEALLGLCQVRGGLPPFSEPSSLVPWPPGRSLPKAVRPPLSWPPFSQQQTLPVMSGEALGWLGQAGPLAMGAAPLGEPAKEDPMLAQEAGSALGSDVDDGTSFLLTAGPSSWPGEWGPGFRAGPPA

SEQ ID NO: 3449 - protein, 143 aa, Homo sapiens
MEYHPDLENLDEDGYTQLHFDSQSNTRIAVVSEKGSCAASPPWRLIAVILGILCLVILVIAVVLGTMGVLSSPCPPNWIIYEKSCYLFSMSLNSWDGSKRQCWQLGSNLLKIDSSNELISDQNHSYPRKPISKLCMDSRVSHL

SEQ ID NO: 3450 - protein, 163 aa, Homo sapiens
MSWRPQPCCISSCCLTTDWVHLWYIWLLVVIGALLLLCGLTSLCFRCCCLSRQQNGEDGGPPPCEVTVIAFDHDSTLQSTITSLQSVFGPAARRILAVAHSHSSLGQLPSSLDTLPGYEEALHMSRFTVAMCGQKAPDLPPVPEEKQLPPTEKESTRIVDSWN

SEQ ID NO: 3451 - protein, 1469 aa, Homo sapiens
MDVDAEREKITQEIKELERILDPGSSGSHVEISESSLESDSEADSLPSEDLDPADPPISEEERWGEASNDEDDPKDKTLPEDPETCLQLNMVYQEVIQEKLAEANLLLAQNREQQEELMRDLAGSKGTKVKDGKSLPPSTYMGHFMKPYFKDKVTGVGPPANEDTREKAAQGIKAFEELLVTKWKNWEKALLRKSVVSDRLQRLLQPKLLKLEYLHQKQSKVSSELERQALEKQGREAEKEIQDINQLPEEALLGNRLDSHDWEKISNINFEGSRSAEEIRKFWQNSEHPSINKQEWSREEEERLQAIAAAHGHLEWQKIAEELGTSRSAFQCLQKFQQHNKALKRKEWTEEEDRMLTQLVQEMRVGSHIPYRRIVYYMEGRDSMQLIYRWTKSLDPGLKKGYWAPEEDAKLLQAVAKYGEQDWFKIREEVPGRSDAQCRDRYLRRLHFSLKKGRWNLKEEEQLIELIEKYGVGHWAKIASELPHRSGSQCLSKWKIMMGKKQGLRRRRRRARHSVRWSSTSSSGSSSGSSGGSSSSSSSSSEEDEPEQAQAGEGDRALLSPQYMVPDMDLWVPARQSTSQPWRGGAGAWLGGPAASLSPPKGSSASQGGSKEASTTAAAPGEETSPVQVPARAHGPVPRSAQASHSADTRPAGAEKQALEGGRRLLTVPVETVLRVLRANTAARSCTQKEQLRQPPLPTSSPGVSSGDSVARSHVQWLRHRATQSGQRRWRHALHRRLLNRRLLLAVTPWVGDVVVPCTQASQRPAVVQTQADGLREQLQQARLASTPVFTLFTQLFHIDTAGCLEVVRERKALPPRLPQAGARDPPVHLLQASSSAQSTPGHLFPNVPAQEASKSASHKGSRRLASSRVERTLPQASLLASTGPRPKPKTVSELLQEKRLQEARAREATRGPVVLPSQLLVSSSVILQPPLPHTPHGRPAPGPTVLNVPLSGPGAPAAAKPGTSGSWQEAGTSAKDKRLSTMQALPLAPVFSEAEGTAPAASQAPALGPGQISVSCPESGLGQSQAPAASRKQGLPEAPPFLPAAPSPTPLPVQPLSLTHIGGPHVATSVPLPVTWVLTAQGLLPVPVPAVVSLPRPAGTPGPAGLLATLLPPLTETRAAQGPRAPALSSSWQPPANMNREPEPSCRTDTPAPPTHALSQSPAEADGSVAFVPGEAQVAREIPEPRTSSHADPPEAEPPWSGRLPAFGGVIPATEPRGTPGSPSGTQEPRGPLGLEKLPLRQPGPEKGALDLEKPPLPQPGPEKGALDLGLLSQEGEAATQQWLGGQRGVRVPLLGSRLPYQPPALCSLRALSGLLLHKKALEHKATSLVVGGEAERPAGALQASLGLVRGQLQDNPAYLLLRARFLAAFTLPALLATLAPQGVRTTLSVPSRVGSESEDEDLLSELELADRDGQPGCTTATCPIQGAPDSGKCSASSCLDTSNDPDDLDVLRTRHARHTRKRRRLV

SEQ ID NO: 3452 - protein, 714 aa, Homo sapiens
MLHLKVQFLDDSQKIFVVDQKSSGKALFNLSCSHLNLAEKEYFGLEFCSHSGNNVWLELLKPITKQVKNPKEIVFKFMVKFFPVDPGHLREELTRYLFTLQIKKDLALGRLPCSDNCTALMVSHILQSELGDFHEETDRKHLAQTRYLPNQDCLEGKIMHFHQKHIGRSPAESDILLLDIARKLDMYGIRPHPASDGEGMQIHLAVAHMGVLVLRGNTKINTFNWAKIRKLSFKRKHFLIKLHANILVLCKDTLEFTMASRDACKAFWKTCVEYHAFFRLSEEPKSKPKTLLCSKGSSFRYSGRTQRQLLEYGRKGRLKSLPFERKHYPSQYHERQCRSSPDLLSDVSKQVEDLRLAYGGGYYQNVNGVHASEPVLESRRRNSALEVTFATELEHSKPEADPTLLHQSQSSSSFPFIYMDPVFNTEPNPNPDPRDIFSERSSLSSFQTSCKFSGNHMSIYSGLTSKVRPAKQLTYTDVPYIPCTGQQVGIMPPQVFFYVDKPPQVPRWSPIRAEERTSPHSYVEPTAMKPAERSPRNIRMKSFQQDLQVLQEAIARTSGRSNINVGLEEEDPNLEDAFVCNIQEQTPKRSQSQSDMKTIRFPFGSEFRPLGPCPALSHKADLFTDMFAEQELPAVLMDQSTAERYVASESSDSESEILKPDYYALYGKEIRSPMARIRLSSGSLQLDEEDEDAYFNTPTAEDRTSLKPCNYFLA

SEQ ID NO: 3453 - protein, 479 aa, Homo sapiens
MDATIAPHRIPPEMPQYGEENHIFELMQNMLEQLLIHQPEDPIPFMIQHLHRDNDNVPRIVILGPPASGKTTIAMWLCKHLNSSLLTLENLILNEFSYTATEARRLYLQRKTVPSALLVQLIQERLAEEDCIKQGWILDGIPETREQALRIQTLGITPRHVIVLSAPDTVLIERNLGKRIDPQTGEIYHTTFDWPPESEIQNRLMVPEDISELETAQKLLEYHRNIVRVIPSYPKILKVISADQPCVDVFYQALTYVQSNHRTNAPFTPRVLLLGPVGSGKSLQAALLAQKYRLVNVCCGQLLKEAVADRTTFGELIQPFFEKEMAVPDSLLMKVLSQRLDQQDCIQKGWVLHGVPRDLDQAHLLNRLGYNPNRVFFLNVPFDSIMERLTLRRIDPVTGERYHLMYKPPPTMEIQARLLQNPKDAEEQVKLKMDLFYRNSADLEQLYGSAITLNGDQDPYTVFEYIESGIINPLPKKIP

SEQ ID NO: 3454 - protein, 1164 aa, Homo sapiens
MAQQANVGELLAMLDSPMLGVRDDVTAVFKENLNSDRGPMLVNTLVDYYLETSSQPALHILTTLQEPHDKHLLDRINEYVGKAATRLSILSLLGHVIRLQPSWKHKLSQAPLLPSLLKCLKMDTDVVVLTTGVLVLITMLPMIPQSGKQHLLDFFDIFGRLSSWCLKKPGHVAEVYLVHLHASVYALFHRLYGMYPCNFVSFLRSHYSMKENLETFEEVVKPMMEHVRIHPELVTGSKDHELDPRRWKRLETHDVVIECAKISLDPTEASYEDGYSVSHQISARFPHRSADVTTSPYADTQNSYGCATSTPYSTSRLMLLNMPGQLPQTLSSPSTRLITEPPQATLWSPSMVCGMTTPPTSPGNVPPDLSHPYSKVFGTTAGGKGTPLGTPATSPPPAPLCHSDDYVHISLPQATVTPPRKEERMDSARPCLHRQHHLLNDRGSEEPPGSKGSVTLSDLPGFLGDLASEEDSIEKDKEEAAISRELSEITTAEAEPVVPRGGFDSPFYRDSLPGSQRKTHSAASSSQGASVNPEPLHSSLDKLGPDTPKQAFTPIDLPCGSADESPAGDRECQTSLETSIFTPSPCKIPPPTRVGFGSGQPPPYDHLFEVALPKTAHHFVIRKTEELLKKAKGNTEEDGVPSTSPMEVLDRLIQQGADAHSKELNKLPLPSKSVDWTHFGGSPPSDEIRTLRDQLLLLHNQLLYERFKRQQHALRNRRLLRKVIKAAALEEHNAAMKDQLKLQEKDIQMWKVSLQKEQARYNQLQEQRDTMVTKLHSQIRQLQHDREEFYNQSQELQTKLEDCRNMIAELRIELKKANNKVCHTELLLSQVSQKLSNSESVQQQMEFLNRQLLVLGEVNELYLEQLQNKHSDTTKEVEMMKAAYRKELEKNRSHVLQQTQRLDTSQKRILELESHLAKKDHLLLEQKKYLEDVKLQARGQLQAAESRYEAQKRITQVFELEILDLYGRLEKDGLLKKLEEEKAEAAEAAEERLDCCNDGCSDSMVGHNEEASGHNGETKTPRPSSARGSSGSRGGGGSSSSSSELSTPEKPPHQRAGPFSSRWETTMGEASASIPTTVGSLPSSKSFLGMKARELFRNKSESQCDEDGMTSSLSESLKTELGKDLGVEAKIPLNLDGPHPSPPTPDSVGQLHIMDYNETHHEHS

SEQ ID NO: 3455 - protein, 665 aa, Homo sapiens
MAHEMIGTQIVTERLVALLESGTEKVLLIDSRPFVEYNTSHILEAININCSKLMKRRLQQDKVLITELIQHSAKHKVDIDCSQKVVVYDQSSQDVASLSSDCFLTVLLGKLEKSFNSVHLLAGGFAEFSRCFPGLCEGKSTLVPTCISQPCLPVANIGPTRILPNLYLGCQRDVLNKELMQQNGIGYVLNASNTCPKPDFIPESHFLRVPVNDSFCEKILPWLDKSVDFIEKAKASNGCVLVHCLAGISRSATIAIAYIMKRMDMSLDEAYRFVKEKRPTISPNFNFLGQLLDYEKKIKNQTGASGPKSKLKLLHLEKPNEPVPAVSEGGQKSETPLSPPCADSATSEAAGQRPVHPASVPSVPSVQPSLLEDSPLVQALSGLHLSADRLEDSNKLKRSFSLDIKSVSYSASMAASLHGFSSSEDALEYYKPSTTLDGTNKLCQFSPVQELSEQTPETSPDKEEASIPKKLQTARPSDSQSKRLHSVRTSSSGTAQRSLLSPLHRSGSVEDNYHTSFLFGLSTSQQHLTKSAGLGLKGWHSDILAPQTSTPSLTSSWYFATESSHFYSASAIYGGSASYSAYSCSQLPTCGDQVYSVRRRQKPSDRADSRRSWHEESPFEKQFKRRSCQMEFGESIMSENRSREELGKVGSQSSFSGSMEIIEVS

SEQ ID NO: 3456 - protein, 227 aa, Homo sapiens
MTDFKLGIVRLGRVAGKTKYTLIDEQDIPLVESYSFEARMEVDADGNGAKIFAYAFDKNRGRGSGRLLHELLWERHRGGVAPGFQVVHLNAVTVDNRLDNLQLVPWGWRPKAEETSSKQREQSLYWLAIQQLPTDPIEEQFPVLNVTRYYNANGDVVEEEENSCTYYECHYPPCTVIEKQLREFNICGRCQVARYCGSQCQQKDWPAHKKHCRERKRPFQHELEPER

SEQ ID NO: 3457 - protein, 989 aa, Homo sapiens
MARPVQLAPGSLALVLCRLEAQKAAGAAEEPGGRAVFRAFRRANARCFWNARLARAASRLAFQGWLRRGVLLVRAPPACLQVLRDAWRRRALRPPRGFRIRAVGDVFPVQMNPITQSQFVPLGEVLCCAISDMNTAQIVVTQESLLERLMKHYPGIAIPSEDILYTTLGTLIKERKIYHTGEGYFIVTPQTYFITNTTTQENKRMLPSDESRLMPASMTYLVSMESCAESAQENAAPISHCQSCQCFRDMHTQDVQEAPVAAEVTRKSHRGLGESVSWVQNGAVSVSAEHHICESTKPLPYTRDKEKGKKFGFSLLWRSLSRKEKPKTEHSSFSAQFPPEEWPVRDEDDLDNIPRDVEHEIIKRINPILTVDNLIKHTVLMQKYEEQKKYNSQGTSTDMLTIGHKYPSKEGVKKRQGLSAKPQGQGHSRRDRHKARNQGSEFQPGSIRLEKHPKLPATQPIPRIKSPNEMVGQKPLGEITTVLGSHLIYKKRISNPFQGLSHRGSTISKGHKIQKTSDLKPSQTGPKEKPFQKPRSLDSSRIFDGKAKEPYAEQPNDKMEAESIYINDPTVKPINDDFRGHLFSHPQQSMLQNDGKCCPFMESMLRYEVYGGENEVIPEVLRKSHSHFDKLGETKQTPHSLPSRGASFSDRTPSACRLVDNTIHQFQNLGLLDYPVGVNPLRQAARQDKDSEELLRKGFVQDAETTSLENEQLSNDDQALYQNEVEDDDGACSSLYLEEDDISENDDLRQMLPGHSQYSFTGGSQGNHLGKQKVIERSLTEYNSTMERVESQVLKRNECYKPTGLHATPGESQEPNLSAESCGLNSGAQFGFNYEEEPSVAKCVQASAPADERIFDYYSARKASFEAEVIQDTIGDTGKKPASWSQSPQNQEMRKHFPQKFQLFNTSHMPVLAQDVQYEHSHLEGTENHSMAGDSGIDSPRTQSLGSNNSVILDGLKRRQNFLQNVEGTKSSQPLTSNSLLPLTPVINV

SEQ ID NO: 3458 - protein, 844 aa, Homo sapiens
MSKRGMSSRAKGDKAEALAALQAANEDLRAKLTDIQIELQQEKSKVSKVEREKNQELRQVREHEQHKTAVLLTELKTKLHEEKMKELQAVRETLLRQHEAELLRVIKIKDNENQRLQALLSALRDGGPEKVKTVLLSEAKEEAKKGFEVEKVKMQQEISELKGAKRQVEEALTLVIQADKIKAAEIRSVYHLHQEEITRIKKECEREIRRLMEEIKFKDRAVFVLERELGVQAGHAQRLQLQKEALDEQLSQVREADRHPGSPRRELPHAAGAGDASDHSGSPEQQLDEKDARRFQLKIAELSAIIRKLEDRNALLSEERNELLKRVREAESQYKPLLDKNKRLSRKNEDLSHALRRMENKLKFVTQENIEMRQRAGIIRRPSSLNDLDQSQDEREVDFLKLQIVEQQNLIDELSKTLETAGYVKSVLERDKLLRFRKQRKKMAKLPKPVVVETFFGYDEEASLESDGSSVSYQTDRTDQTPCTPDDDLEEGMAKEETELRFRQLTMEYQALQRAYALLQEQVGGTLDAEREVKTREQLQAEVQRAQARIEDLEKALAEQGQDMKWIEEKQALYRRNQELVEKIKQMETEEARLRHEVQDARDQNELLEFRILELEERERKSPAISFHHTPFVDGKSPLQVYCEAEGVTDIVVAELMKKLDILGDNANLTNEEQVVVIQARTVLTLAEKWLQQIEETEAALQRKMVDLESEKELFSKQKGYLDEELDYRKQALDQANKHILELEAMLYDALQQEAGAKVAELLSEEEREKLKVAVEQWKRQVMSELRERDAQILRERMELLQLAQQRIKELEERIEAQKRQIKELEEKFLFLFLFFSLAFILWS

SEQ ID NO: 3459 - protein, 396 aa, Homo sapiens
MASLSRALRVAAAHPRQSPTRGMGPCNLSSAAGPTAEKSVPYQRTLKEGQGTSVVAQGPSRPLPSTANVVVIGGGSLGCQTLYHLAKLGMSGAVLLERERLTSGTTWHTAGLLWQLRPSDVEVELLAHTRRVVSRELEEETGLHTGWIQNGGLFIASNRQRLDEYKRLMSLGKAYGVESHVLSPAETKTLYPLMNVDDLYGTLYVPHDGTMDPAGTCTTLARAASARGAQVIENCPVTGIRVWTDDFGVRRVAGVETQHGSIQTPCVVNCAGVWASAVGRMAGVKVPLVAMHHAYVVTERIEGIQSFTLLPTLEYSGTVSAHCNLRLPGSSNSRASASHVAGIKCARHHTRLIFFCILVETEFHHVAKAGLELLSSGNPPISDFQSARITGVSHHA

SEQ ID NO: 3460 - protein, 314 aa, Homo sapiens
MDVGNKSTMSEFVLLGLSNSWELQMFFFMVFSLLYVATMVGNSLIVITVIVDPHLHSPMYFLLTNLSIIDMSLASFATPKMITDYLTGHKTISFDGCLTQIFFLHLFTGTEIILLMAMSFDRYIAICKPLHYASVISPQVCVALVVASWIMGVMHSMSQVIFALTLPFCGPYEVDSFFCDLPVVFQLACVDTYVLGLFMISTSGIIALSCFIVLFNSYVIVLVTVKHHSSRGSSKALSTCTAHFIVVFLFFGPCIFIYMWPLSSFLTDKILSVFYTIFTPTLNPIIYTLRNQEVKIAMRKLKNRFLNFNKAMPS

SEQ ID NO: 3461 - protein, 916 aa, Homo sapiens
MDCEHSLSLPCRGAEAWEIGIDKYLYAMRLSDETLIDIMTRFRKEMKNGLSRDFNPTATVKMLPTFVRSIPDGSEKGDFIALDLGGSSFRILRVQVNHEKNQNVHMESEVYDTPENIVHGSGSQLFDHVAECLGDFMEKRKIKDKKLPVGFTFSFPCQQSKIDEAILITWTKRFKASGVEGADVVKLLNKAIKKRGDYDANIVAVVNDTVGTMMTCGYDDQHCEVGLIIGTGTNACYMEELRHIDLVEGDEGRMCINTEWGAFGDDGSLEDIRTEFDREIDRGSLNPGKQLFEKMVSGMYLGELVRLILVKMAKEGLLFEGRITPELLTRGKFNTSDVSAIEKNKEGLHNAKEILTRLGVEPSDDDCVSVQHVCTIVSFRSANLVAATLGAILNRLRDNKGTPRLRTTVGVDGSLYKTHPQYSRRFHKTLRRLVPDSDVRFLLSESGSGKGAAMVTAVAYRLAEQHRQIEETLAHFHLTKDMLLEVKKRMRAEMELGLRKQTHNNAVVKMLPSFVRRTPDGTENGDFLALDLGGTNFRVLLVKIRSGKKRTVEMHNKIYAIPIEIMQGTGEELFDHIVSCISDFLDYMGIKGPRMPLGFTFSFPCQQTSLDAGILITWTKGFKATDCVGHDVVTLLRDAIKRREEFDLDVVAVVNDTVGTMMTCAYEEPTCEVGLIVGTGSNACYMEEMKNVEMVEGDQGQMCINMEWGAFGDNGCLDDIRTHYDRLVDEYSLNAGKQRYEKMISGMYLGEIVRNILIDFTKKGFLFRGQISETLKTRGIFETKFLSQIESDRLALLQVRAILQQLGLNSTCDDSILVKTVCGVVSRRAAQLCGAGMAAVVDKIRENRGLDRLNVTVGVDGTLYKLHPHFSRIMHQTVKELSPKCNVSFLLSEDGSGKGAALITAVGVRLRTEASS

SEQ ID NO: 3462 - protein, 371 aa, Homo sapiens
MAELQEVQITEEKPLLPGQTPEAAKEAELAARILLDQGQTHSVETPYGSVTFTVYGTPKPKRPAILTYHDVGLNYKSCFQPLFQFEDMQEIIQNFVRVHVDAPGMEEGAPVFPLGYQYPSLDQLADMIPCVLQYLNFSTIIGVGVGAGAYILARYALNHPDTVEGLVLINIDPNAKGWMDWAAHKLTGLTSSIPEMILGHLFSQEELSGNSELIQKYRNIITHAPNLDNIELYWNSYNNRRDLNFERGGDITLRCPVMLVVGDQAPHEDAVVECNSKLDPTQTSFLKMADSGGQPQLTQPGKLTEAFKYFLQGMGYMASSCMTRLSRSRTASLTSAASVDGNRSRSRTLSQSSESGTLSSGPPGHTMEVSC

SEQ ID NO: 3463 - protein, 156 aa, Homo sapiens
MAPARAGFCPLLLLLLLGLWVAEIPVSAKPKGMTSSQWFKIQHMQPSPQACNSAMKNINKHTKRCKDLNTFLHEPFSSVAATCQTPKIACKNGDKNCHQSHGAVSLTMCKLTSGKHPNCRYKEKRQNKSYVVACKPPQKKDSQQFHLVPVHLDRVL

SEQ ID NO: 3464 - protein, 1519 aa, Homo sapiens
MEPEPVEDCVQSTLAALYPPFEATAPTLLGQVFQVVERTYREDALRYTLDFLVPAKHLLAKVQQEACAQYSGFLFFHEGWPLCLHEQVVVQLAALPWQLLRPGDFYLQVVPSAAQAPRLALKCLAPGGGRVQEVPVPNEACAYLFTPEWLQGINKDRPTGRLSTCLLSAPSGIQRLPWAELICPRFVHKEGLMVGHQPSTLPPELPSGPPGLPSPPLPEEALGTRSPGDGHNAPVEGPEGEYVELLEVTLPVRGSPTDAEGSPGLSRVRTVPTRKGAGGKGRHRRHRAWMHQKGLGPRGQDGARPPGEGSSTGASPESPPGAEAVPEAAVLEVSEPPAEAVGEASGSCPLRPGELRGGGGGGQGAEGPPGTPRRTGKGNRRKKRAAGRGALSRGGDSAPLSPGDKEDASHQEALGNLPSPSEHKLPECHLVKEEYEGSGKPESEPKELKTAGEKEPQLSEACGPTEEGAGERELEGPGLLCMAGHTGPEGPLSDTPTPPLETVQEGKGDNIPEEALAVSVSDHPDVAWDLMASGFLILTGGVDQSGRALLTITPPCPPEEPPPSRDTLNTTLHYLHSLLRPDLQTLGLSVLLDLRQAPPLPPALIPALSQLQDSGDPPLVQRLLILIHDDLPTELCGFQGAEVLSENDLKRVAKPEELQWELGGHRDPSPSHWVEIHQEVVRLCRLCQGVLGSVRQAIEELEGAAEPEEEEAVGMPKPLQKVLADPRLTALQRDGGAILMRLRSTPSSKLEGQGPATLYQEVDEAIHQLVRLSNLHVQQQEQRQCLRRLQQVLQWLSGPGEEQLASFAMPGDTLSALQETELRFRAFSAEVQERLAQAREALALEENATSQKVLDIFEQRLEQVESGLHRALRLQRFFQQAHEWVDEGFARLAGAGPGREAVLAALALRRAPEPSAGTFQEMRALALDLGSPAALREWGRCQARCQELERRIQQHVGEEASPRGYRRRRADGASSGGAQWGPRSPSPSLSSLLLPSSPGPRPAPSHCSLAPCGEDYEEEGPELAPEAEGRPPRAVLIRGLEVTSTEVVDRTCSPREHVLLGRARGPDGPWGVGTPRMERKRSISAQQRLVSELIACEQDYVATLSEPVPPPGPELTPELRGTWAAALSARERLRSFHRTHFLRELQGCATHPLRIGACFLRHGDQFSLYAQYVKHRHKLENGLAALSPLSKGSMEAGPYLPRALQQPLEQLTRYGRLLEELLREAGPELSSECRALGAAVQLLREQEARGRDLLAVEAVRGCEIDLKEQGQLLHRDPFTVICGRKKCLRHVFLFEHLLLFSKLKGPEGGSEMFVYKQAFKTADMGLTENIGDSGLCFELWFRRRRAREAYTLQATSPEIKLKWTSSIAQLLWRQAAHNKELRVQQMVSMGIGNKPFLDIKALGERTLSALLTGRAARTRASVAVSSFEHAGPSLPGLSPGACSLPARVEEEAWDLDVKQISLAPETLDSSGDVSPGPRNSPSLQPPHPGSSTPTLASRGILGLSRQSHARALSDPTTPL

SEQ ID NO: 3465 - protein, 414 aa, Homo sapiens
MEMQQNCSISCFWETQPLGCVKISCIFYHSKPRNINGLFLPPSSNITLQKEIQEGIPLQSQSQEPLKPQENISRPIHHPLVLKTNFEEEEEVDEQNDASSLWTKTPEEIEEKRAIKEMCYKSGEYYRFHTPPDILSSKSMTPTAEKQLEKPLENGSELQEGDSLTVPTKLSQYERQGEIKTSLHGKPKTDIAAFENGGGDCYVPQRVIFLGVDESEALTEEKEITISKCSNTKDNKDSPHPKHSLTTRLVPTTHVLNATENISMKCREDPSSMNDVQPVKKPHFKGVKKRKWIYDEPQNFPNSGMQRAVQAPRPQNKMSYHRNNKNRNAENASYIHVQRDAVRTVALNAPSRSRPTHGSYNKVHANREPKPNLSPDKYTSTSYNDSAWRKRIPFSKTYSKSEKIYPEPRRNGSK

SEQ ID NO: 3466 - protein, 303 aa, Homo sapiens
MADDQGCIEEQGVEDSANEDSVDAKPDRSSFVPSLFSKKKKNVTMRSIKTTRDRVPTYQYNMNFEKLGKCIIINNKNFDKVTGMGVRNGTDKDAEALFKCFRSLGFDVIVYNDCSCAKMQDLLKKASEEDHTNAACFACILLSHGEENVIYGKDGVTPIKDLTAHFRGDRCKTLLEKPKLFFIQACRGTELDDGIQADSGPINDTDANPRYKIPVEADFLFAYSTVPGYYSWRSPGRGSWFVQALCSILEEHGKDLEIMQILTRVNDRVARHFESQSDDPHFHEKKQIPCVVSMLTKELYFSQ

SEQ ID NO: 3467 - protein, 1190 aa, Homo sapiens
MTSRFGKTYSRKGGNGSSKFDEVFSNKRTTLSTKWGETTFMAKLGQKRPNFKPDIQEIPKKPKVEEESTGDPFGFDSDDESLPVSSKNLAQVKCSSYSESSEAAQLEEVTSVLEANSKISHVVVEDTVVSDKCFPLEDTLLGKEKSTNRIVEDDASISSCNKLITSDKVENFHEEHEKNSHHIHKNADDSTKKPNAETTVASEIKETNDTWNSQFGKRPESPSEISPIKGSVRTGLFEWDNDFEDIRSEDCILSLDSDPLLEMKDDDFKNRLENLNEAIEEDIVQSVLRPTNCRTYCRANKTKSSQGASNFDKLMDGTSQALAKANSESSKDGLNQAKKGGVSCGTSFRGTVGRTRDYTVLHPSCLSVCNVTIQDTMERSMDEFTASTPADLGEAGRLRKKADIATSKTTTRFRPSNTKSKKDVKLEFFGFEDHETGGDEGGSGSSNYKIKYFGFDDLSESEDDEDDDCQVERKTSKKRTKTAPSPSLQPPPESNDNSQDSQSGTNNAENLDFTEDLPGVPESVKKPINKQGDKSKENTRKIFSGPKRSPTKAVYNARHWNHPDSEELPGPPVVKPQSVTVRLSSKEPNQKDDGVFKAPAPPSKVIKTVTIPTQPYQDIVTALKCRREDKELYTVVQHVKHFNDVVEFGENQEFTDDIEYLLSGLKSTQPLNTRCLSVISLATKCAMPSFRMHLRAHGMVAMVFKTLDDSQHHQNLSLCTAALMYILSRDRLNMDLDRASLDLMIRLLELEQDASSAKLLNEKDMNKIKEKIRRLCETVHNKHLDLENITTGHLAMETLLSLTSKRAGDWFKEELRLLGGLDHIVDKVKECVDHLSRDEDEEKLVASLWGAERCLRVLESVTVHNPENQSYLIAYKDSQLIVSSAKALQHCEELIQQYNRAEDSICLADSKPLPHQNVTNHVGKAVEDCMRAIIGVLLNLTNDNEWGSTKTGEQDGLIGTALNCVLQVPKYLPQEQRFDIRVLGLGLLINLVEYSARNRHCLVNMETSCSFDSSICSGEGDDSLRIGGQVHAVQALVQLFLERERAAQLAESKTDELIKDAPTTQHDKSGEWQETSGEIQWVSTEKTDGTEEKHKKEEEDEELDLNKALQHAGKHMEDCIVASYTALLLGCLCQESPINVTTVREYLPEGDFSIMTEMLKKFLSFMNLTCAVGTTGQKSISRVIEYLEHC

SEQ ID NO: 3468 - protein, 835 aa, Homo sapiens
MSGGSQVHIFWGAPIAPLKITVSEDTASLMSVADPWKKIQLLYSQHSLYLKDEKQHKNLENYKVPESIGSPDLSGHFLANCMNRHVHVKDDFVRSVSETQNIESQKIHSSRLSDITSSNMQICGFKSTVPHFTEEEKYQKLLSENKIRDEQPKHQPDICGKNFNTNLFQLGHKCAAVLDLVCSTEKINIGPEVVQRECVPTEYHEIQNQCLGLFSSNAVDKSRSEAAVRKVSDLKISTDTEFLSIITSSQVAFLAQKKDKRRSPVNKGNVNMETEPKASYGEIRIPEENSIQLDGFTEAYESGQNQAYSLELFSPVCPKTENSRIHINSDKGLEEHTGSQELFSSEDELPPNEIRIELCSSGILCSQLNTFHKSAIKRSCTSEDKVGQSEALSRVLQVAKKMKLISNGGDSAVEMDRRNVSEFKSIKKTSLIKNCDSKSQKYNCLVMVLSPCHVKEINIKFGPNSGSKVPLATVTVIDQSETKKKVFLWRTAAFWAFTVFLGDIILLTDVVIHEDQWIGETVLQSTFSSQLLNLGSYSSIQPEEYSSVVSEVVLQDLLAYVSSKHSYLRDLPPRQPQRVNSIDFVELEHLQPDVLVHAVLRVVDFTILTEAVYSYRGQKQKKVMLTVEQAQDQHYALVLWGPGAAWYPQLQRKKGVVLIKAQISELAFPITASQKIALNAHSSLKSIFSSLPNIVYTGCAKCGLELETDENRIYKQCFSCLPFTMKKIYYRPALMTAIDGRHDVCIRVESKLIEKILLNISADCLNRVIVPSSEITYGMVVADLFHSLLAVSAEPCVLKIQSLFVLDENSYPLQQDFSLLDFYPDIVKHGANARL

SEQ ID NO: 3469 - protein, 904 aa, Homo sapiens
MSGGSQVHIFWGAPIAPLKITVSEDTASLMSVADPWKKIQLLYSQHSLYLKDEKQHKNLENYKVPESIGSPDLSGHFLANCMNRHVHVKDDFVRSVSETQNIESQKIHSSRLSDITSSNMQICGFKSTVPHFTEEEKYQKLLSENKIRDEQPKHQPDICGKNFNTNLFQLGHKCAAVLDLVCSTEKINIGPEVVQRECVPTEYHEIQNQCLGLFSSNAVDKSRSEAAVRKVSDLKISTDTEFLSIITSSQVAFLAQKKDKRRSPVNKGNVNMETEPKASYGEIRIPEENSIQLDGFTEAYESGQNQAYSLELFSPVCPKTENSRIHINSDKGLEEHTGSQELFSSEDELPPNEIRIELCSSGILCSQLNTFHKSAIKRSCTSEDKVGQSEALSRVLQVAKKMKLISNGGDSAVEMDRRNVSEFKSIKKTSLIKNCDSKSQKYNCLVMVLSPCHVKEINIKFGPNSGSKVPLATVTVIDQSETKKKVFLWRTAAFWAFTVFLGDIILLTDVVIHEDQWIGETVLQSTFSSQLLNLGSYSSIQPEEYSSVVSEVVLQDLLAYVSSKHSYLRDLPPRQPQRVNSIDFVELEHLQPDVLVHAVLRVVDFTILTEAVYSYRGQKQKKVMLTVEQAQDQHYALVLWGPGAAWYPQLQRKKGYIWEFKYLFVQCNYTLENLELHTTPWSSCECLFDDDIRAITFKAKFQKSAPSFVKISDLATHLEDKCSGVVLIKAQISELAFPITASQKIALNAHSSLKSIFSSLPNIVYTGCAKCGLELETDENRIYKQCFSCLPFTMKKIYYRPALMTAIDGRHDVCIRVESKLIEKILLNISADCLNRVIVPSSEITYGMVVADLFHSLLAVSAEPCVLKIQSLFVLDENSYPLQQDFSLLDFYPDIVKHGANARL

SEQ ID NO: 3470 - protein, 327 aa, Homo sapiens
MAKAPSWAGVGALAYKAPEALWPAEAVMDGTMEDSEAVQRATALIEQRLAQEEENEKLRGDARQKLPMDLLVLEDEKHHGAQSAALQKVKGQERVRKTSLDLRREIIDVGGIQNLIELRKKRKQKKRDALAASHEPPPEPEEITGPVDEETFLKAAVEGKMKVIEKFLADGGSADTCDQFRRTALHRASLEGHMEILEKLLDNGATVDFQDRLDCTAMHWACRGGHLEVVKLLQSHGADTNVRDKEGDTALHDAVRLNRYKIIKLLLLHGADMMTKNLAGKTPTDLVQLWQADTRHALEHPEPGAEHNGLEGPNDSGRETPQPVPAQ

SEQ ID NO: 3471 - protein, 874 aa, Homo sapiens
MGLPTLEFSDSYLDSPDFRERLQCHEIELERTNKFIKELIKDGSLLIGALRNLSMAVQKFSQSLQDFQFECIGDAETDDEISIAQSLKEFARLLIAVEEERRRLIQNANDVLIAPLEKFRKEQIGAAKDGKKKFDKESEKYYSILEKHLNLSAKKKESHLQEADTQIDREHQNFYEASLEYVFKIQEVQEKKKFEFVEPLLSFLQGLFTFYHEGYELAQEFAPYKQQLQFNLQNTRNNFESTRQEVERLMQRMKSANQDYRPPSQWTMEGYLYVQEKRPLGFTWIKHYCTYDKGSKTFTMSVSEMKSSGKMNGLVTSSPEMFKLKSCIRRKTDSIDKRFCFDIEVVERHGIITLQAFSEANRKLWLEAMDGKEPIYTLPAIISKKEEMYLNEAGFNFVRKCIQAVETRGITILGLYRIGGVNSKVQKLMNTTFSPKSPPDIDIDIELWDNKTITSGLKNYLRCLAEPLMTYKLHKDFIIAVKSDDQNYRVEAVHALVHKLPEKNREMLDILIKHLVKVSLHSQQNLMTVSNLGVIFGPTLMRAQEETVAAMMNIKFQNIVVEILIEHYEKIFHTAPDPSIPLPQPQSRSGSRRTRAICLSTGSRKPRGRYTPCLAEPDSDSYSSSPDSTPMGSIESLSSHSSEQNSTTKSASCQPREKSGGIPWIATPSSSNGQKSLGLWTTSPESSSREDATKTDAESDCQSVASVTSPGDVSPPIDLVKKEPYGLSGLKRASASSLRSISAAEGNKSYSGSIQSLTSVGSKETPKASPNPDLPPKMCRRLRLDTASSNGYQRPGSVVAAKAQLFENVGSPKPVSSGRQAKAMYSCKAEHSHELSFPQGAIFSNVYPSVEPGWLKATYEGKTGLVPENYVVFL

SEQ ID NO: 3472 - protein, 751 aa, Homo sapiens
EIIVAHIEKCSMNQNGNSLKKLAPSGRISGLCFKKLNVTTPIHKIIVNRLARKVEVDSIVVPLPFSSQELSIEDSGSMYVITTPAGLIIKWSHLTGIIDIHFGFRFNLSSYTEGLCGICNEDPDDDLRMQNGTIITNMEDIGLFIESWEIEKSFEVTMRRPVRNCTEHDCSQCIDLLNRRIFIPCHDKVSPEDFCEKMWINYTYFWNYECDALSAYVALCNKFDICIQWRTPDYCSLSCPEGKEYQPCVRPCEARTCLNQWFYGHTSCLNLREDCVCKVGTILHRPHSAQCIPEKECACTDSEDQPRTAGEIWNGGIDECTLYKCLENGSIIPIEPDCDEEPTPVCEREAEVVMGIIDKWTCCSKEVCGCDTTLCETSIPTCTNSQKLIVGHSPLSCCPQYKCECDPLKCPSISTPECREDQFMIQVRQEEPCCFSPFCVCESCTKPVPLCHDGEFLTVDLNSTHFCCPQYYCVCEPNLCPMPLLNCAEDMNLVKENVSGQCCPTWHCEKDDVCVFQEVSVLNPGQSMIKYLEEDFCYAIECLEEKDNHTGFHTLNFTLVNCSKKCDVHQVYTPSPSDYGCCGTCKNVSCKFHMENGTSVVYAVGSTWHYNCTTYECVKTDEGAIILNYTMVCPPFNETECKMNEGIVKLYNEGCCKICKREERICQKVIIKSVIRKQDCMSQSPINVASCDGKCPSATIYNINIESHLRFCKCCRENGVRNLSVPLYCSGNGTEIMYTLQEPIDCTCQWN

SEQ ID NO: 3473 - protein, 1281 aa, Homo sapiens
MPIVMARDLEETASSSEDEEVISQEDHPCIMWTGGCRRIPVLVFHADAILTKDNNIRVIGERYHLSYKIVRTDSRLVRSILTAHGFHEVHPSSTDYNLMWTGSHLKPFLLRTLSEAQKVNHFPRSYELTRKDRLYKNIIRMQHTHGFKAFHILPQTFLLPAEYAEFCNSYSKDRGPWIVKPVASSRGRGVYLINNPNQISLEENILVSRYINNPLLIDDFKFDVRLYVLVTSYDPLVIYLYEEGLARFATVRYDQGAKNIRNQFMHLTNYSVNKKSGDYVSCDDPEVEDYGNKWSMSAMLRYLKQEGRDTTALMAHVEDLIIKTIISAELAIATACKTFVPHRSSCFELYGFDVLIDSTLKPWLLEVNLSPSLACDAPLDLKIKASMISDMFTVVGFVCQDPAQRASTRPIYPTFESSRRNPFQKPQRCRPLSASDAEMKNLVGSAREKGPGKLGGSVLGLSMEEIKVLRRVKEENDRRGGFIRIFPTSETWEIYGSYLEHKTSMNYMLATRLFQDRMTADGAPELKIESLNSKAKLHAALYERKLLSLEVRKRRRRSSRLRAMRPKYPVITQPAEMNVKTETESEEEEEVALDNEDEEQEASQEESAGFLRENQAKYTPSLTALVENTPKENSMKVREWNNKGGHCCKLETQELEPKFNLMQILQDNGNLSKMQARIAFSAYLQHVQIRLMKDSGGQTFSASWAAKEDEQMELVVRFLKRASNNLQHSLRMVLPSRRLALLERRRILAHQLGDFIIVYNKETEQMAEKKSKKKVEEEEEDGVNMENFQEFIRQASEAELEEVLTFYTQKNKSASVFLGTHSKISKNNNNYSDSGAKGDHPETIMEEVKIKPPKQQQTTEIHSDKLSRFTTSAEKEAKLVYSNSSSGPTATLQKIPNTHLSSVTTSDLSPGPCHHSSLSQIPSAIPSMPHQPTILLNTVSASASPCLHPGAQNIPSPTGLPRCRSGSHTIGPFSSFQSAAHIYSQKLSRPSSAKAGSCYLNKHHSGIAKTQKEGEDASLYSKRYNQSMVTAELQRLAEKQAARQYSPSSHINLLTQQVTNLNLATGIINRSSASAPPTLRPIISPSGPTWSTQSDPQAPENHSSSPGSRSLQTGGFAWEGEVENNVYSQATGVVPQHKYHPTAGSYQLQFALQQLEQQKLQSRQLLDQSRARHQAIFGSQTLPNSNLWTMNNGAGCRISSATASGQKPTTLPQKVVPPPSSCASLVPKPPPNHEQVLRRATSQKASKGSSAEGQLNGLQSSLNPAAFVPITSSTDPAHTKI

SEQ ID NO: 3474 - protein, 439 aa, Homo sapiens
MNLLPNIESPVTRQEKMATVWDEAEQDGIGEEVLKMSTEEIIQRTRLLDSEIKIMKSEVLRVTHELQAMKDKIKENSEKIKVNKTLPYLVSNVIELLDVDPNDQEEDGANIDLDSQRKGKCAVIKTSTRQTYFLPVIGLVDAEKLKPGDLVGVNKDSYLILETLPTEYDSRVKAMEVDERPTEQYSDIGGLDKQIQELVEAIVLPMNHKEKFENLGIQPPKGVLMYGPPGTGKTLLARACAAQTKATFLKLAGPQLVQMFIGDGAKLVRDAFALAKEKAPSIIFIDELDAIGTKRFDSEKAGDREVQRTMLELLNQLDGFQPNTQVKVIAATNRVDILDPALLRSGRLDRKIEFPMPNEEARARIMQIHSRKMNVSPDVNYEELARCTDDFNGAQCKAVCVEAGMIALRRGATELTHEDYMEGILEVQAKKKANLQYYA

SEQ ID NO: 3475 - protein, 353 aa, Homo sapiens
MGQDQTKQQIEKGLQLYQSNQTEKALQVWTKVLEKSSDLMGRFRVLGCLVTAHSEMGRYKEMLKFAVVQIDTARELEDADFLLESYLNLARSNEKLCEFHKTISYCKTCLGLPGTRAGAQLGGQVSLSMGNAFLGLSVFQKALESFEKALRYAHNNDDAMLECRVCCSLGSFYAQVKDYEKALFFPCKAAELVNNYGKGWSLKYRAMSQYHMAVAYRLLGRLGSAMECCEESMKIALQHGDRPLQALCLLCFADIHRSRGDLELSQLKLHCLSESIYRSKGLQRELRAHVVRFHECVEETELYCGLCGESIGEKNSRLQALPCSHIFHLRCLQNNGTRSCPNCRRSSMKPGFV

SEQ ID NO: 3476 - protein, 412 aa, Homo sapiens
MGQDQTKQQIEKGLQLYQSNQTEKALQVWTKVLEKSSDLMGRFRVLGCLVTAHSEMGRYKEMLKFAVVQIDTARELEDADFLLESYLNLARSNEKLCEFHKTISYCKTCLGLPGTRAGAQLGGQVSLSMGNAFLGLSVFQKALESFEKALRYAHNNDDAMLECRVCCSLGSFYAQVKDYEKALFFPCKAAELVNNYGKGWSLKYRAMSQYHMAVAYRLLGRLGSAMECCEESMKIALQHGDRPLQALCLLCFADIHRSRGDLETAFPRYDSAMSIMTEIGNRLGQVQALLGVAKCWVARKALDKALDAIERAQDLAEEVGNKLSQLKLHCLSESIYRSKGLQRELRAHVVRFHECVEETELYCGLCGESIGEKNSRLQALPCSHIFHLRCLQNNGTRSCPNCRRSSMKPGFV

SEQ ID NO: 3477 - protein, 782 aa, Homo sapiens
MTSIIKLTTLSGVQEESALCYLLQVDEFRFLLDCGWDEHFSMDIIDSLRKHVHQIDAVLLSHPDPLHLGALPYAVGKLGLNCAIYATIPVYKMGQMFMYDLYQSRHNTEDFTLFTLDDVDAAFDKIQQLKFSQIVNLKGKGHGLSITPLPAGHMIGGTIWKIVKDGEEEIVYAVDFNHKREIHLNGCSLEMLSRPSLLITDSFNATYVQPRRKQRDEQLLTNVLETLRGDGNVLIAVDTAGRVLELAQLLDQIWRTKDAGLGVYSLALLNNVSYNVVEFSKSQVEWMSDKLMRCFEDKRNNPFQFRHLSLCHGLSDLARVPSPKVVLASQPDLECGFSRDLFIQWCQDPKNSIILTYRTTPGTLARFLIDNPSEKITEIELRKRVKLEGKELEEYLEKEKLKKEAAKKLEQSKEADIDSSDESDIEEDIDQPSAHKTKHDLMMKGEGSRKGSFFKQAKKSYPMFPAPEERIKWDEYGEIIKPEDFLVPELQATEEEKSKLESGLTNGDEPMDQDLSDVPTKCISTTESIEIKARVTYIDYEGRSDGDSIKKIINQMKPRQLIIVHGPPEASQDLAECCRAFGGKDIKVYMPKLHETVDATSETHIYQVRLKDSLVSSLQFCKAKDAELAWIDGVLDMRVSKVDTGVILEEGELKDDGEDSEMQVEAPSDSSVIAQQKAMKSLFGDDEKETGEESEIIPTLEPLPPHEVPGHQSVFMNEPRLSDFKQVLLREGIQAEFVGGVLVCNNQVAVRRTETGRIGLEGCLCQDFYRIRDLLYEQYAIV

SEQ ID NO: 3478 - protein, 1077 aa, Homo sapiens
MEVQVSQASLGFELTSVEKSLREWSRLSREVIAWLCPSSPNFILNFPPPPSASSVSMVQLFSSPFGYQSPSGHSEEEREGNMKSAKPQVNHSQHGESQRALSPLQSTLSSAASPSQAYETYIENGLICLKHKIRNIEKKKLKLEDYKDRLKSGEHLNPDQLEAVEKYEEVLHNLEFAKELQKTFSGLSLDLLKAQKKAQRREHMLKLEAEKKKLRTILQVQYVLQNLTQEHVQKDFKGGLNGAVYLPSKELDYLIKFSKLTCPERNESLSVEDQMEQSSLYFWDLLEGSEKAVVGTTYKHLKDLLSKLLNSGYFESIPVPKNAKEKEVPLEEEMLIQSEKKTQLSKTESVKESESLMEFAQPEIQPQEFLNRRYMTEVDYSNKQGEEQPWEADYARKPNLPKRWDMLTEPDGQEKKQESFKSWEASGKHQEVSKPAVSLEQRKQDTSKLRSTLPEEQKKQEISKSKPSPSQWKQDTPKSKAGYVQEEQKKQETPKLWPVQLQKEQDPKKQTPKSWTPSMQSEQNTTKSWTTPMCEEQDSKQPETPKSWENNVESQKHSLTSQSQISPKSWGVATASLIPNDQLLPRKLNTEPKDVPKPVHQPVGSSSTLPKDPVLRKEKLQDLMTQIQGTCNFMQESVLDFDKPSSAIPTSQPPSATPGSPVASKEQNLSSQSDFLQEPLQATSSPVTCSSNACLVTTDQASSGSETEFMTSETPEVFNVNAPLPPRKEQEIKESPYSPGYNQSFTTASTQTPPQCQLPSIHVEQTVHSQETANYHPDGTIQVSNGSLAFYPAQTNVFPRPTQPFVNSRGSVRGCTRGGRLITNSYRSPGGYKGFDTYRGLPSISNGNYSQLQFQAREYSGAPYSQRDNFQQCYKRGGTSGGPRANSRAGWSDSSQVSSPERDNETFNSGDSGQGDSRSMTPVDVPVTNPAATILPVHVYPLPQQMRVAFSAARTSNLAPGTLDQPIVFDLLLNNLGETFDLQLGRFNCPVNGTYVFIFHMLKLAVNVPLYVNLMKNEEVLVSAYANDGAPDHETASNHAILQLFQGDQIWLRLHRGAIYGSSWKYSTFSGYLLYQD

SEQ ID NO: 3479 - protein, 351 aa, Homo sapiens
MTLRLLEDWCRGMDMNPRKALLIAGISQSCSVAEIEEALQAGLAPLGEYRLLGRMFRRDENRKVALVGLTAETSHALVPKEIPGKGGIWRVIFKPPDPDNTFLSRLNEFLAGEGMTVGELSRALGHENGSLDPEQGMIPEMWAPMLAQALEALQPALQCLKYKKLRVFSGRESPEPGEEEFGRWMFHTTQMIKAWQVPDVEKRRRLLESLRGPALDVIRVLKINNPLITVDECLQALEEVFGVTDNPRELQVKYLTTYQKDEEKLSAYVLRLEPLLQKLVQRGAIERDAVNQARLDQVIAGAVHKTIRRELNLPEDGPAPGFLQLLVLIKDYEAAEEEEALLQAILEGNFT

SEQ ID NO: 3480 - protein, 410 aa, Homo sapiens
MGANASNYPHSCSPRVGGNSQAQQTFIGTSSYSQQGYGCESKLYSLDHGHEKPQDKKKRTSGLATLKKKFIKRRKSNRSADHAKQMRELLSGWDVRDVNALVEEYEGTSALKELSLQASLARPEARTLQKDMADLYEYKYCTDVDLIFQETCFPVHRAILAARCPFFKTLLSSSPEYGAEIIMDINTAGIDMPMFSALLHYLYTGEFGMEDSRFQNVDILVQLSEEFGTPNSLDVDMRGLFDYMCYYDVVLSFSSDSELVEAFGGNQNCLDEELKAHKAVISARSPFFRNLLQRRIRTGEEITDRTLRTPTRIILDESIIPKKYATVILHCMYTDVVDLSVLHCSPSVGSLSEVQALVAGKPNMTRAEEAMELYHIALFLEFNMLAQEETTVIRPACAAELSNSCLLPQS

SEQ ID NO: 3481 - protein, 2527 aa, Homo sapiens
MASGSCQGCEEDEETLKKLIVRLNNVQEGKQIETLVQILEDLLVFTYSERASKLFQGKNIHVPLLIVLDSYMRVASVQQVGWSLLCKLIEVCPGTMQSLMGPQDVGNDWEVLGVHQLILKMLTVHNASVNLSVIGLKTLDLLLTSGKITLLILDEESDIFMLIFDAMHSFPANDEVQKLGCKALHVLFERVSEEQLTEFVENKDYMILLSALTNFKDEEEIVLHVLHCLHSLAIPCNNVEVLMSGNVRCYNIVVEAMKAFPMSERIQEVSCCLLHRLTLGNFFNILVLNEVHEFVVKAVQQYPENAALQISALSCLALLTETIFLNQDLEEKNENQENDDEGEEDKLFWLEACYKALTWHRKNKHVQEAACWALNNLLMYQNSLHEKIGDEDGHFPAHREVMLSMLMHSSSKEVFQASANALSTLLEQNVNFRKILLSKGIHLNVLELMQKHIHSPEVAESGCKMLNHLFEGSNTSLDIMAAVVPKILTVMKRHETSLPVQLEALRAILHFIVPGMPEESREDTEFHHKLNMVKKQCFKNDIHKLVLAALNRFIGNPGIQKCGLKVISSIVHFPDALEMLSLEGAMDSVLHTLQMYPDDQEIQCLGLSLIGYLITKKNVFIGTGHLLAKILVSSLYRFKDVAEIQTKGFQTILAILKLSASFSKLLVHHSFDLVIFHQMSSNIMEQKDQQFLNLCCKCFAKVAMDDYLKNVMLERACDQNNSIMVECLLLLGADANQAKEGSSLICQVCEKESSPKLVELLLNSGSREQDVRKALTISIGKGDSQIISLLLRRLALDVANNSICLGGFCIGKVEPSWLGPLFPDKTSNLRKQTNIASTLARMVIRYQMKSAVEEGTASGSDGNFSEDVLSKFDEWTFIPDSSMDSVFAQSDDLDSEGSEGSFLVKKKSNSISVGEFYRDAVLQRCSPNLQRHSNSLGPIFDHEDLLKRKRKILSSDDSLRSSKLQSHMRHSDSISSLASEREYITSLDLSANELRDIDALSQKCCISVHLEHLEKLELHQNALTSFPQQLCETLKSLTHLDLHSNKFTSFPSYLLKMSCIANLDVSRNDIGPSVVLDPTVKCPTLKQFNLSYNQLSFVPENLTDVVEKLEQLILEGNKISGICSPLRLKELKILNLSKNHISSLSENFLEACPKVESFSARMNFLAAMPFLPPSMTILKLSQNKFSCIPEAILNLPHLRSLDMSSNDIQYLPGPAHWKSLNLRELLFSHNQISILDLSEKAYLWSRVEKLHLSHNKLKEIPPEIGCLENLTSLDVSYNLELRSFPNEMGKLSKIWDLPLDELHLNFDFKHIGCKAKDIIRFLQQRLKKAVPYNRMKLMIVGNTGSGKTTLLQQLMKTKKSDLGMQSATVGIDVKDWPIQIRDKRKRDLVLNVWDFAGREEFYSTHPHFMTQRALYLAVYDLSKGQAEVDAMKPWLFNIKARASSSPVILVGTHLDVSDEKQRKACMSKITKELLNKRGFPAIRDYHFVNATEESDALAKLRKTIINESLNFKIRDQLVVGQLIPDCYVELEKIILSERKNVPIEFPVIDRKRLLQLVRENQLQLDENELPHAVHFLNESGVLLHFQDPALQLSDLYFVEPKWLCKIMAQILTVKVEGCPKHPKGIISRRDVEKFLSKKRKFPKNYMSQYFKLLEKFQIALPIGEEYLLVPSSLSDHRPVIELPHCENSEIIIRLYEMPYFPMGFWSRLINRLLEISPYMLSGRERALRPNRMYWRQGIYLNWSPEAYCLVGSEVLDNHPESFLKITVPSCRKGCILLGQVVDHIDSLMEEWFPGLLEIDICGEGETLLKKWALYSFNDGEEHQKILLDDLMKKAEEGDLLVNPDQPRLTIPISQIAPDLILADLPRNIMLNNDELEFEQAPEFLLGDGSFGSVYRAAYEGEEVAVKIFNKHTSLRLLRQELVVLCHLHHPSLISLLAAGIRPRMLVMELASKGSLDRLLQQDKASLTRTLQHRIALHVADGLRYLHSAMIIYRDLKPHNVLLFTLYPNAAIIAKIADYGIAQYCCRMGIKTSEGTPGFRAPEVARGNVIYNQQADVYSFGLLLYDILTTGGRIVEGLKFPNEFDELEIQGKLPDPVKEYGCAPWPMVEKLIKQCLKENPQERPTSAQVFDILNSAELVCLTRRILLPKNVIVECMVATHHNSRNASIWLGCGHTDRGQLSFLDLNTEGYTSEEVADSRILCLALVHLPVEKESWIVSGTQSGTLLVINTEDGKKRHTLEKMTDSVTCLYCNSFSKQSKQKNFLLVGTADGKLAIFEDKTVKLKGAAPLKILNIGNVSTPLMCLSESTNSTERNVMWGGCGTKIFSFSNDFTIQKLIETRTSQLFSYAAFSDSNIITVVVDTALYIAKQNSPVVEVWDKKTEKLCGLIDCVHFLREVMVKENKESKHKMSYSGRVKTLCLQKNTALWIGTGGGHILLLDLSTRRLIRVIYNFCNSVRVMMTAQLGSLKNVMLVLGYNRKNTEGTQKQKEIQSCLTVWDINLPHEVQNLEKHIEVRKELAEKMRRTSVE

SEQ ID NO: 3482 - protein, 1002 aa, Homo sapiens
MAAHEWDWFQREELIGQISDIRVQNLQVERENVQKRTFTRWINLHLEKCNPPLEVKDLFVDIQDGKILMALLEVLSGRNLLHEYKSSSHRIFRLNNIAKALKFLEDSNVKLVSIDAAEIADGNPSLVLGLIWNIILFFQIKELTGNLSRNSPSSSLSPGSGGTDSDSSFPPTPTAERSVAISVKDQRKAIKALLAWVQRKTRKYGVAVQDFAGSWRSGLAFLAVIKAIDPSLVDMKQALENSTRENLEKAFSIAQDALHIPRLLEPEDIMVDTPDEQSIMTYVAQFLERFPELEAEDIFDSDKEVPIESTFVRIKETPSEQESKVFVLTENGERTYTVNHETSHPPPSKVFVCDKPESMKEFRLDGVSSHALSDSSTEFMHQIIDQVLQGGPGKTSDISEPSPESSILSSRKENGRSNSLPIKKTVHFEADTYKDPFCSKNLSLCFEGSPRVAKESLRQDGHVLAVEVAEEKEQKQESSKIPESSSDKVAGDIFLVEGTNNNSQSSSCNGALESTARHDEESHSLSPPGENTVMADSFQIKVNLMTVEALEEGDYFEAIPLKASKFNSDLIDFASTSQAFNKVPSPHETKPDEDAEAFENHAEKLGKRSIKSAHKKKDSPEPQVKMDKHEPHQDSGEEAEGCPSAPEETPVDKKPEVHEKAKRKSTRPHYEEEGEDDDLQGVGEELSSSPPSSCVSLETLGSHSEEGLDFKPSPPLSKVSVIPHDLFYFPHYEVPLAAVLEAYVEDPEDLKNEEMDLEEPEGYMPDLDSREEEADGSQSSSSSSVPGESLPSASDQVLYLSRGGVGTTPASEPAPLAPHEDHQQRETKENDPMDSHQSQESPNLENIANPLEENVTKESISSKKKEKRKHVDHVESSLFVAPGSVQSSDDLEEDSSDYSIPSRTSHSDSSIYLRRHTHRSSESDHFSYVQLRNAADLDDRRNRILTRKANSSGEAMSLGSHSPQSDSLTQLVQQPDMMYFILFLWLLVYCLLLFPQLDVSRL

SEQ ID NO: 3483 - protein, 776 aa, Homo sapiens
MSGKRQFFLKPLALLTCWPSTVNGKDLSKATHEEAVEAFRNAKEPIVVQVLRRTPLSRPAYGMASEVQLMNASTQTDITFEHIMALAKLRPPTPPVPDICPFLLSDSCHSLHPMEHEFYEDNEYISSLPADADRTEDFEYEEVELCRVSSQEKLGLTVCYRTDDEEDTGIYVSEVDPNSIAAKDGRIREGDRILQINGEDVQNREEAVALLSNDECKRIVLLVARPEIQLDEGWLEDERNEFLEELNLEMLEEEHNEAMQPTANEVEQPKKQEEEEGTTDTATSSSNNHEKDSGVGRTDESLRNDESSEQENAAEDPNSTSLKSKRDLGQSQDTLGSVELQYNESLVSGEYIDSDCIGNPDEDCERFRQLLELKCKIRNHGEYDLYYSSSTIECNQGEQEGVEHELQLLNEELRNIELECQNIMQAHRLQKVTDQYGDIWTLHDGGFRNYNTSIDMQRGKLDDIMEHPEKSDKDSSSAYNTAESCRSTPLTVDRSPDSSLPRVINLTNKKNLRSTMAATQSSSGQSSKESTSTKAKTTEQGCSAESKEKVLEGSKLPDQEKAVSEHIPYLSPYHSSSYRYANIPAHARHYQSYMQLIQQKSAVEYAQSQLSLVSMCKESQKCSEPKMEWKVKIRSDGTRYITKRPVRDRILKERALKIKEERSGMTTDDDTMSEMKMGRYWSKEERKQHLVRAKEQRRRREFMMRSRLECLKESPQSGSEGKKEINIIELSHKKMMKKRNKKILDNWMTIQELMTHGAKSPDGTRVHNAFLSVTTV

SEQ ID NO: 3484 - protein, 838 aa, Homo sapiens
MPMDLILVVWFCVCTARTAEDMKPPVLSLIWRTRVLKSLLQQSLQGVVGFGMDPDLQMDIVTELDLVNTTLGVAQVSGMHNASKAFLFQDIEREIHAAPHVSEKLIQLFRNKSEFTILATVQQKPSTSGVILSIRELEHSYFELESSGLRDEIRYHYIHNGKPRTEALPYRMADGQWHKVALSVSASHLLLHVDCNRIYERVIDPPDTNLPPGINLWLGQRNQKHGLFKGIIQDGKIIFMPNGYITQCPNLNHTCPTCSDFLSLVQGIMDLQELLAKMTAKLNYAETRLSQLENCHCEKTCQVSGLLYRDQDSWVDGDHCRNCTCKSGAVECRRMSCPPLNCSPDSLPVHIAGQCCKVCRPKCIYGGKVLAEGQRILTKSCRECRGGVLVKITEMCPPLNCSEKDHILPENQCCRVCRGHNFCAEGPKCGENSECKNWNTKATCECKSGYISVQGDSAYCEDIDECAAKMHYCHANTVCVNLPGLYRCDCVPGYIRVDDFSCTEHDECGSGQHNCDENAICTNTVQGHSCTCKPGYVGNGTICRAFCEEGCRYGGTCVAPNKCVCPSGFTGSHCEKDIDECSEGIIECHNHSRCVNLPGWYHCECRSGFHDDGTYSLSGESCIDIDECALRTHTCWNDSACINLAGGFDCLCPSGPSCSGDCPHEGGLKHNGQVWTLKEDRCSVCSCKDGKIFCRRTACDCQNPSADLFCCPECDTRVTSQCLDQNGHKLYRSGDNWTHSCQQCRCLEGEVDCWPLTCPNLSCEYTAILEGECCPRCVSDPCLADNITYDIRKTCLDSYGVSRLSGSVWTMAGSPCTTCKCKNGRVCCSVDFECLQNN

SEQ ID NO: 3485 - protein, 425 aa, Homo sapiens
MAAVATCGSVAASTGSAVATASKSNVTSFQRRGPRASVTNDSGPRLVSIAGTRPSVRNGQLLVSTGLPALDQLLGGGLAVGTVLLIEEDKYNIYSPLLFKYFLAEGIVNGHTLLVASAKEDPANILQELPAPLLDDKCKKEFDEDVYNHKTPESNIKMKIAWRYQLLPKMEQIGPVSSSRFGHYYDASKRMPQELIEASNWHGFFLPEKISSTLKVEPCSLTPGYTKLLQFIQNIIYEEGFDGSNPQKKQRNILRIGIQNLGSPLWGDDICCAENGGNSHSLTKFLYVLRGLLRTSLSACIITMPTHLIQNKAIIARVTTLSDVVVGLESFIGSERETNPLYKDYHGLIHIRQIPRLNNLICDESDVKDLAFKLKRKLFTIERLHLPPDLSDTVSRSSKMDLAESAKRLGPGCGMMAGGKKHLDF

SEQ ID NO: 3486 - protein, 255 aa, Homo sapiens
MVLLLVILIPVLVSSAGTSAHYEMLGTCRMVCDPYGGTKAPSTAATPDRGLMQSLPTFIQGPKGEAGRPGKAGPRGPPGEPGPPGPMGPPGEKGEPGRQGLPGPPGAPGLNAAGAISAATYSTVPKIAFYAGLKRQHEGYEVLKFDDVVTNLGNHYDPTTGKFTCSIPGIYFFTYHVLMRGGDGTSMWADLCKNNQVRASAIAQDADQNYDYASNSVVLHLEPGDEVYIKLDGGKAHGGNNNKYSTFSGFIIYAD

SEQ ID NO: 3487 - protein, 613 aa, Homo sapiens
MGKIENNERVILNVGGTRHETYRSTLKTLPGTRLALLASSEPPGDCLTTAGDKLQPSPPPLSPPPRAPPLSPGPGGCFEGGAGNCSSRGGRASDHPGGGREFFFDRHPGVFAYVLNYYRTGKLHCPADVCGPLFEEELAFWGIDETDVEPCCWMTYRQHRDAEEALDIFETPDLIGGDPGDDEDLAAKRLGIEDAAGLGGPDGKSGRWRRLQPRMWALFEDPYSSRAARFIAFASLFFILVSITTFCLETHEAFNIVKNKTEPVINGTSVVLQYEIETDPALTYVEGVCVVWFTFEFLVRIVFSPNKLEFIKNLLNIIDFVAILPFYLEVGLSGLSSKAAKDVLGFLRVVRFVRILRIFKLTRHFVGLRVLGHTLRASTNEFLLLIIFLALGVLIFATMIYYAERVGAQPNDPSASEHTQFKNIPIGFWWAVVTMTTLGYGDMYPQTWSGMLVGALCALAGVLTIAMPVPVIVNNFGMYYSLAMAKQKLPRKRKKHIPPAPQASSPTFCKTELNMACNSTQSDTCLGKDNRLLEHNRSVLSGDDSTGSEPPLSPPERLPIRRSSTRDKNRRGETCFLLTTGDYTCASDGGIRKDNCKEVVITGYTQAEARSLT

SEQ ID NO: 3488 - protein, 778 aa, Homo sapiens
MQQESERCRVRARRPDMALYVPKARRGAVLLKTGDEEESCGSPNSVVKEKQKESSLSQKEVFKDKPEARRLNINPDRKEHNCREEKKSSTKLRMDTCLQKTNRVCSKRGTTESKEVLSQGQQQGAPNAGVITNAPLQRHFKPKKVECLEVETTDVTGHERILLSQACLEISEAQVPSKPFQNVEFCDFSRHEPDGEAFEDKDLEGRIETDTKVLEILYEFPRVFSSVMKPENMIVPIKLSSDSEIVQQSMQTSDGILNPSSGGITTTSVPGSPDGVFDQTCVDFEVESVGGIANSTGFILDQKDTDSIPATMGHISLSESTNDTVSPVMIRECEKNDSTADELHVKHEPPDTAVLAHETHRDSGFKNVGDITNKACMMDTTGMSCSDHVTVDSPYVVAVRIADETSINTRSFSKFVGMSADATPLHVARSGNDTEDFSNPSACSDIYGESISSHFTESTGKLIESLSDCASSLPIKKIAGSNYNTFLDSELSMLNGTKVLSDSAVGIDLGSTGDTTEALHELRTAEEFKTEEQDDSGSIEFGVSFPDRESSSMETSIEPKATETSHTEGITAIEESWESMFNDDGDCLDPRLLQELSGNTKSRESIQEPRSDYYNHEVPDIDLSDCEFPHVIEIYDFPQEFHTEDLLRVFCSYQKKGFDIKWVDDTHALGVFSSPITARDALGIKHTMVKIRPLSQATRAAKAKARAYAEFLQPAKERPETSAALARRLVISALGVRSKQSKTEREAELKKLQEARERKRLEAKQREDIWEGRDQSTV

SEQ ID NO: 3489 - protein, 852 aa, Homo sapiens
MSGRARVKARGIARSPSATEVGRIQASPLPRSVDLSNNEASSSNGFLGTSRISTNDKYGISSGDAGSTFMERGVKNKQDFMDLSICTREKLAHVRNCKTGSSGIPVKLVTNLFNLDFPQDWQLYQYHVTYIPDLASRRLRIALLYSHSELSNKAKAFDGAILFLSQKLEEKVTELSSETQRGETIKMTITLKRELPSSSPVCIQVFNIIFRKILKKLSMYQIGRNFYNPSEPMEIPQHKLSLWPGFAISVSYFERKLLFSADVSYKVLRNETVLEFMTALCQRTGLSCFTQTCEKQLIGLIVLTRYNNRTYSIDDIDWSVKPTHTFQKRDGTEITYVDYYKQQYDITVSDLNQPMLVSLLKKKRNDNSEAQLAHLIPELCFLTGLTDQATSDFQLMKAVAEKTRLSPSGRQQRLARLVDNIQRNTNARFELETWGLHFGSQISLTGRIVPSEKILMQDHICQPVSAADWSKDIRTCKILNAQSLNTWLILCSDRTEYVAESFLNCLRRVAGSMGFNVDYPKIIKVQENPAAFVRAIQQYVDPDVQLVMCILPSNQKTYYDSIKKYLSSDCPVPSQCVLARTLNKQGMMMSIATKIAMQMTCKLGGELWAVEIPLKSLMVVGIDVCKDALSKDVMVVGCVASVNPRITRWFSRCILQRTMTDVADCLKVFMTGALNKWYKYNHDLPARIIVYRAGVGDGQLKTLIEYEVPQLLSSVAESSSNTSSRLSVIVVRKKCMPRFFTEMNRTVQNPPLGTVVDSEATRNEWYDFYLISQVACRGTVSPTYYNVIYDDNGLKPDHMQRLTFKLCHLYYNWPGIVSVPAPCQYAHKLTFLVAQSIHKEPSLELANHLFYL

SEQ ID NO: 3490 - protein, 499 aa, Homo sapiens
MDTSPLCFSILLVLCIFIQSSALGQSLKPEPFGRRAQAVETNKTLHEMKTRFLLFGETNQGCQIRINHPDTLQECGFNSSLPLVMIIHGWSVDGVLENWIWQMVAALKSQPAQPVNVGLVDWITLAHDHYTIAVRNTRLVGKEVAALLRWLEESVQLSRSHVHLIGYSLGAHVSGFAGSSIGGTHKIGRITGLDAAGPLFEGSAPSNRLSPDDANFVDAIHTFTREHMGLSVGIKQPIGHYDFYPNGGSFQPGCHFLELYRHIAQHGFNAITQTIKCSHERSVHLFIDSLLHAGTQSMAYPCGDMNSFSQGLCLSCKKGRCNTLGYHVRQEPRSKSKRLFLVTRAQSPFKVYHYQFKIQFINQTETPIQTTFTMSLLGTKEKMQKIPITLGKGIASNKTYSFLITLDVDIGELIMIKFKWENSAVWANVWDTVQTIIPWSTGPRHSGLVLKTIRVKAGETQQRMTFCSENTDDLLLRPTQEKIFVKCEIKSKTSKRKIR

SEQ ID NO: 3491 - protein, 519 aa, Homo sapiens
MPFNGEKQCVGEDQPSDSDSSRFSESMASLSDYECSRQSFASDSSSKSSSPASTSPPRVVTFDEVMATARNLSNLTLAHEIAVNENFQLKQEALPEKSLAGRVKHIVHQAFWDVLDSELNADPPEFEHAIKLFEEIREILLSFLTPGGNRLRNQICEVLDTDLIRQQAEHSAVDIQGLANYVISTMGKLCAPVRDNDIRELKATGNIVEVLRQIFHVLDLMQMDMANFTIMSLRPHLQRQLVEYERTKFQEILEETPSALDQTTEWIKESVNEELFSLSESALTPGAENTSKPSLSPTLVLNNSYLKLLQWDYQKKELPETLMTDGARLQELTEKLNQLKIIACLSLITNNMVGAITGGLPELASRLTRISAVLLEGMNKETFNLKEVLNSIGIQTCVEVNKTLMERGLPTLNAEIQANLIGQFSSIEEEDNPIWSLIDKRIKLYMRRLLCLPSPQKCMPPMPGGLAVIQQELEALGSQYANIVNLNKQVYGPFYANILRKLLFNEEAMGKVDASPPTN

SEQ ID NO: 3492 - protein, 310 aa, Homo sapiens
MALRRPPRLRLCARLPDFFLLLLFRGCLIGAVNLKSSNRTPVVQEFESVELSCIITDSQTSDPRIEWKKIQDEQTTYVFFDNKIQGDLAGRAEILGKTSLKIWNVTRRDSALYRCEVVARNDRKEIDEIVIELTVQVKPVTPVCRVPKAVPVGKMATLHCQESEGHPRPHYSWYRNDVPLPTDSRANPRFRNSSFHLNSETGTLVFTAVHKDDSGQYYCIASNDAGSARCEEQEMEVYDLNIGGIIGGVLVVLAVLALITLGICCAYRRGYFINNKQDGESYKNPGKPDGVNYIRTDEEGDFRHKSSFVI

SEQ ID NO: 3493 - protein, 796 aa, Homo sapiens
MPTTQQSPQDEQEKLLDEAIQAVKVQSFQMKRCLDKNKLMDALKHASNMLGELRTSMLSPKSYYELYMAISDELHYLEVYLTDEFAKGRKVADLYELVQYAGNIIPRLYLLITVGVVYVKSFPQSRKDILKDLVEMCRGVQHPLRGLFLRNYLLQCTRNILPDEGEPTDEETTGDISDSMDFVLLNFAEMNKLWVRMQHQGHSRDREKRERERQELRILVGTNLVRLSQLEGVNVERYKQIVLTGILEQVVNCRDALAQEYLMECIIQVFPDEFHLQTLNPFLRACAELHQNVNVKNIIIALIDRLALFAHREDGPGIPADIKLFDIFSQQVATVIQSRQDMPSEDVVSLQVSLINLAMKCYPDRVDYVDKVLETTVEIFNKLNLEHIATSSAVSKELTRLLKIPVDTYNNILTVLKLKHFHPLFEYFDYESRKSMSCYVLSNVLDYNTEIVSQDQVDSIMNLVSTLIQDQPDQPVEDPDPEDFADEQSLVGRFIHLLRSEDPDQQYLILNTARKHFGAGGNQRIRFTLPPLVFAAYQLAFRYKENSKVDDKWEKKCQKIFSFAHQTISALIKAELAELPLRLFLQGALAAGEIGFENHETVAYEFMSQAFSLYEDEISDSKAQLAAITLIIGTFERMKCFSEENHEPLRTQCALAASKLLKKPDQGRAVSTCAHLFWSGRNTDKNGEELHGGKRVMECLKKALKIANQCMDPSLQVQLFIEILNRYIYFYEKENDAVTIQVLNQLIQKIREDLPNLESSEETEQINKHFHNTLEHLRLRRESPESEGPIYEGLIL

SEQ ID NO: 3494 - protein, 517 aa, Homo sapiens
MIESDTSSIMSGIIRNSGQNHHPSPQEYRLLATTSDDDLPGDLQSLSWLTAVDVPRLQQMASGRVDLGGPCVPHPHPGALAGVADLHVGATPSPLLHGPAGMAPRGMPGLGPITGHRDSMSQFPVGGQPSSGLQDPPHLYSPATQPQFPLPPGAQQCPPVGLYGPPFGVRPPYPQPHVAVHSSQELHPKHYPKPIYSYSCLIAMALKNSKTGSLPVSEIYSFMKEHFPYFKTAPDGWKNSVRHNLSLNKCFEKVENKMSGSSRKGCLWALNLARIDKMEEEMHKWKRKDLAAIHRSMANPEELDKLISDRPESCRRPGKPGEPEAPVLTHATTVAVAHGCLAVSQLPPQPLMTLSLQSVPLHHQVQPQAHLAPDSPAPAQTPPLHALPDLSPSPLPHPAMGRAPVDFINISTDMNTEVDALDPSIMDFALQGNLWEEMKDEGFSLDTLGAFADSPLGCDLGASGLTPASGGSDQSFPDLQVTGLYTAYSTPDSVAASGTSSSSQYLGAQGNKPIALL

SEQ ID NO: 3495 - protein, 1093 aa, Homo sapiens
MAGAAGLTAEVSWKVLERRARTKRSGSVYEPLKSINLPRPDNETLWDKLDHYYRIVKSTLLLYQSPTTGLFPTKTCGGDQKAKIQDSLYCAAGAWALALAYRRIDDDKGRTHELEHSAIKCMRGILYCYMRQADKVQQFKQDPRPTTCLHSVFNVHTGDELLSYEEYGHLQINAVSLYLLYLVEMISSGLQIIYNTDEVSFIQNLVFCVERVYRVPDFGVWERGSKYNNGSTELHSSSVGLAKAALEAINGFNLFGNQGCSWSVIFVDLDAHNRNRQTLCSLLPRESRSHNTDAALLPCISYPAFALDDEVLFSQTLDKVVRKLKGKYGFKRFLRDGYRTSLEDPNRCYYKPAEIKLFDGIECEFPIFFLYMMIDGVFRGNPKQVQEYQDLLTPVLHHTTEGYPVVPKYYYVPADFVEYEKNNPGSQKRFPSNCGRDGKLFLWGQALYIIAKLLADELISPKDIDPVQRYVPLKDQRNVSMRFSNQGPLENDLVVHVALIAESQRLQVFLNTYGIQTQTPQQVEPIQIWPQQELVKAYLQLGINEKLGLSGRPDRPIGCLGTSKIYRILGKTVVCYPIIFDLSDFYMSQDVFLLIDDIKNALQFIKQYWKMHGRPLFLVLIREDNIRGSRFNPILDMLAALKKGIIGGVKVHVDRLQTLISGAVVEQLDFLRISDTEELPEFKSFEELEPPKHSKVKRQSSTPSAPELGQQPDVNISEWKDKPTHEILQKLNDCSCLASQAILLGILLKREGPNFITKEGTVSDHIERVYRRAGSQKLWSVVRRAASLLSKVVDSLAPSITNVLVQGKQVTLGAFGHEEEVISNPLSPRVIQNIIYYKCNTHDEREAVIQQELVIHIGWIISNNPELFSGMLKIRIGWIIHAMEYELQIRGGDKPALDLYQLSPSEVKQLLLDILQPQQNGRCWLNRRQIDGSLNRTPTGFYDRVWQILERTPNGIIVAGKHLPQQPTLSDMTMYEMNFSLLVEDTLGNIDQPQYRQIVVELLMVVSIVLERNPELEFQDKVDLDRLVKEAFNEFQKDQSRLKEIEKQDDMTSFYNTPPLGKRGTCSYLTKAVMNLLLEGEVKPNNDDPCLIS

SEQ ID NO: 3496 - protein, 418 aa, Homo sapiens
MRLSAGPDAGPSGNSSPWWPLATGAGNTSREAEALGEGNGPPRDVRNEELAKLEIAVLAVTFAVAVLGNSSVLLALHRTPRKTSRMHLFIRHLSLADLAVAFFQVLPQMCWDITYRFRGPDWLCRVVKHLQVFGMFASAYMLVVMTADRYIAVCHPLKTLQQPARRSRLMIAAAWVLSFVLSTPQYFVFSMIEVNNVTKARDCWATFIQPWGSRAYVTWMTGGIFVAPVVILGTCYGFICYNIWCNVRGKTASRQSKGAEQAGVAFQKGFLLAPCVSSVKSISRAKIRTVKMTFVIVTAYIVCWAPFFIIQMWSVWDPMSVWTESENPTITITALLGSLNSCCNPWIYMFFSGHLLQDCVQSFPCCQNMKEKFNKEDTDSMSRRQTFYSNNRSPTNSTGMWKDSPKSSKSIKFIPVST

SEQ ID NO: 3497 - protein, 265 aa, Homo sapiens
MSEQQMDLKDLMPTKRKYMWKTAEDRRMSDLTCVLEWLERRQGKKKQAPEKQKPKVVTVLKRNKKKEEKKGKGLMTARGGNRRDTETSQQALGKRFRKDAASYRSLYGVEQKGKHLSMVPGSYIKDGPKKSDTDIKDAVDPESTQRPNPFRRQSIVLDPMLQEGTFNSQRATFIRDWSNKMPDMAYERKLKSLMEKSTEPKMETMRMLKPEEVLSCRYLRLSKENIRTLLKLCKDAGMNVDIHPHMVEEDIDAKKVFTGIPSMAL

SEQ ID NO: 3498 - protein, 582 aa, Homo sapiens
MSESWQQPPQTQPQQPQPPQPQHHAEPPPALAEHTLPPGTAENPLGCAVYGILLQPDPGLQPPQHAPLQAAGEPGPKCGVCGHDLAHLSSPHEHQCLAGHDRSFQCTQCLKIFHQATDLLEHQCVQAEQKPFVCGVCKMGFSLLTSLAQHHSSHSGLVKCSICEKTYKPAEAAEPATTAAPSLPAAPAPSTVTPAEQADKPYSCPICQKPFKHLSELSRHERIHTGEKPYKCTLCDKSFSQSSHLVHHKRTHSSERPYKCAVCEKTFKHRSHLVRHMYAHSGEHHLFRCNVCELHFKESSELLQHPCTPSGERPFRCGECQKAFKRPSDLRQHERTHSAERPFKCDLCPMGFKQQYALMRHRRTHKTEEPFKCGLCEKGFGQPSHLLYHQHVHTLETLFKCPVCQKGFDQSAELLRHKCLPGAAERPFKCPVCNKAYKRASALQKHQLAHCAAAEKPLRCTLCERRFFSSSEFVQHRCDPAREKPLKCPDCEKRFKYASDLQRHRRVHTGEKPYKCPNCDKAFKQREHLNKHQGVHAREQQFKCVWCGERFLDVALLQEHSAQHSAAAAAAEGAYQVAACLP

SEQ ID NO: 3499 - protein, 956 aa, Homo sapiens
MAAAVGVRGRYELPPCSGPGWLLSLSALLSVAARGAFATTHWVVTEDGKIQQQVDSPMNLKHPHDLVILMRQEATVNYLKELEKQLVAQKIHIEENEDRDTGLEQRHNKEDPDCIKAKVPLGDLDLYDGTYITLESKDISPEDYIDTESPVPPDPEQPDCTKILELPYSIHAFQHLRGVQERVNLSAPLLPKEDPIFTYLSKRLGRSIDDIGHLIHEGLQKNTSSWVLYNMASFYWRIKNEPYQVVECAMRALHFSSRHNKDIALVNLANVLHRAHFSADAAVVVHAALDDSDFFTSYYTLGNIYAMLGEYNHSVLCYDHALQARPGFEQAIKRKHAVLCQQKLEQKLEAQHRSLQRTLNELKEYQKQHDHYLRQQEILEKHKLIQEEQILRNIIHETQMAKEAQLGNHQICRLVNQQHSLHCQWDQPVRYHRGDIFENVDYVQFGEDSSTSSMMSVNFDVQSNQSDINDSVKSSPVAHSILWIWGRDSDAYRDKQHILWPKRADCTESYPRVPVGGELPTYFLPPENKGLRIHELSSDDYSTEEEAQTPDCSITDFRKSHTLSYLVKELEVRMDLKAKMPDDHARKILLSRINNYTIPEEEIGSFLFHAINKPNAPIWLILNEAGLYWRAVGNSTFAIACLQRALNLAPLQYQDVPLVNLANLLIHYGLHLDATKLLLQALAINSSEPLTFLSLGNAYLALKNISGALEAFRQALKLTTKCPECENSLKLIRCMQFYPFLYNITSSVCSGNCHEKTLDNSHDKQKYFDNSQSLDAAEEEPSERGTEEDPVFSVENSGRDSDALRLESTVVEESNGSDEMENSDETKMSEEILALVDEFQQAWPLEGFGGALEMKGRRLDLQGIRVLKKGPQDGVARSSCYGDCRSEDDEATEWITFQVKRVKKPKGDHKKTPGKKVETGQIENGHRYQANLEITGPKVASPGPQGLLDWKTRKVP

SEQ ID NO: 3500 - protein, 473 aa, Homo sapiens
MCSGLLELLLPIWLSWTLGTRGSEPRSVNDPGNMSFVKETVDKLLKGYDIRLRPDFGGPPVCVGMNIDIASIDMVSEVNMDYTLTMYFQQYWRDKRLAYSGIPLNLTLDNRVADQLWVPDTYFLNDKKSFVHGVTVKNRMIRLHPDGTVLYGLRITTTAACMMDLRRYPLDEQNCTLEIESYGYTTDDIEFYWRGGDKAVTGVERIELPQFSIVEHRLVSRNVVFATGAYPRLSLSFRLKRNIGYFILQTYMPSILITILSWVSFWINYDASAARVALGITTVLTMTTINTHLRETLPKIPYVKAIDMYLMGCFVFVFLALLEYAFVNYIFFGRGPQRQKKLAEKTAKAKNDRSKSESNRVDAHGNILLTSLEVHNEMNEVSGGIGDTRNSAISFDNSGIQYRKQSMPREGHGRFLGDRSLPHKKTHLRRRSSQLKIKIPDLTDVNAIDRWSRIVFPFTFSLFNLVYWLYYVN

SEQ ID NO: 3501 - protein, 1116 aa, Homo sapiens
MAADLNLEWISLPRSWTYGITRGGRVFFINEEAKSTTWLHPVTGEAVVTGHRRQSTDLPTGWEEAYTFEGARYYINHNERKVTCKHPVTGQPSQDNCIFVVNEQTVATMTSEEKKERPISMINEASNYNVTSDYAVHPMSPVGRTSRASKKVHNFGKRSNSIKRNPNAPVVRRGWLYKQDSTGMKLWKKRWFVLSDLCLFYYRDEKEEGILGSILLPSFQIALLTSEDHINRKYAFKAAHPNMRTYYFCTDTGKEMELWMKAMLDAALVQTEPVKRVDKITSENAPTKETNNIPNHRVLIKPEIQNNQKNKEMSKIEEKKALEAEKYGFQKDGQDRPLTKINSVKLNSLPSEYESGSACPAQTVHYRPINLSSSENKIVNVSLADLRGGNRPNTGPLYTEADRVIQRTNSMQQLEQWIKIQKGRGHEEETRGVISYQTLPRNMPSHRAQIMARYPEGYRTLPRNSKTRPESICSVTPSTHDKTLGPGAEEKRRSMRDDTMWQLYEWQQRQFYNKQSTLPRHSTLSSPKTMVNISDQTMHSIPTSPSHGSIAAYQGYSPQRTYRSEVSSPIQRGDVTIDRRHRAHHPKHVYVPDRRSVPAGLTLQSVSPQSLQGKTLSQDEGRGTLYKYRPEEVDIDAKLSRLCEQDKVVHALEEKLQQLHKEKYTLEQALLSASQEIEMHADNPAAIQTVVLQRDDLQNGLLSTCRELSRATAELERAWREYDKLEYDVTVTRNQMQEQLDHLGEVQTESAGIQRAQIQKELWRIQDVMEGLSKHKQQRGTTEIGMIGSKPFSTVKYKNEGPDYRLYKSEPELTTVAEVDESNGEEKSEPVSEIETSVVKGSHFPVGVVPPRAKSPTPESSTIASYVTLRKTKKMMDLRTERPRSAVEQLCLAESTRPRMTVEEQMERIRRHQQACLREKKKGLNVIGASDQSPLQSPSNLRDNPFRTTQTRRRDDKELDTAIRENDVKPDHETPATEIVQLKETEPQNVDFSKELKKTENISYEMLFEPEPNGVNSVEMMDKERNKDKMPEDVTFSPQDETQTANHKPEEHPEENTKNSVDEQEETVISYESTPEVSRGNQTMAVKSLSPSPESSASPVPSTQPQLTEGSHFMCV

SEQ ID NO: 3502 - protein, 351 aa, Homo sapiens
MATDVQLADYPLMSPKAELKLEKKSGRKPRSPRDSGPQKELVIPGIVDFERIRRALRTPKPQTPGTYCFGRLSHHSFFSRHHPHPQHVTHIQDLTGKPVCVVRDFPAPLPESTVFSGCQMGIPTISVPIGDPQSNRNPQLSSEAWKKELKELASRVAFLTKEDELKKKEKEQKEEPLREQGAKYSAETGRLIPASTRAVGRRRSHQGQQSQSSSRHEGVQAFLLQDQELLVLELLCRILETDLLSAIQFWLLYAPPKEKDLALGLLQTAVAQLLPQPLVSIPTEKLLSQLPEVHEPPQEKQEPPCSQSPKKTKISPFTKSEKPEYIGEAQVLQMHSSQNTEKKTSKPRAES

SEQ ID NO: 3503 - protein, 535 aa, Homo sapiens
MASLSLAPVNIFKAGADEERAETARLTSFIGAIAIGDLVKSTLGPKGMDKILLSSGRDASLMVTNDGATILKNIGVDNPAAKVLVDMSRVQDDEVGDGTTSVTVLAAELLREAESLIAKKIHPQTIIAGWREATKAAREALLSSAVDHGSDEVKFRQDLMNIAGTTLSSKLLTHHKDHFTKLAVEAVLRLKGSGNLEAIHIIKKLGGSLADSYLDEGFLLDKKIGVNQPKRIENAKILIANTGMDTDKIKIFGSRVRVDSTAKVAEIEHAEKEKMKEKVERILKHGINCFINRQLIYNYPEQLFGAAGVMAIEHADFAGVERLALVTGGEIASTFDHPELVKLGSCKLIEEVMIGEDKLIHFSGVALGEACTIVLRGATQQILDEAERSLHDALCVLAQTVKDSRTVYGGGCSEMLMAHAVTQLANRTPGKEAVAMESYAKALRMLPTIIADNAGYDSADLVAQLRAAHSEGNTTAGLDMREGTIGDMAILGITESFQVKRQVLLSAAEAAEVILRVDNIIKAAPRKRVPDHHPC

SEQ ID NO: 3504 - protein, 1078 aa, Homo sapiens
MFGAASRMDTTAVCTGGVTESRGIVDSLQKFSSLPAYLPTNLHISNAEESFFLKEANQDLTRNSSLQARVEPFFIYRARTPPIINASYGPFSVEKIIPQELLLTSTAFGNMDKFPFNWKLKSHILDSSIYSNRPKVQTLFYVTGMGWDDSDLTEDLPCVKMFAFPEAREVAASCRLQGAPGLCVAELELLPEWFSSGLDLEPEEEIPALLGGTTMELFFTLYPADKAGQCPLEEEGKWENNIHSGLESPQQAFPARERIGSVVVYPTQDDLKWSLVSLDENVVISVPLNLVREGDTATFLVSLTSSSVADQFTLRIKAAAGVKITAVRVSSEDQWAVQEEIDNGSTQTSATLTCMGHRPDTQSRVNGSFYEILQVDFGIDNSSDLAGAQQITWQVEYPIEDSMSELVVSEIFVSQTTFVGIVPLAMDTEVLNTAILTGKPVSVPVKVVGVQEDGSVVDVSESVECKSADEDVIKVSNNCDSIFVNGKEMKSKVDTIVNFTHQHFTSQFEVTVWAPRLPLQIEISDTELSQIKGWRIPVAANRRPTRESDDEDDEEKKGRGCSLQYQHATVRVLTQFVAESPDLGQLTYMLGPDWQFDITDLVTEFMKVEEPKIAQLQDGRTLAGREPGITTVQVLSPLSDSILAEKTVIVLDDRVTIAELGVQLVAGMSLSLQPHRADKRAIVSTAAALDVLQSPQQEAIVSSWILFSDGSVTPLDIYDPKDYSVTVSSLDEMVVSVQANLESKWPIVVAEGEGQGPLIKLEMMISEPCQKTKRKSVLAVGKGNVKVKFEPSSDEHQGGSNDIEGINREYKDHLSNSIEREGNQERAVQEWFHRGTPVGQEESTNKSTTPQSPMEGKNKLLKSGGPDAFTSFPTQGKSPDPNNPSDLTVTSRGLTDLEIGMYALLCVFCLAILVFLINCVAFAWKYRHKRFAVSEQGNIPHSHDWVWLGNEVELLENPVDITLPSEECTTMIDRGLQFEERNFLLNGSSQKTFHSQLLRPSDYVYEKEIKNEPMNSSGPKRKRVKFTSYTTILPEDGGPYTNSILFDSDDNIKWVCQDMGLGDSQDFRDYMESLQDQM

SEQ ID NO: 3505 - protein, 1256 aa, Homo sapiens
MLFKLLQRQTYTCLSHRYGLYVCFLGVVVTIVSAFQFGEVVLEWSRDQYHVLFDSYRDNIAGKSFQNRLCLPMPIDVVYTWVNGTDLELLKELQQVREQMEEEQKAMREILGKNTTEPTKKSEKQLECLLTHCIKVPMLVLDPALPANITLKDLPSLYPSFHSASDIFNVAKPKNPSTNVSVVVFDSTKDVEDAHSGLLKGNSRQTVWRGYLTTDKEVPGLVLMQDLAFLSGFPPTFKETNQLKTKLPENLSSKVKLLQLYSEASVALLKLNNPKDFQELNKQTKKNMTIDGKELTISPAYLLWDLSAISQSKQDEDISASRFEDNEELRYSLRSIERHAPWVRNIFIVTNGQIPSWLNLDNPRVTIVTHQDVFRNLSHLPTFSSPAIESHIHRIEGLSQKFIYLNDDVMFGKDVWPDDFYSHSKGQKVYLTWPVPNCAEGCPGSWIKDGYCDKACNNSACDWDGGDCSGNSGGSRYIAGGGGTGSIGVGQPWQFGGGINSVSYCNQGCANSWLADKFCDQACNVLSCGFDAGDCGQDHFHELYKVILLPNQTHYIIPKGECLPYFSFAEVAKRGVEGAYSDNPIIRHASIANKWKTIHLIMHSGMNATTIHFNLTFQNTNDEEFKMQITVEVDTREGPKLNSTAQKGYENLVSPITLLPEAEILFEDIPKEKRFPKFKRHDVNSTRRAQEEVKIPLVNISLLPKDAQLSLNTLDLQLEHGDITLKGYNLSKSALLRSFLMNSQHAKIKNQAIITDETNDSLVAPQEKQVHKSILPNSLGVSERLQRLTFPAVSVKVNGHDQGQNPPLDLETTARFRVETHTQKTIGGNVTKEKPPSLIVPLESQMTKEKKITGKEKENSRMEENAENHIGVTEVLLGRKLQHYTDSYLGFLPWEKKKYFQDLLDEEESLKTQLAYFTDSKNTGRQLKDTFADSLRYVNKILNSKFGFTSRKVPAHMPHMIDRIVMQELQDMFPEEFDKTSFHKVRHSEDMQFAFSYFYYLMSAVQPLNISQVFDEVDTDQSGVLSDREIRTLATRIHELPLSLQDLTGLEHMLINCSKMLPADITQLNNIPPTQESYYDPNLPPVTKSLVTNCKPVTDKIHKAYKDKNKYRFEIMGEEEIAFKMIRTNVSHVVGQLDDIRKNPRKFVCLNDNIDHNHKDAQTVKAVLRDFYESMFPIPSQFELPREYRNRFLHMHELQEWRAYRDKLKFWTHCVLATLIMFTIFSFFAEQLIALKRKIFPRRRIHKEASPNRIRV

SEQ ID NO: 3506 - protein, 508 aa, Homo sapiens
MAGQRTCQRRSSRAGPGKMQEPPKSIEEFLKFQNWDYWPREIHFRDDDKWSCTLKKIKEDSSFVSIYTHLWENVPRIFEALLIMESKLKEYSLILQNHTSEIFKWKSMISETSSYRKLERYGEFLKKYHKKKKIMLSDEMETEKNIEGCSFTGFKANELTQLPRHLDAEQIYLFILKAHNFDERVFKIWKTHFLSEASIALLHDSFWWWFLHKFRPDRENQDCLFDRISESYVTLFMSIPLSRKDAFFQIYPDCLAQAIYATFHEAFPESSYLFNDEFKEDLGNNIFLWCSGLKPQKGFWIHWKLKELSTTTIHGSKKAPAKSVKERIADSQEHISTSIDFNIIKILNNPRAYTLPISKEESRLSRLATKSHYSSTGPEFNRVLFNFGGQSPLILYYLKMHELAGISKAPKKTKIKLTKIFQEPLPAPTYRDVIKEAKRQFARNQKDFRILQAKATKKPHEVKQDFEKFLHKLRSEAEIERECVASLSSSSSSSPSSTDNYNFEEEEY

SEQ ID NO: 3507 - protein, 745 aa, Homo sapiens
MPERLAEMLLDLWTPLIILWITLPPCIYMAPMNQSQVLMSGSPLELNSLGEEQRILNRSKRGWVWNQMFVLEEFSGPEPILVGRLHTDLDPGSKKIKYILSGDGAGTIFQINDVTGDIHAIKRLDREEKAEYTLTAQAVDWETSKPLEPPSEFIIKVQDINDNAPEFLNGPYHATVPEMSILGTSVTNVTATDADDPVYGNSAKLVYSILEGQPYFSIEPETAIIKTALPNMDREAKEEYLVVIQAKDMGGHSGGLSGTTTLTVTLTDVNDNPPKFAQSLYHFSVPEDVVLGTAIGRVKANDQDIGENAQSSYDIIDGDGTALFEITSDAQAQDGIIRLRKPLDFETKKSYTLKVEAANVHIDPRFSGRGPFKDTATVKIVVEDADEPPVFSSPTYLLEVHENAALNSVIGQVTARDPDITSSPIRFSIDRHTDLERQFNINADDGKITLATPLDRELSVWHNITIIATEIRNHSQISRVPVAIKVLDVNDNAPEFASEYEAFLCENGKPGQVIQTVSAMDKDDPKNGHYFLYSLLPEMVNNPNFTIKKNEDNSLSILAKHNGFNRQKQEVYLLPIIISDSGNPPLSSTSTLTIRVCGCSNDGVVQSCNVEAYVLPIGLSMGALIAILACIILLLVIVVLFVTLRRHKNEPLIIKDDEDVRENIIRYDDEGGGEEDTEAFDIATLQNPDGINGFLPRKDIKPDLQFMPRLQKRVARRNITRCCLKRKTVENHGFNELRGQDQKRK

SEQ ID NO: 3508 - protein, 250 aa, Homo sapiens
MVFLALTIVALYILSLKDQDRRVPNLPPSNITSSQEPALLPTASSSAPNTSLVTTPASLQVPEITFCEILPCQETYCCPIRGMKEVSSSPVQRQSEEKEFHQRRWSEDKSKSVLARNALSGPDWESDWIDTTISSIQIMEIQQIIDHQYCIQSLQCGTTEPLIVFQCKFTLGNICFHSKRGTKGLESHREISQEMTQGYQHIWSLPVAPFSDSMFHFRVAAPDLADCSTDPYFAGIFFTDYFFYFYRRCA

SEQ ID NO: 3509 - protein, 1061 aa, Homo sapiens
MGRHVATSCHVAWLLVLISGCWGQVNRLPFFTNHFFDTYLLISEDTPVGSSVTQLLAQDMDNDPLVFGVSGEEASRFFAVEPDTGVVWLRQPLDRETKSEFTVEFSVSDHQGVITRKVNIQVGDVNDNAPTFHNQPYSVRIPENTPVGTPIFIVNATDPDLGAGGSVLYSFQPPSQFFAIDSARGIVTVIRELDYETTQAYQLTVNATDQDKTRPLSTLANLAIIITDVQDMDPIFINLPYSTNIYEHSPPGTTVRIITAIDQDKGRPRGIGYTIVSGNTNSIFALDYISGVLTLNGLLDRENPLYSHGFILTVKGTELNDDRTPSDATVTTTFNILVIDINDNAPEFNSSEYSVAITELAQVGFALPLFIQVVDKDENLGLNSMFEVYLVGNNSHHFIISPTSVQGKADIRIRVAIPLDYETVDRYDFDLFANESVPDHVGYAKVKITLINENDNRPIFSQPLYNISLYENVTVGTSVLTVLATDNDAGTFGEVSYFFSDDPDRFSLDKDTGLIMLIARLDYELIQRFTLTIIARDGGGEETTGRVRINVLDVNDNVPTFQKDAYVGALRENEPSVTQLVRLRATDEDSPPNNQITYSIVSASAFGSYFDISLYEGYGVISVSRPLDYEQISNGLIYLTVMAMDAGNPPLNSTVPVTIEVFDENDNPPTFSKPAYFVSVVENIMAGATVLFLNATDLDRSREYGQESIIYSLEGSTQFRINARSGEITTTSLLDRETKSEYILIVRAVDGGVGHNQKTGIATVNITLLDINDNHPTWKDAPYYINLVEMTPPDSDVTTVVAVDPDLGENGTLVYSIQPPNKFYSLNSTTGKIRTTHAMLDRENPDPHEAELMRKIVVSVTDCGRPPLKATSSATVFVNLLDLNDNDPTFQNLPFVAEVLEGIPAGVSIYQVVAIDLDEGLNGLVSYRMPVGMPRMDFLINSSSGVVVTTTELDRERIAEYQLRVVASDAGTPTKSSTSTLTIHVLDVNDETPTFFPAVYNVSVSEDVPREFRVVWLNCTDNDVGLNAELSYFITGAAPASAHLCRPPGALPPPLPDGQPD

SEQ ID NO: 3510 - protein, 752 aa, Homo sapiens
MGPLMVLFCLLFLYPGLADSAPSCPQNVNISGGTFTLSHGWAPGSLLTYSCPQGLYPSPASRLCKSSGQWQTPGATRSLSKAVCKPVRCPAPVSFENGIYTPRLGSYPVGGNVSFECEDGFILRGSPVRQCRPNGMWDGETAVCDNGAGHCPNPGISLGAVRTGFRFGHGDKVRYRCSSNLVLTGSSERECQGNGVWSGTEPICRQPYSYDFPEDVAPALGTSFSHMLGATNPTQKTKESLGRKIQIQRSGHLNLYLLLDCSQSVSENDFLIFKESASLMVDRIFSFEINVSVAIITFASEPKVLMSVLNDNSRDMTEVISSLENANYKDHENGTGTNTYAALNSVYLMMNNQMRLLGMETMAWQEIRHAIILLTDGKSNMGGSPKTAVDHIREILNINQKRNDYLDIYAIGVGKLDVDWRELNELGSKKDGERHAFILQDTKALHQVFEHMLDVSKLTDTICGVGNMSANASDQERTPWHVTIKPKSQETCRGALISDQWVLTAAHCFRDGNDHSLWRVNVGDPKSQWGKEFLIEKAVISPGFDVFAKKNQGILEFYGDDIALLKLAQKVKMSTHARPICLPCTMEANLALRRPQGSTCRDHENELLNKQSVPAHFVALNGSKLNINLKMGVEWTSCAEVVSQEKTMFPNLTDVREVVTDQFLCSGTQEDESPCKGESGGAVFLERRFRFFQVGLVSWGLYNPCLGSADKNSRKRAPRSKVPPPRDFHINLFRMQPWLRQHLGDVLNFLPL

SEQ ID NO: 3511 - protein, 708 aa, Homo sapiens
MSVPSSLSQSAINANSHGGPALSLPLPLHAAHNQLLNAKLQATAVGPKDLRSAMGEGGGPEPGPANAKWLKEGQNQLRRAATAHRDQNRNVTLTLAEEASQEPEMAPLGPKGLIHLYSELELSAHNAANRGLRGPGLIISTQEQGPDEGEEKAAGEAEEEEEDDDDEEEEEDLSSPPGLPEPLESVEAPPRPQALTDGPREHSKSASLLFGMRNSAASDEDSSWATLSQGSPSYGSPEDTDSFWNPNAFETDSDLPAGWMRVQDTSGTYYWHIPTGTTQWEPPGRASPSQGSSPQEESQLTWTGFAHGEGFEDGEFWKDEPSDEAPMELGLKEPEEGTLTFPAQSLSPEPLPQEEEKLPPRNTNPGIKCFAVRSLGWVEMTEEELAPGRSSVAVNNCIRQLSYHKNNLHDPMSGGWGEGKDLLLQLEDETLKLVEPQSQALLHAQPIISIRVWGVGRDSGRDFAYVARDKLTQMLKCHVFRCEAPAKNIATSLHEICSKIMAERRNARCLVNGLSLDHSKLVDVPFQVEFPAPKNELVQKFQVYYLGNVPVAKPVGVDVINGALESVLSSSSREQWTPSHVSVAPATLTILHQQTEAVLGECRVRFLSFLAVGRDVHTFAFIMAAGPASFCCHMFWCEPNAASLSEAVQAACMLRYQKCLDARSQASTSCLPAPPAESVARRVGWTVRRGVQSLWGSLKPKRLGAHTP

SEQ ID NO: 3512 - protein, 344 aa, Homo sapiens
MASGVGAAFEELPHDGTCDECEPDEAPGAEEVCRECGFCYCRRHAEAHRQKFLSHHLAEYVHGSQAWTPPADGEGAGKEEAEVKVEQEREIESEAGEESESEEESESEEESETEEESEDESDEESEEDSEEEMEDEQESEAEEDNQEEGESEAEGETEAESEFDPEIEMEAERVAKRKCPDHGLDLSTYCQEDRQLICVLCPVIGAHQGHQLSTLDEAFEELRSKDSGGLKAAMIELVERLKFKSSDPKVTRDQMKMFIQQEFKKVQKVIADEEQKALHLVDIQEAMATAHVTEILADIQSHMDRLMTQMAQAKEQLDTSNESAEPKAEGDEEGPSGASEEEDT

SEQ ID NO: 3513 - protein, 563 aa, Homo sapiens
MGLQACLLGLFALILSGKCSYSPEPDQRRTLPPGWVSLGRADPEEELSLTFALRQQNVERLSELVQAVSDPSSPQYGKYLTLENVADLVRPSPLTLHTVQKWLLAAGAQKCHSVITQDFLTCWLSIRQAELLLPGAEFHHYVGGPTETHVVRSPHPYQLPQALAPHVDFVGGLHRFPPTSSLRQRPEPQVTGTVGLHLGVTPSVIRKRYNLTSQDVGSGTSNNSQACAQFLEQYFHDSDLAQFMRLFGGNFAHQASVARVVGQQGRGRAGIEASLDVQYLMSAGANISTWVYSSPGRHEGQEPFLQWLMLLSNESALPHVHTVSYGDDEDSLSSAYIQRVNTELMKAAARGLTLLFASGDSGAGCWSVSGRHQFRPTFPASSPYVTTVGGTSFQEPFLITNEIVDYISGGGFSNVFPRPSYQEEAVTKFLSSSPHLPPSSYFNASGRAYPDVAALSDGYWVVSNRVPIPWVSGTSASTPVFGGILSLINEHRILSGRPPLGFLNPRLYQQHGAGLFDVTRGCHESCLDEEVEGQGFCSGPGWDPVTGWGTPNFPALLKTLLNP

SEQ ID NO: 3514 - protein, 460 aa, Homo sapiens
MAPRSRRRRHKKPPSSVAPIIMAPTTIVTPVPLTPSKPGPSIDTLGFFSLDDNVPGLSQLILQKLNMKSYEEYKLVVDGGTPVSGFGFRCPQEMFQRMEDTFRFCAHCRALPSGLSDSKVLRHCKRCRNVYYCGPECQKSDWPAHRRVCQELRLVAVDRLMEWLLVTGDFVLPSGPWPWPPEAVQDWDSWFSMKGLHLDATLDAVLVSHAVTTLWASVGRPRPDPDVLQGSLKRLLTDVLSRPLTLGLGLRALGIDVRRTGGSTVHVVGASHVETFLTRPGDYDELGYMFPGHLGLRVVMVGVDVATGFSQSTSTSPLEPGTIQLSAHRGLYHDFWEEQVETGQTHHPDLVAAFHPGFHSSPDLMEAWLPTLLLLRDYKIPTLITVYSHQELVSSLQILVELDTHITAFGSNPFMSLKPEQVYSSPNKQPVYCSAYYIMFLGSSCQLDNRQLEEKVDGGI

SEQ ID NO: 3515 - protein, 1043 aa, Homo sapiens
MAASFPPTLGLSSAPDEIQHPHIKFSEWKFKLFRVRSFEKTPEEAQKEKKDSFEGKPSLEQSPAVLDKADGQKPVPTQPLLKAHPKFSKKFHDNEKARGKAIHQANLRHLCRICGNSFRADEHNRRYPVHGPVDGKTLGLLRKKEKRATSWPDLIAKVFRIDVKADVDSIHPTEFCHNCWSIMHRKFSSAPCEVYFPRNVTMEWHPHTPSCDICNTARRGLKRKSLQPNLQLSKKLKTVLDQARQARQHKRRAQARISSKDVMKKIANCSKIHLSTKLLAVDFPEHFVKSISCQICEHILADPVETNCKHVFCRVCILRCLKVMGSYCPSCRYPCFPTDLESPVKSFLSVLNSLMVKCPAKECNEEVSLEKYNHHISSHKESKEIFVHINKGGRPRQHLLSLTRRAQKHRLRELKLQVKAFADKEEGGDVKSVCMTLFLLALRARNEHRQADELEAIMQGKGSGLQPAVCLAIRVNTFLSCSQYHKMYRTVKAITGRQIFQPLHALRNAEKVLLPGYHHFEWQPPLKNVSSSTDVGIIDGLSGLSSSVDDYPVDTIAKRFRYDSALVSALMDMEEDILEGMRSQDLDDYLNGPFTVVVKESCDGMGDVSEKHGSGPVVPEKAVRFSFTIMKITIAHSSQNVKVFEEAKPNSELCCKPLCLMLADESDHETLTAILSPLIAEREAMKSSELMLELGGILRTFKFIFRGTGYDEKLVREVEGLEASGSVYICTLCDATRLEASQNLVFHSITRSHAENLERYEVWRSNPYHESVEELRDRVKGVSAKPFIETVPSIDALHCDIGNAAEFYKIFQLEIGEVYKNPNASKEERKRWQATLDKHLRKKMNLKPIMRMNGNFARKLMTKETVDAVCELIPSEERHEALRELMDLYLKMKPVWRSSCPAKECPESLCQYSFNSQRFAELLSTKFKYRYEGKITNYFHKTLAHVPEIIERDGSIGAWASEGNESGNKLFRRFRKMNARQSKCYEMEDVLKHHWLYTSKYLQKFMNAHNALKTSGFTMNPQASLGDPLGIEDSLESQDSMEF

SEQ ID NO: 3516 - protein, 3298 aa, Homo sapiens
MQKELGIVPSCPGMKSPRPHLLLPLLLLLLLLLGAGVPGAWGQAGSLDLQIDEEQPAGTLIGDISAGLPAGTAAPLMYFISAQEGSGVGTDLAIDEHSGVVRTARVLDREQRDRYRFTAVTPDGATVEVTVRVADINDHAPAFPQARAALQVPEHTAFGTRYPLEPARDADAGRLGTQGYALSGDGAGETFRLETRPGPDGTPVPELVVTGELDRENRSHYMLQLEAYDGGSPPRRAQALLDVTLLDINDHAPAFNQSRYHAVVSESLAPGSPVLQVFASDADAGVNGAVTYEINRRQSEGDGPFSIDAHTGLLQLERPLDFEQRRVHELVVQARDGGAHPELGSAFVTVHVRDANDNQPSMTVIFLSADGSPQVSEAAPPGQLVARISVSDPDDGDFAHVNVSLEGGEGHFALSTQDSVIYLVCVARRLDREERDAYNLRVTATDSGSPPLRAEAAFVLHVTDVNDNAPAFDRQLYRPEPLPEVALPGSFVVRVTARDPDQGTNGQVTYSLAPGAHTHWFSIDPTSGIITTAASLDYELEPQPQLIVVATDGGLPPLASSATVSVALQDVNDNEPQFQRTFYNASLPEGTQPGTCFLQVTATDADSGPFGLLSYSLGAGLGSSGSPPFRIDAHSGDVCTTRTLDRDQGPSSFDFTVTAVDGGGLKSMVYVKVFLSDENDNPPQFYPREYAASISAQSPPGTAVLRLRAHDPDQGSHGRLSYHILAGNSPPLFTLDEQSGLLTVAWPLARRANSVVQLEIGAEDGGGLQAEPSARVDISIVPGTPTPPIFEQLQYVFSVPEDVAPGTSVGIVQAHNPPGRLAPVTLSLSGGDPRGLFSLDAVSGLLQTLRPLDRELLGPVLELEVRAGSGVPPAFAVARVRVLLDDVNDNSPAFPAPEDTVLLPPNTAPGTPIYTLRALDPDSGVNSRVTFTLLAGGGGAFTVDPTTGHVRLMRPLGPSGGPAHELELEARDGGSPPRTSHFRLRVVVQDVGTRGLAPRFNSPTYRVDLPSGTTAGTQVLQVQAQAPDGGPITYHLAAEGASSPFGLEPQSGWLWVRAALDREAQELYILKVMAVSGSKAELGQQTGTATVRVSILNQNEHSPRLSEDPTFLAVAENQPPGTSVGRVFATDRDSGPNGRLTYSLQQLSEDSKAFRIHPQTGEVTTLQTLDREQQSSYQLLVQVQDGGSPPRSTTGTVHVAVLDLNDNSPTFLQASGAAGGGLPIQVPDRVPPGTLVTTLQAKDPDEGENGTILYTLTGPGSELFSLHPHSGELLTAAPLIRAERPHYVLTLSAHDQGSPPRSASLQLLVQVLPSARLAEPPPDLAERDPAAPVPVVLTVTAAEGLRPGSLLGSVAAPEPAGVGALTYTLVGGADPEGTFALDAASGRLYLARPLDFEAGPPWRALTVRAEGPGGAGARLLRVQVQVQDENEHAPAFARDPLALALPENPEPGAALYTFRASDADGPGPNSDVRYRLLRQEPPVPALRLDARTGALSAPRGLDRETTPALLLLVEATDRPANASRRRAARVSARVFVTDENDNAPVFASPSRVRLPEDQPPGPAALHVVARDPDLGEAARVSYRLASGGDGHFRLHSSTGALSVVRPLDREQRAEHVLTVVASDHGSPPRSATQVLTVSVADVNDEAPTFQQQEYSVLLRENNPPGTSLLTLRATDPDVGANGQVTYGGVSSESFSLDPDTGVLTTLRALDREEQEEINLTVYAQDRGSPPQLTHVTVRVAVEDENDHAPTFGSAHLSLEVPEGQDPQTLTMLRASDPDVGANGQLQYRILDGDPSGAFVLDLASGEFGTMRPLDREVEPAFQLRIEARDGGQPALSATLLLTVTVLDANDHAPAFPVPAYSVEVPEDVPAGTLLLQLQAHDPDAGANGHVTYYLGAGTAGAFLLEPSSGELRTAAALDREQCPSYTFSVSAVDGAAAGPLSTTVSVTITVRDVNDHAPTFPTSPLRLRLPRPGPSFSTPTLALATLRAEDRDAGANASILYRLAGTPPPGTTVDSYTGEIRVARSPVALGPRDRVLFIVATDLGRPARSATGVIIVGLQGEAERGPRFPRASSEATIRENAPPGTPIVSPRAVHAGGTNGPITYSILSGNEKGTFSIQPSTGAITVRSAEGLDFEVSPRLRLVLQAESGGAFAFTVLTLTLQDANDNAPRFLRPHYVAFLPESRPLEGPLLQVEADDLDQGSGGQISYSLAASQPARGLFHVDPTTGTITTTAILDREIWAETRLVLMATDRGSPALVGSATLTVMVIDTNDNRPTIPQPWELRVSEDALLGSEIAQVTGNDVDSGPVLWYVLSPSGPQDPFSVGRYGGRVSLTGPLDFEQCDRYQLQLLAHDGPHEGRANLTVLVEDVNDNAPAFSQSLYQVMLLEHTPPGSAILSVSATDRDSGANGHISYHLASPADGFSVDPNNGTLFTIVGTVALGHDGSGAVDVVLEARDHGAPGRAARATVHVQLQDQNDHAPSFTLSHYRVAVTEDLPPGSTLLTLEATDADGSRSHAAVDYSIISGNWGRVFQLEPRLAEAGESAGPGPRALGCLVLLEPLDFESLTQYNLTVAAADRGQPPQSSVVPVTVTVLDVNDNPPVFTRASYRVTVPEDTPVGAELLHVEASDADPGPHGLVRFTVSSGDPSGLFELDESSGTLRLAHALDCETQARHQLVVQAADPAGAHFALAPVTIEVQDVNDHGPAFPLNLLSTSVAENQPPGTLVTTLHAIDGDAGAFGRLRYSLLEAGPGPEGREAFALNSSTGELRARVPFDYEHTESFRLLVGAADAGNLSASVTVSVLVTGEDEYDPVFLAPAFHFQVPEGARRGHSLGHVQATDEDGGADGLVLYSLATSSPYFGINQTTGALYLRVDSRAPGSGTATSGGGGRTRREAPRELRLEVIARGPLPGSRSATVPVTVDITHTALGLAPDLNLLLVGAVAASLGVVVVLALAALVLGLVRARSRKAEAAPGPMSQAAPLASDSLQKLGREPPSPPPSEHLYHQTLPSYGGPGAGGPYPRGGSLDPSHSSGRGSAEAAEDDEIRMINEFPRVASVASSLAARGPDSGIQQDADGLSDTSCEPPAPDTWYKGRKAGLLLPGAGATLYREEGPPATATAFLGGCGLSPAPTGDYGFPADGKPCVAGALTAIVAGEEELRGSYNWDYLLSWCPQFQPLASVFTEIARLKDEARPCPPAPRIDPPPLITAVAHPGAKSVPPKPANTAAARAIFPPASHRSPISHEGSLSSAAMSPSFSPSLSPLAARSPVVSPFGVAQGPSASALSAESGLEPPDDTELHI

SEQ ID NO: 3517 - protein, 308 aa, Homo sapiens
MRQINQTQVTEFLLLGLSDGPHTEQLLFIVLLGVYLVTVLGNLLLISLVHVDSQLHTPMYFFLCNLSLADLCFSTNIVPQALVHLLSRKKVIAFTLCAARLLFFLIFGCTQCALLAVMSYDRYVAICNPLRYPNIMTWKVCVQLATGSWTSGILVSVVDTTFILRLPYRGSNSIAHFFCEAPALLILASTDTHASEMAIFLMGVVILLIPVFLILVSYGRIIVTVVKMKSTVGSLKAFSTCGSHLMVVILFYGSAIITYMTPKSSKQQEKSVSVFYAIVTPMLNPLIYSLRNKDVKAALRKVATRNFP

SEQ ID NO: 3518 - protein, 282 aa, Homo sapiens
MGGAVSAGEDNDELIDNLKEAQYIRTELVEQAFRAIDRADYYLEEFKENAYKDLAWKHGNIHLSAPCIYSEVMEALDLQPGLSFLNLGSGTGYLSSMVGLILGPFGVNHGVELHSDVIEYAKQKLDFFIRTSDSFDKFDFCEPSFVTGNCLEISPDCSQYDRVYCGAGVQKEHEEYMKNLLKVGGILVMPLEEKLTKITRTGPSAWETKKILAVSFAPLIQPCHSESGKSRLVQLRSPSFVQGWSVVVLSQLTAASTFQAEAILPSQSPTWLTLQVLATMPN

SEQ ID NO: 3519 - protein, 1093 aa, Homo sapiens
MADSSSSSFFPDFGLLLYLEELNKEELNTFKLFLKETMEPEHGLTPWNEVKKARREDLANLMKKYYPGEKAWSVSLKIFGKMNLKDLCERAKEEINWSAQTIGPDDAKAGETQEDQEAVLGDGTEYRNRIKEKFCITWDKKSLAGKPEDFHHGIAEKDRKLLEHLFDVDVKTGAQPQIVVLQGAAGVGKTTLVRKAMLDWAEGSLYQQRFKYVFYLNGREINQLKERSFAQLISKDWPSTEGPIEEIMYQPSSLLFIIDSFDELNFAFEEPEFALCEDWTQEHPVSFLMSSLLRKVMLPEASLLVTTRLTTSKRLKQLLKNHHYVELLGMSEDAREEYIYQFFEDKRWAMKVFSSLKSNEMLFSMCQVPLVCWAACTCLKQQMEKGGDVTLTCQTTTALFTCYISSLFTPVDGGSPSLPNQAQLRRLCQVAAKGIWTMTYVFYRENLRRLGLTQSDVSSFMDSNIIQKDAEYENCYVFTHLHVQEFFAAMFYMLKGSWEAGNPSCQPFEDLKSLLQSTSYKDPHLTQMKCFLFGLLNEDRVKQLERTFNCKMSLKIKSKLLQCMEVLGNSDYSPSQLGFLELFHCLYETQDKAFISQAMRCFPKVAINICEKIHLLVSSFCLKHCRCLRTIRLSVTVVFEKKILKTSLPTNTWDGDRITHCWQDLCSVLHTNEHLRELDLYHSNLDKSAMNILHHELRHPNCKLQKLLLKFITFPDGCQDISTSLIHNKNLMHLDLKGSDIGDNGVKSLCEALKHPECKLQTLRLESCNLTVFCCLNISNALIRSQSLIFLNLSTNNLLDDGVQLLCEALRHPKCYLERLSLESCGLTEAGCEYLSLALISNKRLTHLCLADNVLGDGGVKLMSDALQHAQCTLKSLVLRRCHFTSLSSEYLSTSLLHNKSLTHLDLGSNWLQDNGVKLLCDVFRHPSCNLQDLELMGCVLTNACCLDLASVILNNPNLRSLDLGNNDLQDDGVKILCDALRYPNCNIQRLGLEYCGLTSLCCQDLSSALICNKRLIKMNLTQNTLGYEGIVKLYKVLKSPKCKLQVLGLCKEAFDEEAQKLLEAVGVSNPHLIIKPDCNYHNEEDVSWWWCF

SEQ ID NO: 3520 - protein, 876 aa, Homo sapiens
MASDASHALEAALEQMDGIIAGTKTGADLSDGTCEPGLASPASYMNPFPVLHLIEDLRLALEMLELPQERAALLSQIPGPTAAYIKEWFEESLSQVNHHSAASNETYQERLARLEGDKESLILQVSVLTDQVEAQGEKIRDLEVCLEGHQVKLNAAEEMLQQELLSRTSLETQKLDLMTEVSELKLKLVGMEKEQREQEEKQRKAEELLQELRHLKIKVEELENERNQYEWKLKATKAEVAQLQEQVALKDAEIERLHSQLSRTAALHSESHTERDQEIQRLKMGMETLLLANEDKDRRIEELTGLLNQYRKVKEIVMVTQGPSERTLSINEEEPEGGFSKWNATNKDPEELFKQEMPPRCSSPTVGPPPLPQKSLETRAQKKLSCSLEDLRSESVDKCMDGNQPFPVLEPKDSPFLAEHKYPTLPGKLSGATPNGEAAKSPPTICQPDATGSSLLRLRDTESGWDDTAVVNDLSSTSSGTESGPQSPLTPDGKRNPKGIKKFWGKIRRTQSGNFYTDTLGMAEFRRGGLRATAGPRLSRTRDSKGQKSDANAPFAQWSTERVCAWLEDFGLAQYVIFARQWVSSGHTLLTATPQDMEKELGIKHPLHRKKLVLAVKAINTKQEEKSALLDHIWVTRWLDDIGLPQYKDQFHESRVDRRMLQYLTVNDLLFLKVTSQLHHLSIKCAIHVLHVNKFNPHCLHRRPADESNLSPSEVVQWSNHRVMEWLRSVDLAEYAPNLRGSGVHGGLIILEPRFTGDTLAMLLNIPPQKTLLRRHLTTKFNALIGPEAEQEKREKMASPAYTPLTTTAKVRPRKLGFSHFGNIRKKKFDESTDYICPMEPSDGVSDSHRVYSGYRGLSPLDAPELDGLDQVGQIS

SEQ ID NO: 3521 - protein, 415 aa, Homo sapiens
MEDLCVANTLFALNLFKHLAKASPTQNLFLSPWSISSTMAMVYMGSRGSTEDQMAKVLQFNEVGANAVTPMTPENFTSCGFMQQIQKGSYPDAILQAQAADKIHSSFRSLSSAINASTGNYLLESVNKLFGEKSASFREEYIRLCQKYYSSEPQAVDFLECAEEARKKINSWVKTQTKGKIPNLLPEGSVDGDTRMVLVNAVYFKGKWKTPFEKKLNGLYPFRVNSAQRTPVQMMYLREKLNIGYIEDLKAQILELPYAGDVSMFLLLPDEIADVSTGLELLESEITYDKLNKWTSKDKMAEDEVEVYIPQFKLEEHYELRSILRSMGMEDAFNKGRANFSGMSERNDLFLSEVFHQAMVDVNEEGTEAAAGTGGVMTGRTGHGGPQFVADHPFLFLIMHKITNCILFFGRFSSP

SEQ ID NO: 3522 - protein, 1070 aa, Homo sapiens
MYCCSAQDSKMDYKRRFLLGGSKQKVQQHQQYPMPELGRALSAPLASTATTAPLGSLTAAGSCHHAMPHTTPIADIQQGISKYLDALNVFCRASTFLTDLFSTVFRNSHYSKAATQLKDVQEHVMEAASRLTSAIKPEIAKMLMELSAGAANFTDQKEFSLQDIEVLGRCFLTVVQVHFQFLTHALQKVQPVAHSCFAEVIVPEKKNSGSGGGLSGMGHTPEVEEAVRSWRGAAEATSRLRERGCDGCLAGIEVQQLFCSQSAAIPEHQLKELNIKIDSALQAYKIALESLGHCEYAMKAGFHLNPKAIEASLQGCCSEAEAQQTGRRQTPPQPMQCELPTVPVQIGSHFLKGVSFNESAADNLKLKTHTMLQLMKEAGCYNGITSRDDFPVTEVLNQVCPSTWRGACKTAVQLLFGQAGLVVVDTAQIENKEAYAPQISLEGSRIVVQVPSTWCLKEDPATMSLLQRSLDPEKTLGLVDVLYTAVLDLNRWRAGREQALPCIQIQLQREICDFGNQADLPSGNGNKSSGGLQKTFSKLTSRFTKKASCTSSSSSTNYSIQNTPSKNIFIAGCSEEKAKMPGNIDTRLQSILNIGNFPRTTDPSQSAQNSSNTVANGFLMERRENFLHGDDGKDEKGMNLPTDQEMQEVIDFLSGFNMGQSHQGSPLVTRHNSAATAMVTEQKAGAMQPQQPSLPVPPPPRAPQAGAHTPLTPQPGLAPQQQSPKQQQPQVQYYQHLLQPIGPQQPPPQPRAPGKWVHGSSQQPAQAVGAGLSPLGQWPGISDLSSDLYSLGLVSSYMDNVMSEVLGQKPQGPRNNTWPNRDQSDGVFGMLGEILPFDPAVGSDPEFARYVAGVSQAMQQKRQAQHGRRPGNPRGNWPPMDDAHRTWPFPEFFTEGDGLHGGWSGAQGDSASSSDETSSANGDSLFSMFSGPDLVAAVKQRRKHSSGEQDTSTLPSPPLLTTVEDVNQDNKTKTWPPKAPWQHPSPLPSTLPSPSAPLYAVTSPGSQWNDTMQMLQSPVWAATNDCSAAAFSYVQTPPQPPPPPAHKAAPKGFKAFPGKGERRPAYLPQY

SEQ ID NO: 3523 - protein, 506 aa, Homo sapiens
MTSKPHSDWIPYSVLDDEGRNLRQQKLDRQRALLEQKQKKKRQEPLMVQANADGRPRSRRARQSEEQAPLVESYLSSSGSTSYQVQEADSLASVQLGATRPTAPASAKRTKAAATAGGQGGAARKEKKGKHKGTSGPAALAEDKSEAQGPVQILTVGQSDHAQDAGETAAGGGERPSGQDLRATMQRKGISSSMSFDEDEEDEEENSSSSSQLNSNTRPSSATSRKSVREAASAPSPTAPEQPVDVEVQDLEEFALRPAPQGITIKCRITRDKKGMDRGMYPTYFLHLDREDGKKVFLLAGRKRKKSKTSNYLISVDPTDLSRGGDSYIGKLRSNLMGTKFTVYDNGVNPQKASSSTLESGTLRQELAAVCYETNVLGFKGPRKMSVIVPGMNMVHERVSIRPRNEHETLLARWQNKNTESIIELQNKTPVWNDDTQSYVLNFHGRVTQASVKNFQIIHGNDPDYIVMQFGRVAEDVFTMDYNYPLCALQAFAIALSSFDSKLACE

SEQ ID NO: 3524 - protein, 842 aa, Homo sapiens
MKGLCAECGQDLTQLQSKNGKQQVPLSTATVSMVHSVPELMVSSEQAEQLGREDQQRLHRNRKLVLMVDLDQTLIHTTEQHCQQMSNKGIFHFQLGRGEPMLHTRLRPHCKDFLEKIAKLYELHVFTFGSRLYAHTIAGFLDPEKKLFSHRILSRDECIDPFSKTGNLRNLFPCGDSMVCIIDDREDVWKFAPNLITVKKYVYFQGTGDMNAPPGSRESQTRKKVNHSRGTEVSEPSPPVRDPEGVTQAPGVEPSNGLEKPARELNGSEAATPRDSPRPGKPDERDIWPPAQAPTSSQELAGAPEPQGSCAQGGRVAPGQRPAQGATGTDLDFDLSSDSESSSESEGTKSSSSASDGESEGKRGRQKPKAAPEGAGALAQGSSLEPGRPAAPSLPGEAEPGAHAPDKEPELGGQEEGERDGLCGLGNGCADRKEAETESQNSELSGVTAGESLDQSMEEEEEEDTDEDDHLIYLEEILVRVHTDYYAKYDRYLNKEIEEAPDIRKIVPELKSKVLADVAIIFSGLHPTNFPIEKTREHYHATALGAKILTRLVLSPDAPDRATHLIAARAGTEKVLQAQECGHLHVVNPDWLWSCLERWDKVEEQLFPLRDDHTKAQRENSPAAFPDREGVPPTALFHPMPVLPKAQPGPEVRIYDSNTGKLIRTGARGPPAPSSSLPIRQEPSSFRAVPPPQPQMFGEELPDAQDGEQPGPSRRKRQPSMSETMPLYTLCKEDLESMDKEVDDILGEGSDDSDSEKRRPEEQEEEPQPRKPGTRRERTLGAPASSERSAAGGRGPRGHKRKLNEEDAASESSRESSNEDEGSSSEADEMAKALEAELNDLM

SEQ ID NO: 3525 - protein, 1216 aa, Homo sapiens
MARNCSECKEKRAAHILCTYCNRWLCSSCTEEHRHSPVPGGPFFPRAQKGSPGVNGGPGDFTLYCPLHTQEVLKLFCETCDMLTCHSCLVVEHKEHRCRHVEEVLQNQRMLLEGVTTQVAHKKSSLQTSAKQIEDRIFEVKHQHRKVENQIKMAKMVLMNELNKQANGLIEELEGITNERKRKLEQQLQSIMVLNRQFEHVQNFINWAVCSKTSVPFLFSKELIVFQMQRLLETSCNTDPGSPWSIRFTWEPNFWTKQLASLGCITTEGGQMSRADAPAYGGLQGSSPFYQSHQSPVAQQEALSHPSHKFQSPAVCSSSVCCSHCSPVSPSLKGQVPPPSIHPAHSFRQPPEMVPQQLGSLQCSALLPREKELACSPHPPKLLQPWLETQPPVEQESTSQRLGQQLTSQPVCIVPPQDVQQGAHAQPTLQTPSIQVQFGHHQKLKLSHFQQQPQQQLPPPPPPLPHPPPPLPPPPQQPHPPLPPSQHLASSQHESPPGPACSQNMDIMHHKFELEEMQKDLELLLQAQQPSLQLSQTKSPQHLQQTIVGQINYIVRQPAPVQSQSQEETLQATDEPPASQGSKPALPLDKNTAAALPQASGEETPLSVPPVDSTIQHSSPNVVRKHSTSLSIMGFSNTLEMELSSTRLERPLEPQIQSVSNLTAGAPQAVPSLLSAPPKMVSSLTSVQNQAMPSLTTSHLQTVPSLVHSTFQSMPNLISDSPQAMASLASDHPQAGPSLMSGHTQAVPSLATCPLQSIPPVSDMQPETGSSSSSGRTSGSLCPRDGADPSLENALCKVKLEEPINLSVKKPPLAPVVSTSTALQQYQNPKECENFEQGALELDAKENQSIRAFNSEHKIPYVRLERLKICAASSGEMPVFKLKPQKNDQDGSFLLIIECGTESSSMSIKVSQDRLSEATQAPGLEGRKVTVTSLAGQRPPEVEGTSPEEHRLIPRTPGAKKGPPAPIENEDFCAVCLNGGELLCCDRCPKVFHLSCHVPALLSFPGGEWVCTLCRSLTQPEMEYDCENACYNQPGMRASPGLSMYDQKKCEKLVLSLCCNNLSLPFHEPVSPLARHYYQIIKRPMDLSIIRRKLQKKDPAHYTTPEEVVSDVRLMFWNCAKFNYPDSEVAEAGRCLEVFFEGWLKEIYPEKRFAQPRQEDSDSEEVSSESGCSTPQGFPWPPYMQEGIQPKRRRRHMENERAKRMSFRLANSISQV

SEQ ID NO: 3526 - protein, 468 aa, Homo sapiens
MAARGSGPRALRLLLLVQLVAGRCGLAGAAGGAQRGLSEPSSIAKHEDSLLKDLFQDYERWVRPVEHLNDKIKIKFGLAISQLVDVDEKNQLMTTNVWLKQEWIDVKLRWNPDDYGGIKVIRVPSDSVWTPDIVLFDNADGRFEGTSTKTVIRYNGTVTWTPPANYKSSCTIDVTFFPFDLQNCSMKFGSWTYDGSQVDIILEDQDVDKRDFFDNGEWEIVSATGSKGNRTDSCCWYPYVTYSFVIKRLPLFYTLFLIIPCIGLSFLTVLVFYLPSNEGEKICLCTSVLVSLTVFLLVIEEIIPSSSKVIPLIGEYLVFTMIFVTLSIMVTVFAINIHHRSSSTHNAMAPLVRKIFLHTLPKLLCMRSHVDRYFTQKEETESGSGPKSSRNTLEAALDSIRYITRHIMKENDVREVVEDWKFIAQVLDRMFLWTFLFVSIVGSLGLFVPVIYKWANILIPVHIGNANK

SEQ ID NO: 3527 - protein, 450 aa, Homo sapiens
MTVEQNVLQQSAAQKHQQTFLNQLREITGINDTQILQQALKDSNGNLELAVAFLTAKNAKTPQQEETTYYQTALPGNDRYISVGSQADTNVIDLTGDDKDDLQRAIALSLAESNRAFRETGITDEEQAISRVLEASIAENKACLKRTPTEVWRDSRNPYDRKRQDKAPVGLKNVGNTCWFSAVIQSLFNLLEFRRLVLNYKPPSNAQDLPRNQKEHRNLPFMRELRYLFALLVGTKRKYVDPSRAVEILKDAFKSNDSQQEWHQDYRKFRETTMYLIIGLENFQRESYIDSLLFLICAYQNNKELLSKGLYRGHDEELISHYRRECLLKLNEQAAELFESGEDREVNNGLIIMNEFIVPFLPLLLVDEMEEKDILAVEDMRNRWCSYLGQEMEPHLQEKLTDFLPKLLDCSMEIKSFHEPPKLPSYSTHELCERFARIMLSLSRTPADGR

SEQ ID NO: 3528 - protein, 395 aa, Homo sapiens
MDLCQKNETDLENAENNEIQFTEETEPTYTCPDGKSEKNHVYCLLDVSDITLEQDEKAKEFIIGTGWEEAVQGWGRTSPAACIWPRKIPKKARVGEGACSDCLVCVNLSHWSLQTKPPTEGGPEKDQSSPSQTQAAPQGPSTASRAISDICFPTYFRAEKKSLQIKEFIWCNKDWAIPGTNRGKASGNPSGGAHRGLSIPGPLTSRALLVLPPLKASLSNALDVLGKKSKNSFLQSEEKVLDVEKDGCVAYAYGLKTADGKGEKRASELAKHPMVNDTPSSPSPAAQISLLTDPEQRCLHWSLLSEKNLACPPDPSNVRYLAALQLLQKRGVQSYKSKFKAKEPRSPVITRKHVLPKAKQENRPQMLETKVFPRPVLPSLTVSRVIIPVSTHRIL

SEQ ID NO: 3529 - protein, 666 aa, Homo sapiens
MADMEDLFGSDADSEAERKDSDSGSDSDSDQENAASGSNASGSESDQDERGDSGQPSNKELFGDDSEDEGASHHSGSDNHSERSDNRSEASERSDHEDNDPSDVDQHSGSEAPNDDEDEGHRSDGGSHHSEAEGSEKAHSDDEKWGREDKSDQSDDEKIQNSDDEERAQGSDEDKLQNSDDDEKMQNTDDEERPQLSDDERQQLSEEEKANSDDERPVASDNDDEKQNSDDEEQPQLSDEEKMQNSDDERPQASDEEHRHSDDEEEQDHKSESARGSDSEDEVLRMKRKNAIASDSEADSDTEVPKDNSGTMDLFGGADDISSGSDGEDKPPTPGQPVDENGLPQDQQEEEPIPETRIEVEIPKVNTDLGNDLYFVKLPNFLSVEPRPFDPQYYEDEFEDEEMLDEEGRTRLKLKVENTIRWRIRRDEEGNEIKESNARIVKWSDGSMSLHLGNEVFDVYKAPLQGDHNHLFIRQGTGLQGQAVFKTKLTFRPHSTDSATHRKMTLSLADRCSKTQKIRILPMAGRDPECQRTEMIKKEEERLRASIRRESQQRRMREKQHQRGLSASYLEPDRYDEEEEGEESISLAAIKNRYKGGIREERARIYSSDSDEGSEEDKAQRLLKAKKLTSDEEGEPSGKRKAEDDDKANKKHKKYVISDEEEEDDD

SEQ ID NO: 3530 - protein, 677 aa, Homo sapiens
MESDLHQIIHSSQPLTLEHVRYFLYQLLRGLKYMHSAQVIHRDLKPSNLLVNENCELKIGDFGMARGLCTSPAEHQYFMTEYVATRWYRAPELMLSLHEYTQAIDLWSVGCIFGEMLARRQLFPGKNYVHQLQLIMMVLGTPSPAVIQAVGAERVRAYIQSLPPRQPVPWETVYPGADRQALSLLGRMLRFEPSARISAAAALRHPFLAKYHDPDDEPDCAPPFDFAFDREALTRERIKEAIVAEIEDFHARREGIRQQIRFQPSLQPVASEPGCPDVEMPSPWAPSGDCAMESPPPAPPPCPGPAPDTIDLTLQPPPPVSEPAPPKKDGAISDNTKAALKAALLKSLRSRLRDGPSAPLEAPEPRKPVTAQERQREREEKRRRRQERAKEREKRRQERERKERGAGASGGPSTDPLAGLVLSDNDRSLLERWTRMARPAAPALTSVPAPAPAPTPTPTPVQPTSPPPGPVAQPTGPQPQSAGSTSGPVPQPACPPPGPAPHPTGPPGPIPVPAPPQIATSTSLLAAQSLVPPPGLPGSSTPGVLPYFPPGLPPPDAGGAPQSSMSESPDVNLVTQQLSKSQVEDPLPPVFSGTPKGSGAGYGVGFDLEEFLNQSFDMGVADGPQDGQADSASLSASLLADWLEGHGMNPADIESLQREIQMDSPMLLADLPDLQDP

SEQ ID NO: 3531 - protein, 526 aa, Homo sapiens
MAALTIATGTGNWFSALALGVTLLKCLLIPTYHSTDFEVHRNWLAITHSLPISQWYYEATSEWTLDYPPFFAWFEYILSHVAKYFDQEMLNVHNLNYSSSRTLLFQRFSVIFMDVLFVYAVRECCKCIDGKKVGKELTEKPKFILSVLLLWNFGLLIVDHIHFQYNGFLFGLMLLSIARLFQKRHMEGAFLFAVLLHFKHIYLYVAPAYGVYLLRSYCFTANKPDGSIRWKSFSFVRVISLGLVVFLVSALSLGPFLALNQLPQVFSRLFPFKRGLCHAYWAPNFWALYNALDKVLSVIGLKLKFLDPNNIPKASMTSGLVQQFQHTVLPSVTPLATLICTLIAILPSIFCLWFKPQGPRGFLRCLTLCALSSFMFGWHVHEKAILLAILPMSLLSVGKAGDASIFLILTTTGHYSLFPLLFTAPELPIKILLMLLFTIYSISSLKTLFRKEKPLFNWMETFYLLGLGPLEVCCEFVFPFTSWKVKYPFIPLLLTSVYCAVGITYAWFKLYVSVLIDSAIGKTKKQ

SEQ ID NO: 3532 - protein, 883 aa, Homo sapiens
MLQLWKVVRPARQLELHRLILLLIAFSLGSMGFLAYYVSTSPKAKEPLPLPLGDCSSGGAAGPGPARPPVPPRPPRPPETARTEPVVLVFVESAYSQLGQEIVAILESSRFRYSTELAPGRGDMPTLTDNTHGRYVLVIYENLLKYVNLDAWSRELLDRYCVEYGVGIIGFFRAHEHSLLSAQLKGFPLFLHSNLGLRDYQVNPSAPLLHLTRPSRLEPGPLPGDDWTIFQSNHSTYEPVLLASLRPAEPAVPGPVLRRARLPTVVQDLGLHDGIQRVLFGHGLSFWLHKLIFVDAVAYLTGKRLCLDLDRYILVDIDDIFVGKEGTRMKVADVEALLTTQNKLRTLVPNFTFNLGFSGKFYHTGTEEEDAGDDMLLKHRKEFWWFPHMWSHMQPHLFHNRSVLADQMRLNKQFALEHGIPTDLGYAVAPHHSGVYPIHTQLYEAWKSVWGIQVTSTEEYPHLRPARYRRGFIHNGIMVLPRQTCGLFTHTIFYNEYPGGSRELDRSIRGGELFLTVLLNPISIFMTHLSNYGNDRLGLYTFESLVRFLQCWTRLRLQTLPPVPLAQKYFELFPQERSPLWQNPCDDKRHKDIWSKEKTCDRLPKFLIVGPQKTGTTAIHFFLSLHPAVTSSFPSPSTFEEIQFFNSPNYHKGIDWYMDFFPVPSNASTDFLFEKSATYFDSEVVPRRGAALLPRAKIITVLTNPADRAYSWYQHQRAHGDPVALNYTFYQVISASSQTPLALRSLQNRCLVPGYYSTHLQRWLTYYPSGQLLIVDGQELRTNPAASMESIQKFLGITPFLNYTRTLRFDDDKGFWCQGLEGGKTRCLGRSKGRRYPDMDTESRLFLTDFFRNHNLELSKLLSRLGQPVPSWLREELQHSSLG

SEQ ID NO: 3533 - protein, 219 aa, Homo sapiens
MNSSKSSETQCTERGCFSSQMFLWTVAGIPILFLSACFITRCVVTFRIFQTCDEKKFQLPENFTELSCYNYGSGSVKNCCPLNWEYFQSSCYFFSTDTISWALSLKNCSAMGAHLVVINSQEEQEFLSYKKPKMREFFIGLSDQVVEGQWQWVDGTPLTKSLSFWDVGEPNNIATLEDCATMRDSSNPRQNWNDVTCFLNYFRICEMVGINPLNKGKSL

SEQ ID NO: 3534 - protein, 2248 aa, Homo sapiens
MMDSENKPENDEDEKINKEAQDLTKLSSHNEDGGPVSDVIASFPENSMGKRGFSESSNSDSVVIGEDRNKHASKRRKLDEAEPLKSGKQGICRLETSESSVTEGGIALDETGKETFLSDCTVGGTCLPNALSPSCNFSTIDVVSLKTDTEKTSAQEMVSLDLERESPFPPKEISVSCTIGNVDTVLKCSICGHLFSSCSDLEKHAESHMQQPKEHTCCHCSHKAESSSALHMHIKQAHGPQKVFSCDLCGFQCSEENLLNAHYLGKTHLRRQNLAARGGFVQILTKQPFPKKSRTMATKNVHSKPRTSKSIAKNSDSKGLRNVGSTFKDFRGSISKQSGSSSELLVEMMPSRNTLSQEVEIVEEHVTSLGLAQNPENQSRKLDTLVTSEGLLEKLESTKNTLQAAHGNSVTSRPRPERNILVLGNSFRRRSSTFTLKGQAKKRFNLLGIKRGTSETQRMYMKHLRTQMKTHDAESVLKHLEACSSVQRVCVTTSETQEAEQGQGSARPPDSGLHSLTVKPASGSQTLCACTDCGQVATNRTDLEIHVKRCHAREMKFYCRTCDFSSMSRRDLDEHLHSNQHQQTASVLSCQCCSFISLDEINLRDHMKEKHNMHFLCTPCNLFFLSEKDVEEHKATEKHINSLVQPKTLQSSNSDLVLQTLPLSTLESENAKESMDDSGKASQEEPLKSRVSHGNEVRHSSKPQFQCKKCFYKTRSSTVLTRHIKLRHGQDYHFLCKACNLYSLSKEGMEKHIKRSKHLENAKKNNIGLSFEECIERVCIGANDKKEEFDVSGNGRIEGHIGVQLQEHSYLEKGMLASEELSQSGGSTKDDELASTTTPKRGRPKGNISRTCSHCGLLASSITNLTVHIRRKHSHQYSYLCKVCKYYTVTKGDMERHCATKKHKGRVEIEASGKHSSDIIVGPEGGSLEAGKKNAGSAVTMSDEHANKPAESPTSVLEKPDRGNSIEAEVENVFHSLDGEVNSHLLDKKEQISSEPEDFAQPGDVYSQRDVTGTGENKCLHCEFSAHSSASLELHVKRKHTKEFEFYCMACDYYAVTRREMTRHAATEKHKMKRQSYLNSANVEAGSADMSKNIIMPEEEHQQNSEEFQIISGQPSDTLKSRNAADCSILNENTNLDMSKVLCAADSVEVETEEESNFNEDHSFCETFQQAPVKDKVRKPEEMMSLTMSSNYGSPSRFQNENSGSSALNCETAKKNHEISNDAGELRVHCEGEGGNAGDGGGVVPHRHLCPVTLDGERSAESPVLVVTRITREQGNLESGGQNRVARGHGLEDLKGVQEDPVLGNKEILMNSQHETEFILEEDGPASDSTVESSDVYETIISIDDKGQAMYSFGRFDSSIIRIKNPEDGELIDQSEEGLIATGVRISELPLKDCAQGVKKKKSEGSSIGESTRIRCDDCGFLADGLSGLNVHIAMKHPTKEKHFHCLLCGKSFYTESNLHQHLASAGHMRNEQASVEELPEGGATFKCVKCTEPFDSEQNLFLHIKGQHEELLREVNKYIVEDTEQINREREENQGNVCKYCGKMCRSSNSMAFLAHIRTHTGSKPFKCKICHFATAQLGDARNHVKRHLGMREYKCHVCGVAFVMKKHLNTHLLGKHGVGTPKERKFTCHLCDRSFTEKWALNNHMKLHTGEKPFKCTWPTCHYSFLTASAMKDHYRTHTGEKSFLCDLCGFAGGTRHALTKHRRQHTGEKPFKCDECNFASTTQSHLTRHKRVHTGEKPYRCPWCDYRSNCAENIRKHILHTGKHEGVKMYNCPKCDYGTNVPVEFRNHLKEQHPDIENPDLAYLHAGIVSKSYECRLKGQGATFVETDSPFTAAALAEEPLVKEKPLRSSRRPAPPPEQVQQVIIFQGYDGEFALDPSVEETAAATLQTLAMAGQVARVVHITEDGQVIATSQSGAHVGSVVPGPILPEQLADGATQVVVVGGSMEGHGMDESLSPGGAVIQQVTKQEILNLSEAGVAPPEASSALDALLCAVTELGEVEGRAGLEEQGRPGAKDVLIQLPGQEVSHVAADPEAPEIQMFPQAQESPAAVEVLTQVVHPSAAMASQERAQVAFKKMVQGVLQFAVCDTAAAGQLVKDGVTQVVVSEEGAVHMVAGEGAQIIMQEAQGEHMDLVESDGEISQIIVTEELVQAMVQESSGGFSEGTTHYILTELPPGVQDEPGLYSHTVLETADSQELLQAGATLGTEAGAPSRAEQLASVVIYTQEGSSAAAAIQSQRESSELQEA

SEQ ID NO: 3535 - protein, 1454 aa, Homo sapiens
MWAQLLLGMLALSPAIAEELPNYLVTLPARLNFPSVQKVCLDLSPGYSDVKFTVTLETKDKTQKLLEYSGLKKRHLHCISFLVPPPAGGTEEVATIRVSGVGNNISFEEKKKVLIQRQGNGTFVQTDKPLYTPGQQVYFRIVTMDSNFVPVNDKYSMVELQDPNSNRIAQWLEVVPEQGIVDLSFQLAPEAMLGTYTVAVAEGKTFGTFSVEEYVLPKFKVEVVEPKELSTVQESFLVKICCRYTYGKPMLGAVQVSVCQKANTYWYREVEREQLPDKCRNLSGQTDKTGCFSAPVDMATFDLIGYAYSHQINIVATVVEEGTGVEANATQNIYISPQMGSMTFEDTSNFYHPNFPFSGKIRVRGHDDSFLKNHLVFLVIYGTNGTFNQTLVTDNNGLAPFTLETSGWNGTDVSLEGKFQMEDLVYNPEQVPRYYQNAYLHLRPFYSTTRSFLGIHRLNGPLKCGQPQEVLVDYYIDPADASPDQEISFSYYLIGKGSLVMEGQKHLNSKKKGLKASFSLSLTFTSRLAPDPSLVIYAIFPSGGVVADKIQFSVEMCFDNQVSLGFSPSQQLPGAEVELQLQAAPGSLCALRAVDESVLLLRPDRELSNRSVYGMFPFWYGHYPYQVAEYDQCPVSGPWDFPQPLIDPMPQGHSSQRSIIWRPSFSEGTDLFSFFRDVGLKILSNAKIKKPVDCSHRSPEYSTAMGAGGGHPEAFESSTPLHQAEDSQVRQYFPETWLWDLFPIGNSGKEAVHVTVPDAITEWKAMSFCTSQSRGFGLSPTVGLTAFKPFFVDLTLPYSVVRGESFRLTATIFNYLKDCIRVQTDLAKSHEYQLESWADSQTSSCLCADDAKTHHWNITAVKLGHINFTISTKILDSNEPCGGQKGFVPQKGRSDTLIKPVLVKPEGVLVEKTHSSLLCPKGKVASESVSLELPVDIVPDSTKAYVTVLGDIMGTALQNLDGLVQMPSGCGEQNMVLFAPIIYVLQYLEKAGLLTEEIRSRAVGFLEIGYQKELMYKHSNGSYSAFGERDGNGNTWLTAFVTKCFGQAQKFIFIDPKNIQDALKWMAGNQLPSGCYANVGNLLHTAMKGGVDDEVSLTAYVTAALLEMGKDVDDPMVSQGLRCLKNSATSTTNLYTQALLAYIFSLAGEMDIRNILLKQLDQQAIISGESIYWSQKPTPSSNASPWSEPAAVDVELTAYALLAQLTKPSLTQKEIAKATSIVAWLAKQHNAYGGFSSTQDTVVALQALAKYATTAYMPSEEINLVVKSTENFQRTFNIQSVNRLVFQQDTLPNVPGMYTLEASGQGCVYVQTVLRYNILPPTNMKTFSLSVEIGKARCEQPTSPRSLTLTIHTSYVGSRSSSNMAIVEVKMLSGFSPMEGTNQLLLQQPLVKKVEFGTDTLNIYLDELIKNTQTYTFTISQSVLVTNLKPATIKVYDYYLPDEQATIQYSDPCE

SEQ ID NO: 3536 - protein, 435 aa, Homo sapiens
MEGQTPGSRGLPEKPHPATAAATLSSMGAVFILMKSALGAGLLNFPWAFSKAGGVVPAFLVELVSLVFLISGLVILGYAAAVSGQATYQGVVRGLCGPAIGKLCEACFLLNLLMISVAFLRVIGDQLEKLCDSLLSGTPPAPQPWYADQRFTLPLLSVLVILPLSAPREIAFQKYTSILGTLAACYLALVITVQYYLWPQGLVRESHPSLSPASWTSVFSVFPTICFGFQCHEAAVSIYCSMRKRSLSHWALVSVLSLLACCLIYSLTGVYGFLTFGTEVSADVLMSYPGNDMVIIVARVLFAVSIVTVYPIVLFLGRSVMQDFWRRSCLGGWGPSALADPSGLWVRMPLTILWVTVTLAMALFMPDLSEIVSIIGGISSFFIFIFPGLCLICAMGVEPIGPRVKCCLEVWGVVSVLVGTFIFGQSTAAAVWEMF

SEQ ID NO: 3537 - protein, 829 aa, Homo sapiens
MVPAWLWLLCVSVPQALPKAQPAELSVEVPENYGGNFPLYLTKLPLPREGAEGQIVLSGDSGKATEGPFAMDPDSGFLLVTRALDREEQAEYQLQVTLEMQDGHVLWGPQPVLVHVKDENDQVPHFSQAIYRARLSRGTRPGIPFLFLEASDRDEPGTANSDLRFHILSQAPAQPSPDMFQLEPRLGALALSPKGSTSLDHALERTYQLLVQVKDMGDQASGHQATATVEVSIIESTWVSLEPIHLAENLKVLYPHHMAQVHWSGGDVHYHLESHPPGPFEVNAEGNLYVTRELDREAQAEYLLQVRAQNSHGEDYAAPLELHVLVMDENDNVPICPPRDPTVSIPELSPPGTEVTRLSAEDADAPGSPNSHVVYQLLSPEPEDGVEGRAFQVDPTSGSVTLGVLPLRAGQNILLLVLAMDLAGAEGGFSSTCEVEVAVTDINDHAPEFITSQIGPISLPEDVEPGTLVAMLTAIDADLEPAFRLMDFAIERGDTEGTFGLDWEPDSGHVRLRLCKNLSYEAAPSHEVVVVVQSVAKLVGPGPGPGATATVTVLVERVMPPPKLDQESYEASVPISAPAGSFLLTIQPSDPISRTLRFSLVNDSEGWLCIEKFSGEVHTAQSLQGAQPGDTYTVLVEAQDTDEPRLSASAPLVIHFLKAPPAPALTLAPVPSQYLCTPRQDHGLIVSGPSKDPDLASGHGPYSFTLGPNPTVQRDWRLQTLNGSHAYLTLALHWVEPREHIIPVVVSHNAQMWQLLVRVIVCRCNVEGQCMRKVGRMKGMPTKLSAVGILVGTLVAIGIFLILIFTHWTMSRKKDPDQPADSVPLKATV

SEQ ID NO: 3538 - protein, 332 aa, Homo sapiens [sequence omitted]

SEQ ID NO: 3539 - protein, 803 aa, Homo sapiens
MRALWVLGLCCVLLTFGSVRADDEVDVDGTVEEDLGKSREGSRTDDEVVQREEEAIQLDGLNASQIRELREKSEKFAFQAEVNRMMKLIINSLYKNKEIFLRELISNASDALDKIRLISLTDENALSGNEELTVKIKCDKEKNLLHVTDTGVGMTREELVKNLGTIAKSGTSEFLNKMTEAQEDGQSTSELIGQFGVGFYSAFLVADKVIVTSKHNNDTQHIWESDSNEFSVIADPRGNTLGRGTTITLVLKEEASDYLELDTIKNLVKKYSQFINFPIYVWSSKTETVEEPMEEEEAAKEEKEESDDEAAVEEEEEEKKPKTKKVEKTVWDWELMNDIKPIWQRPSKEVEEDEYKAFYKSFSKESDDPMAYIHFTAEGEVTFKSILFVPTSAPRGLFDEYGSKKSDYIKLYVRRVFITDDFHDMMPKYLNFVKGVVDSDDLPLNVSRETLQQHKLLKVIRKKLVRKTLDMIKKIADDKYNDTFWKEFGTNIKLGVIEDHSNRTRLAKLLRFQSSHHPTDITSLDQYVERMKEKQDKIYFMAGSSRKEAESSPFVERLLKKGYEVIYLTEPVDEYCIQALPEFDGKRFQNVAKEGVKFDESEKTKESREAVEKEFEPLLNWMKDKALKDKIEKAVVSQRLTESPCALVASQYGWSGNMERIMKAQAYQTGKDISTNYYASQKKTFEINPRHPLIRDMLRRIKEDEDDKTVLDLAVVLFETATLRSGYLLPDTKAYGDRIERMLRLSLNIDPDAKVEEEPEEEPEETAEDTTEDTEQDEDEEMDVGTDEEEETAKESTAEKDEL

SEQ ID NO: 3540 - protein, 896 aa, Homo sapiens
MLRAALSLLALPLAGAAEEPTQKPESPGEPPPGLELFRWQWHEVEAPYLVALWILVASLAKIVFHLSRKVTSLVPESCLLILLGLVLGGIVLAVAKKAEYQLEPGTFFLFLLPPIVLDSGYFMPSRLFFDNLGAILTYAVVGTLWNAFTTGAALWGLQQAGLVAPRVQAGLLDFLLFGSLISAVDPVAVLAVFEEVHVNETLFIIVFGESLLNDAVTVVLYKVCNSFVEMGSANVQATDYLKGVASLFVVSLGGAAVGLVFAFLLALTTRFTKRVRIIEPLLVFLLAYAAYLTAEMASLSAILAVTMCGLGCKKYVEANISHKSRTTVKYTMKTLASCAETVIFMLLGISAVDSSKWAWDSGLVLGTLIFILFFRALGVVLQTWVLNQFRLVPLDKIDQVVMSYGGLRGAVAFALVILLDRTKVPAKDYFVATTIVVVFFTVIVQGLTIKPLVKWLKVKRSEHHKPTLNQELHEHTFDHILAAVEDVVGHHGYHYWRDRWEQFDKKYLSQLLMRRSAYRIRDQIWDVYYRLNIRDAISFVDQGGHVLSSTGLTLPSMPSRNSVAETSVTNLLRESGSGACLDLQVIDTVRSGRDREDAVMHHLLCGGLYKPRRRYKASCSRHFISEDAQERQDKEVFQQNMKRRLESFKSTKHNICFTKSKPRPRKTGRRKKDGVANAEATNGKHRGLGFQDTAAVILTVESEEEEEESDSSETEKEDDEGIIFVARATSEVLQEGKVSGSLEVCPSPRIIPPSPTCAEKELPWKSGQGDLAVYVSSETTKIVPVDMQTGWNQSISSLESLASPPCNQAPILTCLPPHPRGTEEPQVPLHLPSDPRSSFAFPPSLAKAGRSRSESSADLPQQQELQPLMGHKDHTHLSPGTATSHWCIQFNRGSRL

SEQ ID NO: 3541 - protein, 567 aa, Homo sapiens
MASHVDLLTELQLLEKVPTLERLRAAQKRRAQQLKKWAQYEQDLQHRKRKHERKRSTGGRRKKVSFEASVALLEASLRNDAEEVRYFLKNKVSPDLCNEDGLTALHQCCIDNFEEIVKLLLSHGANVNAKDNELWTPLHAAATCGHINLVKILVQYGADLLAVNSDGNMPYDLCEDEPTLDVIETCMAYQGITQEKINEMRVAPEQQMIADIHCMIAAGQDLDWIDAQGATLLHIAGANGYLRAAELLLDHGVRVDVKDWDGWEPLHAAAFWGQMQMAELLVSHGASLSARTSMDEMPIDLCEEEEFKVLLLELKHKHDVIMKSQLRHKSSLSRRTSSAGSRGKVVRRASLSDRTNLYRKEYEGEAILWQRSAAEDQRTSTYNGDIRETRTDQENKDPNPRLEKPVLLSEFPTKIPRGELDMPVENGLRAPVSAYQYALANGDVWKVHEVPDYSMAYGNPGVADATPPWSSYKEQSPQTLLELKRQRAAAKLLSHPFLSTHLGSSMARTGESSSEGKAPLIGGRTSPYSSNGTSVYYTVTSGDPPLLKFKAPIEEMEEKVHGCCRIS

SEQ ID NO: 3542 - protein, 428 aa, Homo sapiens
HDAPLTIEFPNLDKTSAEWLKVNGLKAKKLSLYQVLAPNAFSPVEEFVPILQKTVSSTIHEKAMIQFEWHDGTVKNIHVDPPFLYKYQQQLSRAMRMYERRIEWLSLASRRIWGTVCEKRVVVLLDISATNSMYIIHIQHSLRLLLEEQLSNKDCFNLIAFGSTIESWRPEMVPVSHNNLQSAWRWALNLRCRGSRNVLSALRKAVEVDFKDKDKHQSQGIYLFTGGIPDQDMPTLSAYMAEACGGCDLQLNVCLFYVGEPKMDTTPPARYASHTDTAAAYKEVTRAAGGRFHWFGDTGIYESDDINSIMSEMEKALNYSQKCAFLMASLKNHSGKVLGSSALPKEKPKTLQLRSQPKKLCPPRPTVPLGARMSIKDDPDREKSPPLKSLKWRPLSSRVGISPGMAEWLRAEFWSQQDQLRPSQRKKG

SEQ ID NO: 3543 - protein, 708 aa, Homo sapiens
MANEEDDPVVQEIDVYLAKSLAEKLYLFQYPVRPASMTYDDIPHLSAKIKPKQQKVELEMAIDTLNPNYCRSKGEQIALNVDGACADETSTYSSKLMDKQTFCSSQTTSNTSRYAAALYRQGELHLTPLHGILQLRPSFSYLDKADAKHREREAANEAGDSSQDEAEDDVKQITVRFSRPESEQARQRRVQSYEFLQKKHAEEPWVHLHYYGLRDSRSEHERQYLLCPGSSGVENTELVKSPSEYLMMLMPPSQEEEKDKPVAPSNVLSMAQLRTLPLADQIKILMKNVKVMPFANLMSLLGPSIDSVAVLRGIQKVAMLVQGNWVVKSDILYPKDSSSPHSGVPAEVLCRGRDFVMWKFTQSRWVVRKEVATVTKLCAEDVKDFLEHMAVVRINKGWEFILPYDGEFIKKHPDVVQRQHMLWTGIQAKLEKVYNLVKETMPKKPDAQSGPAGLVCGDQRIQVAKTKAQQNHALLERELQRRKEQLRVPAVPPGVRIKEEPVSEEGEEDEEQEAEEEPMDTSPSGLHSKLANGLPLGRAAGTDSFNGHPPQGCASTPVARELKAFVEATFQRQFVLTLSELKRLFNLHLASLPPGHTLFSGISDRMLQDTVLAAGCKQILVPFPPQTAASPDEQKVFALWESGDMSDQHRQVLLEIFSKNYRVRRNMIQSRLTQECGEDLSKQEVDKVLKDCCVSYGGMWYLKGTVQS

SEQ ID NO: 3544 - protein, 477 aa, Homo sapiens
MKSLPILLLLCVAVCSAYPLDGAARGEDTSMNLVQKYLENYYDLKKDVKQFVRRKDSGPVVKKIREMQKFLGLEVTGKLDSDTLEVMRKPRCGVPDVGHFRTFPGIPKWRKTHLTYRIVNYTPDLPKDAVDSAVEKALKVWEEVTPLTFSRLYEGEADIMISFAVREHGDFYPFDGPGNVLAHAYAPGPGINGDAHFDDDEQWTKDTTGTNLFLVAAHEIGHSLGLFHSANTEALMYPLYHSLTDLTRFRLSQDDINGIQSLYGPPPDSPETPLVPTEPVPPEPGTPANCDPALSFDAVSTLRGEILIFKDRHFWRKSLRKLEPELHLISSFWPSLPSGVDAAYEVTSKDLVFIFKGNQFWAIRGNEVRAGYPRGIHTLGFPPTVRKIDAAISDKEKNKTYFFVEDKYWRFDEKRNSMEPGFPKQIAEDFPGIDSKIDAVFEEFGFFYFFTGSSQLEFDPNAKKVTHTLKSNSWLNC

SEQ ID NO: 3545 - protein, 478 aa, Homo sapiens
MAAAALRDPAQVPVAADLLTDHEEQGYVTFEDVAVYFSQEEWRLLDDAQRLLYRNVMLENFTLLASLGCWHGAEAEEAPEQIASVGLLSSNIQQHQKQHCGEKPLKRQEGRVPVLRSCKVHLSEKSLQSREVGKALLISSGVLKHQVTHTGEKSHRSSKSREAFHAGKRHYKCSECGKAFGQKYLLVQHQRLHAGKKTYECSECGKLFRDMSNLFIHQIVHTGERPYGCSNCGKSFSRNAHLIEHQRVHTGEKPFTCSECGKAFRHNSTLVQHHKIHTGVRPYECSECGKLFSFNSSLMKHQRIHTGERPYKCSECGKFYSHKSNLIKHWRVHTGERPYKCSDCGKFFTQCSSLMQHQKVHTGEKPFKCNECGRFFRENSTLVRHQRVHTGAKPYECRECGKFFSQSSTLMQHRKVHIGEKPFKCNECGRLFRENSSLVKHQRVHTGAKPYECRECGKFFRHNSSLFKHRRIHTGEMQ

SEQ ID NO: 3546 - protein, 213 aa, Homo sapiens
MKQALVDDTEDVSLDFGNEEELAFRKAKIRHPLATFFHLFFRVSAIVTYVSCDWFSKSFVGCFVMVLLLLSLDFWSVKNVTGRLLVGLRWWNQIDEDGKSHWIFEARKVSPNSIAATEAEARIFWLGLIICPMIWIVFFFSTLFSLKLKWLALVVAGISLQAANLYGYILCKMGGNSDIGKVTASFLSQTVFQTACPGDFQKPGLEGLEIHQH

SEQ ID NO: 3547 - protein, 457 aa, Homo sapiens
MSLMLDDQPPMEAQYAEEGPGPGIFRAEPGDQQHPISQAVCWRSMRRGCAVLGALGLLAGAGVGSWLLVLYLCPAASQPISGTLQDEEITLSCSEASAEEALLPALPKTVSFRINSEDFLLEAQVRDQPRWLLVCHEGWSPALGLQICWSLGHLRLTHHKGVNLTDIKLNSSQEFAQLSPRLGGFLEEAWQPRNNCTSGQVVSLRCSECGARPLASRIVGGQSVAPGRWPWQASVALGFRHTCGGSVLAPRWVVTAAHCMHSFRLARLSSWRVHAGLVSHSAVRPHQGALVERIIPHPLYSAQNHDYDVALLRLQTALNFSDTVGAVCLPAKEQHFPKGSRCWVSGWGHTHPSHTYSSDMLQDTVVPLFSTQLCNSSCVYSGALTPRMLCAGYLDGRADACQGDSGGPLVCPDGDTWRLVGVVSWGRGCAEPNHPGVYAKVAEFLDWIHDTAQDSLL

SEQ ID NO: 3548 - protein, 980 aa, Homo sapiens
MATAATSPALKRLDLRDPAALFETHGAEEIRGLERQVRAEIEHKKEELRQMVGERYRDLIEAADTIGQMRRCAVGLVDAVKATDQYCARLRQAGSAAPRPPRAQQPQQPSQEKFYSMAAQIKLLLEIPEKIWSSMEASQCLHATQLYLLCCHLHSLLQLDSSSSRYSPVLSRFPILIRQVAAASHFRSTILHESKMLLKCQGVSDQAVAEALCSIMLLEESSPRQALTDFLLARKATIQKLLNQPHHGAGIKAQICSLVELLATTLKQAHALFYTLPEGLLPDPALPCGLLFSTLETITGQHPAGKGTGVLQEEMKLCSWFKHLPASIVEFQPTLRTLAHPISQEYLKDTLQKWIHMCNEDIKNGITNLLMYVKSMKGLAGIRDAMWELLTNESTNHSWDVLCRRLLEKPLLFWEDMMQQLFLDRLQTLTKEGFDSISSSSKELLVSALQELESSTSNSPSNKHIHFEYNMSLFLWSESPNDLPSDAAWVSVANRGQFASSGLSMKAQAISPCVQNFCSALDSKLKVKLDDLLAYLPSDDSSLPKDVSPTQAKSSAFDRYADAGTVQEMLRTQSVACIKHIVDCIRAELQSIEEGVQGQQDALNSAKLHSVLFMARLCQSLGELCPHLKQCILGKSESSEKPAREFRALRKQGKVKTQEIIPTQAKWQEVKEVLLQQSVMGYQVWSSAVVKVLIHGFTQSLLLDDAGSVLATATSWDELEIQEEAESGSSVTSKIRLPAQPSWYVQSFLFSLCQEINRVGGHALPKVTLQEMLKSCMVQVVAAYEKLSEEKQIKKEGAFPVTQNRALQLLYDLRYLNIVLTAKGDEVKSGRSKPDSRIEKVTDHLEALIDPFDLDVFTPHLNSNLHRLVQRTSVLFGLVTGTENQLAPRSSTFNSQEPHNILPLASSQIRFGLLPLSMTSTRKAKSTRNIETKAQVVPPARSTAGDPTVPGSLFRQLVSEEDNTSAPSLFKLGWLSSMTK

SEQ ID NO: 3549 - protein, 1267 aa, Homo sapiens
MGDMKTPDFDDLLAAFDIPDPTSLDAKEAIQTPSEENESPLKPPGICMDESVSLSHSGSAPDVPAVSVIVKNTSRQESFEAEKDHITPSLLHNGFRGSDLPPDPHNCGKFDSTFMNGDSARSFPGKLEPPKSEPLPTFNQFSPISSPEPEDPIKDNGFGIKPKHSDSYFPPPLGCGAVGGPVLEALAKFPVPELHMFDHFCKKEPKPEPLPLGSQQEHEQSGQNTVEPHKDPDATRFFGEALEFNSHPSNSIGESKGLARELGTCSSVPPRQRLKPAHSKLSSCVAALVALQAKRVASVTKEDQPGHTKDLSGPTKESSKGSPKMPKSPKSPRSPLEATRKSIKPSDSPRSICSDSSSKGSPSVAASSPPAIPKVRIKTIKTSSGEIKRTVTRILPDPDDPSKSPVGSPLGSAIAEAPSEMPGDEVPVEEHFPEAGTNSGSPQGARKGDESMTKASDSSSPSCSSGPRVPKGAAPGSQTGKKQQSTALQASTLAPANLLPKAVHLANLNLVPHSVAASVTAKSSVQRRSQPQLTQMSVPLVHQVKKAAPLIVEVFNKVLHSSNPVPLYAPNLSPPADSRIHVPASGYCCLECGDAFALEKSLSQHYGRRSVHIEVLCTLCSKTLLFFNKCSLLRHARDHKSKGLVMQCSQLLVKPISADQMFVSAPVNSTAPAAPAPSSSPKHGLTSGSASPPPPALPLYPDPVRLIRYSIKCLECHKQMRDYMVLAAHFQRTTEETEGLTCQVCQMLLPNQCSFCAHQRIHAHKSPYCCPECGVLCRSAYFQTHVKENCLHYARKVGYRCIHCGVVHLTLALLKSHIQERHCQVFHKCAFCPMAFKTASSTADHSATQHPTQPHRPSQLIYKCSCEMVFNKKRHIQQHFYQNVSKTQVGVFKCPECPLLFVQKPELMQHVKSTHGVPRNVDELSSLQSSADTSSSRPGSRVPTEPPATSVAARSSSLPSGRWGRPEAHRRVEARPRLRNTGWTCQECQEWVPDRESYVSHMKKSHGRTLKRYPCRQCEQSFHTPNSLRKHIRNNHDTVKKFYTCGYCTEDSPSFPRPSLLESHISLMHGIRNPDLSQTSKVKPPGGHSPQVNHLKRPVSGVGDAPGTSNGATVSSTKRHKSLFQCAKCSFATDSGLEFQSHIPQHQVDSSTAQCLLCGLCYTSASSLSRHLFIVHKVRDQEEEEEEEAAAAEMAVEVAEPEEGSGEEVPMETRENGLEECAGEPLSADPEARRLLGPAPEDDGGHNDHSQPQASQDQDSHTLSPQV

SEQ ID NO: 3550 - protein, 410 aa, Homo sapiens
MEDPSGAREPRARPRERDPGRRPHPDQGRTHDRPRDRPGDPRRKRSSDGNRRRDGDRDPERDQERDGNRDRNRDRERERERERDPDRGPRRDTHRDAGPRAGEHGVWEKPRQSRTRDGARGLTWDAAAPPGPAPWEAPEPPQPQRKGDPGRRRPESEPPSERYLPSTPRPGREEVEYYQSEAEGLLECHKCKYLCTGRGVVQIVEVVLNGMVLICIVASYFVLAGFSASFSSGGGFGNNYYSPFEGTELEQVRQLDQQYTILRSPLIYGGVAVSLGLGVLTMGVLLQGAKSRTMLSGKWLLTEAAFSLLAAVGYCTGIGVYLHVALQINSTDTCKTRERLYARKGLTWMDCQLAGTDGAAATFACLLVIMYGASVVLALRSYREQKRYKGSREQPGSYSDAPEYLWSGTL

SEQ ID NO: 3551 - protein, 463 aa, Homo sapiens
MHRSFLQARRSRNTTRPALLRLSDYLLTNYRKGVRPVRDWRKPTTVSIDVIVYAILNVDEKNQVLTTYIWYRQYWTDEFLQWNPEDFDNITKLSIPTDSIWVPDILINEFVDVGKSPNIPYVYIRHQGEVQNYKPLQVVTACSLDIYNFPFDVQNCSLTFTSWLHTIQDINISLWRLPEKVKSDRSVFMNQGEWELLGVLPYFREFSMESSNYYAEMKFYVVIRRRPLFYVVSLLLPSIFLMVMDIVGFYLPPNSGERVSFKITLLLGYSVFLIIVSDTLPATAIGTPLIGVYFVVCMALLVISLAETIFIVRLVHKQDLQQPVPAWLRHLVLERIAWLLCLREQSTSQRPPATSQATKTDDCSAMGNHCSHMGGPQDFEKSPRDRCSPPPPPREASLAVCGLLQELSSIRQFLEKRDEIREVARDWLRVGSVLDKLLFHIYLLAVLAYSITLVMLWSIWQYA

SEQ ID NO: 3552 - protein, 891 aa, Homo sapiens
MSLRIDVDTNFPECVVDAGKVTLGTQQRQEMDPRLREKQNEIILRAVCALLNSGGGIIKAEIENKGYNYERHGVGLDVPPIFRSHLDKMQKENHFLIFVKSWNTEAGVPLATLCSNLYHRERTSTDVMDSQEALAFLKCRTQTPTNINVSNSLGPQAAQGSVQYEGNINVSAAALFDRKRLQYLEKLNLPESTHVEFVMFSTDVSHCVKDRLPKCVSAFANTEGGYVFFGVHDETCQVIGCEKEKIDLTSLRASIDGCIKKLPVHHFCTQRPEIKYVLNFLEVHDKGALRGYVCAIKVEKFCCAVFAKVPSSWQVKDNRVRQLPTREWTAWMMEADPDLSRCPEMVLQLSLSSATPRSKPVCIHKNSECLKEQQKRYFPVFSDRVVYTPESLYKELFSQHKGLRDLINTEMRPFSQGILIFSQSWAVDLGLQEKQGVICDALLISQNNTPILYTIFSKWDAGCKGYSMIVAYSLKQKLVNKGGYTGRLCITPLVCVLNSDRKAQSVYSSYLQIYPESYNFMTPQHMEALLQSLVIVLLGFKSFLSEELGSEVLNLLTNKQYELLSKNLRKTRELFVHGLPGSGKTILALRIMEKIRNVFHCEPANILYICENQPLKKLVSFSKKNICQPVTRKTFMKNNFEHIQHIIIDDAQNFRTEDGDWYGKAKFITQTARDGPGVLWIFLDYFQTYHLSCSGLPPPSDQYPREEINRVVRNAGPIANYLQQVMQEARQNPPPNLPPGSLVMLYEPKWAQGVPGNLEIIEDLNLEEILIYVANKCRFLLRNGYSPKDIAVLFTKASEVEKYKDRLLTAMRKRKLSQLHEESDLLLQIGDASDVLTDHIVLDSVCRFSGLERNIVFGINPGVAPPAGAYNLLLCLASRAKRHLYILKASV

SEQ ID NO: 3553 - protein, 822 aa, Homo sapiens
MPAPIRLRELIRTIRTARTQAEEREMIQKECAAIRSSFREEDNTYRCRNVAKLLYMHMLGYPAHFGQLECLKLIASQKFTDKRIGYLGAMLLLDERQDVHLLMTNCIKNDLNHSTQFVQGLALCTLGCMGSSEMCRDLAGEVEKLLKTSNSYLRKKAALCAVHVIRKVPELMEMFLPATKNLLNEKNHGVLHTSVVLLTEMCERSPDMLAHFRKLVPQLVRILKNLIMSGYSPEHDVSGISDPFLQVRILRLLRILGRNDDDSSEAMNDILAQVATNTETSKNVGNAILYETVLTIMDIKSESGLRVLAINILGRFLLNNDKNIRYVALTSLLKTVQTDHNAVQRHRSTIVDCLKDLDVSIKRRAMELSFALVNGNNIRGMMKELLYFLDSCEPEFKADCASGIFLAAEKYAPSKRWHIDTIMRVLTTAGSYVRDDAVPNLIQLITNSVEMHAYTVQRLYKAILGDYSQQPLVQVAAWCIGEYGDLLVSGQCEEEEPIQVTEDEVLDILESVLISNMSTSVTRGYALTAIMKLSTRFTCTVNRIKKVVSIYGSSIDVELQQRAVEYNALFKKYDHMRSALLERMPVMEKVTTNGPTEIVQTNGETEPAPLETKPPPSGPQPTSQANDLLDLLGGNDITPVIPTAPTSKPSSAGGELLDLLGDINLTGAPAAAPAPASVPQISQPPFLLDGLSSQPLFNDIAAGIPSITAYSKNGLKIEFTFERSNTNPSVTVITIQASNSTELDMTDFVFQAAVPKTFQLQLLSPSSSIVPAFNTGTITQVIKVLNPQKQQLRMRIKLTYNHKGSAMQDLAEVNNFPPQSWQ

SEQ ID NO: 3554 - protein, 328 aa, Homo sapiens
MATKRLARQLGLIRRKSIAPANGNLGRSKSKQLFDYLIVIDFESTCWNDGKHHHSQEIIEFPAVLLNTSTGQIDSEFQAYVQPQEHPILSEFCMELTGIKQAQVDEGVPLKICLSQFCKWIHKIQQQKNIIFATGISEPSASEVKLCAFVTWSDWDLGVCLEYECKRKQLLKPVFLNSWIDLRATYKLFYRRKPKGLSGALQEVGIEFSGREHSGLDDSRNTALLAWKMIRDGCVMKITRSLNKGPFLLPSWTWNSDLASGDQHAFLQQEFGCGTYRTLLQKPNMSKQEKGNILWLTMVWLSLACLQRKNYNDCMLNTASQTVTTEKF

SEQ ID NO: 3555 - protein, 1268 aa, Homo sapiens
MDQKILSLAAEKTADKLQEFLQTLREGDLTNLLQNQAVKGKVAGALLRAIFKGSPCSEEAGTLRRRKIYTCCIQLVESGDLQKEIASEIIGLLMLEAHHFPGPLLVELANEFISAVREGSLVNGKSLELLPIILTALATKKENLAYGKGVLSGEECKKQLINTLCSGRWDQQYVIQLTSMFKDVPLTAEEVEFVVEKALSMFSKMNLQEIPPLVYQLLVLSSKGSRKSVLEGIIAFFSALDKQHNEEQSGDELLDVVTVPSGELRHVEGTIILHIVFAIKLDYELGRELVKHLKVGQQGDSNNNLSPFSIALLLSVTRIQRFQDQVLDLLKTSVVKSFKDLQLLQGSKFLQNLVPHRSYVSTMILEVVKNSVHSWDHVTQGLVELGFILMDSYGPKKVLDGKTIETSPSLSRMPNQHACKLGANILLETFKIHEMIRQEILEQVLNRVVTRASSPISHFLDLLSNIVMYAPLVLQSCSSKVTEAFDYLSFLPLQTVQRLLKAVQPLLKVSMSMRDCLILVLRKAMFANQLDARKSAVAGFLLLLKNFKVLGSLSSSQCSQSLSVSQVHVDVHSHYNSVANETFCLEIMDSLRRCLSQQADVRLMLYEGFYDVLRRNSQLANSVMQTLLSQLKQFYEPKPDLLPPLKLEACILTQGDKISLQEPLDYLLCCIQHCLAWYKNTVIPLQQGEEEEEEEEAFYEDLDDILESITNRMIKSELEDFELDKSADFSQSTSIGIKNNICAFLVMGVCEVLIEYNFSISSFSKNRFEDILSLFMCYKKLSDILNEKAGKAKTKMANKTSDSLLSMKFVSSLLTALFRVLLWRYTSIPTSVEESGKKEKGKSISLLCLEGLQKIFSAVQQFYQPKIQQFLRALDVTDKEGEEREDADVSVTQRTAFQIRQFQRSLLNLLSSQEEDFNSKEALLLVTVLTSLSKLLEPSSPQFVQMLSWTSKICKENSREDALFCKSLMNLLFSLHVSYKSPVILLRDLSQDIHGHLGDIDQDVEVEKTNHFAIVNLRTAAPTVCLLVLSQAEKVLEEVDWLITKLKGQVSQETLSEEASSQATLPNQPVEKAIIMQLGTLLTFFHELVQTALPSGSCVDTLLKDLCKMYTTLTALVRYYLQVCQSSGGIPKNMEKLVKLSGSHLTPLCYSFISYVQNKSKSLNYTGEKKEKPAAVATAMARVLRETKPIPNLIFAIEQYEKFLIHLSKKSKVNLMQHMKLSTSRDFKIKGNILDMVLREDGEDENEEGTASEHGGQNKEPAKKKRKK

SEQ ID NO: 3556 - protein, 1972 aa, Homo sapiens
MAQKGQLSDDEKFLFVDKNFINSPVAQADWAAKRLVWVPSEKQGFEAASIKEEKGDEVVVELVENGKKVTVGKDDIQKMNPPKFSKVEDMAELTCLNEASVLHNLRERYFSGLIYTYSGLFCVVVNPYKHLPIYSEKIVDMYKGKKRHEMPPHIYAIADTAYRSMLQDREDQSILCTGESGAGKTENTKKVIQYLAVVASSHKGKKDTSITGELEKQLLQANPILEAFGNAKTVKNDNSSRFGKFIRINFDVTGYIVGANIETYLLEKSRAIRQARDERTFHIFYYMIAGAKEKMRSDLLLEGFNNYTFLSNGFVPIPAAQDDEMFQETVEAMAIMGFSEEEQLSILKVVSSVLQLGNIVFKKERNTDQASMPDNTAAQKVCHLMGINVTDFTRSILTPRIKVGRDVVQKAQTKEQADFAVEALAKATYERLFRWILTRVNKALDKTHRQGASFLGILDIAGFEIFEVNSFEQLCINYTNEKLQQLFNHTMFILEQEEYQREGIEWNFIDFGLDLQPCIELIERPNNPPGVLALLDEECWFPKATDKSFVEKLCTEQGSHPKFQKPKQLKDKTEFSIIHYAGKVDYNASAWLTKNMDPLNDNVTSLLNASSDKFVADLWKDVDRIVGLDQMAKMTESSLPSASKTKKGMFRTVGQLYKEQLGKLMTTLRNTTPNFVRCIIPNHEKRSGKLDAFLVLEQLRCNGVLEGIRICRQGFPNRIVFQEFRQRYEILAANAIPKGFMDGKQACILMIKALELDPNLYRIGQSKIFFRTGVLAHLEEERDLKITDVIMAFQAMCRGYLARKAFAKRQQQLTAMKVIQRNCAAYLKLRNWQWWRLFTKVKPLLQVTRQEEEMQAKEDELQKTKERQQKAENELKELEQKHSQLTEEKNLLQEQLQAETELYAEAEEMRVRLAAKKQELEEILHEMEARLEEEEDRGQQLQAERKKMAQQMLDLEEQLEEEEAARQKLQLEKVTAEAKIKKLEDEILVMDDQNNKLSKERKLLEERISDLTTNLAEEEEKAKNLTKLKNKHESMISELEVRLKKEEKSRQELEKLKRKLEGDASDFHEQIADLQAQIAELKMQLAKKEEELQAALARLDDEIAQKNNALKKIRELEGHISDLQEDLDSERAARNKAEKQKRDLGEELEALKTELEDTLDSTATQQELRAKREQEVTVLKKALDEETRSHEAQVQEMRQKHAQAVEELTEQLEQFKRAKANLDKNKQTLEKENADLAGELRVLGQAKQEVEHKKKKLEAQVQELQSKCSDGERARAELNDKVHKLQNEVESVTGMLNEAEGKAIKLAKDVASLSSQLQDTQELLQEETRQKLNVSTKLRQLEEERNSLQDQLDEEMEAKQNLERHISTLNIQLSDSKKKLQDFASTVEALEEGKKRFQKEIENLTQQYEEKAAAYDKLEKTKNRLQQELDDLVVDLDNQRQLVSNLEKKQRKFDQLLAEEKNISSKYADERDRAEAEAREKETKALSLARALEEALEAKEELERTNKMLKAEMEDLVSSKDDVGKNVHELEKSKRALETQMEEMKTQLEELEDELQATEDAKLRLEVNMQALKGQFERDLQARDEQNEEKRRQLQRQLHEYETELEDERKQRALAAAAKKKLEGDLKDLELQADSAIKGREEAIKQLRKLQAQMKDFQRELEDARASRDEIFATAKENEKKAKSLEADLMQLQEDLAAAERARKQADLEKEELAEELASSLSGRNALQDEKRRLEARIAQLEEELEEEQGNMEAMSDRVRKATQQAEQLSNELATERSTAQKNESARQQLERQNKELRSKLHEMEGAVKSKFKSTIAALEAKIAQLEEQVEQEAREKQAATKSLKQKDKKLKEILLQVEDERKMAEQYKEQAEKGNARVKQLKRQLEEAEEESQRINANRRKLQRELDEATESNEAMGREVNALKSKLRRGNETSFVPSRRSGGRRVIENADGSEEETDTRDADFNGTKASE

SEQ ID NO: 3557 - protein, 507 aa, Homo sapiens
MARLLRSATWELFPWRGYCSQKAKGELCRDFVEALKAVVGGSHVSTAAVVREQHGRDESVHRCEPPDAVVWPQNVEQVSRLAALCYRQGVPIIPFGTGTGLEGGVCAVQGGVCVNLTHMDRILELNQEDFSVVVEPGVTRKALNAHLRDSGLWFPVDPGADASLCGMAATGASGTNAVRYGTMRDNVLNLEVVLPDGRLLHTAGRGRHFRFGFWPEIPHHTAWYSPCVSLGRRKSAAGYNLTGLFVGSEGTLGLITATTLRLHPAPEATVAATCAFPSVQAAVDSTVHILQAAVPVARIEFLDEVMMDACNRYSKLNCLVAPTLFLEFHGSQQALEEQLQRTEEIVQQNGASDFSWAKEAEERSRLWTARHNAWYAALATRPGCKGYSTDVCVPISRLPEIVVQTKEDLNASGLTGSIVGHVGDGNFHCILLVNPDDAEELGRVKAFAEQLGRRALALHGTCTGEHGIGMGKRQLLQEEVGAVGVETMRQLKAVLDPQGLMNPGKVL

SEQ ID NO: 3558 - protein, 967 aa, Homo sapiens
MAKGFYISKSLGILGILLGVAAVCTIIALSVVYSQEKNKNANSSPVASTTPSASATTNPASATTLDQSKAWNRYRLPNTLKPDSYRVTLRPYLTPNDRGLYVFKGSSTVRFTCKEATDVIIIHSKKLNYTLSQGHRVVLRGVGGSQPPDIDKTELVEPTEYLVVHLKGSLVKDSQYEMDSEFEGELADDLAGFYRSEYMEGNVRKVVATTQMQAADARKSFPCFDEPAMKAEFNITLIHPKDLTALSNMLPKGPSTPLPEDPNWNVTEFHTTPKMSTYLLAFIVSEFDYVEKQASNGVLIRIWARPSAIAAGHGDYALNVTGPILNFFAGHYDTPYPLPKSDQIGLPDFNAGAMENWGLVTYRENSLLFDPLSSSSSNKERVVTVIAHELAHQWFGNLVTIEWWNDLWLNEGFASYVEYLGADYAEPTWNLKDLMVLNDVYRVMAVDALASSHPLSTPASEINTPAQISELFDAISYSKGASVLRMLSSFLSEDVFKQGLASYLHTFAYQNTIYLNLWDHLQEAVNNRSIQLPTTVRDIMNRWTLQMGFPVITVDTSTGTLSQEHFLLDPDSNVTRPSEFNYVWIVPITSIRDGRQQQDYWLIDVRAQNDLFSTSGNEWVLLNLNVTGYYRVNYDEENWRKIQTQLQRDHSAIPVINRAQIINDAFNLASAHKVPVTLALNNTLFLIEERQYMPWEAALSSLSYFKLMFDRSEVYGPMKNYLKKQVTPLFIHFRNNTNNWREIPENLMDQYSEVNAISTACSNGVPECEEMVSGLFKQWMENPNNNPIHPNLRSTVYCNAIAQGGEEEWDFAWEQFRNATLVNEADKLRAALACSKELWILNRYLSYTLNPDLIRKQDATSTIISITNNVIGQGLVWDFVQSNWKKLFNDYGGGSFSFSNLIQAVTRRFSTEYELQQLEQFKKDNEETGFGSGTRALEQALEKTKANIKWVKENKEVVLQWFTENSK

SEQ ID NO: 3559 - protein, 649 aa, Homo sapiens
MAPGEKIKAKIKKNLPVTGPQAPTIKELMRWYCLNTNTHGCRRIVVSRGRLRRLLWIGFTLTAVALILWQCALLVFSFYTVSVSIKVHFRKLDFPAVTICNINPYKYSTVRHLLADLEQETREALKSLYGFPESRKRREAESWNSVSEGKQPRFSHRIPLLIFDQDEKGKARDFFTGRKRKVGGSIIHKASNVMHIESKQVVGFQLCSNDTSDCATYTFSSGINAIQEWYKLHYMNIMAQVPLEKKINMSYSAEELLVTCFFDGVSCDARNFTLFHHPMHGNCYTFNNRENETILSTSMGGSEYGLQVILYINEEEYNPFLVSSTGAKVIIHRQDEYPFVEDVGTEIETAMVTSIGMHLTESFKLSEPYSQCTEDGSDVPIRNIYNAAYSLQICLHSCFQTKMVEKCGCAQYSQPLPPAANYCNYQQHPNWMYCYYQLHRAFVQEELGCQSVCKEACSFKEWTLTTSLAQWPSVVSEKWLLPVLTWDQGRQVNKKLNKTDLAKLLIFYKDLNQRSIMESPANSIEMLLSNFGGQLGLWMSCSVVCVIEIIEVFFIDFFSIIARRQWQKAKEWWAWKQAPPCPEAPRSPQGQDNPALDIDDDLPTFNSALHLPPALGTQVPGTPPPKYNTLRLERAFSNQLTDTQMLDEL

SEQ ID NO: 3560 - protein, 333 aa, Homo sapiens
MFKLCSNKMVSQEGSEVELLVSPGARSEHGRYLQDPIVSIDLSEWLRIIEFLLQGLKVYGSVYHINHGNPFNMEVLVDSWPEYQMVIIRPQKQEMTDDMDSYTNVYRMFSKEPQKSEEVLKNCEIVNWKQRLQIQGLQESLGEGIRVATFSKSVKVEHSRALLLVTEDILKLNASSKSKLGSWAETGHPDDEFESETPNFKYAQLDVSYSGLVNDNWKRGKNERSLHYIKRCIEDLPAACMLGPEGVPVSWVTMDPSCEVGMAYSMEKYRRTGNMARVMVRYMKYLRQKNIPFYISVLEENEDSRRFVGQFGFFEASCEWHQWTCYPQNLVPF

SEQ ID NO: 3561 - protein, 399 aa, Homo sapiens
MAEAMDLGKDPNGPTHSSTLFVRDDGSSMSFYVRPSPAKRRLSTLILHGGGTVCRVQEPGAVLLAQPGEALAEASGDFISTQYILDCVERNERLELEAYRLGPASAADTGSEAKPGALAEGAAEPEPQRHAGRIAFTDADDVAILTYVKENARSPSSVTGNALWKAMEKSSLTQHSWQSLKDRYLKHLRGQEHKYLLGDAPVSPSSQKLKRKAEEDPEAADSGEPQNKRTPDLPEEEYVKEEIQENEEAVKKMLVEATREFEEVVVDESPPDFEIHITMCDDDPPTPEEDSETQPDEEEEEEEEKVSQPEVGAAIKIIRQLMEKFNLDLSTVTQAFLKNSGELEATSAFLASGQRADGYPIWSRQDDIDLQKDDEDTREALVKKFGAQNVARRIEFRKK

SEQ ID NO: 3562 - protein, 603 aa, Homo sapiens
MSAAVTAGKLARAPADPGKAGVPGVAAPGAPAAAPPAKEIPEVLVDPRSRRRYVRGRFLGKGGFAKCFEISDADTKEVFAGKIVPKSLLLKPHQREKMSMEISIHRSLAHQHVVGFHGFFEDNDFVFVVLELCRRRSLLELHKRRKALTEPEARYYLRQIVLGCQYLHRNRVIHRDLKLGNLFLNEDLEVKIGDFGLATKVEYDGERKKTLCGTPNYIAPEVLSKKGHSFEVDVWSIGCIMYTLLVGKPPFETSCLKETYLRIKKNEYSIPKHINPVAASLIQKMLQTDPTARPTINELLNDEFFTSGYIPARLPITCLTIPPRFSIAPSSLDPSNRKPLTVLNKGLENPLPERPREKEEPVVRETGEVVDCHLSDMLQQLHSVNASKPSERGLVRQEEAEDPACIPIFWVSKWVDYSDKYGLGYQLCDNSVGVLFNDSTRLILYNDGDSLQYIERDGTESYLTVSSHPNSLMKKITLLKYFRNYMSEHLLKAGANITPREGDELARLPYLRTWFRTRSAIILHLSNGSVQINFFQDHTKLILCPLMAAVTYIDEKRDFRTYRLSLLEEYGCCKELASRLRYARTMVDKLLSSRSASNRLKAS

SEQ ID NO: 3563 - protein, 404 aa, Homo sapiens
MSVKPSWGPGPSEGVTAVPTSDLGEIHNWTELLDLFNHTLSECHVELSQSTKRVVLFALYLAMFVVGLVENLLVICVNWRGSGRAGLMNLYILNMAIADLGIVLSLPVWMLEVTLDYTWLWGSFSCRFTHYFYFVNMYSSIFFLVCLSVDRYVTLTSASPSWQRYQHRVRRAMCAGIWVLSAIIPLPEVVHIQLVEGPEPMCLFMAPFETYSTWALAVALSTTILGFLLPFPLITVFNVLTACRLRQPGQPKSRRHCLLLCAYVAVFVMCWLPYHVTLLLLTLHGTHISLHCHLVHLLYFFYDVIDCFSMLHCVINPILYNFLSPHFRGRLLNAVVHYLPKDQTKAGTCASSSSCSTQHSIIITKGDSQPAAAAPHPEPSLSFQAHHLLPNTSPISPTQPLTPS

SEQ ID NO: 3564 - protein, 712 aa, Homo sapiens
MGMRIKLQSTNHPNNLLKELNKCRLSETMCDVTIVVGSRSFPAHKAVLACAAGYFQNLFLNTGLDAARTYVVDFITPANFEKVLSFVYTSELFTDLINVGVIYEVAERLGMEDLLQACHSTFPDLESTARAKPLTSTSESHSGTLSCPSAEPAHPLGELRGGGDYLGADRNYVLPSDAGGSYKEEEKNVASDANHSLHLPQPPPPPPKTEDHDTPAPFTSIPSMMTQPLLGTVSTGIQTSTSSCQPYKVQSNGDFSKNSFLTPDNAVDITTGTNSCLSNSEHSKDPGFGQMDELQLEDLGDDDLQFEDPAEDIGTTEEVIELSDDSEDELAFGENDNRENKAMPCQVCKKVLEPNIQLIRQHARDHVDLLTGNCKVCETHFQDRNSRVTHVLSHIGIFLFSCDMCETKFFTQWQLTLHRRDGIFENNIIVHPNDPLPGKLGLFSGAASPELKCAACGKVLAKDFHVVRGHILDHLNLKGQACSVCDQRHLNLCSLMWHTLSHLGISVFSCSVCANSFVDWHLLEKHMAVHQSLEDALFHCRLCSQSFKSEAAYRYHVSQHKCNSGLDARPGFGLQHPALQKRKLPAEEFLGEELALQGQPGNSKYSCKVCGKRFAHTSEFNYHRRIHTGEKPYQCKVCHKFFRGRSTIKCHLKTHSGALMYRCTVCGHYSSTLNLMSKHVGVHKGSLPPDFTIEQTFMYIIHSKEADKNPDS

SEQ ID NO: 3565 - protein, 323 aa, Homo sapiens
MGLFDRGVQMLLTTVGAFAAFSLMTIAVGTDYWLYSRGVCKTKSVSENETSKKNEEVMTHSGLWRTCCLEGNFKGLCKQIDHFPEDADYEADTAEYFLRAVRASSIFPILSVILLFMGGLCIAASEFYKTRHNIILSAGIFFVSAGLSNIIGIIVYISANAGDPSKSDSKKNSYSYGWSFYFGALSFIIAEMVGVLAVHMFIDRHKQLRATARATDYLQASAITRIPSYRYRYQRRSRSSSRSTEPSHSRDASPVGIKGFNTLPSTEISMYTLSRDPLKAATTPTATYNSDRDNSFLQVHNCIQKENKDSLHSNTANRRTTPV

SEQ ID NO: 3566 - protein, 633 aa, Homo sapiens
MPSCGACTCGAAAVRLITSSLASAQRGISGGRIHMSVLGRLGTFETQILQRAPLRSFTETPAYFASKDGISKDGSGDGNKKSASEGSSKKSGSGNSGKGGNQLRCPKCGDLCTHVETFVSSTRFVKCEKCHHFFVVLSEADSKKSIIKEPESAAEAVKLAFQQKPPPPPKKIYNYLDKYVVGQSFAKKVLSVAVYNHYKRIYNNIPANLRQQAEVEKQTSLTPRELEIRRREDEYRFTKLLQIAGISPHGNALGASMQQQVNQQIPQEKRGGEVLDSSHDDIKLEKSNILLLGPTGSGKTLLAQTLAKCLDVPFAICDCTTLTQAGYVGEDIESVIAKLLQDANYNVEKAQQGIVFLDEVDKIGSVPGIHQLRDVGGEGVQQGLLKLLEGTIVNVPEKNSRKLRGETVQVDTTNILFVASGAFNGLDRIISRRKNEKYLGFGTPSNLGKGRRAAAAADLANRSGESNTHQDIEEKDRLLRHVEARDLIEFGMIPEFVGRLPVVVPLHSLDEKTLVQILTEPRNAVIPQYQALFSMDKCELNVTEDALKAIARLALERKTGARGLRSIMEKLLLEPMFEVPNSDIVCVEVDKEVVEGKKEPGYIRAPTKESSEEEYDSGVEEEGWPRQADAANS

SEQ ID NO: 3567 - protein, 1043 aa, Homo sapiens
MPLLEGSVGVEDLVLLEPLVEESLLKNLQLRYENKEIYTYIGNVVISVNPYQQLPIYGPEFIAKYQDYTFYELKPHIYALANVAYQSLRDRDRDQCILITGESGSGKTEASKLVMSYVAAVCGKGEQVNSVKEQLLQSNPVLEAFGNAKTIRNNNSSRFGKYMDIEFDFKGSPLGGVITNYLLEKSRLVKQLKGERNFHIFYQLLAGADEQLLKALKLERDTTGYAYLNHEVSRVDGMDDASSFRAVQSAMAVIGFSEEEIRQVLEVTSMVLKLGNVLVADEFQASGIPASGIRDGRGVREIGEMVGLNSEEVERALCSRTMETAKEKVVTALNVMQAQYARDALAKNIYSRLFDWIVNRINESIKVGIGEKKKVMGVLDIYGFEILEDNSFEQFVINYCNEKLQQVFIEMTLKEEQEEYKREGIPWTKVDYFDNGIICKLIEHNQRGILAMLDEECLRPGVVSDSTFLAKLNQLFSKHGHYESKVTQNAQRQYDHTMGLSCFRICHYAGKVTYNVTSFIDKNNDLLFRDLLQAMWKAQHPLLRSLFPEGNPKQASLKRPPTAGAQFKSSVAILMKNLYSKSPNYIRCIKPNEHQQRGQFSSDLVATQARYLGLLENVRVRRAGYAHRQGYGPFLERYRLLSRSTWPHWNGGDREGVEKVLGELSMSSGELAFGKTKIFIRSPKTLFYLEEQRRLRLQQLATLIQKIYRGWRCRTHYQLMRKSQILISSWFRGNMQKKCYGKIKASVLLIQAFVRGWKARKNYRKYFRSEAALTLADFIYKSMVQKFLLGLKNNLPSTNVLDKTWPAAPYKCLSTANQELQQLFYQWKCKRFRDQLSPKQVEILREKLCASELFKGKKASYPQSVPIPFCGDYIGLQGNPKLQKLKGGEEGPVLMAEAVKKVNRGNGKTSSRILLLTKGHVILTDTKKSQAKIVIGLDNVAGVSVTSLKDGLFSLHLSEMSSVGSKGDFLLVSEHVIELLTKMYRAVLDATQRQLTVTVTEKFSVRFKENSVAVKVVQGPAGGDNSKLRYKKKGSHCLEVTVQ

SEQ ID NO: 3568 - protein, 847 aa, Homo sapiens
MSLWGLVSKMPPEKVQRLYVDFPQHLRHLLGDWLESQPWEFLVGSDAFCCNLASALLSDTVQHLQASVGEQGEGSTILQHISTLESIYQRDPLKLVATFRQILQGEKKAVMEQFRHLPMPFHWKQEELKFKTGLRRLQHRVGEIHLLREALQKGAEAGQVSLHSLIETPANGTGPSEALAMLLQETTGELEAAKALVLKRIQIWKRQQQLAGNGAPFEESLAPLQERCESLVDIYSQLQQEVGAAGGELEPKTRASLTGRLDEVLRTLVTSCFLVEKQPPQVLKTQTKFQAGVRFLLGLRFLGAPAKPPLVRADMVTEKQARELSVPQGPGAGAESTGEIINNTVPLENSIPGNCCSALFKNLLLKKIKRCERKGTESVTEEKCAVLFSASFTLGPGKLPIQLQALSLPLVVIVHGNQDNNAKATILWDNAFSEMDRVPFVVAERVPWEKMCETLNLKFMAEVGTNRGLLPEHFLFLAQKIFNDNSLSMEAFQHRSVSWSQFNKEILLGRGFTFWQWFDGVLDLTKRCLRSYWSDRLIIGFISKQYVTSLLLNEPDGTFLLRFSDSEIGGITIAHVIRGQDGSPQIENIQPFSAKDLSIRSLGDRIRDLAQLKNLYPKKPKDEAFRSHYKPEQMGKDGRGYVPATIKMTVERDQPLPTPELQMPTMVPSYDLGMAPDSSMSMQLGPDMVPQVYPPHSHSIPPYQGLSPEESVNVLSAFQEPHLQMPPSLGQMSLPFDQPHPQGLLPCQPQEHAVSSPDPLLCSDVTMVEDSCLSQPVTAFPQGTWIGEDIFPPLLPPTEQDLTKLLLEGQGESGGGSLGAQPLLQPSHYGQSGISMSHMDLRANPSW

SEQ ID NO: 3569 - protein, 770 aa, Homo sapiens
MFRYESLEDCPLDEDEDAFQGLGEEDEEIDQFNDDTFGSGAVDDDWQEAHERLAELEEKLPVAVNEQTGNGERDEMDLLGDHEENLAERLSKMVIENELEDPAIMRAVQTRPVLQPQPGSLNSSIWDGSEVLRRIRGPLLAQEMPTVSVLEYALPQRPPQGPEDDRDLSERALPRRSTSPIIGSPPVRAVPIGTPPKQMAVPSFTQQILCPKPVHVRPPMPPRYPAPYGERMSPNQLCSVPNSSLLGHPFPPSVPPVLSPLQRAQLLGGAQLQPGRMSPSQFARVPGFVGSPLAAMNPKLLQGRVGQMLPPAPGFRAFFSAPPSATPPPQQHPPGPGPHLQNLRSQAPMFRPDTTHLHPQHRRLLHQRQQQNRSQHRNLNGAGDRGSHRSSHQDHLRKDPYANLMLQREKDWVSKIQMMQLQSTDPYLDDFYYQNYFEKLEKLSAAEEIQGDGPKKERTKLITPQVAKLEHAYKPVQFEGSLGKLTVSSVNNPRKMIDAVVTSRSEDDETKEKQVRDKRRKTLVIIEKTYSLLLDVEDYERRYLLSLEEERPALMDDRKHKICSMYDNLRGKLPGQERPSDDHFVQIMCIRKGKRMVARILPFLSTEQAADILMTTARNLPFLIKKDAQDEVLPCLLSPFSLLLYHLPSVSITSLLRQLMNLPQSAATPALSNPHLTAVLQNKFGLSLLLILLSRGEDLQSSDPATESTQNNQWTEVMFMATRELLRIPQAALAKPISIPTNLVSLFSRYVDRQKLNLLETKLQLVQGIR

SEQ ID NO: 3570 - protein, 841 aa, Homo sapiens
MNLLYRKTKLEWRQHKEEEAKRSSSKEVAPAGSAGPAAGQGPGVRVRDIASLRRSLRMGFMTMPASQEHTPHPCRSAMAPRSLSCHSVGSMDSVGGGPGGASGGLTEDSSTRRPPAKPRRHPSTKLSMVGPGSGAETPPSKKAGSQKPTPEGRESSRKVPPQKPRRSPNTQLSVSFDESCPPGPSPRGGNLPLQRLTRGSRVAGDPDVGAQEEPVYIEMVGDVFRGGGRSGGGLAGPPLGGGGPTPPAGADSDSEESEAIYEEMKYPLPEEAGEGRANGPPPLTATSPPQQPHALPPHAHRRPASALPSRRDGTPTKTTPCEIPPPFPNLLQHRPPLLAFPQAKSASRTPGDGVSRLPVLCHSKEPAGSTPAPQVPARERETPPPPPPPPAANLLLLGPSGRARSHSTPLPPQGSGQPRGERELPNSHSMICPKAAGAPAAPPAPAALLPGPPKDKAVSYTMVYSAVKVTTHSVLPAGPPLGAGEPKTEKEISVLHGMLCTSSRPPVPGKTSPHGGAMGAAAGVLHHRGCLASPHSLPDPTVGPLTPLWTYPATAAGLKRPPAYESLKAGGVLNKGCGVGAPSPMVKIQLQEQGTDGGAFASISCAHVIASAGTPEEEEEEVGAATFGAGWALQRKVLYGGRKAKELDKVEDGARAWNGSAEGPGKVEREDRGPGTSGIPVRSQGAEGLLARIHHGDRGGSRTALPIPCQTFPACHRNGDFTGGYRLGRSASTSGVRQVVLHTPRPCSQPRDALSQPHPALPLPLPLPPQPARERDGKLLEVIERKRCVCKEIKARHRPDRGLCKQESMPILPSWRRGPEPRKSGTPPCRRQHTVLWDTAI

SEQ ID NO: 3571 - protein, 395 aa, Homo sapiens
MSGGKKKSSFQITSVTTDYEGPGSPGASDPPTPQPPTGPPPRLPNGEPSPDPGGKGTPRNGSPPPGAPSSRFRVVKLPHGLGEPYRRGRWTCVDVYERDLEPHSFGGLLEGIRGASGGAGGRSLDSRLELASLGLGAPTPPSGLSQGPTSWLRPPPTSPGPQARSFTGGLGQLVVPSKAKAEKPPLSASSPQQRPPEPETGESAGTSRAATPLPSLRVEAEAGGSGARTPPLSRRKAVDMRLRMELGAPEEMGQVPPLDSRPSSPALYFTHDASLVHKSPDPFGAVAAQKFSLAHSMLAISGHLDSDDDSGSGSLVGIDNKIEQAMDLVKSHLMFAVREEVEVLKEQIRELAERNAALEQENGLLRALASPEQLAQLPSSGVPRLGPPAPNGPSV

SEQ ID NO: 3572 - protein, 679 aa, Homo sapiens
MESTSQDRRATHVITIKPNETVLTAFPYRPHSSLLDFLKGEPRVLGATQILLALIIVGFGTIFALNYIGFSQRLPLVVLTGYPFWGALIFILTGYLTVTDKKSKLLGQGVTGMNVISSLVAITGITFTILSYRHQDKYCQMPSFEEICVFSRTLFIVLFFLPSDVTQNSEQPAPEENDQLQFVLQEEFSSDDSTTNAQSVIFGGYAFFKLTLSRSPLVSQPGNKGREFVPDEQKQSILPSPKFSEEEIEPLPPTLEKKPSENMSIQLDSTFKQMKDEDLQSAIVQPSQMQTKLLQDQAASLQVFPSHSALKLEDISPEDLPSQALPVEGLSEQTMPSKSTSSHVKQSSNLTANDLPPQGILSQDTSSQDMLFHDMTSQDMQSLDMLSQDTPSHAMPPQDIPSQDMLSQALSAHAILPEASTSHIVQFPEIQHLLQQPPDLQPENTEPQNQQILQMSYQDIRSEVMEETKEWKSEEELHRRKSSRRHSLNQQTKALQYLRRHSLDVQAKGQKSSKRHSLDQQSKGWQSPKQKSLDQQIKDWLSPKRHSVDKQAQLNQTKEQLPDQQAEDQQAKGEQYPEGQSKDGQVKDQQTDKEQNSKKQTQDQQTEDQPAQEKKSPKGQFQNVQAEGQQAQVEKVPKLLCQDSESQIQQYQFWQFHKGNLQAGQPRTVNLLAKNPLTG

SEQ ID NO: 3573 - protein, 250 aa, Homo sapiens
MNSMTSAVPVANSVLVVAPHNGYPVTPGIMSHVPLYPNSQPQVHLVPGNPPSLVSNVNGQPVQKALKEGKTLGAIQIIIGLAHIGLGSIMATVLVGEYLSISFYGGFPFWGGLWFIISGSLSVAAENQPYSYCLLSGSLGLNIVSAICSAVGVILFITDLSIPHPYAYPDYYPYAWGVNPGMAISGVLLVFCLLEFGIACASSHFGCQLVCCQSSNVSVIYPNIYAANPVITPEPVTSPPSYSSEIQANK

SEQ ID NO: 3574 - protein, 829 aa, Homo sapiens
MTENKTVSSSSTRDDQTNIGLTCQEVKALREKAWSRTNEGNAMSQSLVLYGASKENSEGFHESKMTNTEGVNKGIYFSYPCRRHSCAVVNIPAPCVNKMISHIQDVESKIQEHLKRFETSFEEWSRTSSTKDLKEDWSVTTPVKEVKPGEKRDEKCPELKQEMETLLSEAIRLIKSLETDRADAEEALKQQRSRKNMINMKIDSWSVWKLQELPLAVQKEHEAYLSDVIELQWHLEDKANQLQHFEKQKTELEEANAKIQADIDYMNEHGPLLDSKQNQELQDLKNHYKKKMEVMDLHRKVNEELEEALEACENARLKAQQIKEEIDKDIYQDEKTIEAYKREIYQLNSLFDHYSSSVINVNTNIEEKEEEVTEAIRETKSSKNELHSLSKMLEDLRRVYDQLTWKQKSHENQYLEAVNDFYAAKKTWDIELSDVAKDFSAISLACTKLTEDNKKLEIDINKITVKTNESIRKKSKYESEIKYLTIMKLKNDKHLKNIYKEAYRIGTLFHLTKHKTDEMEDKIAEVRRKFKGREEFLKKLTQGEVAAGMVLQKKLYSIYEVQALERKELIKNRAICAMSLAELQEPLLQLEDEAERIRSLDKEHSVSKRSAIFKDLEATKSKTMIFYAKINELNEELKAKEEEKKSFDQTLEILKNKFITMRFKREHAQTVFDHYMQEKKDCEERIFEEDQRFRVLLAVRQKTLQDTQKIIADSLEENLRLAQEYQQLQITFLKEKDNYFNIYDKQLSLDTSIRDKKQLCQLQRRMHTLWQEHFKLVVLFSQMRLANFQTDSQESIQKILAVQEESSNLMQHILGFFQTLTDGTCENDG

SEQ ID NO: 3575 - protein, 2803 aa, Homo sapiens
MDGVAEFSEYVSETVDVPSPFDLLEPPTSGGFLKLSKPCCYIFPGGRGDSALFAVNGFNILVDGGSDRKSCFWKLVRHLDRIDSVLLTHIGADNLPGINGLLQRKVAELEEEQSQGSSSYSDWVKNLISPELGVVFFNVPEKLRLPDASRKAKRSIEEACLTLQHLNRLGIQAEPLYRVVSNTIEPLTLFHKMGVGRLDMYVLNPVKDSKEMQFLMQKWAGNSKAKTGIVLPNGKEAEISVPYLTSITALVVWLPANPTEKIVRVLFPGNAPQNKILEGLEKLRHLDFLRYPVATQKDLASGAVPTNLKPSKIKQRADSKESLKATTKTAVSKLAKREEVVEEGAKEARSELAKELAKTEKKAKESSEKPPEKPAKPERVKTESSEALKAEKRKLIKDKVGKKHLKEKISKLEEKKDKEKKEIKKERKELKKDEGRKEEKKDAKKEEKRKDTKPELKKISKPDLKPFTPEVRKTLYKAKVPGRVKIDRSRAIRGEKELSSEPQTPPAQKGTVPLPTISGHRELVLSSPEDLTQDFEEMKREERALLAEQRDTGLGDKPFPLDTAEEGPPSTAIQGTPPSVPGLGQEEHVMKEKELVPEVPEEQGSKDRGLDSGAETEEEKDTWEEKKQREAERLPDRTEAREESEPEVKEDVIEKAELEEMEEVHPSDEEEEDATKAEGFYQKHMQEPLKVTPRSREAFGGRELGLQGKAPEKETSLFLSSLTTPAGATEHVSYIQDETIPGYSETEQTISDEEIHDEPEERPAPPRFHTSTYDLPGPEGAGPFEASQPADSAVPATSGKVYGTPETELTYPTNIVAAPLAEEEHVSSATSITECDKLSSFATSVAEDQSVASLTAPQTEETGKSSLLLDTVTSIPSSRTEATQGLDYVPSAGTISPTSSLEEDKGFKSPPCEDFSVTGESEKRGEIIGKGLSGERAVEEEEEETANVEMSEKLCSQYGTPVFSAPGHALHPGEPALGEAEERCLSPDDSTVKMASPPPSGPPSATHTPFHQSPVEEKSEPQDFQEADSWGDTKRTPGVGKEDAAEETVKPGPEEGTLEKEEKVPPPRSPQAQEAPVNIDEGLTGCTIQLLPAQDKAIVFEIMEAGEPTGPILGAEALPGGLRTLPQEPGKPQKDEVLRYPDRSLSPEDAESLSVLSVPSPDTANQEPTPKSPCGLTEQYLHKDRWPEVSPEDTQSLSLSEESPSKETSLDVSSKQLSPESLGTLQFGELNLGKEEMGHLMQAEDTSHHTAPMSVPEPHAATASPPTDGTTRYSAQTDITDDSLDRKSPASSFSHSTPSGNGKYLPGAITSPDEHILTPDSSFSKSPESLPGPALEDIAIKWEDKVPGLKDRTSEQKKEPEPKDEVLQQKDKTLEHKEVVEPKDTAIYQKDEALHVKNEAVKQQDKALEQKGRDLEQKDTALEQKDKALEPKDKDLEEKDKALEQKDKIPEEKDKALEQKDTALEQKDKALEPKDKDLEQKDRVLEQKEKIPEEKDKALDQKVRSVEHKAPEDTVAEMKDRDLEQTDKAPEQKHQAQEQKDKVSEKKDQALEQKYWALGQKDEALEQNIQALEENHQTQEQESLVQEDKTRKPKMLEEKSPEKVKAMEEKLEALLEKTKALGLEESLVQEGRAREQEEKYWRGQDVVQEWQETSPTREEPAGEQKELAPAWEDTSPEQDNRYWRGREDVALEQDTYWRELSCERKVWFPHELDGQGARPHYTEERESTFLDEGPDDEQEVPLREHATRSPWASDFKDFQESSPQKGLEVERWLAESPVGLPPEEEDKLTRSPFEIISPPASPPEMVGQRVPSAPGQESPIPDPKLMPHMKNEPTTPSWLADIPPWVPKDRPLPPAPLSPAPGPPTPAPESHTPAPFSWGTAEYDSVVAAVQEGAAELEGGPYSPLGKDYRKAEGEREEEGRAEAPDKSSHSSKVPEASKSHATTEPEQTEPEQREPTPYPDERSFQYADIYEQMMLTGLGPACPTREPPLGAAGDWPPCLSTKEAAAGRNTSAEKELSSPISPKSLQSDTPTFSYAALAGPTVPPRPEPGPSMEPSLTPPAVPPRAPILSKGPSPPLNGNILSCSPDRRSPSPKESGRSHWDDSTSDSELEKGAREQPEKEAQSPSPPHPIPMGSPTLWPETEAHVSPPLDSHLGPARPSLDFPASAFGFSSLQPAPPQLPSPAEPRSAPCGSLAFSGDRALALAPGPPTRTRHDEYLEVTKAPSLDSSLPQLPSPSSPGAPLLSNLPRPASPALSEGSSSEATTPVISSVAERFSPSLEAAEQESGELDPGMEPAAHSLWDLTPLSPAPPASLDLALAPAPSLPGDMGDGILPCHLECSEAATEKPSPFQVPSEDCAANGPTETSPNPPGPAPAKAENEEAAACPAWERGAWPEGAERSSRPDTLLSPEQPVCPAGGSGGPPSSASPEVEAGPQGCATEPRPHRGELSPSFLNPPLPPSIDDRDLSTEEVRLVGRGGRRRVGGPGTTGGPCPVTDETPPTSASDSGSSQSDSDVPPETEECPSITAEAALDSDEDGDFLPVDKAGGVSGTHHPRPGHDPPPLPQPDPRPSPPRPDVCMADPEGLSSESGRVERLREKEKVQGRVGRRAPGKAKPASPARRLDLRGKRSPTPGKGPADRASRAPPRPRSTTSQVTPAEEKDGHSPMSKGLVNGLKAGPMALSSKGSSGAPVYVDLAYIPNHCSGKTADLDFFRRVRASYYVVSGNDPANGEPSRAVLDALLEGKAQWGENLQVTLIPTHDTEVTREWYQQTHEQQQQLNVLVLASSSTVVMQDESFPACKIEF

SEQ ID NO: 3576 - protein, 441 aa, Homo sapiens
MLLPGRARQPPTPQPVQHPGLRRQVEPPGQLLRLFYCTVLVCSKEISALTDFSGYLTKLLQNHTTYACDGDYLNLQCPRHSTISVQSAFYGQDYQMCSSQKPASQREDSLTCVAATTFQKVLDECQNQRACHLLVNSRVFGPDLCPGSSKYLLVSFKCQPNELKNKTVCEDQELKLHCHESKFLNIYSATYGRRTQERDICSSKAERLPPFDCLSYSALQVLSRRCYGKQRCKIIVNNHHFGSPCLPGVKKYLTVTYACVPKNILTAIDPAIANLKPSLKQKDGEYGINFDPSGSKVLRKDGILVSNSLAAFAYIRAHPERAALLFVSSVCIGLALTLCALVIRESCAKDFRDLQLGREQLVPGSDKVEEDSEDEEEEEDPSESDFPGELSGFCRTSYPIYSSIEAAELAERIERREQIIQEIWMNSGLDTSLPRNMGQFY

SEQ ID NO: 3577 - protein, 2303 aa, Homo sapiens
MATNIEQIFRSFVVSKFREIQQELSSGRNEGQLNGETNTPIEGNQAGDAAASARSLPNEEIVQKIEEVLSGVLDTELRYKPDLKEGSRKSRCVSVQTDPTDEIPTKKSKKHKKHKNKKKKKKKEKEKKYKRQPEESESKTKSHDDGNIDLESDSFLKFDSEPSAVALELPTRAFGPSETNESPAVVLEPPVVSMEVSEPHILETLKPATKTAELSVVSTSVISEQSEQSVAVMPEPSMTKILDSFAAAPVPTTTLVLKSSEPVVTMSVEYQMKSVLKSVESTSPEPSKIMLVEPPVAKVLEPSETLVVSSETPTEVYPEPSTSTTMDFPESSAIEALRLPEQPVDVPSEIADSSMTRPQELPELPKTTALELQESSVASAMELPGPPATSMPELQGPPVTPVLELPGPSATPVPELPGPLSTPVPELPGPPATAVPELPGPSVTPVPQLSQELPGLPAPSMGLEPPQEVPEPPVMAQELPGLPLVTAAVELPEQPAVTVAMELTEQPVTTTELEQPVGMTTVEHPGHPEVTTATGLLGQPEATMVLELPGQPVATTALELPGQPSVTGVPELPGLPSATRALELSGQPVATGALELPGPLMAAGALEFSGQSGAAGALELLGQPLATGVLELPGQPGAPELPGQPVATVALEISVQSVVTTSELSTMTVSQSLEVPSTTALESYNTVAQELPTTLVGETSVTVGVDPLMAPESHILASNTMETHILASNTMDSQMLASNTMDSQMLASNTMDSQMLASSTMDSQMLATSSMDSQMLATSSMDSQMLATSTMDSQMLATSSMDSQMLATSSMDSQMLATSSMDSQMLATSSMDSQMLATSTMDSQMLATSTMDSQMLATSSMDSQMLASGTMDSQMLASGTMDAQMLASGTMDAQMLASSTQDSAMLGSKSPDPYRLAQDPYRLAQDPYRLGHDPYRLGHDAYRLGQDPYRLGHDPYRLTPDPYRMSPRPYRIAPRSYRIAPRPYRLAPRPLMLASRRSMMMSYAAERSMMSSYERSMMSYERSMMSPMAERSMMSAYERSMMSAYERSMMSPMAERSMMSAYERSMMSAYERSMMSPMADRSMMSMGADRSMMSSYSAADRSMMSSYSAADRSMMSSYTADRSMMSMAADSYTDSYTDTYTEAYMVPPLPPEEPPTMPPLPPEEPPMTPPLPPEEPPEGPALPTEQSALTAENTWPTEVPSSPSEESVSQPEPPVSQSEISEPSAVPTDYSVSASDPSVLVSEAAVTVPEPPPEPESSITLTPVESAVVAEEHEVVPERPVTCMVSETPAMSAEPTVLASEPPVMSETAETFDSMRASGHVASEVSTSLLVPAVTTPVLAESILEPPAMAAPESSAMAVLESSAVTVLESSTVTVLESSTVTVLEPSVVTVPEPPVVAEPDYVTIPVPVVSALEPSVPVLEPAVSVLQPSMIVSEPSVSVQESTVTVSEPAVTVSEQTQVIPTEVAIESTPMILESSIMSSHVMKGINLSSGDQNLAPEIGMQEIALHSGEEPHAEEHLKGDFYESEHGINIDLNINNHLIAKEMEHNTVCAAGTSPVGEIGEEKILPTSETKQRTVLDTYPGVSEADAGETLSSTGPFALEPDATGTSKGIEFTTASTLSLVNKYDVDLSLTTQDTEHDMVISTSPSGGSEADIEGPLPAKDIHLDLPSNNNLVSKDTEEPLPVKESDQTLAALLSPKESSGGEKEVPPPPKETLPDSGFSANIEDINEADLVRPLLPKDMERLTSLRAGIEGPLLASDVGRDRSAASPVVSSMPERASESSSEEKDDYEIFVKVKDTHEKSKKNKNRDKGEKEKKRDSSLRSRSKRSKSSEHKSRKRTSESRSRARKRSSKSKSHRSQTRSRSRSRRRRRSSRSRSKSRGRRSVSKEKRKRSPKHRSKSRERKRKRSSSRDNRKTVRARSRTPSRRSRSHTPSRRRRSRSVGRRRSFSISPSRRSRTPSRRSRTPSRRSRTPSRRSRTPSRRSRTPSRRSRTPSRRRRSRSVVRRRSFSISPVRLRRSRTPLRRRFSRSPIRRKRSRSSERGRSPKRLTDLDKAQLLEIAKANAAAMCAKAGVPLPPNLKPAPPPTIEEKVAKKSGGATIEELTEKCKQIAQSKEDDDVIVNKPHVSDEEEEEPPFYHHPFKLSEPKPIFFNLNIAAAKPTPPKSQVTLTKEFPVSSGSQHRKKEADSVYGEWVPVEKNGEENKDDDNVFSSNLPSEGRVKRQGRVRRQMKQPAASHLTVTRCNSLCGTKPQSEKHRIAENSVITSLPNIGPSLHLWEGSPRYNYLASRFASRLYSSRFWW

SEQ ID NO: 3578 - protein, 390 aa, Homo sapiens
MESETEPEPVTLLVKSPNQRHRDLELSGDRGWSVGHLKAHLSRVYPERPRPEDQRLIYSGKLLLDHQCLRDLLPKEKRHVLHLVCNVKSPSKMPEINAKVAESTEEPAGSNRGQYPEDSSSDGLRQREVLRNLSSPGWENISRPEAAQQAFQGLGPGFSGYTPYGWLQLSWFQQIYARQYYMQYLAATAASGAFVPPPSAQEIPVVSAPAPAPIHNQFPAENQPANQNAAPQVVVNPGANQNLRMNAQGGPIVEEDDEINRDWLDWTYSAATFSVFLSILYFYSSLSRFLMVMGATVVMYLHHVGWFPFRPRPVQNFPNDGPPPDVVNQDPNNNLQEGTDPETEDPNHLPPDRDVLDGEQTSPSFMSTAWLVFKTFFASLLPEGPPAIAN

SEQ ID NO: 3579 - protein, 480 aa, Homo sapiens
MASDSIFESFPSYPQCFMRECILGMNPSRDVHDASTSRRFTPPSTALSPGKMSEALPLGAPDAGAALAGKLRSGDRSMVEVLADHPGELVRTDSPNFLCSVLPTHWRCNKTLPIAFKVVALGDVPDGTLVTVMAGNDENYSAELRNATAAMKNQVARFNDLRFVGRSGRGKSFTLTITVFTNPPQVATYHRAIKITVDGPREPRRHRQKLDDQTKPGSLSFSERLSELEQLRRTAMRVSPHHPAPTPNPRASLNHSTAFNPQPQSQMQDTRQIQPSPPWSYDQSYQYLGSIASPSVHPATPISPGRASGMTTLSAELSSRLSTAPDLTAFSDPRQFPALPSISDPRMHYPGAFTYSPTPVTSGIGIGMSAMGSATRYHTYLPPPYPGSSQAQGGPFQASSPSYHLYYGASAGSYQFSMVGGERSPPRILPPCTNASTGSALLNPSLPNQSDVVEAEGSHSNSPTNMAPSARLEEAVWRPY

SEQ ID NO: 3580 - protein, 507 aa, Homo sapiens
MCTKTIPVLWGCFLLWNLYVSSSQTIYPGIKARITQRALDYGVQAGMKMIEQMLKEKKLPDLSGSESLEFLKVDYVNYNFSNIKISAFSFPNTSLAFVPGVGIKALTNHGTANISTDWGFESPLFQDTGGADLFLSGVYFTGIIILTRNDFGHPTLKLQDCYAQLSHAHVSFSGELSVLYNSFAEPMEKPILKNLNEMLCPIIASEVKALNANLSTLEVLTKIDNYTLLDYSLISSPEITENYLDLNLKGVFYPLENLTDPPFSPVPFVLPERSNSMLYIGIAEYFFKSASFAHFTAGVFNVTLSTEEISNHFVQNSQGLGNVLSRIAEIYILSQPFMVRIMATEPPIINLQPGNFTLDIPASIMMLTQPKNSTVETIVSMDFVASTSVGLVILGQRLVCSLSLNRFRLALPESNRSNIEVLRFENILSSILHFGVLPLANAKLQQGFPLSNPHKFLFVNSDIEVLEGFLLISTDLKYETSSKQQPSFHVWEGLNLISRQWRGKSAP

SEQ ID NO: 3581 - protein, 747 aa, Homo sapiens
MSQVKSSYSYDAPSDFINFSSLDDEGDTQNIDSWFEEKANLENKLLGKNGTGGLFQGKTPLRKANLQQAIVTPLKPVDNTYYKEAEKENLVEQSIPSNACSSLEVEAAISRKTPAQPQRRSLRLSAQKDLEQKEKHHVKMKAKRCATPVIIDEILPSKKMKVSNNKKKPEEEGSAHQDTAEKNASSPEKAKGRHTVPCMPPAKQKFLKSTEEQELEKSMKMQQEVVEMRKKNEEFKKLALAGIGQPVKKSVSQVTKSVDFHFRTDERIKQHPKNQEEYKEVNFTSELRKHPSSPARVTKGCTIVKPFNLSQGKKRTFDETVSTYVPLAQQVEDFHKRTPNRYHLRSKKDDINLLPSKSSVTKICRDPQTPVLQTKHRARAVTCKSTAELEAEELEKLQQYKFKARELDPRILEGGPILPKKPPVKPPTEPIGFDLEIEKRIQERESKKKTEDEHFEFHSRPCPTKILEDVVGVPEKKVLPITVPKSPAFALKNRIRMPTKEDEEEDEPVVIKAQPVPHYGVPFKPQIPEARTVEICPFSFDSRDKERQLQKEKKIKELQKGEVPKFKALPLPHFDTINLPEKKVKNVTQIEPFCLETDRRGALKAQTWKHQLEEELRQQKEAACFKARPNTVISQEPFVPKKEKKSVAEGLSGSLVQEPFQLATEKRAKERQELEKRMAEVEAQKAQQLEEARLQEEEQKKEELARLRRELVHKANPIRKYQGLEIKSSDQPLTVPVSPKFSTRFHC

SEQ ID NO: 3582 - protein, 566 aa, Homo sapiens
MGSAGFSVGKFHVEVASRGRECVSGTPECGNRLGSAGFGALCLELRGADPAWGPFAAHGRSRRQGSRFLWLLKILVIILVLGIVGFMFGSMFLQAVFSSPKPELPSPAPGVQKLKLLPEERLRNLFSYDGIWLFPKNQCKCEANKEQGGYNFQDAYGQSDLPAVKARRQAEFEHFQRREGLPRPLPLLVQPNLPFGYPVHGVEVMPLHTVPIPGLQFEGPDAPVYEVTLTASLGTLNTLADVPDSVVQGRGQKQLIISTSDRKLLKFILQHVTYTSTGYQHQKVDIVSLESRSSVAKFPVTIRHPVIPKLYDPGPERKLRNLVTIATKTFLRPHKLMIMLRSIREYYPDLTVIVADDSQKPLEIKDNHVEYYTMPFGKGWFAGRNLAISQVTTKYVLWVDDDFLFNEETKIEVLVDVLEKTELDVVGGSVLGNVFQFKLLLEQSENGACLHKRMGFFQPLDGFPSCVVTSGVVNFFLAHTERLQRVGFDPRLQRVAHSEFFIDGLGTLLVGSCPEVIIGHQSRSPVVDSELAALEKTYNTYRSNTLTRVQFKLALHYFKNHLQCAA

SEQ ID NO: 3583 - protein, 723 aa, Homo sapiens
MPLFFRKRKPSEEARKRLEYQMCLAKEAGADDILDISKCELSEIPFGAFATCKVLQKKVLIVHTNHLTSLLPKSCSLLSLATIKVLDLHDNQLTALPDDLGQLTALQVLNVERNQLMQLPRSIGNLTQLQTLNVKDNKLKELPDTVGELRSLRTLNISGNEIQRLPQMLAHVRTLEMLSLDASAMVYPPREVCGAGTAAILQFLCKESGLEYYPPSQYLLPILEQDGIENSRDSPDGPTDRFSREELEWQNRFSDYEKRKEQKMLEKLEFERRLELGQREHTQLLQQSSSQKDEILQTVKEEQSRLEQGLSEHQRHLNAERQRLQEQLKQTEQNISSRIQKLLQDNQRQKKSSEILKSLENERIRMEQLMSITQEETESLRRRDVASAMQQMLTESCKNRLIQMAYESQRQNLVQQACSSMAEMDERFQQILSWQQMDQNKAISQILQESAMQKAAFEALQVKKDLMHRQIRSQIKLIETELLQLTQLELKRKSLDTESLQEMISEQRWALSSLLQQLLKEKQQREEELREILTELEAKSETRQENYWLIQYQRLLNQKPLSLKLQEEGMERQLVALLEELSAEHYLPIFAHHRLSLDLLSQMSPGDLAKVGVSEAGLQHEILRRVQELLDAARIQPELKPPMGEVVTPTAPQEPPESVRPSAPPAELEVQASECVVCLEREAQMIFLNCGHVCCCQQCCQPLRTCPLCRQDIAQRLRIYHSS

SEQ ID NO: 3584 - protein, 159 aa, Homo sapiens
MSQAWVPGLAPTLLFSLLAGPQKIAAKCGLILACPKGFKCCGDSCCQENELFPGPVRIFVIIFLVILSVFCICGLAKCFCRNCREPEPDSPVDCRGPLELPSIIPPERVRVSLSAPPPPYSEVILKPSLGPTPTEPPPPYSFRPEEYTGDQRGIDNPAF

SEQ ID NO: 3585 - protein, 1449 aa, Homo sapiens
MEPSALRKAGSEQEEGFEGLPRRVTDLGMVSNLRRSNSSLFKSWRLQCPFGNNDKQESLSSWIPENIKKKECVYFVESSKLSDAGKVVCQCGYTHEQHLEEATKPHTFQGTQWDPKKHVQEMPTDAFGDIVFTGLSQKVKKYVRVSQDTPSSVIYHLMTQHWGLDVPNLLISVTGGAKNFNMKPRLKSIFRRGLVKVAQTTGAWIITGGSHTGVMKQVGEAVRDFSLSSSYKEGELITIGVATWGTVHRREGLIHPTGSFPAEYILDEDGQGNLTCLDSNHSHFILVDDGTHGQYGVEIPLRTRLEKFISEQTKERGGVAIKIPIVCVVLEGGPGTLHTIDNATTNGTPCVVVEGSGRVADVIAQVANLPVSDITISLIQQKLSVFFQEMFETFTESRIVEWTKKIQDIVRRRQLLTVFREGKDGQQDVDVAILQALLKASRSQDHFGHENWDHQLKLAVAWNRVDIARSEIFMDEWQWKPSDLHPTMTAALISNKPEFVKLFLENGVQLKEFVTWDTLLYLYENLDPSCLFHSKLQMHHVAQVLRELLGDFTQPLYPRPRHNDRLRLLLPVPHVKLNVQGVSLRSLYKRSSGHVTFTMDPIRDLLIWAIVQNRRELAGIIWAQSQDCIAAALACSKILKELSKEEEDTDSSEEMLALAEEYEHRAIGVFTECYRKDEERAQKLLTRVSEAWGKTTCLQLALEAKDMKFVSHGGIQAFLTKVWWGQLSVDNGLWRVTLCMLAFPLLLTGLISFREKRLQDVGTPAARARAFFTAPVVVFHLNILSYFAFLCLFAYVLMVDFQPVPSWCECAIYLWLFSLVCEEMRQLFYDPDECGLMKKAALYFSDFWNKLDVGAILLFVAGLTCRLIPATLYPGRVILSLDFILFCLRLMHIFTISKTLGPKIIIVKRMMKDVFFFLFLLAVWVVSFGVAKQAILIHNERRVDWLFRGAVYHSYLTIFGQIPGYIDGVNFNPEHCSPNGTDPYKPKCPESDATQQRPAFPEWLTVLLLCLYLLFTNILLLNLLIAMFNYTFQQVQEHTDQIWKFQRHDLIEEYHGRPAAPPPFILLSHLQLFIKRVVLKTPAKRHKQLKNKLEKNEEAALLSWEIYLKENYLQNRQFQQKQRPEQKIEDISNKVDAMVDLLDLDPLKRSGSMEQRLASLEEQVAQTAQALHWIVRTLRASGFSSEADVPTLASQKAAEEPDAEPGGRKKTEEPGDSYHVNARHLLYPNCPVTRFPVPNEKVPWETEFLIYDPPFYTAERKDAAAMDPMGENPMGRTGLRGRGSLSCFGPNHTLYPMVTRWRRNEDGAICRKSIKKMLEVLVVKLPLSEHWALPGGSREPGEMLPRKLKRILRQEHWPSFENLLKCGMEVYKGYMDDPRNTDNAWIETVAVSVHFQDQNDVELNRLNSNLHACDSGASIRWQVVDRRIPLYANHKTLLQKAAAEFGAHY

SEQ ID NO: 3586 - protein, 1503 aa, Homo sapiens
MEPSALRKAGSEQEEGFEGLPRRVTDLGMVSNLRRSNSSLFKSWRLQCPFGNNDKQESLSSWIPENIKKKECVYFVESSKLSDAGKVVCQCGYTHEQHLEEATKPHTFQGTQWDPKKHVQEMPTDAFGDIVFTGLSQKVKKYVRVSQDTPSSVIYHLMTQHWGLDVPNLLISVTGGAKNFNMKPRLKSIFRRGLVKVAQTTGAWIITGGSHTGVMKQVGEAVRDFSLSSSYKEGELITIGVATWGTVHRREGLIHPTGSFPAEYILDEDGQGNLTCLDSNHSHFILVDDGTHGQYGVEIPLRTRLEKFISEQTKERGGVAIKIPIVCVVLEGGPGTLHTIDNATTNGTPCVVVEGSGRVADVIAQVANLPVSDITISLIQQKLSVFFQEMFETFTESRIVEWTKKIQDIVRRRQLLTVFREGKDGQQDVDVAILQALLKASRSQDHFGHENWDHQLKLAVAWNRVDIARSEIFMDEWQWKPSDLHPTMTAALISNKPEFVKLFLENGVQLKEFVTWDTLLYLYENLDPSCLFHSKLQKVLVEDPERPACAPAAPRLQMHHVAQVLRELLGDFTQPLYPRPRHNDRLRLLLPVPHVKLNVQGVSLRSLYKRSSGHVTFTMDPIRDLLIWAIVQNRRELAGIIWAQSQDCIAAALACSKILKELSKEEEDTDSSEEMLALAEEYEHRAIGVFTECYRKDEERAQKLLTRVSEAWGKTTCLQLALEAKDMKFVSHGGIQAFLTKVWWGQLSVDNGLWRVTLCMLAFPLLLTGLISFREKRLQDVGTPAARARAFFTAPVVVFHLNILSYFAFLCLFAYVLMVDFQPVPSWCECAIYLWLFSLVCEEMRQLFYDPDECGLMKKAALYFSDFWNKLDVGAILLFVAGLTCRLIPATLYPGRVILSLDFILFCLRLMHIFTISKTLGPKIIIVKRMMKDVFFFLFLLAVWVVSFGVAKQAILIHNERRVDWLFRGAVYHSYLTIFGQIPGYIDGVNFNPEHCSPNGTDPYKPKCPESDATQQRPAFPEWLTVLLLCLYLLFTNILLLNLLIAMFNYTFQQVQEHTDQIWKFQRHDLIEEYHGRPAAPPPFILLSHLQLFIKRVVLKTPAKRHKQLKNKLEKNEEAALLSWEIYLKENYLQNRQFQQKQRPEQKIEDISNKVDAMVDLLDLDPLKRSGSMEQRLASLEEQVAQTAQALHWIVRTLRASGFSSEADVPTLASQKAAEEPDAEPGGRKKTEEPGDSYHVNARHLLYPNCPVTRFPVPNEKVPWETEFLIYDPPFYTAERKDAAAMDPMGDTLEPLSTIQYNVVDGLRDRRSFHGPYTVQAGLPLNPMGRTGLRGRGSLSCFGPNHTLYPMVTRWRRNEDGAICRKSIKKMLEVLVVKLPLSEHWALPGGSREPGEMLPRKLKRILRQEHWPSFENLLKCGMEVYKGYMDDPRNTDNAWIETVAVSVHFQDQNDVELNRLNSNLHACDSGASIRWQVVDRRIPLYANHKTLLQKAAAEFGAHY

SEQ ID NO: 3587 - protein, 336 aa, Homo sapiens
MTTLSPENSLSARQSASFILVKRKPPIDKTEWDSFFDESGHLAKSRDFICVNILERGLHPFVRTEAWKFLTGYFSWQSSQDERLTVDSMRRKNYKALCQMYEKIQPLLENLHRNFTETRNNIARDIQKIYDKDPLGNVLIDKKRLEKILLLSYVCNTQAEYQQGFHEMMMLFQLMVEHDHETFWLFQFFLQKTEHSCVINIGVAKNLDMLSTLITFLDPVFAEHLKGKGAGAVQSLFPWFCFCFQRAFKSFDDVWRLWEVLLTGKPCRNFQVLVAYSMLQMVREQVLQESMGGDDILLACNNLIDLDADELISAACVVYAELIQKDVPQTLKDFFL

SEQ ID NO: 3588 - protein, 1019 aa, Homo sapiens
MLQGTCSVLLLWGILGAIQAQQQEVISPDTTERNNNCPEKTDCPIHVYFVLDTSESVTMQSPTDILLFHMKQFVPQFISQLQNEFYLDQVALSWRYGGLHFSDQVEVFSPPGSDRASFIKNLQGISSFRRGTFTDCALANMTEQIRQDRSKGTVHFAVVITDGHVTGSPCGGIKLQAERAREEGIRLFAVAPNQNLKEQGLRDIASTPHELYRNDYATMLPDSTEIDQDTINRIIKVMKHEAYGECYKVSCLEIPGPSGPKGYRGQKGAKGNMGEPGEPGQKGRQGDPGIEGPIGFPGPKGVPGFKGEKGEFGADGRKGAPGLAGKNGTDGQKGKLGRIGPPGCKGDPGNRGPDGYPGEAGSPGERGDQGGKGDPGRPGRRGPPGEIGAKGSKGYQGNSGAPGSPGVKGAKGGPGPRGPKGEPGRRGDPGTKGSPGSDGPKGEKGDPGPEGPRGLAGEVGNKGAKGDRGLPGPRGPQGALGEPGKQGSRGDPGDAGPRGDSGQPGPKGDPGRPGFSYPGPRGAPGEKGEPGPRGPEGGRGDFGLKGEPGRKGEKGEPADPGPPGEPGPRGPRGVPGPEGEPGPPGDPGLTECDVMTYVRETCGCCDCEKRCGALDVVFVIDSSESIGYTNFTLEKNFVINVVNRLGAIAKDPKSETGTRVGVVQYSHEGTFEAIQLDDERIDSLSSFKEAVKNLEWIAGGTWTPSALKFAYDRLIKESRRQKTRVFAVVITDGRHDPRDDDLNLRALCDRDVTVTAIGIGDMFHEKHESENLYSIACDKPQQVRNMTLFSDLVAEKFIDDMEDVLCPDPQIVCPDLPCQTELSVAQCTQRPVDIVFLLDGSERLGEQNFHKARRFVEQVARRLTLARRDDDPLNARVALLQFGGPGEQQVAFPLSHNLTAIHEALETTQYLNSFSHVGAGVVHAINAIVRSPRGGARRHAELSFVFLTDGVTGNDSLHESAHSMRKQNVVPTVLALGSDVDMDVLTTLSLGDRAAVFHEKDYDSLAQPGFFDRFIRWIC

SEQ ID NO: 3589 - protein, 1040 aa, Homo sapiens
MGEEGGSASHDEEERASVLLGHSPGCEMCSQEAFQAQRSQLVELLVSGSLEGFESVLDWLLSWEVLSWEDYEGFHLLGQPLSHLARRLLDTVWNKGTWACQKLIAAAQEAQADSQSPKLHGCWDPHSLHPARDLQSHRPAIVRRLHSHVENMLDLAWERGFVSQYECDEIRLPIFTPSQRARRLLDLATVKANGLAAFLLQHVQELPVPLALPLEAATCKKYMAKLRTTVSAQSRFLSTYDGAETLCLEDIYTENVLEVWADVGMAGPPQKSPATLGLEELFSTPGHLNDDADTVLVVGEAGSGKSTLLQRLHLLWAAGQDFQEFLFVFPFSCRQLQCMAKPLSVRTLLFEHCCWPDVGQEDIFQLLLDHPDRVLLTFDGFDEFKFRFTDRERHCSPTDPTSVQTLLFNLLQGNLLKNARKVVTSRPAAVSAFLRKYIRTEFNLKGFSEQGIELYLRKRHHEPGVADRLIRLLQETSALHGLCHLPVFSWMVSKCHQELLLQEGGSPKTTTDMYLLILQHFLLHATPPDSASQGLGPSLLRGRLPTLLHLGRLALWGLGMCCYVFSAQQLQAAQVSPDDISLGFLVRAKGVVPGSTAPLEFLHITFQCFFAAFYLALSADVPPALLRHLFNCGRPGNSPMARLLPTMCIQASEGKDSSVAALLQKAEPHNLQITAAFLAGLLSREHWGLLAECQTSEKALLRRQACARWCLARSLRKHFHSIPPAAPGEAKSVHAMPGFIWLIRSLYEMQEERLARKAARGLNVGHLKLTFCSVGPTECAALAFVLQHLRRPVALQLDYNSVGDIGVEQLLPCLGVCKALYLRDNNISDRGICKLIECALHCEQLQKLALFNNKLTDGCAHSMAKLLACRQNFLALRLGNNYITAAGAQVLAEGLRGNTSLQFLGFWGNRVGDEGAQALAEALGDHQSLRWLSLVGNNIGSVGAQALALMLAKNVMLEELCLEENHLQDEGVCSLAEGLKKNSSLKILKLSNNCITYLGAEALLQALERNDTILEVWLRGNTFSLEEVDKLGCRDTRLLL

SEQ ID NO: 3590 - protein, 129 aa, Homo sapiens
MASPEHPGSPGCMGPITQCTARTQQEAPATGPDLPHPGPDGHLDTHSGLSSNSSMTTRELQQYWQNQKCRWKHVKLLFEIASARIEERKVSKFVMGKSRPGEMTYPGSRGETGTAPEPDPRCPRQSDML

SEQ ID NO: 3591 - protein, 1114 aa, Homo sapiens
MNNEITYYFPCQRWLAVEEDDGQLSRELLPVDESYVLPQSEEGRGGGDNNPLDNLALEQKDKSTTFSVTIKTGVKKNAGTDANVFITLFGTQDDTGMTLLKSSKTNSDKFERDSIEIFTVETLDLGDLWKVRLGHDNTGKAPGWFVDWVEVDAPSLGKCMTFPCGRWLAKNEDDGSIIRDLFHAELQTRLYTPFVPYEITLYTSDVFAAGTDANIFIIIYGCDAVCTQQKYLCTNKREQKQFFERKSASRFIVELEDVGEIIEKIRIGHNNTGMNPGWHCSHVDIRRLLPDKDGAETLTFPCDRWLATSEDDKKTIRELVPYDIFTEKYMKDGSLRQVYKEVEEPLDIVLYSVQIFTGNIPGAGTDAKVYITIYGDLGDTGERYLGKSENRTNKFERGTADTFIIEAADLGVIYKIKLRHDNSKWCADWYVEKVEIWNDTNEDEFLFLCGRWLSLKKEDGRLERLFYEKEYTGDRSSNCSSPADFWEIALSSKMADVDISTVTGPMADYVQEGPIIPYYVSVTTGKHKDAATDSRAFIFLIGEDDERSKRIWLDYPRGKRGFSRGSVEEFYVAGLDVGIIKKIELGHDGASPESCWLVEELCLAVPTQGTKYMLNCNCWLAKDRGDGITSRVFDLLDAMVVNIGVKVLYEMTVWTGDVVGGGTDSNIFMTLYGINGSTEEMQLDKKKARFEREQNDTFIMEILDIAPFTKMRIRIDGLGSRPEWFLERILLKNMNTGDLTMFYYGDWLSQRKGKKTLVCEMCAVIDEEEMMEWTSYTVAVKTSDILGAGTDANVFIIIFGENGDSGTLALKQSANWNKFERNNTDTFNFPDMLSLGHLCKLRVWHDNKGIFPGWHLSYVDVKDNSRDETFHFQCDCWLSKSEGDGQTVRDFACANNKICDELEETTYEIVIETGNGGETRENVWLILEGRKNRSKEFLMENSSRQRAFRKGTTDTFEFDSIYLGDIASLCVGHLAREDRFIPKRELAWHVKTITITEMEYGNVYFFNCDCLIPLKRKRKYFKVFEVTKTTESFASKVQSLVPVKYEVIVTTGYEPGAGTDANVFVTIFGANGDTGKRELKQKMRNLFERGSTDRFFLETLELVVTRLGLAAECG

SEQ ID NO: 3592 - protein, 1191 aa, Homo sapiens
MPGTPGSLEMGLLTFRDVAIEFSPEEWQCLDTAQQNLYRNVMLENYRNLAFLGIALSKPDLITYLEQGKEPWNMKQHEMVDEPTGICPHFPQDFWPEQSMEDSFQKVLLRKYEKCGHENLQLRKGCKSVDECKVHKEGYNKLNQCLTTAQSKVFQCGKYLKVFYKFLNSNRHTIRHTGKKCFKCKKCVKSFCIRLHKTQHKCVYITEKSCKCKECEKTFHWSSTLTNHKEIHTEDKPYKCEECGKAFKQLSTLTTHKIICAKEKIYKCEECGKAFLWSSTLTRHKRIHTGEKPYKCEECGKAFSHSSTLAKHKRIHTGEKPYKCEECGKAFSRSSTLAKHKRIHTGEKPYKCKECGKAFSNSSTLANHKITHTEEKPYKCKECDKAFKRLSTLTKHKIIHAGEKLYKCEECGKAFNRSSNLTIHKFIHTGEKPYKCEECGKAFNWSSSLTKHKRFHTREKPFKCKECGKAFIWSSTLTRHKRIHTGEKPYKCEECGKAFRQSSTLTKHKIIHTGEKPYKFEECGKAFRQSLTLNKHKIIHSREKPYKCKECGKAFKQFSTLTTHKIIHAGKKLYKCEECGKAFNHSSSLSTHKIIHTGEKSYKCEECGKAFLWSSTLRRHKRIHTGEKPYKCEECGKAFSHSSALAKHKRIHTGEKPYKCKECGKAFSNSSTLANHKITHTEEKPYKCKECDKTFKRLSTLTKHKIIHAGEKLYKCEECGKAFNRSSNLTIHKFIHTGEKPYKCEECGKAFNWSSSLTKHKRIHTREKPFKCKECGKAFIWSSTLTRHKRIHTGEKPYKCEECGKAFSRSSTLTKHKTIHTGEKPYKCKECGKAFKHSSALAKHKIIHAGEKLYKCEECGKAFNQSSNLTTHKIIHTKEKPSKSEECDKAFIWSSTLTEHKRIHTREKTYKCEECGKAFSQPSHLTTHKRMHTGEKPYKCEECGKAFSQSSTLTTHKIIHTGEKPYKCEECGKAFRKSSTLTEHKIIHTGEKPYKCEECGKAFSQSSTLTRHTRMHTGEKPYKCEECGKAFNRSSKLTTHKIIHTGEKPYKCEECGKAFISSSTLNGHKRIHTREKPYKCEECGKAFSQSSTLTRHKRLHTGEKPYKCGECGKAFKESSALTKHKIIHTGEKPYKCEKCGKAFNQSSILTNHKKIHTITPVIPLLWEAEAGGSRGQEMETILANTVKPLLY

SEQ ID NO: 3593 - protein, 2671 aa, Homo sapiens
MAADTQVSETLKRFAGKVTTASVKERREILSELGKCVAGKDLPEGAVKGLCKLFCLTLHRYRDAASRRALQAAIQQLAEAQPEATAKNLLHSLQSSGIGSKAGVPSKSSGSAALLALTWTCLLVRIVFPSRAKRQGDIWNKLVEVQCLLLLEVLGGSHKHAVDGAVKKLTKLWKENPGLVEQYLSAILSLEPNQNYAGMLGLLVQFCTSHKEMDVVSQHKSALLDFYMKNILMSKVKPPKYLLDSCAPLLRYLSHSEFKDLILPTIQKSLLRSPENVIETISSLLASVTLDLSQYAMDIVKGLAGHLKSNSPRLMDEAVLALRNLARQCSDSSAMESLTKHLFAILGGSEGKLTVVAQKMSVLSGIGSVSHHVVSGPSSQVLNGIVAELFIPFLQQEVHEGTLVHAVSVLALWCNRFTMEVPKKLTEWFKKAFSLKTSTSAVRHAYLQCMLASYRGDTLLQALDLLPLLIQTVEKAASQSTQVPTITEGVAAALLLLKLSVADSQAEAKLSSFWQLIVDEKKQVFTSEKFLVMASEDALCTVLHLTERLFLDHPHRLTGNKVQQYHRALVAVLLSRTWHVRRQAQQTVRKLLSSLGGFKLAHGLLEELKTVLSSHKVLPLEALVTDAGEVTEAGKAYVPPRVLQEALCVISGVPGLKGDVTDTEQLAQEMLIISHHPSLVAVQSGLWPALLARMKIDPEAFITRHLDQIIPRMTTQSPLNQSSMNAMGSLSVLSPDRVLPQLISTITASVQNPALRLVTREEFAIMQTPAGELYDKSIIQSAQQDSIKKANMKRENKAYSFKEQIIELELKEEIKKKKGIKEEVQLTSKQKEMLQAQLDREAQVRRRLQELDGELEAALGLLDIILAKNPSGLTQYIPVLVDSFLPLLKSPLAAPRIKNPFLSLAACVMPSRLKALGTLVSHVTLRLLKPECVLDKSWCQEELSVAVKRAVMLLHTHTITSRVGKGEPGAAPLSAPAFSLVFPFLKMVLTEMPHHSEEEEEWMAQILQILTVQAQLRASPNTPPGRVDENGPELLPRVAMLRLLTWVIGTGSPRLQVLASDTLTTLCASSSGDDGCAFAEQEEVDVLLCALQSPCASVRETVLRGLMELHMVLPAPDTDEKNGLNLLRRLWVVKFDKEEEIRKLAERLWSMMGLDLQPDLCSLLIDDVIYHEAAVRQAGAEALSQAVARYQRQAAEVMGRLMEIYQEKLYRPPPVLDALGRVISESPPDQWEARCGLALALNKLSQYLDSSQVKPLFQFFVPDALNDRHPDVRKCMLDAALATLNTHGKENVNSLLPVFEEFLKNAPNDASYDAVRQSVVVLMGSLAKHLDKSDPKVKPIVAKLIAALSTPSQQVQESVASCLPPLVPAIKEDAGGMIQRLMQQLLESDKYAERKGAAYGLAGLVKGLGILSLKQQEMMAALTDAIQDKKNFRRREGALFAFEMLCTMLGKLFEPYVVHVLPHLLLCFGDGNQYVREAADDCAKAVMSNLSAHGVKLVLPSLLAALEEESWRTKAGSVELLGAMAYCAPKQLSSCLPNIVPKLTEVLTDSHVKVQKAGQQALRQIGSVIRNPEILAIAPVLLDALTDPSRKTQKCLQTLLDTKFVHFIDAPSLALIMPIVQRAFQDRSTDTRKMAAQIIGNMYSLTDQKDLAPYLPSVTPGLKASLLDPVPEVRTVSAKALGAMVKGMGESCFEDLLPWLMETLTYEQSSVDRSGAAQGLAEVMAGLGVEKLEKLMPEIVATASKVDIAPHVRDGYIMMFNYLPITFGDKFTPYVGPIIPCILKALADENEFVRDTALRAGQRVISMYAETAIALLLPQLEQGLFDDLWRIRFSSVQLLGDLLFHISGVTGKMTTETASEDDNFGTAQSNKAIITALGVERRNRVLAGLYMGRSDTQLVVRQASLHVWKIVVSNTPRTLREILPTLFGLLLGFLASTCADKRTIAARTLGDLVRKLGEKILPEIIPILEEGLRSQKSDERQGVCIGLSEIMKSTSRDAVLYFSESLVPTARKALCDPLEEVREAAAKTFEQLHSTIGHQALEDILPFLLKQLDDEEVSEFALDGLKQVMAIKSRVVLPYLVPKLTTPPVNTRVLAFLSSVAGDALTRHLGVILPAVMLALKEKLGTPDEQLEMANCQAVILSVEDDTGHRIIIEDLLEATRSPEVGMRQAAAIILNIYCSRSKADYTSHLRSLVSGLIRLFNDSSPVVLEESWDALNAITKKLDAGNQLALIEELHKEIRLIGNESKGEHVPGFCLPKKGVTSILPVLREGVLTGSPEQKEEAAKALGLVIRLTSADALRPSVVSITGPLIRILGDRFSWNVKAALLETLSLLLAKVGIALKPFLPQLQTTFTKALQDSNRGVRLKAADALGKLISIHIKVDPLFTELLNGIRAMEDPGVRDTMLQALRFVIQGAGAKVDAVIRKNIVSLLLSMLGHDEDNTRISSAGCLGELCAFLTEEELSAVLQQCLLADVSGIDWMVRHGRSLALSVAVNVAPGRLCAGRYSSDVQEMILSSATADRIPIAVSGVRGMGFLMRHHIETGGGQLPAKLSSLFVKCLQNPSSDIRLVAEKMIWWANKDPLPPLDPQAIKPILKALLDNTKDKNTVVRAYSDQAIVNLLKMRQGEEVFQSLSKILDVASLEVLNEVNRRSLKKLASQADSTEQVDDTILT

SEQ ID NO: 3594 - protein, 703 aa, Homo sapiens
MAASEVAGVVANAPSPPESSSLCASKSDEGLPDGLSTKDSAQKQKNSPLLSVSSQTITKENNRNVHLEHSEQNPGSSAGDTSAAHQVVLGENLIATALCLSGSGSQSDLKDVASTAGEEGDTSLRESLHPVTRSLKAGCHTKQLASRNCSEEKSPQTSILKEGNRDTSLDFRPVVSPANGVEGVRVDQDDDQDSSSLKLSQNIAVQTDFKTADSEVNTDQDIEKNLDKMMTERTLLKERYQEVLDKQRQVENQLQVQLKQLQQRREEEMKNHQEILKAIQDVTIKREETKKKIEKEKKEFLQKEQDLKAEIEKLCEKGRREVWEMELDRLKNQDGEINRNIMEETERAWKAEILSLESRKELLVLKLEEAEKEAELHLTYLKSTPPTLETVRSKQEWETRLNGVRIMKKNVRDQFNSHIQLVRNGAKLSSLPQIPTPTLPPPPSETDFMLQVFQPSPSLAPRMPFSIGQVTMPMVMPSADPRSLSFPILNPALSQPSQPSSPLPGSHGRNSPGLGSLVSPHGPHMPPAASIPPPPGLGGVKASAETPRPQPVDKLEKILEKLLTRFPQCNKAQMTNILQQIKTARTTMAGLTMEELIQLVAARLAEHERVAASTQPLGRIRALFPAPLAQISTPMFLPSAQVSYPGRSSHAPATCKLCLMCQKLVQPSELHPMACTHVLHKECIKFWAQTNTNDTCPFCPTLK

SEQ ID NO: 3595 - protein, 1581 aa, Homo sapiens
MKAQGETEESEKLSKMSSLLERLHAKFNQNRPWSETIKLVRQVMEKRVVMSSGGHQHLVSCLETLQKALKVTSLPAMTDRLESIARQNGLGSHLSASGTECYITSDMFYVEVQLDPAGQLCDVKVAHHGENPVSCPELVQQLREKNFDEFSKHLKGLVNLYNLPGDNKLKTKMYLALQSLEQDLSKMAIMYWKATNAGPLDKILHGSVGYLTPRSGGHLMNLKYYVSPSDLLDDKTASPIILHENNVSRSLGMNASVTIEGTSAVYKLPIAPLIMGSHPVDNKWTPSFSSITSANSVDLPACFFLKFPQPIPVSRAFVQKLQNCTGIPLFETQPTYAPLYELITQFELSKDPDPIPLNHNMRFYAALPGQQHCYFLNKDAPLPDGRSLQGTLVSKITFQHPGRVPLILNLIRHQVAYNTLIGSCVKRTILKEDSPGLLQFEVCPLSESRFSVSFQHPVNDSLVCVVMDVQDSTHVSCKLYKGLSDALICTDDFIAKVVQRCMSIPVTMRAIRRKAETIQADTPALSLIAETVEDMVKKNLPPASSPGYGMTTGNNPMSGTTTPTNTFPGGPITTLFNMSMSIKDRHESVGHGEDFSKVSQNPILTSLLQITGNGGSTIGSSPTPPHHTPPPVSSMAGNTKNHPMLMNLLKDNPAQDFSTLYGSSPLERQNSSSGSPRMEICSGSNKTKKKKSSRLPPEKPKHQTEDDFQRELFSMDVDSQNPIFDVNMTADTLDTPHITPAPSQCSTPPTTYPQPVPHPQPSIQRMVRLSSSDSIGPDVTDILSDIAEEASKLPSTSDDCPAIGTPLRDSSSSGHSQSTLFDSDVFQTNNNENPYTDPADLIADAAGSPSSDSPTNHFFHDGVDFNPDLLNSQSQSGFGEEYFDESSQSGDNDDFKGFASQALNTLGVPMLGGDNGETKFKGNNQADTVDFSIISVAGKALAPADLMEHHSGSQGPLLTTGDLGKEKTQKRVKEGNGTSNSTLSGPGLDSKPGKRSRTPSNDGKSKDKPPKRKKADTEGKSPSHSSSNRPFTPPTSTGGSKSPGSAGRSQTPPGVATPPIPKITIQIPKGTVMVGKPSSHSQYTSSGSVSSSGSKSHHSHSSSSSSSASTSGKMKSSKSEGSSSSKLSSSMYSSQGSSGSSQSKNSSQSGGKPGSSPITKHGLSSGSSSTKMKPQGKPSSLMNPSLSKPNISPSHSRPPGGSDKLASPMKPVPGTPPSSKAKSPISSGSGGSHMSGTSSSSGMKSSSGLGSSGSLSQKTPPSSNSCTASSSSFSSSGSSMSSSQNQHGSSKGKSPSRNKKPSLTAVIDKLKHGVVTSGPGGEDPLDGQMGVSTNSSSHPMSSKHNMSGGEFQGKREKSDKDKSKVSTSGSSVDSSKKTSESKNVGSTGVAKIIISKHDGGSPSIKAKVTLQKPGESSGEGLRPQMASSKNYGSPLISGSTPKHERGSPSHSKSPAYTPQNLDSESESGSSIAEKSYQNSPSSDDGIRPLPEYSTEKHKKHKKEKKKVKDKDRDRDRDKDRDKKKSHSIKPESWSKSPISSDQSLSMTSNTILSADRPSRLSPDFMIGEEDDDLMDVALIGN

SEQ ID NO: 3596 - protein, 320 aa, Homo sapiens
MAGLAARLVLLAGAAALASGSQGDREPVYRDCVLQCEEQNCSGGALNHFRSRQPIYMSLAGWTCRDDCKYECMWVTVGLYLQEGHKVPQFHGKWPFSRFLFFQEPASAVASFLNGLASLVMLCRYRTFVPASSPMYHTCVAFAWVSLNAWFWSTVFHTRDTDLTEKMDYFCASTVILHSIYLCCVRTVGLQHPAVVSAFRALLLLMLTVHVSYLSLIRFDYGYNLVANVAIGLVNVVWWLAWCLWNQRRLPHVRKCVVVVLLLQGLSLLELLDFPPLFWVLDAHAIWHISTIPVHVLFFSFLEDDSLYLLKESEDKFKLD

SEQ ID NO: 3597 - protein, 1075 aa, Homo sapiens
MTTANCGAHDELDFKLVFGEDGAPAPPPPGSRPADLEPDDCASIYIFNVDPPPSTLTTPLCLPHHGLPSHSSVLSPSFQLQSHKNYEGTCEIPESKYSPLGGPKPFECPSIQITSISPNCHQELDAHEDDLQINDPEREFLERPSRDHLYLPLEPSYRESSLSPSPASSISSRSWFSDASSCESLSHIYDDVDSELNEAAARFTLGSPLTSPGGSPGGCPGEETWHQQYGLGHSLSPRQSPCHSPRSSVTDENWLSPRPASGPSSRPTSPCGKRRHSSAEVCYAGSLSPHHSPVPSPGHSPRGSVTEDTWLNASVHGGSGLGPAVFPFQYCVETDIPLKTRKTSEDQAAILPGKLELCSDDQGSLSPARETSIDDGLGSQYPLKKDSCGDQFLSVPSPFTWSKPKPGHTPIFRTSSLPPLDWPLPAHFGQCELKIEVQPKTHHRAHYETEGSRGAVKASTGGHPVVKLLGYNEKPINLQMFIGTADDRYLRPHAFYQVHRITGKTVATASQEIIIASTKVLEIPLLPENNMSASIDCAGILKLRNSDIELRKGETDIGRKNTRVRLVFRVHIPQPSGKVLSLQIASIPVECSQRSAQELPHIEKYSINSCSVNGGHEMVVTGSNFLPESKIIFLEKGQDGRPQWEVEGKIIREKCQGAHIVLEVPPYHNPAVTAAVQVHFYLCNGKRKKSQSQRFTYTPVLMKQEHREEIDLSSVPSLPVPHPAQTQRPSSDSGCSHDSVLSGQRSLICSIPQTYASMVTSSHLPQLQCRDESVSKEQHMIPSPIVHQPFQVTPTPPVGSSYQPMQTNVVYNGPTCLPINAASSQEFDSVLFQQDATLSGLVNLGCQPLSSIPFHSSNSGSTGHLLAHTPHSVHTLPHLQSMGYHCSNTGQRSLSSPVADQITGQPSSQLQPITYGPSHSGSATTASPAASHPLASSPLSGPPSPQLQPMPYQSPSSGTASSPSPATRMHSGQHSTQAQSTGQGGLSAPSSLICHSLCDPASFPPDGATVSIKPEPEDREPNFATIGLQDITLDDVNEIIGRDMSQISVSQGAGVSRQAPLPSPESLDLGRSDGL

SEQ ID NO: 3598 - protein, 685 aa, Homo sapiens
MDVCVRLALWLLWGLLLHQGQSLSHSHSEKATGTSSGANSEESTAAEFCRIDKPLCHSEDEKLSFEAVRNIHKLMDDDANGDVDVEESDEFLREDLNYHDPTVKHSTFHGEDKLISVEDLWKAWKSSEVYNWTVDEVVQWLITYVELPQYEETFRKLQLSGHAMPRLAVTNTTMTGTVLKMTDRSHRQKLQLKALDTVLFGPPLLTRHNHLKDFMLVVSIVIGVGGCWFAYIQNRYSKEHMKKMMKDLEGLHRAEQSLHDLQERLHKAQEEHRTVEVEKVHLEKKLRDEINLAKQEAQRLKELREGTENERSRQKYAEEELEQVREALRKAEKELESHSSWYAPEALQKWLQLTHEVEVQYYNIKKQNAEKQLLVAKEGAEKIKKKRNTLFGTFHVAHSSSLDDVDHKILTAKQALSEVTAALRERLHRWQQIEILCGFQIVNNPGIHSLVAALNIDPSWMGSTRPNPAHFIMTDDVDDMDEEIVSPLSMQSPSLQSSVRQRLTEPQHGLGSQRDLTHSDSESSLHMSDRQRVAPKPPQMSRAADEALNAMTSNGSHRLIEGVHPGSLVEKLPDSPALAKKALLALNHGLDKAHSLMELSPSAPPGGSPHLDSSRSHSPSSPDPDTPSPVGDSRALQASRNTRIPHLAGKKAVAEEDNGSIGEETDSSPGRKKFPLKIFKKPLKK

SEQ ID NO: 3599 - protein, 261 aa, Homo sapiens
MQLVILRVTIFLPWCFAVPVPPAADHKGWDFVEGYFHQFFLTKKESPLLTQETQTQLLQQFHRNGTDLLDMQMHALLHQPHCGVPDGSDTSISPGRCKWNKHTLTYRIINYPHDMKPSAVKDSIYNAVSIWSNVTPLIFQQVQNGDADIKVSFWQWAHEDGWPFDGPGGILGHAFLPNSGNPGVVHFDKNEHWSASDTGYNLFLVATHEIGHSLGLQHSGNQSSIMYPTYWYHDPRTFQLSADDIQRIQHLYGEKCSSDIP

SEQ ID NO: 3600 - protein, 312 aa, Homo sapiens
MSSSGSSHPFLLTGFPGLEEAHHWISVFFLFMYISILFGNGTLLLLIKEDHNLHEPMYFFLAMLAATDLGLALTTMPTVLGVLWLDHREIGSAACFSQAYFIHSLSFLESGILLAMAYDRFIAICNPLRYTSVLTNTRVVKIGLGVLMRGFVSVVPPIRPLYFFLYCHSHVLSHAFCLHQDVIKLACADTTFNRLYPAVLVVFIFVLDYLIIFISYVLILKTVLSIASREERAKALITCVSHICCVLVFYVTVIGLSLIHRFGKQVPHIVHLIMSYAYFLFPPLMNPITYSVKTKQIQNAILHLFTTHRIGT

SEQ ID NO: 3601 - protein, 317 aa, Homo sapiens
MSQVTNTTQEGIYFILTDIPGFEASHIWISIPVCCLYTISIMGNTTILTVIRTEPSVHQRMYLFLSMLALTDLGLTLTTLPTVMQLLWFNVRRISSEACFAQFFFLHGFSFMESSVLLAMSVDCYVAICCPLHYASILTNEVIGRTGLAIICCCVLAVLPSLFLLKRLPFCHSHLLSRSYCLHQDMIRLVCADIRLNSWYGFALALLIIIVDPLLIVISYTLILKNILGTATWAERLRALNNCLSHILAVLVLYIPMVGVSMTHRFAKHASPLVHVIMANIYLLAPPVMNPIIYSVKNKQIQWGMLNFLSLKNMHSR

SEQ ID NO: 3602 - protein, 299 aa, Homo sapiens
MAASSSEISEMKGVEESPKVPGEGPGHSEAETGPPQVLAGVPDQPEAPQPGPNTTAAPVDSGPKAGLAPETTETPAGASETAQATDLSLSPGGESKANCSPEDPCQETVSKPEVSKEATADQGSRLESAAPPEPAPEPAPQPDPRPDSQPTPKPALQPELPTQEDPTPEILSESVGEKQENGAVVPLQAGDGEEGPAPEPHSPPSKKSPPANGAPPRVLQQLVEEDRMRRAHSGHPGSPRGSLSRHPSSQLAGPGVEGGEGTQKPRDYIILAILSCFCPMWPVNIVAFAYAVMVSPMGP

SEQ ID NO: 3603 - protein, 688 aa, Homo sapiens
MSSRTVLAPGNDRNSDTHGTLGSGRSSDKGPSWSSRSLGARCRNSIASCPEEQPHVGNYRLLRTIGKGNFAKVKLARHILTGREVAIKIIDKTQLNPSSLQKLFREVRIMKGLNHPNIVKLFEVIETEKTLYLVMEYASAGEVFDYLVSHGRMKEKEARAKFRQIVSAVHYCHQKNIVHRDLKAENLLLDAEANIKIADFGFSNEFTLGSKLDTFCGSPPYAAPELFQGKKYDGPEVDIWSLGVILYTLVSGSLPFDGHNLKELRERVLRGKYRVPFYMSTDCESILRRFLVLNPAKRCTLEQIMKDKWINIGYEGEELKPYTEPEEDFGDTKRIEVMVGMGYTREEIKESLTSQKYNEVTATYLLLGRKTEEGGDRGAPGLALARVRAPSDTTNGTSSSKGTSHSKGQRSSSSTYHRQRRHSDFCGPSPAPLHPKRSPTSTGEAELKEERLPGRKASCSTAGSGSRGLPPSSPMVSSAHNPNKAEIPERRKDSTSTPNNLPPSMMTRRNTYVCTERPGAERPSLLPNGKENSSGTPRVPPASPSSHSLAPPSGERSRLARGSTIRSTFHGGQVRDRRAGGGGGGGVQNGPPASPTLAHEAAPLPAGRPRPTTNLFTKLTSKLTRRVTLDPSKRQNSNRCVSGASLPQGSKIRSQTNLRESGDLRSQVAIYLGIKRKPPPGCSDSPGV

SEQ ID NO: 3604 - protein, 1832 aa, Homo sapiens
MEDTPPSLSCSDCQRHFPSLPELSRHRELLHPSPNQDSEEADSIPRPYRCQQCGRGYRHPGSLVNHRRTHETGLFPCTTCGKDFSNPMALKSHMRTHAPEGRRRHRPPRPKEATPHLQGETVSTDSWGQRLGSSEGWENQTKHTEETPDCESVPDPRAASGTWEDLPTRQREGLASHPGPEDGADGWGPSTNSARAPPLPIPASSLLSNLEQYLAESVVNFTGGQEPTQSPPAEEERRYKCSQCGKTYKHAGSLTNHRQSHTLGIYPCAICFKEFSNLMALKNHSRLHAQYRPYHCPHCPRVFRLPRELLEHQQSHEGERQEPRWEEKGMPTTNGHTDESSQDQLPSAQMLNGSAELSTSGELEDSGLEEYRPFRCGDCGRTYRHAGSLINHRKSHQTGVYPCSLCSKQLFNAAALKNHVRAHHRPRQGVGENGQPSVPPAPLLLAETTHKEEEDPTTTLDHRPYKCSECGRAYRHRGSLVNHRHSHRTGEYQCSLCPRKYPNLMALRNHVRVHCKAARRSADIGAEGAPSHLKVELPPDPVEAEAAPHTDQDHVCKHEEEATDITPAADKTAAHICSICGLLFEDAESLERHGLTHGAGEKENSRTETTMSPPRAFACRDCGKSYRHSGSLINHRQTHQTGDFSCGACAKHFHTMAAMKNHLRRHSRRRSRRHRKRAGGASGGREAKLLAAESWTRELEDNEGLESPQDPSGESPHGAEGNLESDGDCLQAESEGDKCGLERDETHFQGDKESGGTGEGLERKDASLLDNLDIPGEEGGGTHFCDSLTGVDEDQKPATGQPNSSSHSANAVTGWQAGAAHTCSDCGHSFPHATGLLSHRPCHPPGIYQCSLCPKEFDSLPALRSHFQNHRPGEATSAQPFLCCLCGMIFPGRAGYRLHRRQAHSSSGMTEGSEEEGEEEGVAEAAPARSPPLQLSEAELLNQLQREVEALDSAGYGHICGCCGQTYDDLGSLERHHQSQSSGTTADKAPSPLGVAGDAMEMVVDSVLEDIVNSVSGEGGDAKSQEGAGTPLGDSLCIQGGESLLEAQPRPFRCNQCGKTYRHGGSLVNHRKIHQTGDFLCPVCSRCYPNLAAYRNHLRNHPRCKGSEPQVGPIPEAAGSSELQVGPIPEGGSNKPQHMAEEGPGQAEVEKLQEELKVEPLEEVARVKEEVWEETTVKGEEIEPRLETAEKGCQTEASSERPFSCEVCGRSYKHAGSLINHRQSHQTGHFGCQACSKGFSNLMSLKNHRRIHADPRRFRCSECGKAFRLRKQLASHQRVHMERRGGGGTRKATREDRPFRCGQCGRTYRHAGSLLNHRRSHETGQYSCPTCPKTYSNRMALKDHQRLHSENRRRRAGRSRRTAVRCALCGRSFPGRGSLERHLREHEETEREPANGQGGLDGTAASEANLTGSQGLETQLGGAEPVPHLEDGVPRPGERSQSPIRAASSEAPEPLSWGAGKAGGWPVGGGLGNHSGGWVPQFLTRSEEPEDSVHRSPCHAGDCQLNGPTLSHMDSWDNRDNSSQLQPGSHSSCSQCGKTYCQSGSLLNHNTNKTDRHYCLLCSKEFLNPVATKSHSHNHIDAQTFACPDCGKAFESHQELASHLQAHARGHSQVPAQMEEARDPKAGTGEDQVVLPGQGKAQEAPSETPRGPGESVERARGGQAVTSMAAEDKERPFRCTQCGRSYRHAGSLLNHQKAHTTGLYPCSLCPKLLPNLLSLKNHSRTHTDPKRHCCSICGKAFRTAARLEGHGRVHAPREGPFTCPHCPRHFRRRISFVQHQQQHQEEWTVAGSGAPVAPVTGRGDLPLPPPPTPTTPLLDPSPQWPADLSFSL

SEQ ID NO: 3605 - protein, 743 aa, Homo sapiens
MGLLTFRDVAVEFSLEEWEHLEPAQKNLYQDVMLENYRNLVSLGLVVSKPDLITFLEQRKEPWNVKSEETVAIQPDVFSHYNKDLLTEHCTEASFQKVISRRHGSCDLENLHLRKRWKREECEGHNGCYDEKTFKYDQFDESSVESLFHQQILSSCAKSYNFDQYRKVFTHSSLLNQQEEIDIWGKHHIYDKTSVLFRQVSTLNSYRNVFIGEKNYHCNNSEKTLNQSSSPKNHQENYFLEKQYKCKEFEEVFLQSMHGQEKQEQSYKCNKCVEVCTQSLKHIQHQTIHIRENSYSYNKYDKDLSQSSNLRKQIIHNEEKPYKCEKCGDSLNHSLHLTQHQIIPTEEKPCKWKECGKVFNLNCSLYLTKQQQIDTGENLYKCKACSKSFTRSSNLIVHQRIHTGEKPYKCKECGKAFRCSSYLTKHKRIHTGEKPYKCKECGKAFNRSSCLTQHQTTHTGEKLYKCKVCSKSYARSSNLIMHQRVHTGEKPYKCKECGKVFSRSSCLTQHRKIHTGENLYKCKVCAKPFTCFSNLIVHERIHTGEKPYKCKECGKAFPYSSHLIRHHRIHTGEKPYKCKACSKSFSDSSGLTVHRRTHTGEKPYTCKECGKAFSYSSDVIQHRRIHTGQRPYKCEECGKAFNYRSYLTTHQRSHTGERPYKCEECGKAFNSRSYLTTHRRRHTGERPYKCDECGKAFSYRSYLTTHRRSHSGERPYKCEECGKAFNSRSYLIAHQRSHTREKL

SEQ ID NO: 3606 - protein, 1604 aa, Homo sapiens
MGAKESRIGFLSYEEALRRVTDVELKRLKDAFKRTCGLSYYMGQHCFIREVLGDGVPPKVAEVIYCSFGGTSKGLHFNNLIVGLVLLTRGKDEEKAKYIFSLFSSESGNYVIREEMERMLHVVDGKVPDTLRKCFSEGEKVNYEKFRNWLFLNKDAFTFSRWLLSGGVYVTLTDDSDTPTFYQTLAGVTHLEESDIIDLEKRYWLLKAQSRTGRFDLETFGPLVSPPIRPSLSEGLFNAFDENRDNHIDFKEISCGLSACCRGPLAERQKFCFKVFDVDRDGVLSRVELRDMVVALLEVWKDNRTDDIPELHMDLSDIVEGILNAHDTTKMGHLTLEDYQIWSVKNVLANEFLNLLFQVCHIVLGLRPATPEEEGQIIRGWLERESRYGLQAGHNWFIISMQWWQQWKEYVKYDANPVVIEPSSVLNGGKYSFGTAAHPMEQVEDRIGSSLSYVNTTEEKFSDNISTASEASETAGSGFLYSATPGADVCFARQHNTSDNNNQCLLGANGNILLHLNPQKPGAIDNQPLVTQEPVKATSLTLEGGRLKRTPQLIHGRDYEMVPEPVWRALYHWYGANLALPRPVIKNSKTDIPELELFPRYLLFLRQQPATRTQQSNIWVNMGNVPSPNAPLKRVLAYTGCFSRMQTIKEIHEYLSQRLRIKEEDMRLWLYNSENYLTLLDDEDHKLEYLKIQDEQHLVIEVRNKDMSWPEEMSFIANSSKIDRHKVPTEKGATGLSNLGNTCFMNSSIQCVSNTQPLTQYFISGRHLYELNRTNPIGMKGHMAKCYGDLVQELWSGTQKNVAPLKLRWTIAKYAPRFNGFQQQDSQELLAFLLDGLHEDLNRVHEKPYVELKDSDGRPDWEVAAEAWDNHLRRNRSIVVDLFHGQLRSQVKCKTCGHISVRFDPFNFLSLPLPMDSYMHLEITVIKLDGTTPVRYGLRLNMDEKYTGLKKQLSDLCGLNSEQILLAEVHGSNIKNFPQDNQKVRLSVSGFLCAFEIPVPVSPISASSPTQTDFSSSPSTNEMFTLTTNGDLPRPIFIPNGMPNTVVPCGTEKNFTNGMVNGHMPSLPDSPFTGYIIAVHRKMMRTELYFLSSQKNRPSLFGMPLIVPCTVHTRKKDLYDAVWIQVSRLASPLPPQEASNHAQDCDDSMGYQYPFTLRVVQKDGNSCAWCPWYRFCRGCKIDCGEDRAFIGNAYIAVDWDPTALHLRYQTSQERVVDEHESVEQSRRAQAEPINLDSCLRAFTSEEELGENEMYYCSKCKTHCLATKKLDLWRLPPILIIHLKRFQFVNGRWIKSQKIVKFPRESFDPSAFLVPRDPALCQHKPLTPQGDELSEPRILAREVKKVDAQSSAGEEDVLLSKSPSSLSANIISSPKGSPSSSRKSGTSCPSSKNSSPNSSPRTLGRSKGRLRLPQIGSKNKLSSSKENLDASKENGAGQICELADALSRGHVLGGSQPELVTPQDHEVALANGFLYEHEACGNGYSNGQLGNHSEEDSTDDQREDTRIKPIYNLYAISCHSGILGGGHYVTYAKNPNCKWYCYNDSSCKELHPDEIDTDSAYILFYEQQGIDYAQFLPKTDGKKMADTSSMDEDFESDYKKYCVLQ

SEQ ID NO: 3607 - protein, 991 aa, Homo sapiens
MAGPVSLRDLLMGASAWMGSESPGGSPTEGGGSAAGGPEPPWREDEICVVGIFGKTALRLNSEKFSLVNTVCDRQVFPLFRHQDPGDPGPGIRTEAGAVGEAGGAEDPGAAAGGSVRGSGAVAEGNRTEAGSQDYSLLQAYYSQESKVLYLLLTSICDNSQLLRACRALQSGEAGGGLSLPHAEAHEFWKHQEKLQCLSLLYLFSVCHILLLVHPTCSFDITYDRVFRALDGLRQKVLPLLKTAIKDCPVGKDWKLNCRPCPPRLLFLFQLNGALKVEPPRNQDPAHPDKPKKHSPKRRLQHALEDQIYRIFRKSRVLTNQSINCLFTVPANQAFVYIVPGSQEEDPVGMLLDQLRSHCTVKDPESLLVPAPLSGPRRYQVMRQHSRQQLSFHIDSSSSSSSGQLVDFTLREFLWQHVELVLSKKGFDDSVGRNPQPSHFELPTYQKWISAASKLYEVAIDGKEEDLGSPTGELTSKILSSIKVLEGFLDIDTKFSENRCQKALPMAHSAYQSNLPHNYTMTVHKNQLAQALRVYSQHARGPAFHKYAMQLHEDCYKFWSNGHQLCEERSLTDQHCVHKFHSLPKSGEKPEADRNPPVLYHNSRARSTGACNCGRKQAPRDDPFDIKAANYDFYQLLEEKCCGKLDHINFPVFEPSTPDPAPAKNESSPAPPDSDADKLKEKEPQTQGESTSLSLALSLGQSTDSLGTYPADPQAGGDNPEVHGQVEVKTEKRPNFVDRQASTVEYLPGMLHSNCPKGLLPKFSSWSLVKLGPAKSYNFHTGLDQQGFIPGTNYLMPWDIVIRTRAEDEGDLDTNSWPAPNKAIPGKRSAVVMGRGRRRDDIARAFVGFEYEDSRGRRFMCSGPDKVMKVMGSGPKESALKALNSDMPLYILSSSQGRGLKPHYAQLMRLFVVVPDAPLQIILMPQVQPGPPPCPVFYPEKQEITLPPDGLWVLRFPYAYVTERGPCFPPKENVQLMSYKVLRGVLKAVTQ

SEQ ID NO: 3608 - protein, 755 aa, Homo sapiens
MRPAPIALWLRLVLALALVRPRAVGWAPVRAPIYVSSWAVQVSQGNREVERLARKFGFVNLGPIFPDGQYFHLRHRGVVQQSLTPHWGHRLHLKKNPKVQWFQQQTLQRRVKRSVVVPTDPWFSKQWYMNSEAQPDLSILQAWSQGLSGQGIVVSVLDDGIEKDHPDLWANYDPLASYDFNDYDPDPQPRYTPSKENRHGTRCAGEVAAMANNGFCGVGVAFNARIGGVRMLDGTITDVIEAQSLSLQPQHIHIYSASWGPEDDGRTVDGPGILTREAFRRGVTKGRGGLGTLFIWASGNGGLHYDNCNCDGYTNSIHTLSVGSTTQQGRVPWYSEACASTLTTTYSSGVATDPQIVTTDLHHGCTDQHTGTSASAPLAAGMIALALEANPFLTWRDMQHLVVRASKPAHLQAEDWRTNGVGRQVSHHYGYGLLDAGLLVDTARTWLPTQPQRKCAVRVQSRPTPILPLIYIRENVSACAGLHNSIRSLEHVQAQLTLSYSRRGDLEISLTSPMGTRSTLVAIRPLDVSTEGYNNWVFMSTHFWDENPQGVWTLGLENKGYYFNTGTLYRYTLLLYGTAEDMTARPTGPQVTSSACVQRDTEGLCQACDGPAYILGQLCLAYCPPRFFNHTRLVTAGPGHTAAPALRVCSSCHASCYTCRGGSPRDCTSCPPSSTLDQQQGSCMGPTTPDSRPRLRAAACPHHRCPASAMVLSLLAVTLGGPVLCGMSMDLPLYAWLSRARATPTKPQVWLPAGT

SEQ ID NO: 3609 - protein, 331 aa, Homo sapiens
MSMTTRAWEELDGGLGSCQALEDHSALAETQEDRASATPRLADSGSVPHDSQVAEGPSVDTRPKKMEKEPAARGTPGTGKERLKAGASPRSVPARKKAQTAPPLQPPPPPPALSEELPWGDLSLNKCLVLASLVALLGSAFQLCRDAVPGEAALQARVPEPWVPPSSAPREPSSPLPKFEAQAPPSAPPAPRAEAEVRPKIPGSREAAENDEEEPGEATGEAVREDRVTLADRGPKERPRREGKPRKEKPRKEERPKKERPRKEERPRAAREPREALPQRWESREGGHRPWARDSRDAEPRKKQAWVSPRRPDEEQRPGSRQKLRAGKGRD

SEQ ID NO: 3610 - protein, 615 aa, Homo sapiens
MAESGGSSGGAGGGGAFGAGPGPERPNSTADKNGALKCTFSAPSHSTSLLQGLATLRAQGQLLDVVLTINREAFPAHKVVLAACSDYFRAMFTGGMREASQDVIELKGVSARGLRHIIDFAYSAEVTLDLDCVQDVLGAAVFLQMLPVVELCEEFLKAAMSVETCLNIGQMATTFSLASLRESVDAFTFRHFLQIAEEEDFLRLPLERLVFFLQSNRLQSCAEIDLFRAAVRWLQHDPARRPRASHVLCHIRFPLMQSSELVDSVQTLDIMVEDVLCRQYLLEAFNYQVLPFRQHEMQSPRTAVRSDVPSLVTFGGTPYTDSDRSVSSKVYQLPEPGARHFRELTEMEVGCSHTCVAVLDNFVYVAGGQHLQYRSGEGAVDACYRYDPHLNRWLRLQAMQESRIQFQLNVLCGMVYATGGRNRAGSLASVERYCPRRNEWGYACSLKRRTWGHAGAASGGRLYISGGYGISVEDKKALHCYDPVADQWEFKAPMSEPRVLHAMVGAGGRIYALGGRMDHVDRCFDVLAVEYYVPETDQWTSVSPMRAGQSEAGCCLLERKIYIVGGYNWRLNNVTGIVQVYNTDTDEWERDLHFPESFAGIACAPVLLPRAGTRR

SEQ ID NO: 3611 - protein, 953 aa, Homo sapiens
MDVAESPERDPHSPEDEEQPQGLSDDDILRDSGSDQDLDGAGVRASDLEDEESAARGPSQEEEDNHSDEEDRASEPKSQDQDSEVNELSRGPTSSPCEEEGDEGEEDRTSDLRDEASSVTRELDEHELDYDEEVPEEPAPAVQEDEAEKAGAEDDEEKGEGTPREEGKAGVQSVGEKESLEAAKEKKKEDDDGEIDDGEIDDDDLEEGEVKDPSDRKVRPRPTCRFFMKGNCTWGMNCRFIHPGVNDKGNYSLITKADPFPPNGAPPLGPHPLMPANPWGGPVVDEILPPPPPEPPTESAWERGLRHAKEVLKKATIRKEQEPDFEEKRFTVTIGEDEREFDKENEVFRDWNSRIPRDVRDTVLEPYADPYYDYEIERFWRGGQYENFRVQYTETEPYHNYRERERERERENRQRERERERERDRERERRQRERERERERERDKERQRRKEEWERERAKRDEKDRQHRDRDREKEREKEKGKPKPRSPQPPSRQAEPPKKEAATTGPQVKRADEWKDPWRRSKSPKKKLGVSVSPSRARRRRKTSASSASASNSSRSSSRSSSYSGSGSSRSRSRSSSYSSYSSRSSRHSSFSGSRSRSRSFSSSPSPSPTPSPHRPSIRTKGEPAPPPGKAGEKSVKKPAPPPAPPQATKTTAPVPEPTKPGDPREARRKERPARTPPRRRTLSGSGSGSGSSYSGSSSRSRSLSVSSVSSVSSATSSSSSAHSVDSEDMYADLASPVSSASSRSPAPAQTRKEKGKSKKEDGVKEEKRKRDSSTQPPKSAKPPAGGKSSQQPSTPQQAPPGQPQQGTFVAHKEIKLTLLNKAADKGSRKRYEPSDKDRQSPPPAKRPNTSPDRGSRDRKSGGRLGSPKPERQRGQNSKAPAAPADRKRQLSPQSKSSSKVTSVPGKASDPGAASTKSGKASTLSRREELLKQLKAVEDAIARKRAKIPGKA

SEQ ID NO: 3612 - protein, 2521 aa, Homo sapiens
MEPHVLGAVLYWLLLPCALLAACLLRFSGLSLVYLLFLLLLPWFPGPTRCGLQGHTGRLLRALLGLSLLFLVAHLALQICLHIVPRLDQLLGPSCSRWETLSRHIGVTRLDLKDIPNAIRLVAPDLGILVVSSVCLGICGRLARNTRQSPHPRELDDDERDVDASPTAGLQEAATLAPTRRSRLAARFRVTAHWLLVAAGRVLAVTLLALAGIAHPSALSSVYLLLFLALCTWWACHFPISTRGFSRLCVAVGCFGAGHLICLYCYQMPLAQALLPPAGIWARVLGLKDFVGPTNCSSPHALVLNTGLDWPVYASPGVLLLLCYATASLRKLRAYRPSGQRKEAAKGYEARELELAELDQWPQERESDQHVVPTAPDTEADNCIVHELTGQSSVLRRPVRPKRAEPREASPLHSLGHLIMDQSYVCALIAMMVWSITYHSWLTFVLLLWACLIWTVRSRHQLAMLCSPCILLYGMTLCCLRYVWAMDLRPELPTTLGPVSLRQLGLEHTRYPCLDLGAMLLYTLTFWLLLRQFVKEKLLKWAESPAALTEVTVADTEPTRTQTLLQSLGELVKGVYAKYWIYVCAGMFIVVSFAGRLVVYKIVYMFLFLLCLTLFQVYYSLWRKLLKAFWWLVVAYTMLVLIAVYTFQFQDFPAYWRNLTGFTDEQLGDLGLEQFSVSELFSSILVPGFFLLACILQLHYFHRPFMQLTDMEHVSLPGTRLPRWAHRQDAVSGTPLLREEQQEHQQQQQEEEEEEEDSRDEGLGVATPHQATQVPEGAAKWGLVAERLLELAAGFSDVLSRVQVFLRRLLELHVFKLVALYTVWVALKEVSVMNLLLVVLWAFALPYPRFRPMASCLSTVWTCVIIVCKMLYQLKVVNPQEYSSNCTEPFPNSTNLLPTEISQSLLYRGPVDPANWFGVRKGFPNLGYIQNHLQVLLLLVFEAIVYRRQEHYRRQHQLAPLPAQAVFASGTRQQLDQDLLGCLKYFINFFFYKFGLEICFLMAVNVIGQRMNFLVTLHGCWLVAILTRRHRQAIARLWPNYCLFLALFLLYQYLLCLGMPPALCIDYPWRWSRAVPMNSALIKWLYLPDFFRAPNSTNLISDFLLLLCASQQWQVFSAERTEEWQRMAGVNTDRLEPLRGEPNPVPNFIHCRSYLDMLKVAVFRYLFWLVLVVVFVTGATRISIFGLGYLLACFYLLLFGTALLQRDTRARLVLWDCLILYNVTVIISKNMLSLLACVFVEQMQTGFCWVIQLFSLVCTVKGYYDPKEMMDRDQDCLLPVEEAGIIWDSVCFFFLLLQRRVFLSHYYLHVRADLQATALLASRGFALYNAANLKSIDFHRRIEEKSLAQLKRQMERIRAKQEKHRQGRVDRSRPQDTLGPKDPGLEPGPDSPGGSSPPRRQWWRPWLDHATVIHSGDYFLFESDSEEEEEAVPEDPRPSAQSAFQLAYQAWVTNAQAVLRRRQQEQEQARQEQAGQLPTGGGPSQEVEPAEGPEEAAAGRSHVVQRVLSTAQFLWMLGQALVDELTRWLQEFTRHHGTMSDVLRAERYLLTQELLQGGEVHRGVLDQLYTSQAEATLPGPTEAPNAPSTVSSGLGAEEPLSSMTDDMGSPLSTGYHTRSGSEEAVTDPGEREAGASLYQGLMRTASELLLDRRLRIPELEEAELFAEGQGRALRLLRAVYQCVAAHSELLCYFIIILNHMVTASAGSLVLPVLVFLWAMLSIPRPSKRFWMTAIVFTEIAVVVKYLFQFGFFPWNSHVVLRRYENKPYFPPRILGLEKTDGYIKYDLVQLMALFFHRSQLLCYGLWDHEEDSPSKEHDKSGEEEQGAEEGPGVPAATTEDHIQVEARVGPTDGTPEPQVELRPRDTRRISLRFRRRKKEGPARKGAAAIEAEDREEEEGEEEKEAPTGREKRPSRSGGRVRAAGRRLQGFCLSLAQGTYRPLRRFFHDILHTKYRAATDVYALMFLADVVDFIIIIFGFWAFGKHSAATDITSSLSDDQVPEAFLVMLLIQFSTMVVDRALYLRKTVLGKLAFQVALVLAIHLWMFFILPAVTERMFNQNVVAQLWYFVKCIYFALSAYQIRCGYPTRILGNFLTKKYNHLNLFLFQGFRLVPFLVELRAVMDWVWTDTTLSLSSWMCVEDIYANIFIIKCSRETEKKYPQPKGQKKKKIVKYGMGGLIILFLIAIIWFPLLFMSLVRSVVGVVNQPIDVTVTLKLGGYEPLFTMSAQQPSIIPFTAQAYEELSRQFDPQPLAMQFISQYSPEDIVTAQIEGSSGALWRISPPSRAQMKRELYNGTADITLRFTWNFQRDLAKGGTVEYANEKHMLALAPNSTARRQLASLLEGTSDQSVVIPNLFPKYIRAPNGPEANPVKQLQPNEEADYLGVRIQLRREQGAGATGFLEWWVIELQECRTDCNLLPMVIFSDKVSPPSLGFLAGYGIMGLYVSIVLVIGKFVRGFFSEISHSIMFEELPCVDRILKLCQDIFLVRETRELELEEELYAKLIFLYRSPETMIKWTREKE

SEQ ID NO: 3613 - protein, 2663 aa, Homo sapiens
MPKGGCPKAPQQEELPLSSDMVEKQTGKKDKDKVSLTKTPKLERGDGGKEVRERASKRKLPFTAGANGEQKDSDTEKQGPERKRIKKEPVTRKAGLLFGMGLSGIRAGYPLSERQQVALLMQMTAEESANSPVDTTPKHPSQSTVCQKGTPNSASKTKDKVNKRNERGETRLHRAAIRGDARRIKELISEGADVNVKDFAGWTALHEACNRGYYDVAKQLLAAGAEVNTKGLDDDTPLHDAANNGHYKVVKLLLRYGGNPQQSNRKGETPLKVANSPTMVNLLLGKGTYTSSEESSTESSEEEDAPSFAPSSSVDGNNTDSEFEKGLKHKAKNPEPQKATAPVKDEYEFDEDDEQDRVPPVDDKHLLKKDYRKETKSNSFISIPKMEVKSYTKNNTIAPKKASHRILSDTSDEEDASVTVGTGEKLRLSAHTILPGSKTREPSNAKQQKEKNKVKKKRKKETKGREVRFGKRSDKFCSSESESESSESGEDDRDSLGSSGCLKGSPLVLKDPSLFSSLSASSTSSHGSSAAQKQNPSHTDQHTKHWRTDNWKTISSPAWSEVSSLSDSTRTRLTSESDYSSEGSSVESLKPVRKRQEHRKRASLSEKKSPFLSSAEGAVPKLDKEGKVVKKHKTKHKHKNKEKGQCSISQELKLKSFTYEYEDSKQKSDKAILLENDLSTENKLKVLKHDRDHFKKEEKLSKMKLEEKEWLFKDEKSLKRIKDTNKDISRSFREEKDRSNKAEKERSLKEKSPKEEKLRLYKEERKKKSKDRPSKLEKKNDLKEDKISKEKEKIFKEDKEKLKKEKVYREDSAFDEYCNKNQFLENEDTKFSLSDDQRDRWFSDLSDSSFDFKGEDSWDSPVTDYRDMKSDSVAKLILETVKEDSKERRRDSRAREKRDYREPFFRKKDRDYLDKNSEKRKEQTEKHKSVPGYLSEKDKKRRESAEAGRDRKDALESCKERRDGRAKPEEAHREELKECGCESGFKDKSDGDFGKGLEPWERHHPAREKEKKDGPDKERKEKTKPERYKEKSSDKDKSEKSILEKCQKDKEFDKCFKEKKDTKEKHKDTHGKDKERKASLDQGKEKKEKAFPGIISEDFSEKKDDKKGKEKSWYIADIFTDESEDDRDSCMGSGFKMGEASDLPRTDGLQEKEEGREAYASDRHRKSSDKQHPERQKDKEPRDRRKDRGAADAGRDKKEKVFEKHKEKKDKESTEKYKDRKDRASVDSTQDKKNKQKLPEKAEKKHAAEDKAKSKHKEKSDKEHSKERKSSRSADAEKSLLEKLEEEALHEYREDSNDKISEVSSDSFTDRGQEPGLTAFLEVSFTEPPGDDKPRESACLPEKLKEKERHRHSSSSSKKSHDRERAKKEKAEKKEKGEDYKEGGSRKDSGQYEKDFLEADAYGVSYNMKADIEDELDKTIELFSTEKKDKNDSEREPSKKIEKELKPYGSSAINILKEKKKREKHREKWRDEKERHRDRHADGLLRHHRDELLRHHRDEQKPATRDKDSPPRVLKDKSRDEGPRLGDAKLKEKFKDGAEKEKGDPVKMSNGNDKVAPSKDPGKKDARPREKLLGDGDLMMTSFERMLSQKDLEIEERHKRHKERMKQMEKLRHRSGDPKLKEKAKPADDGRKKGLDIPAKKPPGLDPPFKDKKLKESTPIPPAAENKLHPASGADSKDWLAGPHMKEVLPASPRPDQSRPTGVPTPTSVLSCPSYEEVMHTPRTPSCSADDYADLVFDCADSQHSTPVPTAPTSACSPSFFDRFSVASSGLSENASQAPARPLSTNLYRSVSVDIRRTPEEEFSVGDKLFRQQSVPAASSYDSPMPPSMEDRAPLPPVPAEKFACLSPGYYSPDYGLPSPKVDALHCPPAAVVTVTPSPEGVFSSLQAKPSPSPRAELLVPSLEGALPPDLDTSEDQQATAAIIPPEPSYLEPLDEGPFSAVITEEPVEWAHPSEQALASSLIGGTSENPVSWPVGSDLLLKSPQRFPESPKRFCPADPLHSAAPGPFSASEAPYPAPPASPAPYALPVAEPGLEDVKDGVDAVPAAISTSEAAPYAPPSGLESFFSNCKSLPEAPLDVAPEPACVAAVAQVEALGPLENSFLDGSRGLSHLGQVEPVPWADAFAGPEDDLDLGPFSLPELPLQTKDAADGEAEPVEESLAPPEEMPPGAPGVINGGDVSTVVAEEPPALPPDQASTRLPAELEPEPSGEPKLDVALEAAVEAETVPEERARGDPDSSVEPAPVPPEQRPLGSGDQGAEAEGPPAASLCAPDGPAPNTVAQAQAADGAGPEDDTEASRAAAPAEGPPGGIQPEAAEPKPTAEAPKAPRVEEIPQRMTRNRAQMLANQSKQGPPPSEKECAPTPAPVTRAKARGSEDDDAQAQHPRKRRFQRSTQQLQQQLNTSTQQTREVIQQTLAAIVDAIKLDAIEPYHSDRANPYFEYLQIRKKIEEKRKILCCITPQAPQCYAEYVTYTGSYLLDGKPLSKLHIPVIAPPPSLAEPLKELFRQQEAVRGKLRLQHSIEREKLIVSCEQEILRVHCRAARTIANQAVPFSACTMLLDSEVYNMPLESQGDENKSVRDRFNARQFISWLQDVDDKYDRMKTCLLMRQQHEAAALNAVQRMEWQLKVQELDPAGHKSLCVNEVPSFYVPMVDVNDDFVLLPA

SEQ ID NO: 3614 - protein, 484 aa, Homo sapiens
MYDDSYVPGFEDSEAGSADSYTSRPSLDSDVSLEEDRESARREVESQAQQQLERAKHKPVAFAVRTNVSYCGVLDEECPVQGSGVNFEAKDFLHIKEKYSNDWWIGRLVKEGGDIAFIPSPQRLESIRLKQEQKARRSGNPSSLSDIGNRRSPPPSLAKQKQKQAEHVPPYDVVPSMRPVVLVGPSLKGYEVTDMMQKALFDFLKHRFDGRISITRVTADLSLAKRSVLNNPGKRTIIERSSARSSIAEVQSEIERIFELAKSLQLVVLDADTINHPAQLAKTSLAPIIVFVKVSSPKVLQRLIRSRGKSQMKHLTVQMMAYDKLVQCPPESFDVILDENQLEDACEHLAEYLEVYWRATHHPAPGPGLLGPPSAIPGLQNQQLLGERGEEHSPLERDSLMPSDEASESSRQAWTGSSQRSSRHLEEDYADAYQDLYQPHRQHTSGLPSANGHDPQDRLLAQDSEHNHSDRNWQRNRPWPKDSY

SEQ ID NO: 3615 - protein, 5537 aa, Homo sapiens
MDSQKLAGEDKDSEPAADGPAASEDPSATESDLPNPHVGEVSVLSSGSPRLQETPQDCSGGPVRRCALCNCGEPSLHGQRELRRFELPFDWPRCPVVSPGGSPGPNEAVLPSEDLSQIGFPEGLTPAHLGEPGGSCWAHHWCAAWSAGVWGQEGPELCGVDKAIFSGISQRCSHCTRLGASIPCRSPGCPRLYHFPCATASGSFLSMKTLQLLCPEHSEGAAYLEEARCAVCEGPGELCDLFFCTSCGHHYHGACLDTALTARKRAGWQCPECKVCQACRKPGNDSKMLVCETCDKGYHTFCLKPPMEELPAHSWKCKACRVCRACGAGSAELNPNSEWFENYSLCHRCHKAQGGQTIRSVAEQHTPVCSRFSPPEPGDTPTDEPDALYVACQGQPKGGHVTSMQPKEPGPLQCEAKPLGKAGVQLEPQLEAPLNEEMPLLPPPEESPLSPPPEESPTSPPPEASRLSPPPEELPASPLPEALHLSRPLEESPLSPPPEESPLSPPPESSPFSPLEESPLSPPEESPPSPALETPLSPPPEASPLSPPFEESPLSPPPEELPTSPPPEASRLSPPPEESPMSPPPEESPMSPPPEASRLFPPFEESPLSPPPEESPLSPPPEASRLSPPPEDSPMSPPPEESPMSPPPEVSRLSPLPVVSRLSPPPEESPLSPPPEESPTSPPPEASRLSPPPEDSPTSPPPEDSPASPPPEDSLMSLPLEESPLLPLPEEPQLCPRSEGPHLSPRPEEPHLSPRPEEPHLSPQAEEPHLSPQPEEPCLCAVPEEPHLSPQAEGPHLSPQPEELHLSPQTEEPHLSPVPEEPCLSPQPEESHLSPQSEEPCLSPRPEESHLSPELEKPPLSPRPEKPPEEPGQCPAPEELPLFPPPGEPSLSPLLGEPALSEPGEPPLSPLPEELPLSPSGEPSLSPQLMPPDPLPPPLSPIITAAAPPALSPLGELEYPFGAKGDSDPESPLAAPILETPISPPPEANCTDPEPVPPMILPPSPGSPVGPASPILMEPLPPQCSPLLQHSLVPQNSPPSQCSPPALPLSVPSPLSPIGKVVGVSDEAELHEMETEKVSEPECPALEPSATSPLPSPMGDLSCPAPSPAPALDDFSGLGEDTAPLDGIDAPGSQPEPGQTPGSLASELKGSPVLLDPEELAPVTPMEVYPECKQTAGQGSPCEEQEEPRAPVAPTPPTLIKSDIVNEISNLSQGDASASFPGSEPLLGSPDPEGGGSLSMELGVSTDVSPARDEGSLRLCTDSLPETDDSLLCDAGTAISGGKAEGEKGRRRSSPARSRIKQGRSSSFPGRRRPRGGAHGGRGRGRARLKSTASSIETLVVADIDSSPSKEEEEEDDDTMQNTVVLFSNTDKFVLMQDMCVVCGSFGRGAEGHLLACSQCSQCYHPYCVNSKITKVMLLKGWRCVECIVCEVCGQASDPSRLLLCDDCDISYHTYCLDPPLLTVPKGGWKCKWCVSCMQCGAASPGFHCEWQNSYTHCGPCASLVTCPICHAPYVEEDLLIQCRHCERWMHAGCESLFTEDDVEQAADEGFDCVSCQPYVVKPVAPVAPPELVPMKVKEPEPQYFRFEGVWLTETGMALLRNLTMSPLHKRRQRRGRLGLPGEAGLEGSEPSDALGPDDKKDGDLDTDELLKGEGGVEHMECEIKLEGPVSPDVEPGKEETEESKKRKRKPYRPGIGGFMVRQRKSHTRTKKGPAAQAEVLSGDGQPDEVIPADLPAEGAVEQSLAEGDEKKKQQRRGRKKSKLEDMFPAYLQEAFFGKELLDLSRKALFAVGVGRPSFGLGTPKAKGDGGSERKELPTSQKGDDGPDIADEESRGLEGKADTPGPEDGGVKASPVPSDPEKPGTPGEGMLSSDLDRISTEELPKMESKDLQQLFKDVLGSEREQHLGCGTPGLEGSRTPLQRPFLQGGLPLGNLPSSSPMDSYPGLCQSPFLDSRERGGFFSPEPGEPDSPWTGSGGTTPSTPTTPTTEGEGDGLSYNQRSLQRWEKDEELGQLSTISPVLYANINFPNLKQDYPDWSSRCKQIMKLWRKVPAADKAPYLQKAKDNRAAHRINKVQKQAESQINKQTKVGDIARKTDRPALHLRIPPQPGALGSPPPAAAPTIFIGSPTTPAGLSTSADGFLKPPAGSVPGPDSPGELFLKLPPQVPAQVPSQDPFGLAPAYPLEPRFPTAPPTYPPYPSPTGAPAQPPMLGASSRPGAGQPGEFHTTPPGTPRHQPSTPDPFLKPRCPSLDNLAVPESPGVGGGKASEPLLSPPPFGESRKALEVKKEELGASSPSYGPPNLGFVDSPSSGTHLGGLELKTPDVFKAPLTPRASQVEPQSPGLGLRPQEPPPAQALAPSPPSHPDIFRPGSYTDPYAQPPLTPRPQPPPPESCCALPPRSLPSDPFSRVPASPQSQSSSQSPLTPRPLSAEAFCPSPVTPRFQSPDPYSRPPSRPQSRDPFAPLHKPPRPQPPEVAFKAGSLAHTSLGAGGFPAALPAGPAGELHAKVPSGQPPNFVRSPGTGAFVGTPSPMRFTFPQAVGEPSLKPPVPQPGLPPPHGINSHFGPGPTLGKPQSTNYTVATGNFHPSGSPLGPSSGSTGESYGLSPLRPPSVLPPPAPDGSLPYLSHGASQRSGITSPVEKREDPGTGMGSSLATAELPGTQDPGMSGLSQTELEKQRQRQRLRELLIRQQIQRNTLRQEKETAAAAAGAVGPPGSWGAEPSSPAFEQLSRGQTPFAGTQDKSSLVGLPPSKLSGPILGPGSFPSDDRLSRPPPPATPSSMDVNSRQLVGGSQAFYQRAPYPGSLPLQQQQQQLWQQQQATAATSMRFAMSARFPSTPGPELGRQALGSPLAGISTRLPGPGEPVPGPAGPAQFIELRHNVQKGLGPGGTPFPGQGPPQRPRFYPVSEDPHRLAPEGLRGLAVSGLPPQKPSAPPAPELNNSLHPTPHTKGPTLPTGLELVNRPPSSTELGRPNPLALEAGKLPCEDPELDDDFDAHKALEDDEELAHLGLGVDVAKGDDELGTLENLETNDPHLDDLLNGDEFDLLAYTDPELDTGDKKDIFNEHLRLVESANEKAEREALLRGVEPGPLGPEERPPPAADASEPRLASVLPEVKPKVEEGGRHPSPCQFTIATPKVEPAPAANSLGLGLKPGQSMMGSRDTRMGTGPFSSSGHTAEKASFGATGGPPAHLLTPSPLSGPGGSSLLEKFELESGALTLPGGPAASGDELDKMESSLVASELPLLIEDLLEHEKKELQKKQQLSAQLQPAQQQQQQQQQHSLLSAPGPAQAMSLPHEGSSPSLAGSQQQLSLGLAGARQPGLPQPLMPTQPPAHALQQRLAPSMAMVSNQGHMLSGQHGGQAGLVPQQSSQPVLSQKPMGTMPPSMCMKPQQLAMQQQLANSFFPDTDLDKFAAEDIIDPIAKAKMVALKGIKKVMAQGSIGVAPGMNRQQVSLLAQRLSGGPSSDLQNHVAAGSGQERSAGDPSQPRPNPPTFAQGVINEADQRQYEEWLFHTQQLLQMQLKVLEEQIGVHRKSRKALCAKQRTAKKAGREFPEADAEKLKLVTEQQSKIQKQLDQVRKQQKEHTNLMAEYRNKQQQQQQQQQQQQQQHSAVLALSPSQSPRLLTKLPGQLLPGHGLQPPQGPPGGQAGGLRLTPGGMALPGQPGGPFLNTALAQQQQQQHSGGAGSLAGPSGGFFPGNLALRSLGPDSRLLQERQLQLQQQRMQLAQKLQQQQQQQQQQQHLLGQVAIQQQQQQGPGVQTNQALGPKPQGLMPPSSHQGLLVQQLSPQPPQGPQGMLGPAQVAVLQQQHPGALGPQGPHRQVLMTQSRVLSSPQLAQQGQGLMGHRLVTAQQQQQQQQHQQQGSMAGLSHLQQSLMSHSGQPKLSAQPMGSLQQLQQQQQLQQQQQLQQQQQQQLQQQQQLQQQQLQQQQQQQQLQQQQQQQLQQQQQQLQQQQQQQQQQFQQQQQQQQMGLLNQSRTLLSPQQQQQQQVALGPGMPAKPLQHFSSPGALGPTLLLTGKEQNTVDPAVSSEATEGPSTHQGGPLAIGTTPESMATEPGEVKPSLSGDSQLLLVQPQPQPQPSSLQLQPPLRLPGQQQQQVSLLHTAGGGSHGQLGSGSSSEASSVPHLLAQPSVSLGDQPGSMTQNLLGPQQPMLERPMQNNTGPQPPKPGPVLQSGQGLPGVGIMPTVGQLRAQLQGVLAKNPQLRHLSPQQQQQLQALLMQRQLQQSQAVRQTPPYQEPGTQTSPLQGLLGCQPQLGGFPGPQTGPLQELGAGPRPQGPPRLPAPPGALSTGPVLGPVHPTPPPSSPQEPKRPSQLPSPSSQLPTEAQLPPTHPGTPKPQGPTLEPPPGRVSPAAAQLADTLFSKGLGPWDPPDNLAETQKPEQSSLVPGHLDQVNGQVVPEASQLSIKQEPREEPCALGAQSVKREANGEPIGAPGTSNHLLLAGPRSEAGHLLLQKLLRAKNVQLSTGRGSEGLRAEINGHIDSKLAGLEQKLQGTPSNKEDAAARKPLTPKPKRVQKASDRLVSSRKKLRKEDGVRASEALLKQLKQELSLLPLTEPAITANFSLFAPFGSGCPVNGQSQLRGAFGSGALPTGPDYYSQLLTKNNLSNPPTPPSSLPPTPPPSVQQKMVNGVTPSEELGEHPKDAASARDSERALRDTSEVKSLDLLAALPTPPHNQTEDVRMESDEDSDSPDSIVPASSPESILGEEAPRFPHLGSGRWEQEDRALSPVIPLIPRASIPVFPDTKPYGALGLEVPGKLPVTTWEKGKGSEVSVMLTVSAAAAKNLNGVMVAVAELLSMKIPNSYEVLFPESPARAGTEPKKGEAEGPGGKEKGLEGKSPDTGPDWLKQFDAVLPGYTLKSQLDILSLLKQESPAPEPPTQHSYTYNVSNLDVRQLSAPPPEEPSPPPSPLAPSPASPPTEPLVELPTEPLAEPPVPSPLPLASSPESARPKPRARPPEEGEDSRPPRLKKWKGVRWKRLRLLLTIQKGSGRQEDEREVAEFMEQLGTALRPDKVPRDMRRCCFCHEEGDGATDGPARLLNLDLDLWVHLNCALWSTEVYETQGGALMNVEVALHRGLLTKCSLCQRTGATSSCNRMRCPNVYHFACAIRAKCMFFKDKTMLCPMHKIKGPCEQELSSFAVFRRVYIERDEVKQIASIIQRGERLHMFRVGGLVFHAIGQLLPHQMADFHSATALYPVGYEATRIYWSLRTNNRRCCYRCSIGENNGRPEFVIKVIEQGLEDLVFTDASPQAVWNRIIEPVAAMRKEADMLRLFPEYLKGEELFGLTVHAVLRIAESLPGVESCQNYLFRYGRHPLMELPLMINPTGCARSEPKILTHYKRPHTLNSTSMSKAYQSTFTGETNTPYSKQFVHSKSSQYRRLRTEWKNNVYLARSRIQGLGLYAAKDLEKHTMVIEYIGTIIRNEVANRREKIYEEQNRGIYMFRINNEHVIDATLTGGPARYINHSCAPNCVAEVVTFDKEDKIIIISSRRIPKGEELTYDYQFDFEDDQHKIPCHCGAWNCRKWMN

SEQ ID NO: 3616 - protein, 531 aa, Homo sapiens
MGFLHVGQDGLELPTSGDPPASASQSAGITGVSHRTQPPCFEGLTSKDLVREEKTRKRKRKAKESGMALLQGLLTFRDVAIEFSQEEWKCLDPAQRTLYRDVMLENYRNLVSLDTSSKCMMKMFSSTGQGNTEVVHTGTLQIHASHHIGDTCFQEIEKDIHDFVFQWQENETNGHEALMTKTKKLMSSTERHDQRHAGNKPIKNELGSSFHSHLPEVHIFHPEGKIGNQVEKAINDAFSVSASQRISCRPKTRISNKYRNNFLQSSLLTQKREVHTREKSFQRNESGKAFNGSSLLKKHQIIHLGDKQYKCDVCGKDFHQKRYLACHRCHTGENPYTCNECGKTFSHNSALLVHKAIHTGEKPYKCNECGKVFNQQSNLARHHRVHTGEKPYKCEECDKVFSRKSHLERHRRIHTGEKPYKCKVCDKAFRRDSHLAQHTVIHTGEKPYKCNECGKTFVQNSSLVMHKVIHTGEKRYKCNECGKVFNHKSNLACHRRLHTGEKPYKCNECGKVFNRKSNLERHHRLHTGKKS

SEQ ID NO: 3617 - protein, 494 aa, Homo sapiens
MLASGMLLVALLVCLTVMVLMSVWQQRKSKGKLPPGPTPLPFIGNYLQLNTEQMYNSLMKISERYGPVFTIHLGPRRVVVLCGHDAVREALVDQAEEFSGRGEQATFDWVFKGYGVVFSNGERAKQLRRFSIATLRDFGVGKRGIEERIQEEAGFLIDALRGTGGANIDPTFFLSRTVSNVISSIVFGDRFDYKDKEFLSLLRMMLGIFQFTSTSTGQLYEMFSSVMKHLPGPQQQAFQLLQGLEDFIAKKVEHNQRTLDPNSPRDFIDSFLIRMQEEEKNPNTEFYLKNLVMTTLNLFIGGTETVSTTLRYGFLLLMKHPEVEAKVHEEIDRVIGKNRQPKFEDRAKMPYMEAVIHEIQRFGDVIPMSLARRVKKDTKFRDFFLPKGTEVYPMLGSVLRDPSFFSNPQDFNPQHFLNEKGQFKKSDAFVPFSIGKRNCFGEGLARMELFLFFTTVMQNFRLKSSQSPKDIDVSPKHVGFATIPRNYTMSFLPR

SEQ ID NO: 3618 - protein, 536 aa, Homo sapiens
MSPRVVSNSSVLASQSVGITNVRTVFSNVFNNTTAFPILRGSNCHKITAPGLGKGQLVNLLPPENLPWCGGSQGPRMLRTCYVLCSQAGPPSRGWQSLSFDGGAFHLKGTGELTRALLVLRLCAWPPLVTHGLLLQAWSRRLLGSRLSGAFLRASVYGQFVAGETAEEVKGCVQQLRTLSLRPLLAVPTEEEPDSAAKSGEAWYEGNLGAMLRCVDLSRGLLEPPSLAEASLMQLKVTALTSTRLCKELASWVRRPGASLELSPERLAEAMDSGQNLQVSCLNAEQNQHLRASLSRLHRVAQYARAQHVRLLVDAEYTSLNPALSLLVAALAVRWNSPGEGGPWVWNTYQACLKDTFERLGRDAEAAHRAGLAFGVKLVRGAYLDKERAVAQLHGMEDPTQPDYEATSQSYSRCLELMLTHVARHGPMCHLMVASHNEESVRQATKRMWELGIPLDGTVCFGQLLGMCDHVSLALGQAGYVVYKSIPYGSLEEVIPYLIRRAQENRSVLQGARREQELLSQELWRRLLPGCRRIPH

SEQ ID NO: 3619 - protein, 894 aa, Homo sapiens
MAWRCPRMGRVPLAWCLALCGWACMAPRGTQAEESPFVGNPGNITGARGLTGTLRCQLQVQGEPPEVHWLRDGQILELADSTQTQVPLGEDEQDDWIVVSQLRITSLQLSDTGQYQCLVFLGHQTFVSQPGYVGLEGLPYFLEEPEDRTVAANTPFNLSCQAQGPPEPVDLLWLQDAVPLATAPGHGPQRSLHVPGLNKTSSFSCEAHNAKGVTTSRTATITVLPQQPRNLHLVSRQPTELEVAWTPGLSGIYPLTHCTLQAVLSDDGMGIQAGEPDPPEEPLTSQASVPPHQLRLGSLHPHTPYHIRVACTSSQGPSSWTHWLPVETPEGVPLGPPENISATRNGSQAFVHWQEPRAPLQGTLLGYRLAYQGQDTPEVLMDIGLRQEVTLELQGDGSVSNLTVCVAAYTAAGDGPWSLPVPLEAWRPGQAQPVHQLVKEPSTPAFSWPWWYVLLGAVVAAACVLILALFLVHRRKKETRYGEVFEPTVERGELVVRYRVRKSYSRRTTEATLNSLGISEELKEKLRDVMVDRHKVALGKTLGEGEFGAVMEGQLNQDDSILKVAVKTMKIAICTRSELEDFLSEAVCMKEFDHPNVMRLIGVCFQGSERESFPAPVVILPFMKHGDLHSFLLYSRLGDQPVYLPTQMLVKFMADIASGMEYLSTKRFIHRDLAARNCMLNENMSVCVADFGLSKKIYNGDYYRQGRIAKMPVKWIAIESLADRVYTSKSDVWSFGVTMWEIATRGQTPYPGVENSEIYDYLRQGNRLKQPADCLDGLYALMSRCWELNPQDRPSFTELREDLENTLKALPPAQEPDEILYVNMDEGGGYPEPPGAAGGADPPTQPDPKDSCSCLTAAEVHPAGRYVLCPSTTPSPAQPADRGSPAAPGQEDGA

SEQ ID NO: 3620 - protein, 1576 aa, Homo sapiens
MAERGLEPSPAAVAALPPEVRAQLAELELELSEGDITQKGYEKKRSKLLSPYSPQTQETDSAVQKELRNQTPAPSAAQTSAPSKYHRTRSGGARDERYRSDIHTEAVQAALAKHKEQKMALPMPTKRRSTFVQSPADACTPPDTSSASEDEGSLRRQAALSAALQQSLQNAESWINRSIQGSSTSSSASSTLSHGEVKGTSGSLADVFANTRIENFSAPPDVTTTTSSSSSSSSIRPANIDLPPSGIVKGMHKGSNRSSLMDTADGVPVSSRVSTKIQQLLNTLKRPKRPPLKEFFVDDSEEIVEVPQPDPNQPKPEGRQMTPVKGEPLGVICNWPPALESALQRWGTTQAKCSCLTALDMTGKPVYTLTYGKLWSRSLKLAYTLLNKLGTKNEPVLKPGDRVALVYPNNDPVMFMVAFYGCLLAEVIPVPIEVPLTRKDAGGQQIGFLLGSCGIALALTSEVCLKGLPKTQNGEIVQFKGWPRLKWVVTDSKYLSKPPKDWQPHISPAGTEPAYIEYKTSKEGSVMGVTVSRLAMLSHCQALSQACNYSEGETIVNVLDFKKDAGLWHGMFANVMNKMHTISVPYSVMKTCPLSWVQRVHAHKAKVALVKCRDLHWAMMAHRDQRDVSLSSLRMLIVTDGANPWSVSSCDAFLSLFQSHGLKPEAICPCATSAEAMTVAIRRPGVPGAPLPGRAILSMNGLSYGVIRVNTEDKNSALTVQDVGHVMPGGMMCIVKPDGPPQLCKTDEIGEICVSSRTGGMMYFGLAGVTKNTFEVIPVNSAGSPVGDVPFIRSGLLGFVGPGSLVFVVGKMDGLLMVSGRRHNADDIVATGLAVESIKTVYRGRIAVFSVSVFYDERIVVVAEQRPDASEEDSFQWMSRVLQAIDSIHQVGVYCLALVPANTLPKTPLGGIHISQTKQLFLEGSLHPCNILMCPHTCVTNLPKPRQKQPGVGPASVMVGNLVAGKRIAQAAGRDLGQIEENDLVRKHQFLAEILQWRAQATPDHVLFMLLNAKGTTVCTASCLQLHKRAERIASVLGDKGHLNAGDNVVLLYPPGIELIAAFYGCLYAGCIPVTVRPPHAQNLTATLPTVRMIVDVSKAACILTSQTLMRLLRSREAAAAVDVKTWPTIIDTDDLPRKRLPQLYKPPTPEMLAYLDFSVSTTGMLTGVKMSHSAVNALCRAIKLQCELYSSRQIAICLDPYCGLGFALWCLCSVYSGHQSVLIPPMELENNLFLWLSTVNQYKIRDTFCSYSVMELCTKGLGNQVEVLKTRGINLSCVRTCVVVAEERPRVALQQSFSKLFKDIGLSPRAVSTTFGSRVNVAICLQGTSGPDPTTVYVDLKSLRHDRVRLVERGAPQSLLLSESGKILPGVKVVIVNPETKGPVGDSHLGEIWVNSPHTASGYYTIYDSETLQADHFNTRLSFGDAAQTLWARTGYLGFVRRTELTAATGERHDALYVVGALDETLELRGLRYHPIDIETSVSRIHRSIAECAVFTWTNLLVVVVELCGSEQEALDLVPLVTNVVLEEHYLIVGVVVVVDPGVIPINSRGEKQRMHLRDSFLADQLDPIYVAYNM

SEQ ID NO: 3621 - protein, 452 aa, Homo sapiens
MKVQPSVTCVASWGGIVHLEAFGDPVIVLRGAWAVPRVDCLIDTLRTPNASCMRKGTHLLVPCLEEEELALHRRRLDMSEALPCPGKETPTPGCRLGALYWACVHNDPTQLQAILDGGVSPEEATQVDSNGRTGLMVACYHGFQSVVALLSHCPFLDVNQQDKGGDTALMLAAQAGHVPLVSLLLNYYVGLDLERRDQRGLTALMKAAMRNRCADLTAVDPVRGKTALEWAVLTDSFDTVWRIRQLLRRPQVEQLSQHYKPEWPALSGLVAQAQAQAQVAPSLLERLQATLSLPFAPSPQEGGVLDHLVTATTSLASPFVTTACHTLCPDHPPSLGTRSKSVPELLGTAPPPPLVPQSPPGSPQRSPWVFVPYQSPQGILSKCLQWLQPRDSTSPRPQVPKILLSKASSSSHQCQPKPSPSGHQSLALPLWRYQELRIEKRKQEEEARMAQK

SEQ ID NO: 3622 - protein, 270 aa, Homo sapiens
MSPHPTALLGLVLCLAQTIHTQEEDLPRPSISAEPGTVIPLGSHVTFVCRGPVGVQTFRLERDSRSTYNDTEDVSQASPSESEARFRIDSVREGNAGLYRCIYYKPPKWSEQSDYLELLVKGPTQRPSDNSHNEHAPASQGLKAEHLYILIGVSVVFLFCLLLLVLFCLHRQNQIKQGPPRSKDEEQKPQQRPDLAVDVLERTADKATVNGLPEKDRETDTSALAAGSSQEVTYAQLDHWALTQRTARAVSPQSTKPMAESITYAAVARH

SEQ ID NO: 3623 - protein, 451 aa, Homo sapiens
MGAPPGYRPSAWVHLLHQLPRADFQLRPVPSVFAPQEQEYQQALLLVAALAGLGLGLSLIFIAVYLIRFCCCRPPEPPGSKIPSPGGGCVTWSCIVALLAGCTGIGIGFYGNSETSDGVSQLSSALLHANHTLSTIDHLVLETVERLGEAVRTELTTLEEVLEPRTELVAAARGARRQAEAAAQQLQGLAFWQGVPLSPLQVAENVSFVEEYRWLAYVLLLLLELLVCLFTLLGLAKQSKWLVIVMTVMSLLVLVLSWGSMGLEAATAVGLSDFCSNPDPYVLNLTQEETGLSSDILSYYLLCNRAVSNPFQQRLTLSQRALANIHSQLLGLEREAVPQFPSAQKPLLSLEETLNVTEGNFHQLVALLHCRSLHKDYGAALRGLCEDALEGLLFLLLFSLLSAGALATALCSLPRAWALFPPSDDYDDTDDDDPFNPQQESKRFVQWQSSI

SEQ ID NO: 3624 - protein, 670 aa, Homo sapiens
MAEVVAEVAEMPTQMSPGAVEMSTPMSAEMMEMSTEVTEMTPGEALASSLFFQHHQFMCSECGSLYNTLEEVLSHQEQHMLAVSEEEALTTQNVGLEPELVPGAEGPFQCGECSQLILSPGELLAHQDAHLRESANQIQYQCWDCQELFPSPELWVAHRKAQHLSATVAEPPVPPPLPPPTPLPPPSPPSEVKMEPYECPECSTLCATPEEFLEHQGTHFDSLEKEERNGLEEEEEDDEEDEEDDEEMEDEEAMAEVGDDAVGGDESTAGWAQGCGDCPQHQPSAGARRQHRRTAHSPASATHPFHCSQCQRSFSSANRLQAHGRAHVGGTHECTTCSKVFKKAASLEQHLRLHRGEARYLCVDCGRGFGTELTLVAHRRAHTANPLHRCRCGKTFSNMTKFLYHRRTHAGKSGAPPTGATAPPAPAEPTPPPPPPAPPAQLPCPQCSKSFASASRLSRHRRAVHGPPERRHRCGVCGKGFKKLIHVRNHLRTHTGERPFQCHSCGKTFASLANLSRHQLTHTGARPYQCLDCGKRFTQSSNLQQHRRLHLRPVAFARAPRLPITGLYNKSPYYCGTCGRWFRAMAGLRLHQRVHARARTLTLQPPRSPSPAPPPPPEPQQTIMCTELGETIAIIETSQPLALEDTLQLCQAALGASEAGGLLQLDTAFV

SEQ ID NO: 3625 - protein, 981 aa, Homo sapiens
MPAELLLLLIVAFASPSCQVLSSLRMAAILDDQTVCGRGERLALALAREQINGIIEVPAKARVEVDIFELQRDSQYETTDTMCQILPKGVVSVLGPSSSPASASTVSHICGEKEIPHIKVGPEETPRLQYLRFASVSLYPSNEDVSLAVSRILKSFNYPSASLICAKAECLLRLEELVRGFLISKETLSVRMLDDSRDPTPLLKEIRDDKVSTIIIDANASISHLILRKASELGMTSAFYKYILTTMDFPILHLDGIVEDSSNILGFSMFNTSHPFYPEFVRSLNMSWRENCEASTYLGPALSAALMFDAVHVVVSAVRELNRSQEIGVKPLACTSANIWPHGTSLMNYLRMVEYDGLTGRVEFNSKGQRTNYTLRILEKSRQGHREIGVWYSNRTLAMNATTLDINLSQTLANKTLVVTTILENPYVMRRPNFQALSGNERFEGFCVDMLRELAELLRFRYRLRLVEDGLYGAPEPNGSWTGMVGELINRKADLAVAAFTITAEREKVIDFSKPFMTLGISILYRVHMGRKPGYFSFLDPFSPAVWLFMLLAYLAVSCVLFLAARLSPYEWYNPHPCLRARPHILENQYTLGNSLWFPVGGFMQQGSEIMPRALSTRCVSGVWWAFTLIIISSYTANLAAFLTVQRMEVPVESADDLADQTNIEYGTIHAGSTMTFFQNSRYQTYQRMWNYMQSKQPSVFVKSTEEGIARVLNSRYAFLLESTMNEYHRRLNCNLTQIGGLLDTKGYGIGMPLGSPFRDEITLAILQLQENNRLEILKRKWWEGGRCPKEEDHRAKGLGMENIGGIFIVLICGLIIAVFVAVMEFIWSTRRSAESEETPALHPAACQCSALGPRTPLKEPSMLLVKVPSTRVQVAFSRTSLRQVCPFLLQHQLSSLYWIQATNVQICCHFSSLKPSPDLTFPPSHRPLSSLLFTALAAVGGLPDASSFFFPPISSCPPLQSGIGPCHSTEATLVTSNFHV

SEQ ID NO: 3626 - protein, 114 aa, Homo sapiens
MAGLALQPGTALLCYSCKAQVSNEDCLQVENCTQLGEQCWTARIRAVGLLTVISKGCSLNCVDDSQDYYVGKKNITCCDTDLCNASGAHALQPAAAILALLPALGLLLWGPGQL

SEQ ID NO: 3627 - protein, 454 aa, Homo sapiens
MSTFRQEDVEDHYEMGEELGSGQFAIVRKCRQKGTGKEYAAKFIKKRRLSSSRRGVSREEIEREVNILREIRHPNIITLHDIFENKTDVVLILELVSGGELFDFLAEKESLTEDEATQFLKQILDGVHYLHSKRIAHFDLKPENIMLLDKNVPNPRIKLIDFGIAHKIEAGNEFKNIFGTPEFVAPEIVNYEPLGLEADMWSIGVITYILLSGASPFLGETKQETLTNISAVNYDFDEEYFSNTSELAKDFIRRLLVKDPKRRMTIAQSLEHSWIKAIRRRNVRGEDSGRKPERRRLKTTRLKEYTIKSHSSLPPNNSYADFERFSKVLEEAAAAEEGLRELQRSRRLCHEDVEALAAIYEEKEAWYREESDSLGQDLRRLRQELLKTEALKRQAQEEAKGALLGTSGLKRRFSRLENRYEALAKQVASEMRFVQDLVRALEQEKLQGVECGLR

SEQ ID NO: 3628 - protein, 956 aa, Homo sapiens
MLEELECGAPGARGAATAMDCKDRPAFPVKKLIQARLPFKRLNLVPKGKADDMSDDQGTSVQSKSPDLEASLDTLENNCHVGSDIDFRPKLVNGKGPLDNFLRNRIETSIGQSTVIIDLTEDSNEQPDSLVDHNKLNSEASPSREAINGQREDTGDQQGLLKAIQNDKLAFPGETLSDIPCKTEEEGVGCGGAGRRGDSQECSPRSCPELTSGPRMCPRKEQDSWSEAGGILFKGKVPMVVLQDILAVRPPQIKSLPATPQGKNMTPESEVLESFPEEDSVLSHSSLSSPSSTSSPEGPPAPPKQHSSTSPFPTSTPLRRITKKFVKGSTEKNKLRLQRDQERLGKQLKLRAEREEKEKLKEEAKRAKEEAKKKKEEEKELKEKERREKREKDEKEKAEKQRLKEERRKERQEALEAKLEEKRKKEEEKRLREEEKRIKAEKAEITRFFQKPKTPQAPKTLAGSCGKFAPFEIKEHMVLAPRRRTAFHPDLCSQLDQLLQQQSGEFSFLKDLKGRQPLRSGPTHVSTRNADIFNSDVVIVERGKGDGVPERRKFGRMKLLQFCENHRPAYWGTWNKKTALIRARDPWAQDTKLLDYEVDSDEEWEEEEPGESLSHSEGDDDDDMGEDEDEDDGFFVPHGYLSEDEGVTEECADPENHKVRQKLKAKEWDEFLAKGKRFRVLQPVKIGCVWAADRDCAGDDLKVLQQFAACFLETLPAQEEQTPKASKRERRDEQILAQLLPLLHGNVNGSKVIIREFQEHCRRGLLSNHTGSPRSPSTTYLHTPTPSEDAAIPSKSRLKRLISENSVYEKRPDFRMCWYVHPQVLQSFQQEHLPVPCQWSYVTSVPSAPKEDSGSVPSTGPSQGTPISLKRKSAGSMCITQFMKKRRHDGQIGAEDMDGFQADTEEEEEEEGDCMIVDVPDAAEVQAPCGAASGAGGGVGVDTGKATLTASPLGAS

SEQ ID NO: 3629 - protein, 1357 aa, Homo sapiens
MQTLGSFFGSLPGFSSARNLVANAHSSARARPAADPTGAPAAEAAQPQAQVAAHPEQTAPWTEKELQPSEKQMVSGAKDLVCSKMSRAKDAVSSGVASVVDVAKGVVQGGLDTTRSALTGTKEVVSSGVTGAMDMAKGAVQGGLDTSKAVLTGTKDTVSTGLTGAVNVAKGTVQAGVDTTKTVLTGTKDTVTTGVMGAVNLAKGTVQTGVETSKAVLTGTKDAVSTGLTGAVNVARGSIQTGVDTSKTVLTGTKDTVCSGVTGAMNVAKGTIQTGVDTSKTVLTGTKDTVCSGVTGAMNVAKGTIQTGVDTSKTVLTGTKDTVCSGVTGAMNVAKGTIQTGVDTTKTVLTGTKNTVCSGVTGAVNLAKEAIQGGLDTTKSMVMGTKDTMSTGLTGAANVAKGAMQTGLNTTQNIATGTKDTVCSGVTGAMNLARGTIQTGVDTTKIVLTGTKDTVCSGVTGAANVAKGAVQGGLDTTKSVLTGTKDAVSTGLTGAVNVAKGTVQTGVDTTKTVLTGTKDTVCSGVTSAVNVAKGAVQGGLDTTKSVVIGTKDTMSTGLTGAANVAKGAVQTGVDTAKTVLTGTKDTVTTGLVGAVNVAKGTVQTGMDTTKTVLTGTKDTIYSGVTSAVNVAKGAVQTGLKTTQNIATGTKNTFGSGVTSAVNVAKGAAQTGVDTAKTVLTGTKDTVTTGLMGAVNVAKGTVQTSVDTTKTVLTGTKDTVCSGVTGAANVAKGAIQGGLDTTKSVLTGTKDAVSTGLTGAVKLAKGTVQTGMDTTKTVLTGTKDAVCSGVTGAANVAKGAVQMGVDTAKTVLTGTKDTVCSGVTGAANVAKGAVQTGLKTTQNIATGTKNTLGSGVTGAAKVAKGAVQGGLDTTKSVLTGTKDAVSTGLTGAVNLAKGTVQTGVDTSKTVLTGTKDTVCSGVTGAVNVAKGTVQTGVDTAKTVLSGAKDAVTTGVTGAVNVAKGTVQTGVDASKAVLMGTKDTVFSGVTGAMSMAKGAVQGGLDTTKTVLTGTKDAVSAGLMGSGNVATGATHTGLSTFQNWLPSTPATSWGGLTSSRTTDNGGEQTALSPQEAPFSGISTPPDVLSVGPEPAWEAAATTKGLATDVATFTQGAAPGREDTGLLATTHGPEEAPRLAMLQNELEGLGDIFHPMNAEEQAQLAASQPGPKVLSAEQGSYFVRLGDLGPSFRQRAFEHAVSHLQHGQFQARDTLAQLQDCFRLIEKAQQAPEGQPRLDQGSGASAEDAAVQEERDAGVLSRVCGLLRQLHTAYSGLVSSLQGLPAELQQPVGRARHSLCELYGIVASAGSVEELPAERLVQSREGVHQAWQGLEQLLEGLQHNPPLSWLVGPFALPAGGQ

SEQ ID NO: 3630 - protein, 994 aa, Homo sapiens
MAASFFSDFGLMWYLEELKKEEFRKFKEHLKQMTLQLELKQIPWTEVKKASREELANLLIKHYEEQQAWNITLRIFQKMDRKDLCMKVMRERTGYTKTYQAHAKQKFSRLWSSKSVTEIHLYFEEEVKQEECDHLDRLFAPKEAGKQPRTVIIQGPQGIGKTTLLMKLMMAWSDNKIFRDRFLYTFYFCCRELRELPPTSLADLISREWPDPAAPITEIVSQPERLLFVIDSFEELQGGLNEPDSDLCGDLMEKRPVQVLLSSLLRKKMLPEASLLIAIKPVCPKELRDQVTISEIYQPRGFNESDRLVYFCCFFKDPKRAMEAFNLVRESEQLFSICQIPLLCWILCTSLKQEMQKGKDLALTCQSTTSVYSSFVFNLFTPEGAEGPTPQTQHQLKALCSLAAEGMWTDTFEFCEDDLRRNGVVDADIPALLGTKILLKYGERESSYVFLHVCIQEFCAALFYLLKSHLDHPHPAVRCVQELLVANFEKARRAHWIFLGCFLTGLLNKKEQEKLDAFFGFQLSQEIKQQIHQCLKSLGERGNPQGQVDSLAIFYCLFEMQDPAFVKQAVNLLQEANFHIIDNVDLVVSAYCLKYCSSLRKLCFSVQNVFKKEDEHSSTSDYSLICWHHICSVLTTSGHLRELQVQDSTLSESTFVTWCNQLRHPSCRLQKLGINNVSFSGQSVLLFEVLFYQPDLKYLSFTLTKLSRDDIRSLCDALNYPAGNVKELALVNCHLSPIDCEVLAGLLTNNKKLTYLNVSCNQLDTGVPLLCEALCSPDTVLVYLMLAFCHLSEQCCEYISEMLLRNKSVRYLDLSANVLKDEGLKTLCEALKHPDCCLDSLCLVKCFITAAGCEDLASALISNQNLKILQIGCNEIGDVGVQLLCRALTHTDCRLEILGLEECGLTSTCCKDLASVLTCSKTLQQLNLTLNTLDHTGVVVLCEALRHPECALQVLGLRKTDFDEETQALLTAEEERNPNLTITDDCDTITRVEI

SEQ ID NO: 3631 - protein, 647 aa, Homo sapiens
MASLVSLELGLLLAVLVVTATASPPAGLLSLLTSGQGALDQEALGGLLNTLADRVHCANGPCGKCLSVEDALGLGEPEGSGLPPGPVLEARYVARLSAAAVLYLSNPEGTCEDARAGLWASHADHLLALLESPKALTPGLSWLLQRMQARAAGQTPKMACVDIPQLLEEAVGAGAPGSAGGVLAALLDHVRSGSCFHALPSPQYFVDFVFQQHSSEVPMTLAELSALMQRLGVGREAHSDHSHRHRGASSRDPVPLISSSNSSSVWDTVCLSARDVMAAYGLSEQAGVTPEAWAQLSPALLQQQLSGACTSQSRPPVQDQLSQSERYLYGSLATLLICLCAVFGLLLLTCTGCRGVTHYILQTFLSLAVGAVTGDAVLHLTPKVLGLHTHSEEGLSPQPTWRLLAMLAGLYAFFLFENLFNLLLPRDPEDLEDGPCGHSSHSHGGHSHGVSLQLAPSELRQPKPPHEGSRADLVAEESPELLNPEPRRLSPELRLLPYMITLGDAVHNFADGLAVGAAFASSWKTGLATSLAVFCHELPHELGDFAALLHAGLSVRQALLLNLASALTAFAGLYVALAVGVSEESEAWILAVATGLFLYVALCDMLPAMLKVRDPRPWLLFLLHNVGLLGGWTVLLLLSLYEDDITF

SEQ ID NO: 3632 - protein, 517 aa, Homo sapiens
MSLGSELFRDVAIVFSQEEWQWLAPAQRDLYRDVMLETYSNLVSLGLAVSKPDVISFLEQGKEPWMVERVVSGGLCPVLESRYDTKELFPKQHVYEVESPQWEIMESLTSYGLECSSFQDDWECRNQFDRQQGNPDRHFHQMIIRHEEMPTFDQHASLTFYQKIHTREKPFGYNKCRKDFWQKELLINHQGIYTNEKPYKCKECGKAFKYGSRLIQHENIHSGKKPYECKECGKAFNSGSNFIQHQRVHTGEKPYECKDCEKAFSRSSQLIEHQRTHTGEKPYQCKECGKAFNRISHLKVHYRIHTGEKPYACKECGKTFSHRSQLIQHQTVHTGRKLYECKECGKAFNQGSTLIRHQRIHTGEKPYECKVCGKAFRVSSQLKQHQRIHTGEKPYQCKVCGRAFKRVSHLTVHYRIHTGEKPYECKECGKAFSHCSQLIHHQVIHTEKKPYEYKECEKTLSHDSTTVQPQRMHNRETHVNIINVEKPSISSYPLLIIREFMLASNHMNGSNGESPLA

SEQ ID NO: 3633 - protein, 868 aa, Homo sapiens
MRGAASASVREPTPLPGRGAPRTKPRAGRGPTVGTPATLALPARGRPRSRNGLASKGQRGAAPTGPGHRALPSRDTALPQERNKKLEAVGTGIEPKAMSQGLVTFGDVAVDFSQEEWEWLNPIQRNLYRKVMLENYRNLASLGLCVSKPDVISSLEQGKEPWTVKRKMTRAWCPDLKAVWKIKELPLKKDFCEGKLSQAVITERLTSYNLEYSLLGEHWDYDALFETQPGLVTIKNLAVDFRQQLHPAQKNFCKNGIWENNSDLGSAGHCVAKPDLVSLLEQEKEPWMVKRELTGSLFSGQRSVHETQELFPKQDSYAEGVTDRTSNTKLDCSSFRENWDSDYVFGRKLAVGQETQFRQEPITHNKTLSKERERTYNKSGRWFYLDDSEEKVHNRDSIKNFQKSSVVIKQTGIYAGKKLFKCNECKKTFTQSSSLTVHQRIHTGEKPYKCNECGKAFSDGSSFARHQRCHTGKKPYECIECGKAFIQNTSLIRHWRYYHTGEKPFDCIDCGKAFSDHIGLNQHRRIHTGEKPYKCDVCHKSFRYGSSLTVHQRIHTGEKPYECDVCRKAFSHHASLTQHQRVHSGEKPFKCKECGKAFRQNIHLASHLRIHTGEKPFECAECGKSFSISSQLATHQRIHTGEKPYECKVCSKAFTQKAHLAQHQKTHTGEKPYECKECGKAFSQTTHLIQHQRVHTGEKPYKCMECGKAFGDNSSCTQHQRLHTGQRPYECIECGKAFKTKSSLICHRRSHTGEKPYECSVCGKAFSHRQSLSVHQRIHSGKKPYECKECRKTFIQIGHLNQHKRVHTGERSYNYKKSRKVFRQTAHLAHHQRIHTGESSTCPSLPSTSNPVDLFPKFLWNPSSLPSP

SEQ ID NO: 3634 - protein, 838 aa, Homo sapiens
MYAFYSLLIYIFYSLFRRDGGAAAAAEPGDPAQRARKPRGRRRPDLPAPELWTELTGLAASSEPEDGSEGAAEGRAAAVSLEEALLRLAEFLSVQLGAEESCGGPADLGQSGEVPSLLTVTSQLLALLAWLRSPRGRQALLQGTQPAPRVRPPSPDGSTSQEESPSHFTAVPGEPLGDETQGQQPLQLEEDQRAWQRLEQLILGQLEELKQQLEQQEEELGRLRLGVGATDSEKRVQHLTLENEALKQSLSLMRDLLLHWGPGPPIRAPQEEAEALLELQGRLQEAQDTTEALRAQLGVQEVQLQGLQGALQQLQQETEQNCRRELQQMHGQLAGLRARMASLRQGCGDLRGLVSTFTQSCQGSLSEARGQVSWALGALSSGGPGTQLPEGQQGPPAGCPGRLPELKGNIRVLCRLRPGTSSSLVSVEPGPGGTVTTCYRGRHRRFRLDWVFPPDASQEEVFRELEPAVLSCLRGYSVCIFTYGQTGTGKTYSMEGPPEDPGIVPRALQSLFREMGAGRQHRVTLSMVEIYNEAVRDLLAPGPPERLAVRQGPEGQGGIQVAGLTHWDVPNLETLHQMLKLGRSNRATAATAMNQRSSRSHALVTLTLRAASPPRAPGTAGTLHLVDLAGSERARKAGAAGPPRGDPDGARRLREAQTINRSLLALGGVMAALRAHRPHVPFRDSQLTRLLQPALGPGTTAVLLLQVGAGAGQVCACRSPPTRARPPAPLARRSPRGRRISGRQSAPSSSPTEWVKWSWGQPGAAGSRAPPGRLLPSAPTLRSPGPPAPLRRPLAVLHAPVPTTARARLSRPQRACPSSPGSRPCPWGLRPGLCWQRR

SEQ ID NO: 3635 - protein, 804 aa, Homo sapiens
MAAHRPGPLKQQNKAHKGGRHRGRGSAQRDGKGRLALKTLSKKVRKELSRVDQRHRASQLRKQKKEAVLAEKRQLGGKDGPPHQVLVVPLHSRISLPEAMQLLQDRDTGTVHLNELGNTQNFMLLCPRLKHRWFFTSARPGDLHVVLDMAKVADTILFLLDPLEGWDSTGDYCLSCLFAQGLPTYTLAVQGISGLPLKKQIDTRKKLSKAVEKRFPHDKLLLLDTQQEAGMLLRQLANQKQQHLAFRDRRAYLFAHAVDFVPSEENNLVGTLKISGYVRGQTLNVNRLLHIVGYGDFQMKQIDAPGDPFPLNPRGIKPQKDPDMAMEICATDAVDDMEEGLKVLMKADPGRQESLQAEVIPDPMEGEQTWPTEEELSEAKDFLKESSKVVKKVPKGTSSYQAEWILDGGSQSGGEGDEYEYDDMEHEDFMEEESQDESSEEEEEYETMTIGESVHDDLYDKKVDEEAEAKMLEKYKQERLEEMFPDEVDTPRDVAARIRFQKYRGLKSFRTSPWDPKENLPQDYARIFQFQNFTNTRKSIFKEVEEKEVEGAEVGWYVTLHVSEVPVSVVECFRQGTPLIAFSLLPHEQKMSVLNMVVRRDPGNTEPVKAKEELIFHCGFRRFRASPLFSQHTAADKHKLQRFLTADMALVATVYAPITFPPASVLLFKQKSNGMHSLIATGHLMSVDPDRMVIKRVVLSGHPFKIFTKMAVVRYMFFNREDVLWFKPVELRTKWGRRGHIKEPLGTHGHMKCSFDGKLKSQDTVLMNLYKRVFPKWTYDPYVPEPVPWLKSEISSTVPQGGME

SEQ ID NO: 3636 - protein, 791 aa, Homo sapiens
MKAHPKEMVPLMGKRVAAPSGNPAILPEKRPAEITPTKKSAHFFLEIEGFEPNPTVAKTSPPVFSKPMDSNIRQCISGNCDDMDSPQSPQDDVTETPSNPNSPSAQLAKEEQRRKKRRLKKRIFAAVSEGCVEELVELLVELQELCRRRHDEDVPDFLMHKLTASDTGKTCLMKALLNINPNTKEIVRILLAFAEENDILGRFINAEYTEEAYEGQTALNIAIERRQGDIAALLIAAGADVNAHAKGAFFNPKYQHEGFYFGETPLALAACTNQPEIVQLLMEHEQTDITSRDSRGNNILHALVTVAEDFKTQNDFVKRMYDMILLRSGNWELETTRNNDGLTPLQLAAKMGKAEILKYILSREIKEKRLRSLSRKFTDWAYGPVSSSLYDLTNVDTTTDNSVLEITVYNTNIDNRHEMLTLEPLHTLLHMKWKKFAKHMFFLSFCFYFFYNITLTLVSYYRPREEEAIPHPLALTHKMGWLQLLGRMFVLIWAMCISVKEGIAIFLLRPSDLQSILSDAWFHFVFFIQAVLVILSVFLYLFAYKEYLACLVLAMALGWANMLYYTRGFQSMGMYSVMIQKVILHDVLKFLFVYIVFLLGFGVALASLIEKCPKDNKDCSSYGSFSDAVLELFKLTIGLGDLNIQQNSKYPILFLFLLITYVILTFVLLLNMLIALMGETVENVSKESERIWRLQRARTILEFEKMLPEWLRSRFRMGELCKVAEDDFRLCLRINEVKWTEWKTHVSFLNEDPGPVRRTADFNKIQDSSRNNSKTTLNAFEEVEEFPETSV

SEQ ID NO: 3637 - protein, 1043 aa, Homo sapiens
MEAAHLLPAADVLRHFSVTAEGGLSPAQVTGARERYGPNELPSEEGKSLWELVLEQFEDLLVRILLLAALVSFVLAWFEEGEETTTAFVEPLVIMLILVANAIVGVWQERNAESAIEALKEYEPEMGKVIRSDRKGVQRIRARDIVPGDIVEVAVGDKVPADLRLIEIKSTTLRVDQSILTGESVSVTKHTEAIPDPRAVNQDKKNMLFSGTNITSGKAVGVAVATGLHTELGKIRSQMAAVEPERTPLQRKLDEFGRQLSHAISVICVAVWVINIGHFADPAHGGSWLRGAVYYFKIAVALAVAAIPEGLPAVITTCLALGTRRMARKNAIVRSLPSVETLGCTSVICSDKTGTLTTNQMSVCRMFVVAEADAGSCLLHEFTISGTTYTPEGEVRQGDQPVRCGQFDGLVELATICALCNDSALDYNEAKGVYEKVGEATETALTCLVEKMNVFDTDLQALSRVERAGACNTVIKQLMRKEFTLEFSRDRKSMSVYCTPTRPHPTGQGSKMFVKGAPESVIERCSSVRVGSRTAPLTPTSREQILAKIRDWGSGSDTLRCLALATRDAPPRKEDMELDDCSKFVQYETDLTFVGCVGMLDPPRPEVAACITRCYQAGIRVVMITGDNKGTAVAICRRLGIFGDTEDVAGKAYTGREFDDLSPEQQRQACRTARCFARVEPAHKSRIVENLQSFNEITAMTGDGVNDAPALKKAEIGIAMGSGTAVAKSAAEMVLSDDNFASIVAAVEEGRAIYSNMKQFIRYLISSNVGEVVCIFLTAILGLPEALIPVQLLWVNLVTDGLPATALGFNPPDLDIMEKLPRSPREALISGWLFFRYLAIGVYVGLATVAAATWWFVYDAEGPHINFYQLRNFLKCSEDNPLFAGIDCEVFESRFPTTMALSVLVTIEMCNALNSVSENQSLLRMPPWMNPWLLVAVAMSMALHFLILLVPPLPLIFQVTPLSGRQWVVVLQISLPVILLDEALKYLSRNHMHACLYPGLLRTVSQAWSRQPLTTSWTPDHTGRNEPEVSAGNRVESPVCTSD

SEQ ID NO: 3638 - protein, 485 aa, Homo sapiens
MKNATIVMSVRREQGSSSGEGSLSFEDVAVGFTREEWQFLDQSQKVLYKEVMLENYINLVSIGYRGTKPDSLFKLEQGEPPGIAEGAAHSQICPGFVIQSRRYAGKDSDAFGGYGRSCLHIKRDKTLTGVKYHRCVKPSSPKSQLNDLQKICAGGKPHECSVCGRAFSRKAQLIQHQRTERGEKPHGCGECGKTFMRKIQLTEHQRTHTGEKPHECSECGKAFSRKSQLMVHQRTHTGEKPYRCSKCGKAFSRKCRLNRHQRSHTGEKLYGCSVCGKAFSQKAYLTAHQRLHTGDKPYKCSDCGRTFYFKSDLTRHQRIHTGEKPYECSECEKAFRSKSKLIQHQRTHTGERPYSCRECGKAFAHMSVLIKHEKTHIRETAINSLTVEKPSSRSHTSLYMSELIQEQKTVNTVPIEMPSSGTPPLLNKSERLVGRNVVIVEQPFPRNQAFVVNQEFEQRISLTNEVNVAPSVINYILYLTDIVSE

SEQ ID NO: 3639 - protein, 264 aa, Homo sapiens
MPSIFAYQSSEVDWCESNFQYSELVAEFYNTFSNIPFFIFGPLMMLLMHPYAQKRSRYIYVVWVLFMIIGLFSMYFHMTLSFLGQLLDEIAILWLLGSGYSIWMPRCYFPSFLGGNRSQFIRLVFITTVVSTLLSFLRPTVNAYALNSIALHILYIVCQEYRKTSNKELRHLIEVSVVLWAVALTSWISDRLLCSFWQRIHFFYLHSIWHVLISITFPYGMVTMALVDANYEMPGETLKVRYWPRDSWPVGLPYVEIRGDDKDC

SEQ ID NO: 3640 - protein, 406 aa, Homo sapiens
MSGAPTAGAALMLCAATAVLLSAQGGPVQSKSPRFASWDEMNVLAHGLLQLGQGLREHAERTRSQLSALERRLSACGSACQGTEGSTDLPLAPESRVDPEVLHSLQTQLKAQNSRIQQLFHKVAQQQRHLEKQHLRIQHLQSQFGLLDHKHLDHEVAKPARRKRLPEMAQPVDPAHNVSRLHRLPRDCQELFQVGERQSGLFEIQPQGSPPFLVNCKMTSDGGWTVIQRRHDGSVDFNRPWEAYKAGFGDPHGEFWLGLEKVHSITGDRNSRLAVQLRDWDGNAELLQFSVHLGGEDTAYSLQLTAPVAGQLGATTVPPSGLSVPFSTWDQDHDLRRDKNCAKSLSGGWWFGTCSHSNLNGQYFRSIPQQRQKLKKGIFWKTWRGRYYPLQATTMLIQPMAAEAAS

SEQ ID NO: 3641 - protein, 402 aa, Homo sapiens
MAAVILPSTAAPSSLFPASQQKGHTQGGELVNELLTSWLRGLVTFEDVAVEFTQEEWALLDPAQRTLYRDVMLENCRNLASLGCRVNKPSLISQLEQDKKVVTEERGILPSTCPDLETLLKAKWLTPKKNVFRKEQSKGVKTERSHRGVKLNECNQCFKVFSTKSNLTQHKRIHTGEKPYDCSQCGKSFSSRSYLTIHKRIHNGEKPYECNHCGKAFSDPSSLRLHLRIHTGEKPYECNQCFHVFRTSCNLKSHKRIHTGENHHECNQCGKAFSTRSSLTGHNSIHTGEKPYECHDCGKTFRKSSYLTQHVRTHTGEKPYECNECGKSFSSSFSLTVHKRIHTGEKPYECSDCGKAFNNLSAVKKHLRTHTGEKPYECNHCGKSFTSNSYLSVHKRIHNRWI

SEQ ID NO: 3642 - protein, 790 aa, Homo sapiens
MAYCLTNCYQYSVTFEDTAVDFTQEEWILLDPVQRNLYRDVMLENYENVAKVGFQLFKPSVISWLEEEELRTLQQGVLQDWAIKHQTSVSALQQEFWKIQTSNGIQMDLVTFDSVAVEFTQEEWTLLDPAQRNLYSDVMLENYKNLSSVGYQLFKPSLISWLEEEEELSTLPRVLQEWKMCLKTKGPALWQDNFCLKTLNGIQLARNQNGEELYDCKQCEDVFCKHPCLKTNMSTQNRGNTSECIQYAKDLLSLYNKTSTIRKVSVFSKHGKSFRLILNVQVQRKCTQDKSFEGTDYGKAFIYQSYLEAHRKTQSGEKLNEWKQCGEAFTHSTSHAVNVETHIIKNPYECKECGKDFRYPTHLNNHMQTHIGIKPYKCKHCGKTFTVPSGFLEHVRTHTGEKPYGCKECGKAFGTSAGLIEHIRCHAREKTFKCDHCGKAFISYPSLFGHLRVHNGEKPYEHKEYGKAFGTSSGVIEDRRSNTGQKRFDCDQCGKVFVSFSSLFAHLRTHTGEKPFKCYKCGKPFTSSACLRIHMRTHTEERLYQCKKCGKAFTKCSYLTKHLRTHAGEKPYECMKCGKAFTERSYLTKHLRRHSGEKPYECKKCGKAFTERSDLTKHLRRHTGDKPYEYKDCGKAFVVSSSLVDHLRTHTGYKPYKCNACEKAYSRSCVLTQHLKTHAAEKTSECNACGNSFRNSMCFHDRLKTLTKIKPYKCKDCGKAFTCHSDLTNHVRIHTGEKPYKCKECGKAFRTSSGRIQHLRTHMGEKPFECDQCGKAFASFSARIAHLKTH

SEQ ID NO: 3643 - protein, 315 aa, Homo sapiens
MAPENFTRVTEFILTGVSSCPELQIPLFLVFLVLYVLTMAGNLGIITLTSVDSRLQNPMYFFLRHLAIINLGNSTVIAPKMLMNFLVKKKTTSFYECATQLGGFLFFIVSEVMMLAVMAYDRYVAICNPLLYMVVVSRRLCLLLVSLTYLYGFSTAIVVSPCIFSVSYCSSNIINHFYCDIAPLLALSCSDTYIPETIVFISAATNLVFSMITVLVSYFNIVLSILRIRSPEGRKKAFSTCASHMIAVTVFYGTMLFMYLQPQTNHSLDTDKMASVFYTLVIPMLNPLIYSLRNNDVNVALKKFMENPCYSFKSM

SEQ ID NO: 3644 - protein, 314 aa, Homo sapiens
MEFTDRNYTLVTEFILLGFPTRPELQIVLFLMFLTLYAIILIGNIGLMLLIRIDPHLQTPMYFFLSNLSFVDLCYFSDIVPKMLVNFLSENKSISYYGCALQFYFFCTFADTESFILAAMAYDRYVAICNPLLYTVVMSRGICMRLIVLSYLGGNMSSLVHTSFAFILKYCDKNVINHFFCDLPPLLKLSCTDTTINEWLLSTYGSSVEIICFIIIIISYFFILLSVLKIRSFSGRKKTFSTCASHLTSVTIYQGTLLFIYSRPSYLYSPNTDKIISVFYTIFIPVLNPLIYSLRNKDVKDAAEKVLRSKVDSS

SEQ ID NO: 3645 - protein, 244 aa, Homo sapiens
MPLLTLYLLLFWLSGYSIVTQITGPTTVNGLERGSLTVQCVYRSGWETYLKWWCRGAIWRDCKILVKTSGSEQEVKRDRVSIKDNQKNRTFTVTMEDLMKTDADTYWCGIEKTGNDLGVTVQVTIDPAPVTQEETSSSPTLTGHHLDNRSEGSQAANYRPAAHQAQAPEAQCPPAPHLHHIAAAFGGRLTLGLEDDEVPAESSRDVPRAGTAAPGGRPLLCRPDPAAGRNLPAKGYHEAFLCPG

SEQ ID NO: 3646 - protein, 2033 aa, Homo sapiens
MFKGLSKGSQGKGSPKGSPAKGSPKGSPSRHSRAATQELALLISRMQANADQVERDILETQKRLQQDRLNSEQSQALQHQQETGRSLKEAEVLLKDLFLDVDKARRLKHPQAEEIEKDIKQLHERVTQECAEYRALYEKMVLPPDVGPRVDWARVLEQKQKQVCAGQYGPGMAELEQQIAEHNILQKEIDAYGQQLRSLVGPDAATIRSQYRDLLKAASWRGQSLGSLYTHLQGCTRQLSALAEQQRRILQQDWSDLMADPAGVRREYEHFKQHELLSQEQSVNQLEDDGERMVELRHPAVGPIQAHQEALKMEWQNFLNLCICQETQLQHVEDYRRFQEEADSVSQTLAKLNSNLDAKYSPAPGGPPGAPTELLQQLEAEEKRLAVTERATGDLQRRSRDVAPLPQRRNPPQQPLHVDSICDWDSGEVQLLQGERYKLVDNTDPHAWVVQGPGGETKRAPAACFCIPAPDPDAVARASRLASELQALKQKLATVQSRLKASAVESLRPSQQAPSGSDLANPQAQKLLTQMTRLDGDLGQIERQVLAWARAPLSRPTPLEDLEGRIHSHEGTAQRLQSLGTEKETAQKECEAFLSTRPVGPAALQLPVALNSVKNKFSDVQVLCSLYGEKAKAALDLERQIQDADRVIRGFEATLVQEAPIPAEPGALQERVSELQRQRRELLEQQTCVLRLHRALKASEHACAALQNNFQEFCQDLPRQQRQVRALTDRYHAVGDQLDLREKVVQDAALTYQQFKNCKDNLSSWLEHLPRSQVRPSDGPSQIAYKLQAQKRLTQEIQSRERDRATASHLSQALQAALQDYELQADTYRCSLEPTLAVSAPKRPRVAPLQESIQAQEKNLAKAYTEVAAAQQQLLQQLEFARKMLEKKELSEDIRRTHDAKQGSESPAQAGRESEALKAQLEEERKRVARVQHELEAQRSQLLQLRTQRPLERLEEKEVVEFYRDPQLEGSLSRVKAQVEEEGKRRAGLQADLEVAAQKVVQLESKRKTMQPHLLTKEVTQVERDPGLDSQAAQLRIQIQQLRGEDAVISARLEGLKKELLALEKREVDVKEKVVVKEVVKVEKNLEMVKAAQALRLQMEEDAARRKQAEEAVAKLQARIEDLERAISSVEPKVIVKEVKKVEQDPGLLQESSRLRSLLEEERTKNATLARELSDLHSKYSVVEKQRPKVQLQERVHEIFQVDPETEQEITRLKAKLQEMAGKRSGVEKEVEKLLPDLEVLRAQKPTVEYKEVTQEVVRHERSPEVLREIDRLKAQLNELVNSHGRSQEQLIRLQGERDEWRRERAKVETKTVSKEVVRHEKDPVLEKEAERLRQEVREAAQKRRAAEDAVYELQSKRLLLERRKPEEKVVVQEVVVTQKDPKLREEHSRLSGSLDEEVGRRRQLELEVQQLRAGVEEQEGLLSFQEDRSKKLAVERELRQLTLRIQELEKRPPTVQEKIIMEEVVKLEKDPDLEKSTEALRWDLDQEKTQVTELNRECKNLQVQIDVLQKAKSQEKTIYKEVIRVQKDRVLEDERARVWEMLNRERTARQAREEEARRLRERIDRAETLGRTWSREESELQRARDQADQECGRLQQELRALERQKQQQTLQLQEESKLLSQKTESERQKAAQRGQELSRLEAAILREKDQIYEKERTLRDLHAKVSREELSQETQTRETNLSTKISILEPETGKDMSPYEAYKRGIIDRGQYLQLQELECDWEEVTTSGPCGEESVLLDRKSGKQYSIEAALRCRRISKEEYHLYKDGHLPISEFALLVAGETKPSSSLSIGSIISKSPLASPAPQSTSFFSPSFSLGLGDDSFPIAGIYDTTTDNKCSIKTAVAKNMLDPITGQKLLEAQAATGGIVDLLSRERYSVHKAMERGLIENTSTQRLLNAQKAFTGIEDPVTKKRLSVGEAVQKGWMPRESVLPHLQVQHLTGGLIDPKRTGRIPIQQALLSGMISEELAQLLQDESSYEKDLTDPISKERLSYKEAMGRCRKDPLSGLLLLPAALEGYRCYRSASPTVPRSLR

SEQ ID NO: 3647 - protein, 790 aa, Homo sapiens
MITVNPDGKIMVRRCLVTLRPFRLFVLGIGFFTLCFLMTSLGGQFSARRLGDSPFTIRTEVMGGPESRGVLRKMSDLLELMVKRMDALARLENSSELHRAGGDLHFPADRMPPGAGLMERIQAIAQNVSDIAVKVDQILRHSLLLHSKVSEGRRDQCEAPSDPKFPDCSGKVEWMRARWTSDPCYAFFGVDGTECSFLIYLSEVEWFCPPLPWRNQTAAQRAPKPLPKVQAVFRSNLSHLLDLMGSGKESLIFMKKRTKRLTAQWALAAQRLAQKLGATQRDQKQILVHIGFLTEESGDVFSPRVLKGGPLGEMVQWADILTALYVLGHGLRVTVSLKELQSNLGVPPGRGSCPLTMPLPFDLIYTDYHGLQQMKRHMGLSFKKYRCRIRVIDTFGTEPAYNHEEYATLHGYRTNWGYWNLNPKQFMTMFPHTPDNSFMGFVSEELNETEKRLIKGGKASNMAVVYGKEASIWKGKEKFLGILNKYMEIHGTVYYESQRPPEVPAFVKNHGLLPQPEFQQLLRKAKLFIGFGFPYEGPAPLEAIANGCIFLQSRFSPPHSSLNHEFFRGKPTSREVFSQHPYAENFIGKPHVWTVDYNNSEEFEAAIKAIMRTQVDPYLPYEYTCEGMLERIHAYIQHQDFCRAPDPALPEAHAPQSPFVLAPNATHLEWARNTSLAPGAWPPAHALRAWLAVPGRACTDTCLDHGLICEPSFFPFLNSQDAFLKLQVPCDSTESEMNHLYPAFAQPGQECYLQKEPLLFSCAGSNTKYRRLCPCRDFRKGQVALCQGCL

SEQ ID NO: 3648 - protein, 1690 aa, Homo sapiens
MATGSAQGNFTGHTKKTNGNNGTNGALVQSPSNQSALGAGGANSNGSAARVWGVATGSSSGLAHCSVSGGDGKMDTMIGDGRSQNCWGASNSNAGINLNLNPNANPAAWPVLGHEGTVATGNPSSICSPVSAIGQNMGNQNGNPTGTLGAWGNLLPQESTEPQTSTSQNVSFSAQPQNLNTDGPNNTNPMNSSPNPINAMQTNGLPNWGMAVGMGAIIPPHLQGLPGANGSSVSQVSGGSAEGISNSVWGLSPGNPATGNSNSGFSQGNGDTVNSALSAKQNGSSSAVQKEGSGGNAWDSGPPAGPGILAWGRGSGNNGVGNIHSGAWGHPSRSTSNGVNGEWGKPPNQHSNSDINGKGSTGWESPSVTSQNPTVQPGGEHMNSWAKAASSGTTASEGSSDGSGNHNEGSTGREGTGEGRRRDKGIIDQGHIQLPRNDLDPRVLSNTGWGQTPVKQNTAWEFEESPRSERKNDNGTEAWGCAATQASNSGGKNDGSIMNSTNTSSVSGWVNAPPAAVPANTGWGDSNNKAPSGPGVWGDSISSTAVSTAAAAKSGHAWSGAANQEDKSPTWGEPPKPKSQHWGDGQRSNPAWSAGGGDWADSSSVLGHLGDGKKNGSGWDADSNRSGSGWNDTTRSGNSGWGNSTNTKANPGTNWGETLKPGPQQNWASKPQDNNVSNWGGAASVKQTGTGWIGGPVPVKQKDSSEATGWEEPSPPSIRRKMEIDDGTSAWGDPSNYNNKTVNMWDRNNPVIQSSTTTNTTTTTTTTTSNTTHRVETPPPHQAGTQLNRSPLLGPGRKVSSGWGEMPNVHSKTENSWGEPSSPSTLVDNGTAAWGKPPSSGSGWGDHPAEPPVAFGRAGAPVAASALCKPASKSMQEGWGSGGDEMNLSTSQWEDEEGDVWNNAASQESTSSCSSWGNAPKKGLQKGMKTSGKQDEAWIMSRLIKQLTDMGFPREPAEEALKSNNMNLDQAMSALLEKKVDVDKRGLGVTDHNGMAAKPLGCRPPISKESSVDRPTFLDKDGGLVEEPTPSPFLPSPSLKLPLSHSALPSQALGGIASGLGMQNLNSSRQIPSGNLGMFGNSGAAQARTMQQPPQPPVQPLNSSQPSLRAQVPQFLSPQVQAQLLQFAAKNIGLNPALLTSPINPQHMTMLNQLYQLQLAYQRLQIQQQMLQAQRNVSGSMRQQEQQVARTITNLQQQIQQHQRQLAQALLVKQPPPPPPPPHLSLHPSAGKSAMDSFPSHPQTPGLPDLQTKEQQSSPNTFAPYPLAGLNPNMNVNSMDMTGGLSVKDPSQSQSRLPQWTHPNSMDNLPSAASPLEQNPSKHGAIPGGLSIGPPGKSSIDDSYGRYDLIQNSESPASPPVAVPHSWSRAKSDSDKISNGSSINWPPEFHPGVPWKGLQNIDPENDPDVTPGSVPTGPTINTTIQDVNRYLLKSGGKLSDIKSTWSSGPTSHTQASLSHELWKVPRNSTAPTRPPPGLTNPKPSSTWGASPLGWTSSYSSGSAWSTDTSGRTSSWLVLRNLTPQIDGSTLRTLCLQHGPLITFHLNLTQGNAVVRYSSKEEAAKAQKSLHMCVLGNTTILAEFAGEEEVNRFLAQGQALPPTSSWQSSSASSQPRLSAAGSSHGLVRSDAGHWNAPCLGGKGSSELLWGGVPQYSSSLWGPPSADDSRVIGSPTPLTTLLPGDLLSGESL

SEQ ID NO: 3649 - protein, 165 aa, Homo sapiens
MGAPTLPPAWQPFLKDHRISTFKNWPFLEGCACTPERMAEAGFIHCPTENEPDLAQCFFCFKELEGWEPDDDPIGPGTVAYACNTSTLGGRGGRITREEHKKHSSGCAFLSVKKQFEELTLGEFLKLDRERAKNKIAKETNNKKKEFEETAEKVRRAIEQLAAMD

SEQ ID NO: 3650 - protein, 504 aa, Homo sapiens
MMTTSLIWGIAIAACCCLWLILGIRRRQTGEPPLENGLIPYLGCALQFGANPLEFLRANQRKHGHVFTCKLMGKYVHFITNPLSYHKVLCHGKYFDWKKFHFATSAKAFGHRSIDPMDGNTTENINDTFIKTLQGHALNSLTESMMENLQRIMRPPVSSNSKTAAWVTEGMYSFCYRVMFEAGYLTIFGRDLTRRDTQKAHILNNLDNFKQFDKVFPALVAGLPIHMFRTAHNAREKLAESLRHENLQKRESISELISLRMFLNDTLSTFDDLEKAKTHLVVLWASQANTIPATFWSLFQMIRNPEAMKAATEEVKRTLENAGQKVSLEGNPICLSQAELNDLPVLDSIIKESLRLSSASLNIRTAKEDFTLHLEDGSYNIRKDDIIALYPQLMHLDPEIYPDPLTFKYDRYLDENGKTKTTFYCNGLKLKYYYMPFGSGATICPGRLFAIHEIKQFLILMLSYFELELIEGQAKCPPLDQSRAGLGILPPLNDIEFKYKFKHL

SEQ ID NO: 3651 - protein, 459 aa, Homo sapiens
MSVRFSSTSRRLGSCGGTGSVRLSSGGAGFGAGNTCGVPGIGSGFSCAFGGSSSAGGYGGGLGGGSASCAAFTGNEHGLLSGNEKVTMQNLNDRLASYLENVRALEEANADLEQKIKGWYEKFGPGSCRGLDHDYSRYFPIIDELKNQIISATTSNAHVVLQNDNARLTADDFRLKFENELALHQSVEADINGLRRVLDELTLCRTDLEIQLETLSEELAYLKKNHEEEMKALQCAAGGNVNVEMNAAPGVDLTVLLNNMRAEYEALAEQNRRDAEAWFNEKSASLQQQISDDAGATTSARNELIEMKRTLQTLEIELQSLLATKHSLECSLTETESNYCAQLAQIQAQIGALEEQLHQVRTETEGQKLEYEQLLDIKVHLEKEIETYCLLIDGEDGSCSKSKGYGGPGNQTKDSSKTTIVKTVVEEIDPRGKVLSSRVHTVEEKSTKVNNKNEQRVSS

SEQ ID NO: 3652 - protein, 445 aa, Homo sapiens
MTMFENVTRALARQLNPRGDLTPLDSLIDFKRFHPFCLVLRKRKSTLFWGARYVRTDYTLLDVLEPGSSPSDPTDTGNFGFKNMLDTRVEGDVDVPKTVKVKGTAGLSQNSTLEVQTLSVAPKALETVQERKLAADHPFLKEMQDQGENLYVVMEVVETVQEVTLERAGKAEACFSLPFFAPLGLQGSINHKEAVTIPKGCVLAFRVRQLMVKGKDEWDIPHICNDNMQTFPPGEKSGEEKVILIQASDVGDVHEGFRTLKEEVQRETQQVEKLSRVGQSSLLSSLSKLLGKKKELQDLELALEGALDKGHEVTLEALPKDVLLSKEAVGAILYFVGALTELSEAQQKLLVKSMEKKILPVQLKLVESTMEQNFLLDKEGVFPLQPELLSSLGDEELTLTEALVGLSGLEVQRSGPQYMWDPDTLPRLCALYAGLSLLQQLTKAS

SEQ ID NO: 3653 - protein, 302 aa, Homo sapiens
MALVASVRVPARVLLRAGARLPGAALGRTERAAGGGDGARRFGSQRVLVEPDAGAGVAVMKFKNPPVNSLSLEFLTELVISLEKLENDKSFRGVILTSDRPGVFSAGLDLTEMCGRSPAHYAGYWKAVQELWLRLYQSNLVLVSAINGACPAGGCLVALTCDYRILADNPRYCIGLNETQLGIIAPFWLKDTLENTIGHRAAERALQLGLLFPPAEALQVGIVDQVVPEEQVQSTALSAIAQWMAIPDHARQLTKAMMRKATASRLVTQRDADVQNFVSFISKDSIQKSLQMYLERLKEEKG

SEQ ID NO: 3654 - protein, 1704 aa, Homo sapiens
MAVLRQLALLLWKNYTLQKRKVLVTVLELFLPLLFSGILIWLRLKIQSENVPNATIYPGQSIQELPLFFTFPPPGDTWELAYIPSHSDAAKTVTETVRRALVINMRVRGFPSEKDFEDYIRYDNCSSSVLAAVVFEHPFNHSKEPLPLAVKYHLRFSYTRRNYMWTQTGSFFLKETEGWHTTSLFPLFPNPGPREPTSPDGGEPGYIREGFLAVQHAVDRAIMEYHADAATRQLFQRLTVTIKRFPYPPFIADPFLVAIQYQLPLLLLLSFTYTALTIARAVVQEKERRLKEYMRMMGLSSWLHWSAWFLLFFLFLLIAASFMTLLFCVKVKPNVAVLSRSDPSLVLAFLLCFAISTISFSFMVSTFFSKANMAAAFGGFLYFFTYIPYFFVAPRYNWMTLSQKLCSCLLSNVAMAMGAQLIGKFEAKGMGIQWRDLLSPVNVDDDFCFGQVLGMLLLDSVLYGLVTWYMEAVFPGQFGVPQPWYFFIMPSYWCGKPRAVAGKEEEDSDPEKALRNEYFEAEPEDLVAGIKIKHLSKVFRVGNKDRAAVRDLNLNLYEGQITVLLGHNGAGKTTTLSMLTGLFPPTSGRAYISGYEISQDMVQIRKSLGLCPQHDILFDNLTVAEHLYFYAQLKGLSRQKCPEEVKQMLHIIGLEDKWNSRSRFLSGGMRRKLSIGIALIAGSKVLILDEPTSGMDAISRRAIWDLLQRQKSDRTIVLTTHFMDEADLLGDRIAIMAKGELQCCGSSLFLKQKYGAGYHMTLVKEPHCNPEDISQLVHHHVPNATLESSAGAELSFILPRESTHRFEGLFAKLEKKQKELGIASFGASITTMEEVFLRVGKLVDSSMDIQAIQLPALQYQHERRASDWAVDSNLCGAMDPSDGIGALIEEERTAVKLNTGLALHCQQFWAMFLKKAAYSWREWKMVAAQVLVPLTCVTLALLAINYSSELFDDPMLRLTLGEYGRTVVPFSVPGTSQLGQQLSEHLKDALQAEGQEPREVLGDLEEFLIFRASVEGGGFNERCLVAASFRDVGERTVVNALFNNQAYHSPATALAVVDNLLFKLLCGPHASIVVSNFPQPRSALQAAKDQFNEGRKGFDIALNLLFAMAFLASTFSILAVSERAVQAKHVQFVSGVHVASFWLSALLWDLISFLIPSLLLLVVFKAFDVRAFTRDGHMADTLLLLLLYGWAIIPLMYLMNFFFLGAATAYTRLTIFNILSGIATFLMVTIMRIPAVKLEELSKTLDHVFLVLPNHCLGMAVSSFYENYETRRYCTSSEVAAHYCKKYNIQYQENFYAWSAPGVGRFVASMAASGCAYLILLFLIETNLLQRLRGILCALRRRRTLTELYTRMPVLPEDQDVADERTRILAPSPDSLLHTPLIIKELSKVYEQRVPLLAVDRLSLAVQKGECFGLLGFNGAGKTTTFKMLTGEESLTSGDAFVGGHRISSDVGKVRQRIGYCPQFDALLDHMTGREMLVMYARLRGIPERHIGACVENTLRGLLLEPHANKLVRTYSGGNKRKLSTGIALIGEPAVIFLDEPSTGMDPVARRLLWDTVARARESGKAIIITSHSMEECEALCTRLAIMVQGQFKCLGSPQHLKSKFGSGYSLRAKVQSEGQQEALEEFKAFVDLTFPGSVLEDEHQGMVHYHLPGRDLSWAKVFGILEKAKEKYGVDDYSVSQISLEQVFLSFAHLQPPTAEEGR

SEQ ID NO: 3655 - protein, 2752 aa, Homo sapiens
MYNGIGLPTPRGSGTNGYVQRNLSLVRGRRGERPDYKGEEELRRLEAALVKRPNPDILDHERKRRVELRCLELEEMMEEQGYEEQQIQEKVATFRLMLLEKDVNPGGKEETPGQRPAVTETHQLAELNEKKNERLRAAFGISDSYVDGSSFDPQRRAREAKQPAPEPPKPYSLVRESSSSRSPTPKQKKKKKKKDRGRRSESSSPRRERKKSSKKKKHRSESESKKRKHRSPTPKSKRKSKDKKRKRSRSTTPAPKSRRAHRSTSADSASSSDTSRSRSRSAAAKTHTTALAGRSPSPASGRRGEGDAPFSEPGTTSTQRPSSPETATKQPSSPYEDKDKDKKEKSATRPSPSPERSSTGPEPPAPTPLLAERHGGSPQPLATTPLSQEPVNPPSEASPTRDRSPPKSPEKLPQSSSSESSPPSPQPTKVSRHASSSPESPKPAPAPGSHREISSSPTSKNRSHGRAKRDKSHSHTPSRRMGRSRSPATAKRGRSRSRTPTKRGHSRSRSPQWRRSRSAQRWGRSRSPQRRGRSRSPQRPGWSRSRNTQRRGRSRSARRGRSHSRSPATRGRSRSRTPARRGRSRSRTPARRRSRSRTPTRRRSRSRTPARRGRSRSRTPARRRSRTRSPVRRRSRSRSPARRSGRSRSRTPARRGRSRSRTPARRGRSRSRTPARRSGRSRSRTPARRGRSRSRTPRRGRSRSRSLVRRGRSHSRTPQRRGRSGSSSERKNKSRTSQRRSRSNSSPEMKKSRISSRRSRSLSSPRSKAKSRLSLRRSLSGSSPCPKQKSQTPPRRSRSGSSQPKAKSRTPPRRSRSSSSPPPKQKSKTPSRQSHSSSSPHPKVKSGTPPRQGSITSPQANEQSVTPQRRSCFESSPDPELKSRTPSRHSCSGSSPPRVKSSTPPRQSPSRSSSPQPKVKAIISPRQRSHSGSSSPSPSRVTSRTTPRRSRSVSPCSNVESRLLPRYSHSGSSSPDTKVKPETPPRQSHSGSISPYPKVKAQTPPGPSLSGSKSPCPQEKSKDSLVQSCPGSLSLCAGVKSSTPPGESYFGVSSLQLKGQSQTSPDHRSDTSSPEVRQSHSESPSLQSKSQTSPKGGRSRSSSPVTELASRSPIRQDRGEFSASPMLKSGMSPEQSRFQSDSSSYPTVDSNSLLGQSRLETAESKEKMALPPQEDATASPPRQKDKFSPFPVQDRPESSLVFKDTLRTPPRERSGAGSSPETKEQNSALPTSSQDEELMEVVEKSEEPAGQILSHLSSELKEMSTSNFESSPEVEERPAVSLTLDQSQSQASLEAVEVPSMASSWGGPHFSPEHKELSNSPLRENSFGSPLEFRNSGPLGTEMNTGFSSEVKEDLNGPFLNQLETDPSLDMKEQSTRSSGHSSSELSPDAVEKAGMSSNQSISSPVLDAVPRTPSRERSSSASSPEMKDGLPRTPSRRSRSGSSPGLRDGSGTPSRHSLSGSSPGMKDIPRTPSRGRSECDSSPEPKALPQTPRPRSRSPSSPELNNKCLTPQRERSGSESSVDQKTVARTPLGQRSRSGSSQELDVKPSASPQERSESDSSPDSKAKTRTPLRQRSRSGSSPEVDSKSRLSPRRSRSGSSPEVKDKPRAAPRAQSGSDSSPEPKAPAPRALPRRSRSGSSSKGRGPSPEGSSSTESSPEHPPKSRTARRGSRSSPEPKTKSRTPPRRRSSRSSPELTRKARLSRRSRSASSSPETRSRTPPRHRRSPSVSSPEPAEKSRSSRRRRSASSPRTKTTSRRGRSPSPKPRGLQRSRSRSRREKTRTTRRRDRSGSSQSTSRRRQRSRSRSRVTRRRRGGSGYHSRSPARQESSRTSSRRRRGRSRTPPTSRKRSRSRTSPAPWKRSRSRASPATHRRSRSRTPLISRRRSRSRTSPVSRRRSRSRTSVTRRRSRSRASPVSRRRSRSRTPPVTRRRSRSRTPTTRRRSRSRTPPVTRRRSRSRTPPVTRRRSRSRTSPITRRRSRSRTSPVTRRRSRSRTSPVTRRRSRSRTSPVTRRRSRSRTPPAIRRRSRSRTPLLPRKRSRSRSPLAIRRRSRSRTPRTARGKRSLTRSPPAIRRRSASGSSSDRSRSATPPATRNHSGSRTPPVALNSSRMSCFSRPSMSPTPLDRCRSPGMLEPLGSSRTPMSVLQQAGGSMMDGPGPRIPDHQRTSVPENHAQSRIALALTAISLGTARPPPSMSAAGLAARMSQVPAPVPLMSLRTAPAANLASRIPAASAAAMNLASARTPAIPTAVNLADSRTPAAAAAMNLASPRTAVAPSAVNLADPRTPTAPAVNLAGARTPAALAALSLTGSGTPPTAANYPSSSRTPQAPASANLVGPRSAHATAPVNIAGSRTAAALAPASLTSARMAPALSGANLTSPRVPLSAYERVSGRTSPPLLDRARSRTPPSAPSQSRMTSERAPSPSSRMGQAPSQSLLPPAQDQPRSPVPSAFSDQSRCLIAQTTPVAGSQSLSSGAVATTTSSAGDHNGMLSVPAPGVPHSDVGEPPASTGAQQPSALAALQPAKERRSSSSSSSSSSSSSSSSSSSSSSSSSGSSSSDSEGSSLPVQPEVALKRVPSPTPAPKEAVREGRPPEPTPAKRKRRSSSSSSSSSSSSSSSSSSSSSSSSSSSSSSSSSSSSSSSSSSPSPAKPGPQALPKPASPKKPPPGERRSRSPRKPIDSLRDSRSLSYSPVERRRPSPQPSPRDQQSSSSERGSRRGQRGDSRSPSHKRRRETPSPRPMRHRSSRSP

SEQ ID NO: 3656 - protein, 424 aa, Homo sapiens
MASMPPTPEAQGPILFEDLAVYFSQEECVTLHPAQRSLSKDGTKESLEDAALMGEEGKPEINQQLSLESMELDELALEKYPIAAPLVPYPEKSSEDGVGNPEAKILSGTPTYKRRVISLLVTIENHTPLVELSEYLGTNTLSEILDSPWEGAKNVYKCPECDQNFSDHSYLVLHQKIHSGEKKHKCGDCGKIFNHRANLRTHRRIHTGEKPYKCAKCSASFRQHSHLSRHMNSHVKEKPYTCSICGRGFMWLPGLAQHQKSHSAENTYESTNCDKHFNEKPNLALPEETFVSGPQYQHTKCMKSFRQSLYPALSEKSHDEDSERCSDDGDNFFSFSKFKPLQCPDCDMTFPCFSELISHQNIHTEERPHKCKTCEESFALDSELACHQKSHMLAEPFKCTVCGKTFKSNLHLITHKRTHIKNTT

SEQ ID NO: 3657 - protein, 166 aa, Homo sapiens
MAVSTVFSTSSLMLALSRHSLLSPLLSVTSFRRFYRGDSPTDSQKDMIEIPLPPWQERTDESIETKRARLLYESRKRGMLENCILLSLFAKEHLQHMTEKQLNLYDRLINEPSNDWDIYYWATEAKPAPEIFENEVMALLRDFAKNKNKEQRLRAPDLEYLFEKPR

SEQ ID NO: 3658 - protein, 355 aa, Homo sapiens
METLKDKTLQELEELQNDSEAIDQLALESPEVQDLQLEREMALATNRSLAERNLEFQGPLEISRSNLSDRYQELRKLVERCQEQKAKLEKFSSALQPGTLLDLLQVEGMKIEEESEAMAEKFLEGEVPLETFLENFSSMRMLSHLRRVRVEKLQEVVRKPRASQELAGDAPPPRPPPPVRPVPQGTPPVVEEQPQPPLAMPPYPLPYSPSPSLPVGPTAHGALPPAPFPVVSQPSFYSGPLGPTYPAAQLGPRGAAGYSWSPQRSMPPRPGYPGTPMGASGPGYPLRGGRAPSPGYPQQSPYPATGGKPPYPIQPQLPSFPGQPQPSVPLQPPYPPGPAPPYGFPPPPGPAWPGY

SEQ ID NO: 3659 - protein, 308 aa, Homo sapiens
MNPIVVVHGGGAGPISKDRKERVHQGMVRAATVGYGILREGGSAVDAVEGAVVALEDDPEFNAGCGSVLNTNGEVEMDASIMDGKDLSAGAVSAVQCIANPIKLARLVMEKTPHCFLTDQGAAQFAAAMGVPEIPGEKLVTERNKKRLEKEKHEKGAQKTDCQKNLGTVGAVALDCKGNVAYATSTGGIVNKMVGRVGDSPCLGAGGYADNDIGAVSTTGHGESILKVNLARLTLFHIEQGKTVEEAADLSLGYMKSRVKGLGGLIVVSKTGDWVAKWTSTSMPWAAAKDGKLHFGIDPDDTTITDLP

SEQ ID NO: 3660 - protein, 747 aa, Homo sapiens
MEVKRLKVTELRSELQRRGLDSRGLKVDLAQRLQEALDAEMLEDEAGGGGAGPGGACKAEPRPVAASGGGPGGDEEEDEEEEEEDEEALLEDEDEEPPPAQALGQAAQPPPEPPEAAAMEAAAEPDASEKPAEATAGSGGVNGGEEQGLGKREEDEPEERSGDETPGSEVPGDKAAEEQGDDQDSEKSKPAGSDGERRGVKRQRDEKDEHGRAYYEFREEAYHSRSKSPLPPEEEAKDEEEDQTLVNLDTYTSDLHFQVSKDRYGGQPLFSEKFPTLWSGARSTYGVTKGKVCFEAKVTQNLPMKEGCTEVSLLRVGWSVDFSRPQLGEDEFSYGFDGRGLKAENGQFEEFGQTFGENDVIGCFANFETEEVELSFSKNGEDLGVAFWISKDSLADRALLPHVLCKNCVVELNFGQKEEPFFPPPEEFVFIHAVPVEERVRTAVPPKTIEECEVILMVGLPGSGKTQWALKYAKENPEKRYNVLGAETVLNQMRMKGLEEPEMDPKSRDLLVQQASQCLSKLVQIASRTKRNFILDQCNVYNSGQRRKLLLFKTFSRKVVVVVPNEEDWKKRLELRKEVEGDDVPESIMLEMKANFSLPEKCDYMDEVTYGELEKEEAQPIVTKYKEEARKLLPPSEKRTNRRNNRNKRNRQNRSRGQGYVGGQRRGYDNRAYGQQYWGQPGNRGGYRNFYDRYRGDYDRFYGRDYEYNRYRDYYRQYNRDWQSYYYHHPQDRDRYYRNYYGYQGYR

SEQ ID NO: 3661 - protein, 529 aa, Homo sapiens
MFTVLTRQPCEQAGLKALYRTPTIIALVVLLVSIVVLVSITVIQIHKQEVLPPGLKYGIVLDAGSSRTTVYVYQWPAEKENNTGVVSQTFKCSVKGSGISSYGNNPQDVPRAFEECMQKVKGQVPSHLHGSTPIHLGATAGMRLLRLQNETAANEVLESIQSYFKSQPFDFRGAQIISGQEEGVYGWITANYLMGNFLEKNLWHMWVHPHGVETTGALDLGGASTQISFVAGEKMDLNTSDIMQVSLYGYVYTLYTHSFQCYGRNEAEKKFLAMLLQNSPTKNHLTNPCYPRDYSISFTMGHVFDSLCTVDQRPESYNPNDVITFEGTGDPSLCKEKVASIFDFKACHDQETCSFDGVYQPKIKGPFVAFAGFYYTASALNLSGSFSLDTFNSSTWNFCSQNWSQLPLLLPKFDEVYARSYCFSANYIYHLFVNGYKFTEETWPQIHFEKEVGNSSIAWSLGYMLSLTNQIPAESPLIRLPIEPPVFVGTLAFFTAAALLCLAFLAYLCSATRRKRHSEHAFDHAVDSD

SEQ ID NO: 3662 - protein, 1275 aa, Homo sapiens
MENFILYEEIGRGSKTVVYKGRRKGTINFVAILCTDKCKRPEITNWVRLTREIKHKNIVTFHEWYETSNHLWLVVELCTGGSLKTVIAQDENLPEDVVREFGIDLISGLHHLHKLGILFCDISPRKILLEGPGTLKFSNFCLAKVEGENLEEFFALVAAEEGGGDNGENVLKKSMKSRVKGSPVYTAPEVVRGADFSISSDLWSLGCLLYEMFSGKPPFFSESISELTEKILCEDPLPPIPKDSSRPKASSDFINLLDGLLQRDPQKRLTWTRLLQHSFWKKAFAGADQESSVEDLSLSRNTMECSGPQDSKELLQNSQSRQAKGHKSGQPLGHSFRLENPTEFRPKSTLEGQLNESMFLLSSRPTPRTSTAVEVSPGEDMTHCSPQKTSPLTKITSGHLSQQDLESQMRELIYTDSDLVVTPIIDNPKIMKQPPVKFDAKILHLPTYSVDKLLFLKDQDWNDFLQQVCSQIDSTEKSMGASRAKLNLLCYLCVVAGHQEVATRLLHSPLFQLLIQHLRIAPNWDIRAKVAHVIGLLASHTAELQENTPVVEAIVLLTELIRENFRNSKLKQCLLPTLGELIYLVATQEEKKKNPRECWAVPLAAYTVLMRCLREGEERVVNHMAAKIIENVCTTFSAQSQGFITGEIGPILWYLFRHSTADSLRITAVSALCRITRHSPTAFQNVIEKVGLNSVINSLASAICKVQQYMLTLFAAMLSCGIHLQRLIQEKGFVSTIIRLLDSPSTCIRAKAFLVLLYILIYNREMLLLSCQARLVMYIERDSRKTTPGKEQQSGNEYLSKCLDLLICHIVQELPRILGDILNSLANVSGRKHPSTVQVKQLKLCLPLMPVVLHLVTSQVFRPQVVTEEFLFSYGTILSHIKSVDSGETNIDGAIGLTASEEFIKITLSAFEAIIQYPILLKDYRSTVVDYILPPLVSLVQSQNVEWRLFSLRLLSETTSLLVNQEFGDGKEKASVDSDSNLLALIRDVLLPQYEHILLEPDPVPAYALKLLVAMTEHNPTFTRLVEESKLIPLIFEVTLEHQESILGNTMQSVIALLSNLVACKDSNMELLYEQGLVSHICNLLTETATLCLDVDNKNNNEMAAPLLFSLLDILHSMLTYTSGIVRLALQAQKSGSGEDPQAAEDLLLLNRPLTDLISLLIPLLPNEDPEIFDVSSKCLSILVQLYGGENPDSLSPENVEIFAHLLTSKEDPKEQKLLLRILRRMITSNEKHLESLKNAGSLLRALERLAPGSGSFADSAVAPLALEILQAVGH

SEQ ID NO: 3663 - protein, 550 aa, Homo sapiens
MWKASAGHAVSIAQDDAGADDWETDPDFVNDVSEKEQRWGAKTVQGSGHQEHINIHKLRENVFQEHQTLKEKELETGPKASHGYGGKFGVEQDRMDKSAVGHEYQSKLSKHCSQVDSVRGFGGKFGVQMDRVDQSAVGFEYQGKTEKHASQKDYSSGFGGKYGVQADRVDKSAVGFDYQGKTEKHESQRDYSKGFGGKYGIDKDKVDKSAVGFEYQGKTEKHESQKDYVKGFGGKFGVQTDRQDKCALGWDHQEKLQLHESQKDYKTGFGGKFGVQSERQDSAAVGFDYKEKLAKHESQQDYSKGFGGKYGVQKDRMDKNASTFEDVTQVSSAYQKTVPVEAVTSKTSNIRANFENLAKEKEQEDRRKAEAERAQRMAKERQEQEEARRKLEEQARAKTQTPPVSPAPQPTEERLPSSPVYEDAASFKAELSYRGPVSGTEPEPVYSMEAADYREASSQQGLAYATEAVYESAEAPGHYPAEDSTYDEYENDLGITAVALYDYQAAGDDEISFDPDDIITNIEMIDDGWWRGVCKGRYGLFPANYVELRQ

SEQ ID NO: 3664 - protein, 1303 aa, Homo sapiens
MPGPRGAAGGLAPEMRGAGAAGLLALLLLLLLLLLGLGGRVEGGPAGERGAGGGGALARERFKVVFAPVICKRTCLKGQCRDSCQQGSNMTLIGENGHSTDTLTGSGFRVVVCPLPCMNGGQCSSRNQCLCPPDFTGRFCQVPAGGAGGGTGGSGPGLSRTGALSTGALPPLAPEGDSVASKHAIYAVQVIADPPGPGEGPPAQHAAFLVPLGPGQISAEVQAPPPVVNVRVHHPPEASVQVHRIESSNAESAAPSQHLLPHPKPSHPRPPTQKPLGRCFQDTLPKQPCGSNPLPGLTKQEDCCGSIGTAWGQSKCHKCPQLQYTGVQKPGPVRGEVGADCPQGYKRLNSTHCQDINECAMPGVCRHGDCLNNPGSYRCVCPPGHSLGPSRTQCIADKPEEKSLCFRLVSPEHQCQHPLTTRLTRQLCCCSVGKAWGARCQRCPTDGTAAFKEICPAGKGYHILTSHQTLTIQGESDFSLFLHPDGPPKPQQLPESPSQAPPPEDTEEERGVTTDSPVSEERSVQQSHPTATTTPARPYPELISRPSPPTMRWFLPDLPPSRSAVEIAPTQVTETDECRLNQNICGHGECVPGPPDYSCHCNPGYRSHPQHRYCVDVNECEAEPCGPGRGICMNTGGSYNCHCNRGYRLHVGAGGRSCVDLNECAKPHLCGDGGFCINFPGHYKCNCYPGYRLKASRPPVCEDIDECRDPSSCPDGKCENKPGSFKCIACQPGYRSQGGGACRDVNECAEGSPCSPGWCENLPGSFRCTCAQGYAPAPDGRSCLDVDECEAGDVCDNGICSNTPGSFQCQCLSGYHLSRDRSHCEDIDECDFPAACIGGDCINTNGSYRCLCPQGHRLVGGRKCQDIDECSQDPSLCLPHGACKNLQGSYVCVCDEGFTPTQDQHGCEEVEQPHHKKECYLNFDDTVFCDSVLATNVTQQECCCSLGAGWGDHCEIYPCPVYSSAEFHSLCPDGKGYTQDNNIVNYGIPAHRDIDECMLFGSEICKEGKCVNTQPGYECYCKQGFYYDGNLLECVDVDECLDESNCRNGVCENTRGGYRCACTPPAEYSPAQRQCLSPEEMDVDECQDPAACRPGRCVNLPGSYRCECRPPWVPGPSGRDCQLPESPAERAPERRDVCWSQRGEDGMCAGPLAGPALTFDDCCCRQGRGWGAQCRPCPPRGAGSHCPTSQSESNSFWDTSPLLLGKPPRDEDSSEEDSDECRCVSGRCVPRPGGAVCECPGGFQLDASRARCVDIDECRELNQRGLLCKSERCVNTSGSFRCVCKAGFARSRPHGACVPQRRR

SEQ ID NO: 3665 - protein, 666 aa, Homo sapiens
MPPGGSGPGGCPRRPPALAGPLPPPPPPPPPPLLPLLPLLLLLLLGAAEGARVSSSLSTTHHVHHFHSKHGTVPIAINRMPFLTRGGHAGTTYIFGKGGALITYTWPPNDRPSTRMDRLAVGFSTHQRSAVLVRVDSASGLGDYLQLHIDQGTVGVIFNVGTDDITIDEPNAIVSDGKYHVVRFTRSGGNATLQVDSWPVNERYPAGNFDNERLAIARQRIPYRLGRVVDEWLLDKGRQLTIFNSQAAIKIGGRDQGRPFQGQVSGLYYNGLKVLALAAESDPNVRTEGHLRLVGEGPSVLLSAETTATTLLADMATTIMETTTTMATTTTRRGRSPTLRDSTTQNTDDLLVASAECPSDDEDLEECEPSTGGELILPIITEDSLDPPPVATRSPFVPPPPTFYPFLTGVGATQDTLPPPAARRPPSGGPCQAERDDSDCEEPIEASGFASGEVFDSSLPPTDDEDFYTTFPLVTDRTTLLSPRKPAPRPNLRTDGATGAPGVLFAPSAPAPNLPAGKMNHRDPLQPLLENPPLGPGAPTSFEPRRPPPLRPGVTSAPGFPHLPTANPTGPGERGPPGAVEVIRESSSTTGMVVGIVAAAALCILILLYAMYKYRNRDEGSYQVDQSRNYISNSAQSNGAVVKEKAPAAPKTPSKAKKNKDKEYYV

SEQ ID NO: 3666 - protein, 606 aa, Homo sapiens
MKVRSAGGDGDALCVTEEDLAGDDEDMPTFPCTQKGRPGPRCSRCQKNLSLHTSVRILYLFLALLLVAVAVLASLVFRKVDSLSEDISLTQSIYDKKLVLMQKNLQGLDPKALNNCSFCHEAGQLGPEIRKLQEELEGIQKLLLAQEVQLDQTLQAQEVLSTTSRQISQEMGSCSFSIHQVNQSLGLFLAQVRGWQATTAGLDLSLKDLTQECYDVKAAVHQINFTVGQTSEWIHGIQRKTDEETLTLQKIVTDWQNYTRLFSGLRTTSTKTGEAVKNIQATLGASSQRISQNSESMHDLVLQVMGLQLQLDNISSFLDDHEENMHDLQYHTHYAQNRTVERFESLEGRMASHEIEIGTIFTNINATDNHVHSMLKYLDDVRLSCTLGFHTHAEELYYLNKSVSIMLGTTDLLRERFSLLSARLDLNVRNLSMIVEEMKAVDTQHGEILRNVTILRGAPGPPGPRGFKGDMGVKGPVGGRGPKGDPGSLGPLGPQGPQGQPGEAGPVGERGPVGPRGFPGLKGSKGSFGTGGPRGQPGPKGDIGPPGPEGPPGSPGPSGPQGKPGIAGKTGSPGQRGAMGPKGEPGIQGPPGLPGPPGPPGSQSFY

SEQ ID NO: 3667 - protein, 388 aa, Homo sapiens [sequence omitted]

SEQ ID NO: 3668 - protein, 493 aa, Homo sapiens
MERSPDVSPGPSRSFKEELLCAVCYDPFRDAVTLRCGHNFCRGCVSRCWEVQVSPTCPVCKDRASPADLRTNHTLNNLVEKLLREEAEGARWTSYRFSRVCRLHRGQLSLFCLEDKELLCCSCQADPRHQGHRVQPVKDTAHDFRAKCRNMEHALREKAKAFWAMRRSYEAIAKHNQVEAAWLEGRIRQEFDKLREFLRVEEQAILDAMAEETRQKQLLADEKMKQLTEETEVLAHEIERLQMEMKEDDVSFLMKHKSRKRRLFCTMEPEPVQPGMLIDVCKYLGSLQYRVWKKMLASVESVPFSFDPNTAAGWLSVSDDLTSVTNHGYRVQVENPERFSSAPCLLGSRVFSQGSHAWEVALGGLQSWRVGVVRVRQDSGAEGHSHSCYHDTRSGFWYVCRTQGVEGDHCVTSDPATSPLVLAIPRRLRVELECEEGELSFYDAERHCHLYTFHARFGEVRPYFYLGGARGAGPPEPLRICPLHISVKEELDG

SEQ ID NO: 3669 - protein, 577 aa, Homo sapiens
MQWLMRFRTLWGIHKSFHNIHPAPSQLRCRSLSEFGAPRWNDYEVPEEFNFASYVLDYWAQKEKEGKRGPNPAFWWVNGQGDEVKWSFREMGDLTRRVANVFTQTCGLQQGDHLALMLPRVPEWWLVAVGCMRTGIIFIPATILLKAKDILYRLQLSKAKGIVTIDALASEVDSIASQCPSLKTKLLVSDHSREGWLDFRSLVKSASPEHTCVKSKTLDPMVIFFTSGTTGFPKMAKHSHGLALQPSFPGSRKLRSLKTSDVSWCLSDSGWIVATIWTLVEPWTAGCTVFIHHLPQFDTKVIIQTLLKYPINHFWGVSSIYRMILQQDFTSIRFPALEHCYTGGEVVLPKDQEEWKRRTGLLLYENYGQSETGLICATYWGMKIKPGFMGKATPPYDVQVIDDKGSILPPNTEGNIGIRIKPVRPVSLFMCYEGDPEKTAKVECGDFYNTGDRGKMDEEGYICFLGRSDDIINASGYRIGPAEVESALVEHPAVAESAVVGSPDPIRGEVVKAFIVLTPQFLSHDKDQLTKELQQHVKSVTAPYKYPRKVEFVSELPKTITGKIERKELRKKETGQM

SEQ ID NO: 3670 - protein, 1316 aa, Homo sapiens
MTIVDKASESSDPSAYQNQPGSSEAVSPGDMDAGSASWGAVSSLNDVSNHTLSLGPVPGAVVYSSSSVPDKSKPSPQKDQALGDGIAPPQKVLFPSEKICLKWQQTHRVGAGLQNLGNTCFANAALQCLTYTPPLANYMLSHEHSKTCHAEGFCMMCTMQAHITQALSNPGDVIKPMFVINEMRRIARHFRFGNQEDAHEFLQYTVDAMQKACLNGSNKLDRHTQATTLVCQIFGGYLRSRVKCLNCKGVSDTFDPYLDITLEIKAAQSVNKALEQFVKPEQLDGENSYKCSKCKKMVPASKRFTIHRSSNVLTLSLKRFANFTGGKIAKDVKYPEYLDIRPYMSQPNGEPIVYVLYAVLVHTGFNCHAGHYFCYIKASNGLWYQMNDSIVSTSDIRSVLSQQAYVLFYIRSHDVKNGGELTHPTHSPGQSSPRPVISQRVVTNKQAAPGFIGPQLPSHMIKNPPHLNGTGPLKDTPSSSMSSPNGNSSVNRASPVNASASVQNWSVNRSSVIPEHPKKQKITISIHNKLPVRQCQSQPNLHSNSLENPTKPVPSSTITNSAVQSTSNASTMSVSSKVTKPIPRSESCSQPVMNGKSKLNSSVLVPYGAESSEDSDEESKGLGKENGIGTIVSSHSPGQDAEDEEATPHELQEPMTLNGANSADSDSDPKENGLAPDGASCQGQPALHSENPFAKANGLPGKLMPAPLLSLPEDKILETFRLSNKLKGSTDEMSAPGAERGPPEDRDAEPQPGSPAAESLEEPDAAAGLSSTKKAPPPRDPGTPATKEGAWEAMAVAPEEPPPSAGEDIVGDTAPPDLCDPGSLTGDASPLSQDAKGMIAEGPRDSALAEAPEGLSPAPPARSEEPCEQPLLVHPSGDHARDAQDPSQSLGAPEAAERPPAPVLDMAPAGHPEGDAEPSPGERVEDAAAPKAPGPSPAKEKIGSLRKVDRGHYRSRRERSSSGEPARESRSKTEGHRHRRRRTCPRERDRQDRHAPEHHPGHGDRLSPGERRSLGRCSHHHSRHRSGVELDWVRHHYTEGERGWGREKFYPDRPRWDRCRYYHDRYALYAARDWKPFHGGREHERAGLHERPHKDHNRGRRGCEPARERERHRPSSPRAGAPHALAPHPDRFSHDRTALVAGDNCNLSDRFHEHENGKSRKRRHDSVENSDSHVEKKARRSEQKDPLEEPKAKKHKKSKKKKKSKDKHRDRDSRHQQDSDLSAACSDADLHRHKKKKKKKKRHSRKSEDFVKDSELHLPRVTSLETVAQFRRAQGGFPLSGGPPLEGVGPFREKTKHLRMESRDDRCRLFEYGQGD

SEQ ID NO: 3671 - protein, 859 aa, Homo sapiens
MGRKLDLSGLTDDETEHVLQVVQRDFNLRKKEEERLSELKQKLDEEGSKCSILSKHQQFVEHCCMRCCSPFTFLVNTKRQCGDCKFNVCKSCCSYQKHEKAWVCCVCQQARLLRAQSLEWFYNNVKSRFKRFGSAKVLKNLYRKHRLESGACFDILGGSLFESNLENEGSISGSDSTFYRQSEGHSVMDTLAVALRVAEEAIEEAISKAEAYGDSLDKQNEASYLRDHKEELTEELATTILQKIIRKQKSKSEQQVEEEPGWPHPQSCSTKVADEGTSASPGGYRAPAALWRSQSAFSITGEEALKTPPVEAPSRQPRDQGQHPRAESALPSWKSVDRLDETNLAPVLQSPDGNWVALKDGAPPPTRLLAKPKSGTFQALEVASSVASAYDEMGSDSEEDFDWSEALSKLCPRSRALPRNPQPQPTQAQSSDQGPIAASPSSALSPNPEAMCSDSETSSAGSSREVGHQARLSWLQRKAPRNPAAEKMRLHGELDVNFNPQLASRETSDSSEPEEAPHTTDRRARRWRRARLGSEEPSKEPSSPSAQLRDLDTHQVSDDLSETDISNEARDPQTLTDTTEEKRRNRLYELAMKMSEKETSSGEDQESEPKTESENQKESLSSEDNSQSVQEELKKKFSAVSLCNISTEVLKVINATEELIAGSTGPWESPQVPPDRQKGMFPRGTDQVRLDEQLTSLEENVYLAAGTVYGLETQLTELEDAARCIHSGTDETHLADLEDQVATAAAQVHHAELQISDIESRISALTIAGLNIAPCVRFTRRRDQKQRTQVQTIDTSRQQRRKLPAPPVKAEKIETSSVTTIKTFNHNFILQGSSTNRTKERKGTTKDLMEPALESAVMY

SEQ ID NO: 3672 - protein, 377 aa, Homo sapiens
MKTLPLFVCICALSACFSFSEGRERDHELRHRRHHHQSPKSHFELPHYPGLLAHQKPFIRKSYKCLHKRCRPKLPPSPNNPPKFPNPHQPPKHPDKNSSVVNPTLVATTQIPSVTFPSASTKITTLPNVTFLPQNATTISSRENVNTSSSVATLAPVNSPAPQDTTAAPPTPSATTPAPPSSSAPPETTAAPPTPSATTQAPPSSSAPPETTAAPPTPPATTPAPPSSSAPPETTAAPPTPSATTPAPLSSSAPPETTAVPPTPSATTLDPSSASAPPETTAAPPTPSATTPAPPSSPAPQETTAAPITTPNSSPTTLAPDTSETSAAPTHQTTTSVTTQTTTTKQPTSAPGQNKISRFLLYMKNLLNRIIDDMVEQ

SEQ ID NO: 3673 - protein, 578 aa, Homo sapiens
MNISVDLETNYAELVLDVGRVTLGENSRKKMKDCKLRKKQNESVSRAMCALLNSGGGVIKAEIENEDYSYTKDGIGLDLENSFSNILLFVPEYLDFMQNGNYFLIFVKSWSLNTSGLRITTLSSNLYKRDITSAKVMNATAALEFLKDMKKTRGRLYLRPELLAKRPCVDIQEENNMKALAGVFFDRTELDRKEKLTFTESTHVEIKNFSTEKLLQRIKEILPQYVSAFANTDGGYLFIGLNEDKEIIGFKAEMSDLDDLEREIEKSIRKMPVHHFCMEKKKINYSCKFLGVYDKGSLCGYVCALRVERFCCAVFAKEPDSWHVKDNRVMQLTRKEWIQFMVEAEPKFSSSYEEVISQINTSLPAPHSWPLLEWQRQRHHCPGLSGRITYTPENLCRKLFLQHEGLKQLICEEMDSVRKGSLIFSRSWSVDLGLQENHKVLCDALLISQDSPPVLYTFHMVQDEEFKGYSTQTALTLKQKLAKIGGYTKKVCVMTKIFYLSPEGMTSCQYDLRSQVIYPESYYFTRRKYLLKALFKALKRLKSLRDQFSFAENLYQIIGIDCFQKNDKKMFKSCRRLT

SEQ ID NO: 3674 - protein, 482 aa, Homo sapiens
MASFSAETNSTDLLSQPWNEPPVILSMVILSLTFLLGLPGNGLVLWVAGLKMQRTVNTIWFLHLTLADLLCCLSLPFSLAHLALQGQWPYGRFLCKLIPSIIVLNMFASVFLLTAISLDRCLVVFKPIWCQNHRNVGMACSICGCIWVVAFVMCIPVFVYREIFTTDNHNRCGYKFGLSSSLDYPDFYGDPLENRSLENIVQPPGEMNDRLDPSSFQTNDHPWTVPTVFQPQTFQRPSADSLPRGSARLTSQNLYSNVFKPADVVSPKIPSGFPIEDHETSPLDNSDAFLSTHLKLFPSASSNSFYESELPQGFQDYYNLGQFTDDDQVPTPLVAITITRLVVGFLLPSVIMIACYSFIVFRMQRGRFAKSQSKTFRVAVVVVAVFLVCWTPYHIFGVLSLLTDPETPLGKTLMSWDHVCIALASANSCFNPFLYALLGKDFRKKARQSIQGILEAAFSEELTRSTHCPSNNVISERNSTTV

SEQ ID NO: 3675 - protein, 598 aa, Homo sapiens
MLKLVGGGGGQDWACSVAGTSLGGEEAAFEVARPGDQGKAGGGSPGWGCAGIPDSAPGAGVLQAGAVGPARGGQGAEEVGESAGGGEERRVRHPQAPALRLLNRKPQGGSGEIKTPENDLQRGRLSRGPRTAPPAPGMGDRSGQQERSVPHSPGAPVGTSAAAVNGLLHNGFHPPPVQPPHVCSRGPVGGSDAAPQRLPLLPELQPQPLLPQHDSPAKKCRLRRRMDSGRKNRPPFPWFGMDIGGTLVKLVYFEPKDITAEEEQEEVENLKSIRKYLTSNTAYGKTGIRDVHLELKNLTMCGRKGNLHFIRFPSCAMHRFIQMGSEKNFSSLHTTLCATGGGAFKFEEDFRMIADLQLHKLDELDCLIQGLLYVDSVGFNGKPECYYFENPTNPELCQKKPYCLDNPYPMLLVNMGSGVSILAVYSKDNYKRVTGTSLGGGTFLGLCCLLTGCETFEEALEMAAKGDSTNVDKLVKDIYGGDYERFGLQGSAVASSFGNMMSKEKRDSISKEDLARATLVTITNNIGSIARMCALNENIDRVVFVGNFLRINMVSMKLLAYAMDFWSKGQLKALFLEHEGYFGAVGALLELFKMTDDK

SEQ ID NO: 3676 - protein, 227 aa, Homo sapiens
MNIKGSPWKGSLLLLLVSNLLLCQSVAPLPICPGGAARCQVTLRDLFDRAVVLSHYIHNLSSEMFSEFDKRYTHGRGFITKAINSCHTSSLATPEDKEQAQQMNQKDFLSLIVSILRSWNEPLYHLVTEVRGMQEAPEAILSKAVEIEEQTKRLLEGMELIVSQVHPETKENEIYPVWSGLPSLQMADEESRLSAYYNLLHCLRRDSHKIDNYLKLLKCRIIHNNNC

SEQ ID NO: 3677 - protein, 374 aa, Homo sapiens
MKRQNVRTLSLIVCTFTYLLVGAAVFDALESDHEMREEEKLKAEEIRIKGKYNISSEDYRQLELVILQSEPHRAGVQWKFAGSFYFAITVITTIGYGHAAPGTDAGKAFCMFYAVLGIPLTLVMFQSLGERMNTFVRYLLKRIKKCCGMRNTDVSMENMVTVGFFSCMGTLCIGAAAFSQCEEWSFFHAYYYCFITLTTIGFGDYVALQTKGALQKKPLYVAFSFMYILVGLTVIGAFLNLVVLRFLTMNSEDERRDAEERASLAGNRNSMVIHIPEEPRPSRPRYKADVPDLQSVCSCTCYRSQDYGGRSVAPQNSFSAKLAPHYFHSISYKIEEISPSTLKNSLFPSPISSISPGLHSFTDHQRLMKRRKSV

SEQ ID NO: 3678 - protein, 553 aa, Homo sapiens
MAAPAGGGGSAVSVLAPNGRRHTVKVTPSTVLLQVLEDTCRRQDFNPCEYDLKFQRSVLDLSLQWRFANLPNNAKLEMVPASRSREGPENMVRIALQLDDGSRLQDSFCSGQTLWELLSHFPQIRECLQHPGGATPVCVYTRDEVTGEAALRGTTLQSLGLTGGSATIRFVMKCYDPVGKTPGSLGSSASAGQAAASAPLPLESGELSRGDLSRPEDADTSGPCCEHTQEKQSTRAPAAAPFVPFSGGGQRLGGPPGPTRPLTSSSAKLPKSLSSPGGPSKPKKSKSGQDPQQEQEQERERDPQQEQERERPVDREPVDREPVVCHPDLEERLQAWPAELPDEFFELTVDDVRRRLAQLKSERKRLEEAPLVTKAFREAQIKEKLERYPKVALRVLFPDRYVLQGFFRPSETVGDLRDFVRSHLGNPELSFYLFITPPKTVLDDHTQTLFQANLFPAALVHLGAEEPAGVYLEPGLLEHAISPSAADVLVARYMSRAAGSPSPLPAPDPAPKSEPAAEEGALVPPEPIPGTAQPVKRSLGKVPKWLKLPASKR

SEQ ID NO: 3679 - protein, 364 aa, Homo sapiens
MHRLIFVYTLICANFCSCRDTSATPQSASIKALRNANLRRDDLYRRDETIQVKGNGYVQSPRFPNSYPRNLLLTWRLHSQENTRIQLVFDNQFGLEEAENDICRYDFVEVEDISETSTIIRGRWCGHKEVPPRIKSRTNQIKITFKSDDYFVAKPGFKIYYSLLEDFQPAAASETNWESVTSSISGVSYNSPSVTDPTLIADALDKKIAEFDTVEDLLKYFNPESWQEDLENMYLDTPRYRGRSYHDRKSKVDLDRLNDDAKRYSCTPRNYSVNIREELKLANVVFFPRCLLVQRCGGNCGCGTVNWRSCTCNSGKTVKKYHEVLQFEPGHIKRRGRAKTMALVDIQLDHHERCDCICSSRPPR

SEQ ID NO: 3680 - protein, 456 aa, Homo sapiens
MNKFQGPVTLKDVIVEFTKEEWKLLTPAQRTLYKDVMLENYSHLVSVGYHVNKPNAVFKLKQGKEPWILEVEFPHRGFPEDLWSIHDLEARYQESQAGNSRNGELTKHQKTHTTEKACECKECGKFFCQKSALIVHQHTHSKGKSYDCDKCGKSFSKNEDLIRHQKIHTRDKTYECKECKKIFYHLSSLSRHLRTHAGEKPYECNQCEKSFYQKPHLTEHQKTHTGEKPFECTECGKFFYVKAYLMVHQKTHTGEKPYECKECGKAFSQKSHLTVHQRMHTGEKPYKCKECGKFFSRNSHLKTHQRSHTGEKPYECKECRKCFYQKSALTVHQRTHTGEKPFECNKCGKTFYYKSDLTKHQRKHTGEKPYECTECGKSFAVNSVLRLHQRTHTGEKPYACKECGKSFSQKSHFIIHQRKHTGEKPYECQECGETFIQKSQLTAHQKTHTKKRNAEK

SEQ ID NO: 3681 - protein, 625 aa, Homo sapiens
MARPVDPQRSPDPTFRSSTRHSGKLEPMEATAHLLRKQCPSRLNSPAWEASGLHWSSLDSPVGSMQALRPSAQHSWSPEPSVVPDQAWEDTALHQKKLCPLSLTSLPREAAVNFSYRSQTLLQEAQVLQGSPELLPRSPKPSGLQRLAPEEATALPLRRLCHLSLMEKDLGTTAHPRGFPELSHKSTAAASSRQSRPRVRSASLPPRTRLPSGSQAPSAAHPKRLSDLLLTSRAAAPGWRSPDPRSRLAAPPLGSTTLPSTWTAPQSRLTARPSRSPEPQIRESEQRDPQLRRKQQRWKEPLMPRREEKYPLRGTDPLPPGQPQRIPLPGQPLQPQPILTPGQPQKIPTPGQHQPILTPGHSQPIPTPGQPLPPQPIPTPGRPLTPQPIPTPGRPLTPQPIQMPGRPLRLPPPLRLLRPGQPMSPQLRQTQGLPLPQPLLPPGQPKSAGRPLQPLPPGPDARSISDPPAPRSRLPIRLLRGLLARLPGGASPRAAAAAACTTMKGWPAATMTPAETSPTMGPPDASAGFSIGEIAAAESPSATYSATFSCKPSGAASVDLRVPSPKPRALSRSRRYPWRRSADRCAKKPWRSGPRSAQRRNAVSSSTNNSRTKRWATCVRTACCF

SEQ ID NO: 3682 - protein, 1118 aa, Homo sapiens
MPAVASVPKELYLSSSLKDLNKKTEVKPEKISTKSYVHSALKIFKTAEECRLDRDEERAYVLYMKYVTVYNLIKKRPDFKQQQDYFHSILGPGNIKKAVEEAERLSESLKLRYEEAEVRKKLEEKDRQEEAQRLQQKRQETGREDGGTLAKGSLENVLDSKDKTQKSNGEKNEKCETKEKGAITAKELYTMMTDKNISLIIMDARRMQDYQDSCILHSLSVPEEAISPGVTASWIEAHLPDDSKDTWKKRGNVEYVVLLDWFSSAKDLQIGTTLRSLKDALFKWESKTVLRNEPLVLEGGYENWLLCYPQYTTNAKVTPPPRRQNEEVSISLDFTYPSLEESIPSKPAAQTPPASIEVDENIELISGQNERMGPLNISTPVEPVAASKSDVSPIIQPVPSIKNVPQIDRTKKPAVKLPEEHRIKSESTNHEQQSPQSGKVIPDRSTKPVVFSPTLMLTDEEKARIHAETALLMEKNKQEKELRERQQEEQKEKLRKEEQEQKAKKKQEAEENEITEKQQKAKEEMEKKESEQAKKEDKETSAKRGKEITGVKRQSKSEHETSDAKKSVEDRGKRCPTPEIQKKSTGDVPHTSVTGDSGSGKPFKIKGQPESGILRTGTFREDTDDTERNKAQREPLTRARSEEMGRIVPGLPSGWAKFLDPITGTFRYYHSPTNTVHMYPPEMAPSSAPPSTPPTHKAKPQIPAERDREPSKLKRSYSSPDITQAIQEEEKRKPTVTPTVNRENKPTCYPKAEISRLSASQIRNLNPVFGGSGPALTGLRNLGNTCYMNSILQCLCNAPHLADYFNRNCYQDDINRSNLLGHKGEVAEEFGIIMKALWTGQYRYISPKDFKITIGKINDQFAGYSQQDSQELLLFLMDGLHEDLNKADNRKRYKEENNDHLDDFKAAEHAWQKHKQLNESIIVALFQGQFKSTVQCLTCHKKSRTFEAFMYLSLPLASTSKCTLQDCLRLFSKEEKLTDNNRFYCSHCRARRDSLKKIEIWKLPPVLLVHLKRFSYDGRWKQKLQTSVDFPLENLDLSQYVIGPKNNLKKYNLFSVSNHYGGLDGGHYTAYCKNAARQRWFKFDDHEVSDISVSSVKSSAAYILFYTSLGPRVTDVAT

SEQ ID NO: 3683 - protein, 823 aa, Homo sapiens
MELWRQCTHWLIQCRVLPPSHRVTWDGAQVCELAQALRDGVLLCQLLNNLLPHAINLREVNLRPQMSQFLCLKNIRTFLSTCCEKFGLKRSELFEAFDLFDVQDFGKVIYTLSALSWTPIAQNRGIMPFPTEEESVGDEDIYSGLSDQIDDTVEEDEDLYDCVENEEAEGDEIYEDLMRSEPVSMPPKMTEYDKRCCCLREIQQTEEKYTDTLGSIQQHFLKPLQRFLKPQDIEIIFINIEDLLRVHTHFLKEMKEALGTPGAANLYQVFIKYKERFLVYGRYCSQVESASKHLDRVAAAREDVQMKLEECSQRANNGRFTLRDLLMVPMQRVLKYHLLLQELVKHTQEAMEKENLRLALDAMRDLAQCVNEVKRDNETLRQITNFQLSIENLDQSLAHYGRPKIDGELKITSVERRSKMDRYAFLLDKALLICKRRGDSYDLKDFVNLHSFQVRDDSSGDRDNKKWSHMFLLIEDQGAQGYELFFKTRELKKKWMEQFEMAISNIYPENATANGHDFQMFSFEETTSCKACQMLLRGTFYQGYRCHRCRASAHKECLGRVPPCGRHGQDFPGTMKKDKLHRRAQDKKRNELGLPKMEVFQEYYGLPPPPGAIGPFLRLNPGDIVELTKAEAEQNWWEGPPQDLSVHLWYAGPMERAGAESILANRSDGTFLVRQRVKDAAEFAISIKYNVEVKHIKIMTAEGLYRITEKKAFRGLTELVEFYQQNSLKDCFKSLDTTLQFPFKEPEKRTISRPAVGSTKYFGTAKARYDFCARDRSELSLKEGDIIKILNKKGQQGWWRGEIYGRVGWFPANYVEEDYSEYC

SEQ ID NO: 3684 - protein, 329 aa, Homo sapiens
MLPLLLGLLGPAACWALGPTPGPGSSELRSAFSAARTTPLEGTSEMAVTFDKVYVNIGGDFDVATGQFRCRVPGAYFFSFTAGKAPHKSLSVMLVRNRDEVQALAFDEQRRPGARRAASQSAMLQLDYGDTVWLRLHGAPQYALGAPGATFSGYLVYADADADAPARGPPAPPEPRSAFSAARTRSLVGSDAGPGPRHQPLAFDTEFVNIGGDFDAAAGVFRCRLPGAYFFSFTLGKLPRKTLSVKLMKNRDEVQAMIYDDGASRRREMQSQSVMLALRRGDAVWLLSHDHDGYGAYSNHGKYITFSGFLVYPDLAPAAPPGLGASELL

SEQ ID NO: 3685 - protein, 327 aa, Homo sapiens
MRALPGLLEARARTPRLLLLQCLLAAARPSSADGSAPDSPFTSPPLREEIMANNFSLESHNISLTEHSSMPVEKNITLERPSNVNLTCQFTTSGDLNAVNVTWKKDGEQLENNYLVSATGSTLYTQYRFTIINSKQMGSYSCFFREEKEQRGTFNFKVPELHGKNKPLISYVGDSTVLTCKCQNCFPLNWTWYSSNGSVKVPVGVQMNKYVINGTYANETKLKITQLLEEDGESYWCRALFQLGESEEHIELVVLSYLVPLKPFLVIVAEVILLVATILLCEKYTQKKKKHSDEGKEFEQIEQLKSDDSNGIENNVPRHRKNESLGQ

SEQ ID NO: 3686 - protein, 771 aa, Homo sapiens
MSGRSVRLRSVPIQSLSELERARLQEVAFYQLQQDCDLSCQITIPKDGQKRKKSLRKKLDSLGKEKNKDKEFIPQAFGMPLSQVIANDRAYKLKQDLQRDEQKDASDFVASLLPFGNKRQNKELSSSNSSLSSTSETPNESTSPNTPEPAPRARRRGAMSVDSITDLDDNQSRLLEALQLSLPAEAQSKKEKARDKKLSLNPIYRQVPRLVDSCCQHLEKHGLQTVGIFRVGSSKKRVRQLREEFDRGIDVSLEEEHSVHDVAALLKEFLRDMPDPLLTRELYTAFINTLLLEPEEQLGTLQLLIYLLPPCNCDTLHRLLQFLSIVARHADDNISKDGQEVTGNKMTSLNLATIFGPNLLHKQKSSDKEFSVQSSARAEESTAIIAVVQKMIENYEALFMVPPDLQNEVLISLLETDPDVVDYLLRRKASQSSSPDMLQSEVSFSVGGRHSSTDSNKASSGDISPYDNNSPVLSERSLLAMQEDAAPGGSEKLYRVPGQFMLVGHLSSSKSRESSPGPRLGKDLSEEPFDIWGTWHSTLKSGSKDPGMTGSSGDIFESSSLRAGPCSLSQGNLSPNWPRWQGSPAELDSDTQGARRTQAAAPATEGRAHPAVSRACSTPHVQVAGKAERPTARSEQYLTLSGAHDLSESELDVAGLQSRATPQCQRPHGSGRDDKRPPPPYPGPGKPAAAAAWIQGPPEGVETPTDQGGQAAEREQQVTQKKLSSANSLPAGEQDSPRLGDAGWLDWQRERWQIWELLSTDNPDALPETLV

SEQ ID NO: 3687 - protein, 429 aa, Homo sapiens
MALRLLKLAATSASARVVAAGAQRVRGIHSSVQCKLRYGMWHFLLGDKASKRLTERSRVITVDGNICTGKGKLAKEIAEKLGFKHFPEAGIHYPDSTTGDGKPLATDYNGNCSLEKFYDDPRSNDGNSYRLQSWLYSSRLLQYSDALEHLLTTGQGVVLERSIFSDFVFLEAMYNQGFIRKQCESALQTHFWTGVAGASGKLESGSSEEVLLINERGGRSKPGVDHYNEVKSVTICDYLPPHLVIYIDVPVPEPHEMKITSAYLQDIENAYKKTFLPEMSEKCEVLQYSAREAQDSKKVVEDIEYLKFDKGPWLKQDNRTLYHLRLLVQDKFEVLNYTSIPIFLPEVTIGAHQTDRVLHQFRERLDWTVCFGEESTEVKHQGHLLSVQPGTVALTVGSWLRSCLLGLHWKLLFLFPESPMHTTAFMFLC

SEQ ID NO: 3688 - protein, 160 aa, Homo sapiens
MVPKLFTSQICLLLLLGLMGVEGSLHARPPQFTRAQWFAIQHISLNPPRCTIAMRAINNYRWRCKNQNTFLRTTFANVVNVCGNQSIRCPHNRTLNNCHRSRFRVPLLHCDLINPGAQNISNCTYADRPGRRFYVVACDNRDPRDSPRYPVVPVHLDTTI

SEQ ID NO: 3689 - protein, 419 aa, Homo sapiens
MPAENSPAPAYKVSSHGGDSGLDGLGGPGVQLGSPDKKKRKANTQGPSFPPLSEYAPPPNPNSDHLVAANPFDDNYNTISYKPLPSSNPYLGPGYPGFGGYSTFRMPPHVPPRMSSPYCGPYSLRNQPHPFPQNPLGMGFNRPHAFNFGPHDNSSFGNPSYNNALSQNVNMPNQHFRQNPAENFSQIPPQNASQVSNPDLASNFVPGNNSNFTSPLESNHSFIPPPNTFGQAKAPPPKQDFTQGATKNTNQNSSAHPPHLNMDDTVNQSNIELKNVNRNNAVNQENSRSSSTEATNNNPANGTQNKPRQPRGAADACTTEKSNKSSLHPNRHGHSSSDPVYPCGICTNEVNDDQDAILCEASCQKWFHRICTGMTETAYGLLTAEASAVWGCDTCMADKDVQLMRTRETFGPSAVGSDA

SEQ ID NO: 3690 - protein, 764 aa, Homo sapiens
MAGTSAPGSKRRSEPPAPRPGPPPGTGHPPSKRARGFSAAAAPDPDDPFGAHGDFTADDLEELDTLASQALSQCPAAARDVSSDHKVHRLLDGMSKNPSGKNRETVPIKDNFELEVLQAQYKELKEKMKVMEEEVLIKNGEIKILRDSLHQTESVLEEQRRSHFLLEQEKTQALSDKEKEFSKKLQSLQSELQFKDAEMNELRTKLQTSERANKLAAPSVSHVSPRKNPSVVIKPEACSPQFGKTSFPTKESFSANMSLPHPCQTESGYKPLVGREDSKPHSLRGDSIKQEEAQKSFVDSWRQRSNTQGSILINLLLKQPLIPGSSLSLCHLLSSSSESPAGTPLQPPGFGSTLAGMSGLRTTGSYDGSFSLSALREAQNLAFTGLNLVARNECSRDGDPAEGGRRAFPLCQLPGAVHFLPLVQFFIGLHCQALQDLAAAKRSGAPGDSPTHSSCVSSGVETNPEDSVCILEGFSVTALSILQHLVCHSGAVVSLLLSGVGADSAAGEGNRSLVHRLSDGDMTSALRGVADDQGQHPLLKMLLHLLAFSSAATGHLQASVLTQCLKVLVKLAENTSCDFLPRFQCVFQVLPKCLSPETPLPSVLLAVELLSLLADHDQLAPQLCSHSEGCLLLLLYMYITSRPDRVALETQWLQLEQEVVRALTVMLHRQWLTVRRAGGPPRTDQQRRTVRCLRDTVLLLHGLSQKDKLFMMHCVEVLHQFDQVMPGVSMLIRGLPDVTDCEEAALDDLCAAETDVEDPEVECG

SEQ ID NO: 3691 - protein, 932 aa, Homo sapiens
MQRELVYARGDGPGAPRPGSTAHPPHAIPNSPPSTPVPHSMPPSPSRIPYGGTRSMVVPGNATIPRDRISSLPVSRPISPSPSAILERRDVKPDEDMSGKNIAMYRNEGFYADPYLYHEGRMSIASSHGGHPLDVPDHIIAYHRTAIRSASAYCNPSMQAEMHMEQSLYRQKSRKYPDSHLPTLGSKTPPASPHRVSDLRMIDMHAHYNAHGPPHTMQPDRASPSRQAFKKEPGTLVYIEKPRSAAGLSSLVDLGPPLMEKQVFAYSTATIPKDRETSEKMMKTTANRNHTDSAGTPHVSGGKMLSALESTVPPSQPPPVGTSAIHMSLLEMRRSVAELRLQLQQMRQLQLQNQELLRAMMKKAELEISGKVMETMKRLEDPVQRQRVLVEQERQKYLHEEEKIVKKLCELEDFVEDLKKDSTAASRLVTLKDVEDGAFLLRQVGEAVATLKGEFPTLQNKMRAILRIEVEAVRFLKEEPHKLDSLLKRVRSMTDVLTMLRRHVTDGLLKGTDAAQAAQYMAMEKATAAEVLKSQEEAAHTSGQPFHSTGAPGDAKSEVVPLSGMMVRHAQSSPVVIQPSQHSVALLNPAQNLPHVASSPAVPQEATSTLQMSQAPQSPQIPMNGSAMQSLFIEEIHSVSAKNRAVSIEKAEKKWEEKRQNLDHYNGKEFEKLLEEAQANIMKSIPNLEMPPATGPLPRGDAPVDKVELSEDSPNSEQDLEKLGGKSPPPPPPPPRRSYLPGSGLTTTRSGDVVYTGRKENITAKASSEDAGPSPQTRATKYPAEEPASAWTPSPPPVTTSSSKDEEEEEEEGDKIMAELQAFQKCSFMDVNSNSHAEPSRADSHVKDTRSGATVPPKEKKNLEFFHEDVRKSDVEYENGPQMEFQKGSSGAPQTSRMPVPMSAKNRPGTLDKPGKQSKLQDPRQYRQVVLP

SEQ ID NO: 3692 - protein, 391 aa, Homo sapiens
MDRRKKPLDVTASSLVDLKAELFRKQEEFKQEKLLKDSGVFGKPKTTNKKPSIWSKQNVGVSNRAEKDAEQKIEEQKTLDKAREKLEEKAKLYEKMTKGDFIDEEVEDMYLVDFTQKIIDKRKEMEASGAHRDSQKAGERDDDEENLPEGEIPPPQDPSEEWVDYVDSLGRSRRCMRKDLPDLLEMDKNLQGRLFISPANEKTLLSEDMRKELQRQQWEEEEREALKRPMGPVHYEDIRENDGDVIGPLPPEPEAVPTPRPAAQSSKVEVIVQERKDTKPGVPHIREWDRGKEFSFGYWSKRQSDLRAERDPEFAPPSDYFVGQKRTGFSSSQAWSRPGPAQSDPGQCPDQSHGPSPEHTSPTPAPDNPPQAPTVTFKTLDDMISYYKQVT

SEQ ID NO: 3693 - protein, 314 aa, Homo sapiens
MLPSNITSTHPAVFLLVGIPGLEHLHAWISIPFCFAYTLALLGNCTLLFIIQADAALHEPMYLFLAMLATIDLVLSSTTLPKMLAIFWFRDQEINFFACLVQMFFLHSFSIMESAVLLAMAFDRYVAICKPLHYTTVLTGSLITKIGMAAVARAVTLMTPLPFLLRRFHYCRGPVIAHCYCEHMAVVRLACGDTSFNNIYGIAVAMFIVVLDLLFVILSYVFILQAVLQLASQEARYKAFGTCVSHIGAILSTYTPVVISSVMHRVARHAAPRVHILLAIFYLLFPPMVNPIIYGVKTKQIREYVLSLFQRKNM

SEQ ID NO: 3694 - protein, 313 aa, Homo sapiens
MERINSTLLTAFILTGIPYPLRLRTLFFVFFFLIYILTQLGNLLILITVWADPRLHARPMYIFLGVLSVIDMSISSIIVPRLMMNFTLGVKPIPFGGCVAQLYFYHFLGSTQCFLYTLMAYDRYLAICQPLRYPVLMTAKLSALLVAGAWMAGSIHGALQAILTFRLPYCGPNQVDYFFCDIPAVLRLACADTTVNELVTFVDIGVVVASCFSLILLSYIQIIQAILRIHTADGRRRAFSTCGAHVTVVTVYYVPCAFIYLRPETNSPLDGAAALVPTAITPFLNPLIYTLRNQEVKLALKRMLRSPRTPSEV

SEQ ID NO: 3695 - protein, 664 aa, Homo sapiens
MLMDAGQDYMVFEDVAIHFSQEEWGILNDVQRHLHSDVMLENFALLSSVGCWHGAKDEEAPSKQCVSVGVSQVTTLKPALSTQKAQPCETCSSLLKDILHLAEHDGTHPKRTAKLYLHQKEHLREKLTRSDEGRPSFVNDSVHLAKRNLTCMQGGKDFTGDSDLQQQALHSGWKPHRDTHGVEAFQSGQNNYSCTQCGKDFCHQHTLFEHQKIHTEERPYECSECGKLFRYNSDLIKHQRNHTGERPYKCSECGKAFSLKYNVVQHQKIHTGERPYECSECGKAFLRKSHLLQHQRIHTRPRPYVCSECGKAFLTQAHLVGHQKIHTGERPYGCNECGKYFMYSSALIRHQKVHTGERPFYCCECGKFFMDSCTLIIHQRVHTGEKPYECNECGKFFRYRSTLIRHQKVHTGEKPYECSECGKFFMDTSTLIIHQRVHTGEKPYECNKCGKFFRYCFTLNRHQRVHSGERPYECSECGKFFVDSCTLKSHQRVHTGERPFECSICGKSFRCRSTLDTHQRIHTGERPYECSECGKFFRHNSNHIRHRRNHFGERSFECTECGRVFSQNSHLIRHQKVHTRERTYKCSKCGKFFMDSSTLISHERVHTGEKPYECSECGKVFRYNSSLIKHRRIHTGERPYQCSECGRVFNQNSHLIQHQKVHTR

SEQ ID NO: 3696 - protein, 1213 aa, Homo sapiens
MKQPIMADGPRCKRRKQANPRRKNVVNYDNVVDTGSETDEEDKLHIAEDDGIANPLDQETSPASVPNHESSPHVSQALLPREEEEDEIREGGVEHPWHNNEILQASVDGPEMKEDYDTMGPEATIQTAINNGTVKNANCTSDFEEYFAKRKLEERDGHAVSIEEYLQRSDTAIIYPEAPEELSRLGTPEANGQEENDLPPGTPDAFAQLLTCPYCDRGYKRLTSLKEHIKYRHEKNEENFSCPLCSYTFAYRTQLERHMVTHKPGTDQHQMLTQGAGNRKFKCTECGKAFKYKHHLKEHLRIHSGEKPYECPNCKKRFSHSGSYSSHISSKKCIGLISVNGRMRNNIKTGSSPNSVSSSPTNSAITQLRNKLENGKPLSMSEQTGLLKIKTEPLDFNDYKVLMATHGFSGTSPFMNGGLGATSPLGVHPSAQSPMQHLGVGMEAPLLGFPTMNSNLSEVQKVLQIVDNTVSRQKMDCKAEEISKLKGYHMKDPCSQPEEQGVTSPNIPPVGLPVVSHNGATKSIIDYTLEKVNEAKACLQSLTTDSRRQISNIKKEKLRTLIDLVTDDKMIENHNISTPFSCQFCKESFPGPIPLHQHERYLCKMNEEIKAVLQPHENIVPNKAGVFVDNKALLLSSVLSEKGMTSPINPYKDHMSVLKAYYAMNMEPNSDELLKISIAVGLPQEFVKEWFEQRKVYQYSNSRSPSLERSSKPLAPNSNPPTKDSLLPRSPVKPMDSITSPSIAELHNSVTNCDPPLRLTKPSHFTNIKPVEKLDHSRSNTPSPLNLSSTSSKNSHSSSYTPNSFSSEELQAEPLDLSLPKQMKEPKSIIATKNKTKASSISLDHNSVSSSSENSDEPLNLTFIKKEFSNSNNLDNKSTNPVFSMNPFSAKPLYTALPPQSAFPPATFMPPVQTSIPGLRPYPGLDQMSFLPHMAYTYPTGAATFADMQQRRKYQRKQGFQGELLDGAQDYMSGLDDMTDSDSCLSRKKIKKTESGMYACDLCDKTFQKSSSLLRHKYEHTGKRPHQCQICKKAFKHKHHLIEHSRLHSGEKPYQCDKCGKRFSHSGSYSQHMNHRYSYCKREAEEREAAEREAREKGHLEPTELLMNRAYLQSITPQGYSDSEERESMPRDGESEKEHEKEGEDGYGKLGRQDGDEEFEEEEEESENKSMDTDPETIRDEEETGDHSMDDSSEDGKMETKSDHEEDNMEDGM

SEQ ID NO: 3697 - protein, 485 aa, Homo sapiens
MRDNRAVSLCQQEWMCPGPAQRALYRGATQRKDSHVSLATGVPWGYEETKTLLAILSSSQFYGKLQTCQQNSQIYRAMAEGLWEQGFLRTPEQCRTKFKSLQLSYRKVRRGRVPEPCIFYEEMNALSGSWASAPPMASDAVPGQEGSDIEAGELNHQNGEPTEVEDGTVDGADRDEKDFRNPGQEVRKLDLPVLFPNRLGFEFKNEIKKENLKWDDSEEVEINKALQRKSRGVYWHSELQKGLESEPTSRRQCRNSPGESEEKTPSQEKMSHQSFCARDKACTHILCGKNCSQSVHSPHKPALKLEKVSQCPECGKTFSRSSYLVRHQRIHTGEKPHKCSECGKGFSERSNLTAHLRTHTGERPYQCGQCGKSFNQSSSLIVHQRTHTGEKPYQCIVCGKRFNNSSQFSAHRRIHTGESPYKCAVCGKIFNNSSHFSAHRKTHTGEKPYRCSHCERGFTKNSALTRHQTVHMKAVLSSQEGRDAL

SEQ ID NO: 3698 - protein, 1085 aa, Homo sapiens
MDTPENVLQMLEAHMQSYKGNDPLGEWERYIQWVEENFPENKEYLITLLEHLMKEFLDKKKYHNDPRFISYCLKFAEYNSDLHQFFEFLYNHGIGTLSSPLYIAWAGHLEAQGELQHASAVLQRGIQNQAEPREFLQQQYRLFQTRLTETHLPAQARTSEPLHNVQVLNQMITSKSNPGNNMACISKNQGSELSGVISSACDKESNMERRVITISKSEYSVHSSLASKVDVEQVVMYCKEKLIRGESEFSFEELRAQKYNQRRKHEQWVNEDRHYMKRKEANAFEEQLLKQKMDELHKKLHQVVETSHEDLPASQERSEVNPARMGPSVGSQQELRAPCLPVTYQQTPVNMEKNPREAPPVVPPLANAISAALVSPATSQSIAPPVPLKAQTVTDSMFAVASKDAGCVNKSTHEFKPQSGAEIKEGCETHKVANTSSFHTTPNTSLGMVQATPSKVQPSPTVHTKEALGFIMNMFQAPTLPDISDDKDEWQSLDQNEDAFEAQFQKNVRSSGAWGVNKIISSLSSAFHVFEDGNKENYGLPQPKNKPTGARTFGERSVSRLPSKPKEEVPHAEEFLDDSTVWGIRCNKTLAPSPKSPGDFTSAAQLASTPFHKLPVESVHILEDKENVVAKQCTQATLDSCEENMVVPSRDGKFSPIQEKSPKQALSSHMYSASLLRLSQPAAGGVLTCEAELGVEACRLTDTDAAIAEDPPDAIAGLQAEWMQMSSLGTVDAPNFIVGNPWDDKLIFKLLSGLSKPVSSYPNTFEWQCKLPAIKPKTEFQLGSKLVYVHHLLGEGAFAQVYEATQGDLNDAKNKQKFVLKVQKPANPWEFYIGTQLMERLKPSMQHMFMKFYSAHLFQNGSVLVGELYSYGTLLNAINLYKNTPEKVMPQGLVISFAMRMLYMIEQVHDCEIIHGDIKPDNFILGNGFLEQDDEDDLSAGLALIDLGQSIDMKLFPKGTIFTAKCETSGFQCVEMLSNKPWNYQIDYFGVAATVYCMLFGTYMKVKNEGGECKPEGLFRRLPHLDMWNEFFHVMLNIPDCHHLPSLDLLRQKLKKVFQQHYTNKIRALRNRLIVLLLECKRSRK

SEQ ID NO: 3699 - protein, 714 aa, Homo sapiens
MPVRFKGLSEYQRNFLWKKSYLSESCNSSVGRKYPWAGLRSDQLGITKEPSFISKRRVPYHDPQISKSLEWNGAISESNVVASPEPEAPETPKSQEAEQKDVTQERVHSLEASRVPKRTRSHSADSRAEGASDVENNEGVTNHTPVNENVELEHSTKVLSENVDNGLDRLLRKKAGLTVVPSYNALRNSEYQRQFVWKTSKETAPAFAANQVFHNKSQFVPPFKGNSVIHETEYKRNFKGLSPVKEPKLRNDLRENRNLETVSPERKSNKIDDRLKLEAEMELKDLHQPKRKLTPWKHQRLGKVNSEYRAKFLSPAQYLYKAGAWTHVKGNMPNQVKELREKAEFYRKRVQGTHFSRDHLNQILSDSNCCWDVSSTTSSEGTVSSNIRALDLAGDPTSHKTLQKCPSTEPEEKGNIVEEQPQKNTTEKLGVSAPTIPVRRRLAWDTENTSEDVQKQPGEKEEEDDNEEEGDRKTGKQAFMGEQEKLDVREKSKADKMKEGSDSSVSSEKGGRLPTPKLRELGGIQRTHHDLTTPAVGGAVLVSPSKMKPPAPEQRKRMTSQDCLETSKNDFTKKESRAVSLLTSPAAGIKTVDPLPLREDSEDNIHKFAEATLPVSKIPKYPTNPPGQLPSPPHVPSYWHPSRRIQGSLRDPEFQHNVGKARMNNLQLPQHEAFNDEDEDRLSEISARSAASSLRAFQTLARAKKRKENFWGKT

SEQ ID NO: 3700 - protein, 322 aa, Homo sapiens
MSSLGGGSQDAGGSSSSSTNGSGGSGSSGPKAGAADKSAVVAAAAPASVADDTPPPERRNKSGIISEPLNKSLRRSRPLSHYSSFGSSGGSGGGSMMGGESADKATAAAAAASLLANGHDLAAAMAVDKSNPTSKHKSGAVASLLSKAERATELAAEGQLTLQQFAQSTEMLKRVVQEHLPLMSEAGAGLPDMEAVAGAEALNGQSDFPYLGAFPINPGLFIMTPAGVFLAESALHMAGLAEYPMQGELASAISSGKKKRKRCGMCAPCRRRINCEQCSSCRNRKTGHQICKFRKCEELKKKPSAALEKVMLPTGAAFRWFQ

SEQ ID NO: 3701 - protein, 1767 aa, Homo sapiens
MEPWSSRWKTKRWLWDFTVTTLALTFLFQAREVRGAAPVDVLKALDFHNSPEGISKTTGFCTNRKNSKGSDTAYRVSKQAQLSAPTKQLFPGGTFPEDFSILFTVKPKKGIQSFLLSIYNEHGIQQIGVEVGRSPVFLFEDHTGKPAPEDYPLFRTVNIADGKWHRVAISVEKKTVTMIVDCKKKTTKPLDRSERAIVDTNGITVFGTRILDEEVFEGDIQQFLITGDPKAAYDYCEHYSPDCDSSAPKAAQAQEPQIDEANIVDDFQEYNYGTMESYQTEAPRHVSGTNEPNPVEEIFTEEYLTGEDYDSQRKNSEDTLYENKEIDGRDSDLLVDGDLGEYDFYEYKEYEDKPTSPPNEEFGPGVPAETDITETSINGHGAYGEKGQKGEPAVVEPGMLVEGPPGPAGPAGIMGPPGLQGPTGPPGDPGDRGPPGRPGLPGADGLPGPPGTMLMLPFRYGGDGSKGPTISAQEAQAQAILQQARIALRGPPGPMGLTGRPGPVGGPGSSGAKGESGDPGPQGPRGVQGPPGPTGKPGKRGRPGADGGRGMPGEPGAKGDRGFDGLPGLPGDKGHRGERGPQGPPGPPGDDGMRGEDGEIGPRGLPGEAGPRGLLGPRGTPGAPGQPGMAGVDGPPGPKGNMGPQGEPGPPGQQGNPGPQGLPGPQGPIGPPGEKGPQGKPGLAGLPGADGPPGHPGKEGQSGEKGALGPPGPQGPIGYPGPRGVKGADGVRGLKGSKGEKGEDGFPGFKGDMGLKGDRGEVGQIGPRGEDGPEGPKGRAGPTGDPGPSGQAGEKGKLGVPGLPGYPGRQGPKGSTGFPGFPGANGEKGARGVAGKPGPRGQRGPTGPRGSRGARGPTGKPGPKGTSGGDGPPGPPGERGPQGPQGPVGFPGPKGPPGPPGKDGLPGHPGQRGETGFQGKTGPPGPGGVVGPQGPTGETGPIGERGHPGPPGPPGEQGLPGAAGKEGAKGDPGPQGISGKDGPAGLRGFPGERGLPGAQGAPGLKGGEGPQGPPGPVGSPGERGSAGTAGPIGLPGRPGPQGPPGPAGEKGAPGEKGPQGPAGRDGVQGPVGLPGPAGPAGSPGEDGDKGEIGEPGQKGSKGDKGENGPPGPPGLQGPVGAPGIAGGDGEPGPRGQQGMFGQKGDEGARGFPGPPGPIGLQGLPGPPGEKGENGDVGPMGPPGPPGPRGPQGPNGADGPQGPPGSVGSVGGVGEKGEPGEAGNPGPPGEAGVGGPKGERGEKGEAGPPGAAGPPGAKGPPGDDGPKGNPGPVGFPGDPGPPGEPGPAGQDGVGGDKGEDGDPGQPGPPGPSGEAGPPGPPGKRGPPGAAGAEGRQGEKGAKGEAGAEGPPGKTGPVGPQGPAGKPGPEGLRGIPGPVGEQGLPGAAGQDGPPGPMGPPGLPGLKGDPGSKGEKGHPGLIGLIGPPGEQGEKGDRGLPGTQGSPGAKGDGGIPGPAGPLGPPGPPGLPGPQGPKGNKGSTGPAGQKGDSGLPGPPGSPGPPGEVIQPLPILSSKKTRRHTEGMQADADDNILDYSDGMEEIFGSLNSLKQDIEHMKFPMGTQTNPARTCKDLQLSHPDFPDGEYWIDPNQGCSGDSFKVYCNFTSGGETCIYPDKKSEGVRISSWPKEKPGSWFSEFKRGKLLSYLDVEGNSINMVQMTFLKLLTASARQNFTYHCHQSAAWYDVSSGSYDKALRFLGSNDEEMSYDNNPFIKTLYDGCASRKGYEKTVIEINTPKIDQVPIVDVMINDFGDQNQKFGFEVGPVCFLG

SEQ ID NO: 3702 - protein, 509 aa, Homo sapiens
MDFLLALVLVSSLYLQAAAEFDGRWPRQIVSSIGLCRYGGRIDCCWGWARQSWGQCQPVCQPRCKHGECIGPNKCKCHPGYAGKTCNQDLNECGLKPRPCKHRCMNTYGSYKCYCLNGYMLMPDGSCSSALTCSMANCQYGCDVVKGQIRCQCPSPGLQLAPDGRTCVDVDECATGRASCPRFRQCVNTFGSYICKCHKGFDLMYIGGKYQCHDIDECSLGQYQCSSFARCYNIRGSYKCKCKEGYQGDGLTCVYIPKVMIEPSGPIHVPKGNGTILKGDTGNNNWIPDVGSTWWPPKTPYIPPIITNRPTSKPTTRPTPKPTPIPTPPPPPPLPTELRTPLPPTTPERPTTGLTTIAPAASTPPGGITVDNRVQTDPQKPRGDVFSVLVHSCNFDHGLCGWIREKDNDLHWEPIRDPAGGQYLTVSAAKAPGGKAARLVLPLGRLMHSGDLCLSFRHKVTGLHSGTLQVFVRKHGAHGAALWGRNGGHGWRQTQITLRGADIKSESQR

SEQ ID NO: 3703 - protein, 488 aa, Homo sapiens
MAAGSEATTPVIVAAGAGGEEGEHVKPFKPEKAKEIIMSLQQPAIFCNMVFDWPARHWNAKYLSQVLHGKQIRFRMGMKSMSTVPQFETTCNYVEATLEEFLTWNCDQSSISGPFRDYDHSKFWAYADYKYFVSLFEDKTDLFQDVKWSDFGFPGRNGQESTLWIGSLGAHTPCHLDSYGCNLVFQVQGRKRWHLFPPEDTPFLYPTRIPYEESSVFSKINVVNPDLKRFPQFRKAQRHAVTLSPGQVLFVPRHWWHYVESIDPVTVSINSWIELEEDHLARVEEAITRMLVCALKTAENPQNTRAWLNPTEVEETSHAVNCCYLNAAVSAFFDRCRTSEVVEIQALRTDGEHMKKEELNVCNHMEVGQTGSQNLTTGTDKPEAASPFGPDLVPVAQRSEEPPSERGGIFGSDGKDFVDKDGEHFGKLHCAKRQQIMSNSENAIEEQIASNTTTTPQTFISTDDLLDCLVNPQVTRIVAQLLIQGRSL

SEQ ID NO: 3704 - protein, 247 aa, Homo sapiens
MEYHPDLENLDEDGYTQLHFDSQSNTRIAVVSEKGSCAASPPWRLIAVILGILCLVILVIAVVLGTMAIWRSNSGSNTLENGYFLSRNKENHSQPTQSSLEDSVTPTKAVKTTGVLSSPCPPNWIIYEKSCYLFSMSLNSWDGSKRQCWQLGSNLLKIDSSNELGFIVKQVSSQPDNSFWIGLSRPQTEVPWLWEDGSTFSSNLFQIRTTATQENPSPNCVWIHVSVIYDQLCSVPSYSICEKKFSM

SEQ ID NO: 3705 - protein, 371 aa, Homo sapiens
MSSRGGKKKSTKTSRSAKAGVIFPVGRMLRYIKKGHPKYRIGVGAPVYMAAVLEYLTAEILELAGNAARDNKKGRVTPRHILLAVANDEELNQLLKGVTIASGGVLPNIHPELLAKKRGSKGKLEAIITPPPAKKAKSPSQKKPVSKKAGGKKGARKSKKQGEVSKAASADSTTEGTPADGFTVLSTKSLFLGQKLNLIHSEISNLAGFEVEAIINPTNADIDLKDDLGNTLEKKGGKEFVEAVLELRKKNGPLEVAGAAVSAGHGLPAKFVIHCNSPVWGADKCEELLEKTVKNCLALADDKKLKSIAFPSIGSGRNGFPKQTAAQLILKAISSYFVSTMSSSIKTVYFVLFDSESIGIYVQEMAKLDAN

SEQ ID NO: 3706 - protein, 688 aa, Homo sapiens
MSNVTLRKMSPTGNEMKSTTQGTTRKQQDFHEVNKRRTFLQDNSWIKKRPEEEKDENYGRVVLNRHNSHDALDRKVNERDVPKATISRYSSDDTLDRISDRNDAAKTYKANTLDNQLTNRSMSMFRSLEVTKLQPGGSLNANTSNTIASTSATTPVKKKRQSWFPPPPPGYNASSSTGTRRREPGVHPPIPPKPSSPVSSPNQLRQDNRQIHPPKPGVYTETNRSAERNIRSQDLDNIVKVATSLQRSDKGEELDNLIKMNKSLNRNQGLDSLFRANPKVEEREKRAKSLESLIYMSTRTDKDGKGIQSLGSPIKVNQRTDKNEKGRQNLESVAKVNARMNKTSRRSEDLDNATEVNPKGHENTTGKKDLDGLIKVDPETNKNITRGQSLDNLIKVTPEVKRSNQGSKDLNNFIKVYPGTEKSTEGGQSLDSLIKVTPERNRTNQGNQDLENLIKVIPSANKSSEQGLDEHINVSPKAVKNTDGKQDLDKLIKVNPEIFTNNQRNQDLANLIKVNPAVIRNNQSQDLDNLIKVKPSALRNTNRDQNLENLIEVNSHVSENKNGSSNTGAKQAGPQDTVVYTRTYVENSKSPKDGYQENISGKYIQTVYSTSDRSVIERDMCTYCRKPLGVETKMILDELQICCHSTCFKCEICKQPLENLQAGDSIWIYRQTIHCEPCYSKIMAKWIP

SEQ ID NO: 3707 - protein, 623 aa, Homo sapiens
MSTQDERQINTEYAVSLLEQLKLFYEQQLFTDIVLIVEGTEFPCHKMVLATCSSYFRAMFMSGLSESKQTHVHLRNVDAATLQIIITYAYTGNLAMNDSTVEQLYETACFLQVEDVLQRCREYLIKKINAENCVRLLSFADLFSCEELKQSAKRMVEHKFTAVYHQDAFMQLSHDLLIDILSSDNLNVEKEETVREAAMLWLEYNTESRSQYLSSVLSQIRIDALSEVTQRAWFQGLPPNDKSVVVQGLYKSMPKFFKPRLGMTKEEMMIFIEASSENPCSLYSSVCYSPQAEKVYKLCSPPADLHKVGTVVTPDNDIYIAGGQVPLKNTKTNHSKTSKLQTAFRTVNCFYWFDAQQNTWFPKTPMLFVRIKPSLVCCEGYIYAIGGDSVGGELNRRTVERYDTEKDEWTMVSPLPCAWQWSAAVVVHDCIYVMTLNLMYCYFPRSDSWVEMAMRQTSRSFASAAAFGDKIFYIGGLHIATNSGIRLPSGTVDGSSVTVEIYDVNKNEWKMAANIPAKRYSDPCVRAVVISNSLCVFMRETHLNERAKYVTYQYDLELDRWSLRQHISERVLWDLGRDFRCTVGKLYPSCLEESPWKPPTYLFSTDGTEEFELDGEMVALPPV

SEQ ID NO: 3708 - protein, 359 aa, Homo sapiens
MTSTSKGILRPFLIVCIILGCFMACLLIYIKPTNSWIFSPMESASSVLKMKNFFSTKTDYFNETTILVWVWPFGQTFDLTSCQAMFNIQGCHLTTDRSLYNKSHAVLIHHRDISWDLTNLPQQARPPFQKWIWMNLESPTHTPQKSGIEHLFNLTLTYRRDSDIQVPYGFLTVSTNPFVFEVPSKEKLVCWVVSNWNPEHARVKYYNELSKSIEIHTYGQAFGEYVNDKNLIPTISTCKFYLSFENSIHKDYITEKLYNAFLAGSVPVVLGPSRENYENYIPADSFIHVEDYNSPSELAKYLKEVDKNNKLYLSYFNWRKDFTVNLPRFWESHACLACDHVKRHQEYKSVGNLEKWFWN

SEQ ID NO: 3709 - protein, 456 aa, Homo sapiens
MDTVVFEDVVVDFTLEEWALLNPAQRKLYRDVMLETFKHLASVDNEAQLKASGSISQQDTSGEKLSLKQKIEKFTRKNIWASLLGKNWEEHSVKDKHNTKERHLSRNPRVERPCKSSKGNKRGRTFRKTRNCNRHLRKNCCTSVRRYECSQCGKLFTHSSSLIRHKRAHSGQKLYKCKECGKAFSRPSYLQTHEKTHSGEKPYACQSCGKTFLRSHSLTEHVRTHTGEKPYECGQCGKGFSCPKSFRAHVMMHAGGRPYECKHCGKAFRCQKSFRVHMIMHAGGRPYECKQCGKAYCWATSFQRHVRIHNGEKPYKCGKCGKAFGWPSSLHKHARTHAKKKPVSGGSVGKSSARPRPSTDVKSQTREKVYKCETCGKTYGWSSSLHKHERKHTGEKPVNAASVGKPSGGLCSSKNVRTQIGQKPSKCEKCGKAFSCPKAFQGHVRSHTGKKSCTSK

SEQ ID NO: 3710 - protein, 392 aa, Homo sapiens
MASHKLLVTPPKALLKPLSIPNQLLLGPGPSNLPPRIMAAGGLQMIGSMSKDMYQIMDEIKEGIQYVFQTRNPLTLVISGSGHCALEAALVNVLEPGDSFLVGANGIWGQRAVDIGERIGARVHPMTKDPGGHYTLQEVEEGLAQHKPVLLFLTHGESSTGVLQPLDGFGELCHRYKCLLLVDSVASLGGTPLYMDRQGIDILYSGSQKALNAPPGTSLISFSDKAKKKMYSRKTKPFSFYLDIKWLANFWGCDDQPRMYHHTIPVISLYSLRESLALIAEQGLENSWRQHREAAAYLHGRLQALGLQLFVKDPALRLPTVTTVAVPAGYDWRDIVSYVIDHFDIEIMGGLGPSTGKVLRIGLLGCNATRENVDRVTEALRAALQHCPKKKL

SEQ ID NO: 3711 - protein, 843 aa, Homo sapiens
MSSAMLVTCLPDPSSSFREDAPRPPVPGEEGETPPCQPGVGKGQVTKPMPVSSNTRRNEDGLGEPEGRASPDSPLTRWTKSLHSLLGDQDGAYLFRTFLEREKCVDTLDFWFACNGFRQMNLKDTKTLRVAKAIYKRYIENNSIVSKQLKPATKTYIRDGIKKQQIDSIMFDQAQTEIQSVMEENAYQMFLTSDIYLEYVRSGGENTAYMSNGGLGSLKVVCGYLPTLNEEEEWTCADFKCKLSPTVVGLSSKTLRATASVRSTETVDSGYRSFKRSDPVNPYHIGSGYVFAPATSANDSEISSDALTDDSMSMTDSSVDGIPPYRVGSKKQLQREMHRSVKANGQVSLPHFPRTHRLPKEMTPVEPATFAAELISRLEKLKLELESRHSLEERLQQIREDEEREGSELTLNSREGAPTQHPLSLLPSGSYEEDPQTILDDHLSRVLKTPGCQSPGVGRYSPRSRSPDHHHHHHSQYHSLLPPGGKLPPAAASPGACPLLGGKGFVTKQTTKHVHHHYIHHHAVPKTKEEIEAEATQRVHCFCPGGSEYYCYSKCKSHSKAPETMPSEQFGGSRGSTLPKRNGKGTEPGLALPAREGGAPGGAGALQLPREEGDRSQDVWQWMLESERQSKPKPHSAQSTKKAYPLESARSSPGERASRHHLWGGNSGHPRTTPRAHLFTQDPAMPPLTPPNTLAQLEEACRRLAEVSKPPKQRCCVASQQRDRNHSATVQTGATPFSNPSLAPEDHKEPKKLAGVHALQASELVVTYFFCGEEIPYRRMLKAQSLTLGHFKEQLSKKGNYRYYFKKASDEFACGAVFEEIWEDETVLPMYEGRILGKVERID

SEQ ID NO: 3712 - protein, 882 aa, Homo sapiens
MAVRSRRPWMSVALGLVLGFTAASWLIAPRVAELSERKRRGSSLCSYYGRSAAGPRAGAQQPLPQPQSRPRQEQSPPPARQDLQGPPLPEAAPGITSFRSSPWQQPPPLQQRRRGREPEGATGLPGAPAAEGEPEEEDGGAAGQRRDGRPGSSHNGSGDGGAAAPSARPRDFLYVGVMTAQKYLGSRALAAQRTWARFIPGRVEFFSSQQPPNAGQPPPPLPVIALPGVDDSYPPQKKSFMMIKYMHDHYLDKYEWFMRADDDVYIKGDKLEEFLRSLNSSKPLYLGQTGLGNIEELGKLGLEPGENFCMGGPGMIFSREVLRRMVPHIGECLREMYTTHEDVEVGRCVRRFGGTQCVWSYEMQQLFHENYEHNRKGYIQDLHNSKIHAAITLHPNKRPAYQYRLHNYMLSRKISELRYRTIQLHRESALMSKLSNTEVSKEDQQLGVIPSFNHFQPRERNEVIEWEFLTGKLLYSAAENQPPRQSLSSILRTALDDTVLQVMEMINENAKSRGRLIDFKEIQYGYRRVNPMHGVEYILDLLLLYKRHKGRKLTVPVRRHAYLQQLFSKPFFRETEELDVNSLVESINSETQSFSFISNSLKILSSFQGAKEMGGHNEKKVHILVPLIGRYDIFLRFMENFENMCLIPKQNVKLVIILFSRDSGQDSSKHIELIKGYQNKYPKAEMTLIPMKGEFSRGLGLEMASAQFDNDTLLLFCDVDLIFREDFLQRCRDNTIQGQQVYYPIIFSQYDPKVTNGGNPPTDDYFIFSKKTGFWRDYGYGITCIYKSDLLGAGGFDTSIQGWGLEDVDLYNKVILSGLRPFRSQEVGVVHIFHPVHCDPNLDPKQYKMCLGSKASTFASTMQLAELWLEKHLGVRYNRTLS

SEQ ID NO: 3713 - protein, 465 aa, Homo sapiens
MNAQLTMEAIGELHGVSHEPVPAPADLLGGSPHARSSVAHRGSHLPPAHPRSMGMASLLDGGSGGGDYHHHHRAPEHSLAGPLHPTMTMACETPPGMSMPTTYTTLTPLQPLPPISTVSDKFPHHHHHHHHHHHPHHHQRLAGNVSGSFTLMRDERGLASMNNLYTPYHKDVAGMGQSLSPLSSSGLGSIHNSQQGLPHYAHPGAAMPTDKMLTPNGFEAHHPAMLGRHGEQHLTPTSAGMVPINGLPPHHPHAHLNAQGHGQLLGTAREPNPSVTGAQVSNGSNSGQMEEINTKEVAQRITTELKRYSIPQAIFAQRVLCRSQGTLSDLLRNPKPWSKLKSGRETFRRMWKWLQEPEFQRMSALRLAACKRKEQEHGKDRGNTPKKPRLVFTDVQRRTLHAIFKENKRPSKELQITISQQLGLELSTVSNFFMNARRRSLDKWQDEGSSNSGNSSSSSSTCTKA

SEQ ID NO: 3714 - protein, 764 aa, Homo sapiens
MNGEADCPTDLEMAAPKGQDRWSQEDMLTLLECMKNNLPSNDSSKFKTTESHMDWEKVAFKDFSGDMCKLKWVEISNEVRKFRTLTELILDAQEHVKNPYKGKKLKKHPDFPKKPLTPYFRFFMEKRAKYAKLHPEMSNLDLTKILSKKYKELPEKKKMKYIQDFQREKQEFERNLARFREDHPDLIQNAKKSDIPEKPKTPQQLWYTHEKKVYLKVRPDATTKEVKDSLGKQWSQLSDKKRLKWIHKALEQRKEYEEIMRDYIQKHPELNISEEGITKSTLTKAERQLKDKFDGRPTKPPPNSYSLYCAELMANMKDVPSTERMVLCSQQWKLLSQKEKDAYHKKCDQKKKDYEVELLRFLESLPEEEQQRVLGEEKMLNINKKQATSPASKKPAQEGGKGGSEKPKRPVSAMFIFSEEKRRQLQEERPELSESELTRLLARMWNDLSEKKKAKYKAREAALKAQSERKPGGEREERGKLPESPKRAEEIWQQSVIGDYLARFKNDRVKALKAMEMTWNNMEKKEKLMWIKKAAEDQKRYERELSEMRAPPAATNSSKKMKFQGEPKKPPMNGYQKFSQELLSNGELNHLPLKERMVEIGSRWQRISQSQKEHYKKLAEEQQKQYKVHLDLWVKSLSPQDRAAYKEYISNKRKSMTKLRGPNPKSSRTTLQSKSESEEDDEEDEDDEDEDEEEEDDENGDSSEDGGDSSESSSEDESEDGDENEEDDEDEDDDEDDDEDEDNESEGSSSSSSSSGDSSDSDSN

SEQ ID NO: 3715 - protein, 2083 aa, Homo sapiens
MFSKKPHGDVKKSTQKVLDTKKDALTRLKHLRIVIENAESIDLKQFFDQHFSHIYYVFFENFVTIEASLKQKGHKSQREELDAILFIFEKILQLLPERIHQRWQFHSIGLILKKLLHTGNSLKIRREGVRLFLLWLQALQNNCSKEQLWMFSCLIPGFSAPQSEHGPRTLDNLINPPLNLQETQVTIEEITPLVPPQSGDKGQEDLTSYFLEALLKYIVIQVKSLEWKNKENQERGFSFLFSHFKKYYLPYIFPNICKENSLYHPILDIPQMRPKPHYVVIKKDAETNEAIYCTKEPFIKARVIVIRWLVSFWLEPKPHTGPHIPGMEGEVLPKNIQRAAASLVSREESKNDNADKTDRTTEPEQSHSNTSTLTEREPSSSSLCSIDEEHLTDIEIVRRVFSSKRSNVNFVTEIFRQAFLLPICEAAAMRKVVKVYQEWIQQEEKPLFMQEPEEIVITSSDLPCIENVTDHDISMEEGEKREEENGTNTADHVRNSSWAKNGSYQGALHNASEEATEQNIRAGTQAVLQVFIINSSNIFLLEPANEIKNLLDEHTDMCKRILNIYRYMVVQVSMDKKTWEQMLLVLLRVTESVLKMPSQAFLQFQGKKNMTLAGRLAGPLFQTLIVAWIKANLNVYISRELWDDLLSVLSSLTYWEELATEWSLTMETLTKVLARNLYSLDLSDLPLDKLSEQKQKKHKGKGVGHEFQKVSVDKSFSRGWSRDQPGQAPMRQRSATTTGSPGTEKARSIVRQKTVDIDDAQILPRSTRVRHFSQSEETGNEVFGALNEEQPLPRSSSTSDILEPFTVERAKVNKEDMSQKLPPLNSDIGGSSANVPDLMDEFIAERLRSGNASTMTRRGSSPGSLEIPKDLPDILNKQNQMRPIDDPGVPSEWTSPASAGSSDLISSDSHSDSFSAFQYDGRKFDNFGFGTDTGVTSSADVDSGSGHHQSAEEQEVASLTTLHIDSETSSLNQQAFSAEVATITGSESASPVHSPLGSRSQTPSPSTLNIDHMEQKDLQLDEKLHHSVLQTPDDLEISEFPSECCSVMAGGTLTGWHADVATVMWRRMLGILGDVNSIMDPEIHAQVFDYLCELWQNLAKIRDNLGISTDNLTSPSPPVLIPPLRILTPWLFKATMLTDKYKQGKLHAYKLICNTMKRRQDVSPNRDFLTHFYNIMHCGLLHIDQDIVNTIIKHCSPQFFSLGLPGATMLIMDFIVAAGRVASSAFLNAPRVEAQVLLGSLVCFPNLYCELPSLHPNIPDVAVSQFTDVKELIIKTVLSSARDEPSGPARCVALCSLGIWICEELVHESHHPQIKEALNVICVSLKFTNKTVAHVACNMLHMLVHYVPRLQIYQPDSPLKIIQILIATITHLLPSTEASSYEMDKRLVVSLLLCLLDWIMALPLKTLLQPFHATGAESDKTEKSVLNCIYKVLHGCVYGAQCFSNPRYFPMSLSDLASVDYDPFMHLESLKEPEPLHSPDSERSSKLQPVTEVKTQMQHGLISIAARTVITHLVNHLGHYPMSGGPAMLTSQVCENHDNHYSESTELSPELFESPNIQFFVLNNTTLVSCIQIRSEENMPGGGLSAGLASANSNVRIIVRDLSGKYSWDSAILYGPPPVSGLSEPTSFMLSLSHQEKPEEPPTSNECLEDITVKDGLSLQFKRFRETVPTWDTIRDEEDVLDELLQYLGVTSPECLQRTGISLNIPAPQPVCISEKQENDVINAILKQHTEEKEFVEKHFNDLNMKAVEQDEPIPQKPQSAFYYCRLLLSILGMNSWDKRRSFHLLKKNEKLLRELRNLDSRQCRETHKIAVFYVAEGQEDKHSILTNTGGSQAYEDFVAGLGWEVNLTNHCGFMGGLQKNKSTGLTTPYFATSTVEVIFHVSTRMPSDSDDSLTKKLRHLGNDEVHIVWSEHTRDYRRGIIPTEFGDVLIVIYPMKNHMFSIQIMKKPEVPFFGPLFDGAIVNGKVLPIMVRATAINASRALKSLIPLYQNFYEERARYLQTIVQHHLEPTTFEDFAAQVFSPAPYHHLPSDAGSYPEILPSETPTATQVDGADLASPMSPRTSKSRMSMKLRRSSGSANKS

SEQ ID NO: 3716 - protein, 438 aa, Homo sapiens
MAVSEIKPKLKLNPLTKVPISHNKRDRDLPGSLQCQLQHKEKKLSASQMAAFQDAYNFFYKDKTGCIDFHGLMCTVAKLGMNLTKHDVYNELKCADIDRDGKVNFSDFIKVLTDKNLFLKAVVPEKETCLDLAGNPGILLFEILSRLLETSALPRKSIIEIVSYFQRKFQHTGPGMLWSPYTMGYGKRTLKPDICTPPSSSMAAFANAARIAIMKEKDLFKFLEELKRCNSGSDSPYSKIPIFPLFPNVDGVVMGKPFKDMQKLEMLRIKEPLHFFEDYFFHKRDWKTQAANIKSMDPASGYSNNIFTIDQMLKKKQTCTVADATAIKQHVKRATDTYNLGIALEHRKEMLNLWQKIRGDLIGMDSRNESFYDTFSTYTWSWNVCQELLSPKDLRLYDAYVNRNSSHNSRSSSSSDTSECYTDSGRKRKRKGLKGFQQ

SEQ ID NO: 3717 - protein, 350 aa, Homo sapiens
METNSSLPTNISGGTPAVSAGYLFLDIITYLVFAVTFVLGVLGNGLVIWVAGFRMTHTVTTISYLNLAVADFCFTSTLPFFMVRKAMGGHWPFGWFLCKFVFTIVDINLFGSVFLIALIALDRCVCVLHPVWTQNHRTVSLAKKVIIGPWVMALLLTLPVIIRVTTVPGKTGTVACTFNFSPWTNDPKERINVAVAMLTVRGIIRFIIGFSAPMSIVAVSYGLIATKIHKQGLIKSSRPLRVLSFVAAAFFLCWSPYQVVALIATVRIRELLQGMYKEIGIAVDVTSALAFFNSCLNPMLYVFMGQDFRERLIHALPASLERALTEDSTQTSDTATNSTLPSAEVELQAK

SEQ ID NO: 3718 - protein, 4493 aa, Homo sapiens
MPRPGTMALCLLTLVLSLLPPQAAAEQDLSVNRAVWDGGGCISQGDVLNRQCQQLSQHVRTGSAANTATGTTSTNVVEPRMYLSCSTNPEMTSIESSVTSDTPGVSSTRMTPTESRTTSESTSDSTTLFPSSTEDTSSPTTPEGTDVPMSTPSEESISSTMAFVSTAPLPSFEAYTSLTYKVDMSTPLTTSTQASSSPTTPESTTIPKSTNSEGSTPLTSMPASTMKVASSEAITLLTTPVEISTPVTISAQASSSPTTAEGPSLSNSAPSGGSTPLTRMPLSVMLVVSSEASTLSTTPAATNIPVITSTEASSSPTTAEGTSIPTSTYTEGSTPLTSTPASTMPVATSEMSTLSITPVDTSTLVTTSTEPSSLPTTAEATSMLTSTLSEGSTPLTNMPVSTILVASSEASTTSTIPVDSKTFVTTASEASSSPTTAEDTSIATSTPSEGSTPLTSMPVSTTPVASSEASNLSTTPVDSKTQVTTSTEASSSPPTAEVNSMPTSTPSEGSTPLTSMSVSTMPVASSEASTLSTTPVDTSTPVTTSSEASSSSTTPEGTSIPTSTPSEGSTPLTNMPVSTRLVVSSEASTTSTTPADSNTFVTTSSEASSSSTTAEGTSMPTSTYSERGTTITSMSVSTTLVASSEASTLSTTPVDSNTPVTTSTEATSSSTTAEGTSMPTSTYTEGSTPLTSMPVNTTLVASSEASTLSTTPVDTSTPVTTSTEASSSPTTADGASMPTSTPSEGSTPLTSMPVSKTLLTSSEASTLSTTPLDTSTHITTSTEASCSPTTTEGTSMPISTPSEGSPLLTSIPVSITPVTSPEASTLSTTPVDSNSPVTTSTEVSSSPTPAEGTSMPTSTYSEGRTPLTSMPVSTTLVATSAISTLSTTPVDTSTPVTNSTEARSSPTTSEGTSMPTSTPGEGSTPLTSMPDSTTPVVSSEARTLSATPVDTSTPVTTSTEATSSPTTAEGTSIPTSTPSEGTTPLTSTPVSHTLVANSEASTLSTTPVDSNTPLTTSTEASSPPPTAEGTSMPTSTPSEGSTPLTRMPVSTTMVASSETSTLSTTPADTSTPVTTYSQASSSSTTADGTSMPTSTYSEGSTPLTSVPVSTRLVVSSEASTLSTTPVDTSIPVTTSTEASSSPTTAEGTSIPTSPPSEGTTPLASMPVSTTLVVSSEANTLSTTPVDSKTQVATSTEASSPPPTAEVTSMPTSTPGERSTPLTSMPVRHTPVASSEASTLSTSPVDTSTPVTTSAETSSSPTTAEGTSLPTSTTSEGSTLLTSIPVSTTLVTSPEASTLLTTPVDTKGPVVTSNEVSSSPTPAEGTSMPTSTYSEGRTPLTSIPVNTTLVASSAISILSTTPVDNSTPVTTSTEACSSPTTSEGTSMPNSNPSEGTTPLTSIPVSTTPVVSSEASTLSATPVDTSTPGTTSAEATSSPTTAEGISIPTSTPSEGKTPLKSIPVSNTPVANSEASTLSTTPVDSNSPVVTSTAVSSSPTPAEGTSIAISTPSEGSTALTSIPVSTTTVASSEINSLSTTPAVTSTPVTTYSQASSSPTTADGTSMQTSTYSEGSTPLTSLPVSTMLVVSSEANTLSTTPIDSKTQVTASTEASSSTTAEGSSMTISTPSEGSPLLTSIPVSTTPVASPEASTLSTTPVDSNSPVITSTEVSSSPTPAEGTSMPTSTYTEGRTPLTSITVRTTPVASSAISTLSTTPVDNSTPVTTSTEARSSPTTSEGTSMPNSTPSEGTTPLTSIPVSTTPVLSSEASTLSATPIDTSTPVTTSTEATSSPTTAEGTSIPTSTLSEGMTPLTSTPVSHTLVANSEASTLSTTPVDSNSPVVTSTAVSSSPTPAEGTSIATSTPSEGSTALTSIPVSTTTVASSETNTLSTTPAVTSTPVTTYAQVSSSPTTADGSSMPTSTPREGRPPLTSIPVSTTTVASSEINTLSTTLADTRTPVTTYSQASSSPTTADGTSMPTPAYSEGSTPLTSMPLSTTLVVSSEASTLSTTPVDTSTPATTSTEGSSSPTTAGGTSIQTSTPSERTTPLAGMPVSTTLVVSSEGNTLSTTPVDSKTQVTNSTEASSSATAEGSSMTISAPSEGSPLLTSIPLSTTPVASPEASTLSTTPVDSNSPVITSTEVSSSPIPTEGTSMQTSTYSDRRTPLTSMPVSTTVVASSAISTLSTTPVDTSTPVTNSTEARSSPTTSEGTSMPTSTPSEGSTPFTSMPVSTMPVVTSEASTLSATPVDTSTPVTTSTEATSSPTTAEGTSIPTSTLSEGTTPLTSIPVSHTLVANSEVSTLSTTPVDSNTPFTTSTEASSPPPTAEGTSMPTSTSSEGNTPLTRMPVSTTMVASFETSTLSTTPADTSTPVTTYSQAGSSPTTADDTSMPTSTYSEGSTPLTSVPVSTMPVVSSEASTHSTTPVDTSTPVTTSTEASSSPTTAEGTSIPTSPPSEGTTPLASMPVSTTPVVSSEAGTLSTTPVDTSTPMTTSTEASSSPTTAEDIVVPISTASEGSTLLTSIPVSTTPVASPEASTLSTTPVDSNSPVVTSTEISSSATSAEGTSMPTSTYSEGSTPLRSMPVSTKPLASSEASTLSTTPVDTSIPVTTSTETSSSPTTAKDTSMPISTPSEVSTSLTSILVSTMPVASSEASTLSTTPVDTRTLVTTSTGTSSSPTTAEGSSMPTSTPGERSTPLTNILVSTTLLANSEASTLSTTPVDTSTPVTTSAEASSSPTTAEGTSMRISTPSDGSTPLTSILVSTLPVASSEASTVSTTAVDTSIPVTTSTEASSSPTTAEVTSMPTSTPSETSTPLTSMPVNHTPVASSEAGTLSTTPVDTSTPVTTSTKASSSPTTAEGIVVPISTASEGSTLLTSIPVSTTPVASSEASTLSTTPVDTSIPVTTSTEGSSSPTTAEGTSMPISTPSEVSTPLTSILVSTVPVAGSEASTLSTTPVDTRTPVTTSAEASSSPTTAEGTSMPISTPGERRTPLTSMSVSTMPVASSEASTLSRTPADTSTPVTTSTEASSSPTTAEGTGIPISTPSEGSTPLTSIPVSTTPVAIPEASTLSTTPVDSNSPVVTSTEVSSSPTPAEGTSMPISTYSEGSTPLTGVPVSTTPVTSSAISTLSTTPVDTSTPVTTSTEAHSSPTTSEGTSMPTSTPSEGSTPLTYMPVSTMLVVSSEDSTLSATPVDTSTPVTTSTEATSSTTAEGTSIPTSTPSEGMTPLTSVPVSNTPVASSEASILSTTPVDSNTPLTTSTEASSSPPTAEGTSMPTSTPSEGSTPLTSMPVSTTTVASSETSTLSTTPADTSTPVTTYSQASSSPPIADGTSMPTSTYSEGSTPLTNMSFSTTPVVSSEASTLSTTPVDTSTPVTTSTEASLSPTTAEGTSIPTSSPSEGTTPLASMPVSTTPVVSSEVNTLSTTPVDSNTLVTTSTEASSSPTIAEGTSLPTSTTSEGSTPLSIMPLSTTPVASSEASTLSTTPVDTSTPVTTSSPTNSSPTTAEVTSMPTSTAGEGSTPLTNMPVSTTPVASSEASTLSTTPVDSNTFVTSSSQASSSPATLQVTTMRMSTPSEGSSSLTTMLLSSTYVTSSEASTPSTPSVDRSTPVTTSTQSNSTPTPPEVITLPMSTPSEVSTPLTIMPVSTTSVTISEAGTASTLPVDTSTPVITSTQVSSSPVTPEGTTMPIWTPSEGSTPLTTMPVSTTRVTSSEGSTLSTPSVVTSTPVTTSTEAISSSATLDSTTMSVSMPMEISTLGTTILVSTTPVTRFPESSTPSIPSVYTSMSMTTASEGSSSPTTLEGTTTMPMSTTSERSTLLTTVLISPISVMSPSEASTLSTPPGDTSTPLLTSTKAGSFSIPAEVTTIRISITSERSTPLTTLLVSTTLPTSFPGASIASTPPLDTSTTFTPSTDTASTPTIPVATTISVSVITEGSTPGTTIFIPSTPVTSSTADVFPATTGAVSTPVITSTELNTPSTSSSSTTTSFSTTKEFTTPAMTTAAPLTYVTMSTAPSTPRTTSRGCTTSASTLSATSTPHTSTSVTTRPVTPSSESSRPSTITSHTIPPTFPPAHSSTPPTTSASSTTVNPEAVTTMTTRTKPSTRTTSFPTVTTTAVPTNTTIKSNPTSTPTVPRTTTCFGDGCQNTASRCKNGGTWDGLKCQCPNLYYGELCEEVVSSIDIGPPETISAQMELTVTVTSVKFTEELKNHSSQEFQEFKQTFTEQMNIVYSGIPEYVGVNITKLRLGSVVVEHDVLLRTKYTPEYKTVLDNATEVVKEKITKVTTQQIMINDICSDMMCFNTTGTQVQNITVTQYDPEEDCRKMAKEYGDYFVVEYRDQKPYCISPCEPGFSVSKNCNLGKCQMSLSGPQCLCVTTETHWYSGETCNQGTQKSLVYGLVGAGVVLMLIILVALLMLVFRSKREVKRQKYRLSQLYKWQEEDSGPAPGTFQNIGFDICQDDDSIHLESIYSNFQPSLRHIDPETKIRIQRPQVMTTSF

SEQ ID NO: 3719 - protein, 194 aa, Homo sapiens
MPPPAKEGGRKGPRERSGKSAPGTAQGEERAKGAPATEPPKPGWALTPQGLAAMLPAQRHRHLLFGDLLEDVGAAASTFPCGSVEPGYRMPDPRPWTQSLELPAERQNRLLGVLKAAEARGRVRALRLRYTRMRAEEIALLIQRQKSARAAIRLELFLPPQLKPARIPDPLDRQERRRVETILEENVDGTIFPR

SEQ ID NO: 3720 - protein, 298 aa, Homo sapiens
MDTGVWGWGAAACRWGPAERAAGSLNAASLREEQLHLSLLVSSGWRTISFHVVPVVRRKLGAPALEGVQQMPGFPEGSLRRILSQGVDLVPASAQLWRTSTDYLLTRLLGELGSLQGHRLDSLSILDRVNHESWRDSGQTDGLTFGHLKMVLLWASVLFLAPEDWAELQGAVYRLLVVLLCCLATRKLPHFLHPQRNLLQGSGLDLGAIYQRVEGFASQPEAALRIHATHLGRSPPPRIGSGLKALLQLPASDPTYWATAYFDVLLDKFQVFNIQDKDRISAMQSIFQKTRTLGGEES

SEQ ID NO: 3721 - protein, 1125 aa, Homo sapiens
MASEEASLRALESLMTEFFHDCTTNERKREIEELLNNFAQQIGAWRFCLYFLSSTRNDYVMMYSLTVFENLINKMWLGVPSQDKMEIRSCLPKLLLAHHKTLPYFIRNKLCKVIVDIGRQDWPMFYHDFFTNILQLIQSPVTTPLGLIMLKTTSEELACPREDLSVARKEELRKLLLDQVQTVLGLLTGILETVWDKHSVTAATPPPSPTSGESGDLLSNLLQSPSSAKLLNQPIPILDVESEYICSLALECLAHLFSWIPLSASITPSLLTTIFHFARFGCDIRARKMASVNGSSQNCVSGQERGRLGVLAMSCINELMSKNCVPMEFEEYLLRMFQQTFYLLQKITKDNNAHTVKSRLEELDESYIEKFTDFLRLFVSVHLRRIESYSQFPVVEFLTLLFKYTFHQPTHEGYFSCLDIWTLFLDYLTSKIKSRLGDKEAVLNRYEDALVLLLTEVLNRIQFRYNQAQLEELDDETLDDDQQTEWQRYLRQSLEVVAKVMELLPTHAFSTLFPVLQDNLEVYLGLQQFIVTSGSGHRLNITAENDCRRLHCSLRDLSSLLQAVGRLAEYFIGDVFAARFNDALTVVERLVKVTLYGSQIKLYNIETAVPSVLKPDLIDVHAQSLAALQAYSHWLAQYCSEVHRQNTQQFVTLISTTMDAITPLISTKVQDKLLLSACHLLVSLATTVRPVFLISIPAVQKVFNRITDASALRLVDKAQVLVCRALSNILLLPWPNLPENEQQWPVRSINHASLISALSRDYRNLKPSAVAPQRKMPLDDTKLIIHQTLSVLEDIVENISGESTKSRQICYQSLQESVQVSLALFPAFIHQSDVTDEMLSFFLTLFRGLRVQMGVPFTEQIIQTFLNMFTREQLAESILHEGSTGCRVVEKFLKILQVVVQEPGQVFKPFLPSIIALCMEQVYPIIAERPSPDVKAELFELLFRTLHHNWRYFFKSTVLASVQRGIAEEQMENEPQFSAIMQAFGQSFLQPDIHLFKQNLFYLETLNTKQKLYHKKIFRTAMLFQFVNVLLQVLVHKSHDLLQEEIGIAIYNMASVDFDGFFAAFLPEFLTSCDGVDANQKSVLGRNFKMDRDLPSFTQNVHRLVNDLRYYRLCNDSLPPGTVKL

SEQ ID NO: 3722 - protein, 396 aa, Homo sapiens
MLITVYCVRRDLSEVTFSLQVSPDFELRNFKVLCEAESRVPVEEIQIIHMERLLIEDHCSLGSYGLKDGDIVVLLQKDNVGPRAPGRAPNQPRVDFSGIAVPGTSSSRPQHPGQQQQRTPAAQRSQGLASGEKVAGLQGLGSPALIRSMLLSNPHDLSLLKERNPPLAEALLSGSLETFSQVLMEQQREKALREQERLRLYTADPLDREAQAKIEEEIRQQNIEENMNIAIEEAPESFGQVTMLYINCKVNGHPLKAFVDSGAQMTIMSQACAERCNIMRLVDRRWAGVAKGVGTQRIIGRVHLAQIQIEGDFLQCSFSILEDQPMDMLLGLDMLRRHQCSIDLKKNVLVIGTTGTQTYFLPEGELPLCSRMVSGQDESSDKEITHSVMDSGRKEH

SEQ ID NO: 3723 - protein, 325 aa, Homo sapiens
MLSHADLLDARLGMKDAAELLGHREAVKCRLGVGGSDPGGHPGDLAPNSDPVEGATLLPGEDITTVGSTPASLAVSAKDPDKQPGPQGGPNPSQAGQQQGQQKQKRHRTRFTPAQLNELERSFAKTHYPDIFMREELALRIGLTESRVQVWFQNRRAKWKKRKKTTNVFRAPGTLLPTPGLPQFPSAAAAAAAAMGDSLCSFHANDTRWAAAAMPGVSQLPLPPALGRQQAMAQSLSQCSLAAGPPPNSMGLSNSLAGSNGAGLQSHLYQPAFPGMVPASLPGPSNVSGSPQLCSSPDSSDVWRGTSIASLRRKALEHTVSMSFT

SEQ ID NO: 3724 - protein, 306 aa, Homo sapiens
MGGRKMATDEENVYGLEENAQSRQESTRRLILVGRTGAGKSATGNSILGQRRFFSRLGATSVTRACTTGSRRWDKCHVEVVDTPDIFSSQVSKTDPGCEERGHCYLLSAPGPHALLLVTQLGRFTAQDQQAVRQVRDMFGEDVLKWMVIVFTRKEDLAGGSLHDYVSNTENRALRELVAECGGRVCAFDNRATGREQEAQVEQLLGMVEGLVLEHKGAHYSNEVYELAQVLRWAGPEERLRRVAERVAARVQRRPWGAWLSARLWKWLKSPRSWRLGLALLLGGALLFWVLLHRRWSEAVAEVGPD

SEQ ID NO: 3725 - protein, 260 aa, Homo sapiens
MSATGPISNYYVDSLISHDNEDLLASRFPATGAHPAAARPSGLVPDCSDFPSCSFAPKPAVFSTSWAPVPSQSSVVYHPYGPQPHLGADTRYMRTWLEPLSGAVSFPSFPAGGRHYALKPDAYPGRRADCGPGEGRSYPDYMYGSPGELRDRAPQTLPSPEADALAGSKHKEEKADLDPSNPVANWIHARSTRKKRCPYTKYQTLELEKEFLFNMYLTRDRRYEVARVLNLTERQVKIWFQNRRMKMKKMNKEKTDKEQS

SEQ ID NO: 3726 - protein, 358 aa, Homo sapiens
MAATLGSGERWTEAYIDAVRRNKYPEDTPPESHDPCGCCNCMKAQKEKKSENEWTQTRQGEGNSTYSEEQLLGVQRIKKCRNYYEILGVSRDASDEELKKAYRKLALKFHPDKNCAPGATDAFKAIGNAFAVLSNPDKRLRYDEYGDEQVTFTAPRARPYNYYRDFEADITPEELFNVFFGGHFPTGNIHMFSNVTDDTYYYRRRHRHERTQTQKEEEEEKPQTTYSAFIQLLPVLVIVIISVITQLLATNPPYSLFYKSTLGYTISRETQNLQVPYFVDKNFDKAYRGASLHDLEKTIEKDYIDYIQTSCWKEKQQKSELTNLAGLYRDERLKQKAESLKLENCEKLSKLIGLRRGG

SEQ ID NO: 3727 - protein, 811 aa, Homo sapiens
MKEEAFLRRRFSLCPPSSTPQKVDPRKLTRNLLLSGDNELYPLSPGKDMEPNGPSLPRDEGPPTPSSATKVPPAEYRLCNGSDKECVSPTARVTKKETLKAQKENYRQEKKRATRQLLSALTDPSVVIMADSLKGPKGESVGSITQPLPSSYLIFRAASESDGRCWLDALELALRCSSLLRLGTCKPGRDGEPGTSPDASPSSLCGLPASATVHPDQDLFPLNGSSLENDAFSDKSERENPEESDTETQDHSRKTESGSDQSETPGAPVRRGTTYVEQVQEELGELGEASQVETVSEENKSLMWTLLKQLRPGMDLSRVVLPTFVLEPRSFLNKLSDYYYHADLLSRAAVEEDAYSRMKLVLRWYLSGFYKKPKGIKKPYNPILGETFRCCWFHPQTDSRTFYIAEQVSHHPPVSAFHVSNRKDGFCISGSITAKSRFYGNSLSALLDGKATLTFLNRAEDYTLTMPYAHCKGILYGTMTLELGGKVTIECAKNNFQAQLEFKLKPFFGGSTSINQISGKITSGEEVLASLSGHWDRDVFIKEEGSGSSALFWTPSGEVRRQRLRQHTVPLEEQTELESERLWQHVTRAISKGDQHRATQEKFALEEAQRQRARERQESLMPWKPQLFHLDPITQEWHYRYEDHSPWDPLKDIAQFEQDGILRTLQQEAVARQTTFLGSPGPRHERSGPDQRLRKASDQPSGHSQATESSGSTPESCPELSDEEQDGDFVPGGESPCPRCRKEARRLQALHEAILSIREAQQELHRHLSAMLSSTARAAQAPTPGLLQSPRSWFLLCVFLACQLFINHILK

SEQ ID NO: 3728 - protein, 491 aa, Homo sapiens
MPLPVQVFNLQGAVEPMQIDVDPQEDPQNAPDVNYVVENPSLDLEQYAASYSGLMRIERLQFIADHCPTLRVEALKMALSFVQRTFNVDMYEEIHRKLSEATRSSLRELQNAPDAIPESGVEPPALDTAWVEATRKKALLKLEKLDTDLKNYKGNSIKESIRRGHDDLGDHYLDCGDLSNALKCYSRARDYCTSAKHVINMCLNVIKVSVYLQNWSHVLSYVSKAESTPEIAEQRGERDSQTQAILTKLKCAAGLAELAARKYKQAAKCLLLASFDHCDFPELLSPSNVAIYGGLCALATFDRQELQRNVISSSSFKLFLELEPQVRDIIFKFYESKYASCLKMLDEMKDNLLLDMYLAPHVRTLYTQIRNRALIQYFSPYVSADMHRMAAAFNTTVAALEDELTQLILEGLISARVDSHSKILYARDVDQRSTTFEKSLLMGKEFQRRAKAMMLRAAVLRNQIHVKSPPREGSQGELTPANSQSRMSTNM

SEQ ID NO: 3729 - protein, 685 aa, Homo sapiens
MLLHINPAYLFKLLHGFPPWIMPTDGNLGDKNFQMGKPGHREGATMHVKKYLLKGLHRLQKGPGYTYKELLVWYCDNTNTHGPKRIICEGPKKKAMWFLLTLLFAALVCWQWGIFIRTYLSWEVSVSLSVGFKTMDFPAVTICNASPFKYSKIKHLLKDLDELMEAVLERILAPELSHANATRNLNFSIWNHTPLVLIDERNPHHPMVLDLFGDNHNGLTSSSASEKICNAHGCKMAMRLCSLNRTQCTFRNFTSATQALTEWYILQATNIFAQVPQQELVEMSYPGEQMILACLFGAEPCNYRNFTSIFYPHYGNCYIFNWGMTEKALPSANPGTEFGLKLILDIGQEDYVPFLASTAGVRLMLHEQRSYPFIRDEGIYAMSGTETSIGVLVDKLQRMGEPYSPCTVNGSEVPVQNFYSDYNTTYSIQACLRSCFQDHMIRNCNCGHYLYPLPRGEKYCNNRDFPDWAHCYSDLQMSVAQRETCIGMCKESCNDTQYKMTISMADWPSEASEDWIFHVLSQERDQSTNITLSRKGIVKLNIYFQEFNYRTIEESAANNIVWLLSNLGGQFGFWMGGSVLCLIEFGEIIIDFVWITIIKLVALAKSLRQRRAQASYAGPPPTVAELVEAHTNFGFQPDTAPRSPNTGPYPSEQALPIPGTPPPNYDSLRLQPLDVIESDSEGDAI

SEQ ID NO: 3730 - protein, 632 aa, Homo sapiens
MKALLLLVLPWLSPANYIDNVGNLHFLYSELCKGASHYGLTKDRKRRSQDGCPDGCASLTATAPSPEVSAAATISLMTDEPGLDNPAYVSSAEDGQPAISPVDSGRSNRTRARPFERSTIRSRSFKKINRALSVLRRTKSGSAVANHADQGRENSENTTAPEVFPRLYHLIPDGEITSIKINRVDPSESLSIRLVGGSETPLVHIIIQHIYRDGVIARDGRLLPGDIILKVNGMDISNVPHNYAVRLLRQPCQVLWLTVMREQKFRSRNNGQAPDAYRPRDDSFHVILNKSSPEEQLGIKLVRKVDEPGVFIFNVLDGGVAYRHGQLEENDRVLAINGHDLRYGSPESAAHLIQASERRVHLVVSRQVRQRSPDIFQEAGWNSNGSWSPGPGERSNTPKPLHPTITCHEKVVNIQKDPGESLGMTVAGGASHREWDLPIYVISVEPGGVISRDGRIKTGDILLNVDGVELTEVSRSEAVALLKRTSSSIVLKALEVKEYEPQEDCSSPAALDSNHNMAPPSDWSPSWVMWLELPRCLYNCKDIVLRRNTAGSLGFCIVGGYEEYNGNKPFFIKSIVEGTPAYNDGRIRCGDILLAVNGRSTSGMIHACLARLLKELKGRITLTIVSWPGTFL

SEQ ID NO: 3731 - protein, 394 aa, Homo sapiens
MSGEDEQQEQTIAEDLVVTKYKMGGDIANRVLRSLVEASSSGVSVLSLCEKGDAMIMEETGKIFKKEKEMKKGIAFPTSISVNNCVCHFSPLKSDQDYILKEGDLVKIDLGVHVDGFIANVAHTFVVDVAQGTQVTGRKADVIKAAHLCAEAALRLVKPGNQNTQVTEAWNKVAHSFNCTPIEGMLSHQLKQHVIDGEKTIIQNPTDQQKKDHEKAEFEVHEVYAVDVLVSSGEGKAKDAGQRTTIYKRDPSKQYGLKMKTSRAFFSEVERRFDAMPFTLRAFEDEKKARMGVVECAKHELLQPFNVLYEKEGEFVAQFKFTVLLMPNGPMRITSGPFEPDLYKSEMEVQDAELKALLQSSASRKTQKKKKKKASKTAENATSGETLEENEAGD

SEQ ID NO: 3732 - protein, 1704 aa, Homo sapiens
MSSVSEVNVDIKDFLMSINLEQYLLHFHESGFTTVKDCAAINDSLLQKIGISPTGHRRRILKQLQIILSKMQDIPIYANVHKTKKNDDPSKDYHVPSSDQNICIELSNSGSVQTSSPPQLETVRKNLEDSDASVERSQYPQSDDKLSPPKRDFPTAEEPHLNLGSLNDSLFGSDNIKIESLITKKTVDHTVEEQQTEKVKLITENLSKLPNADSECLSFVGCSTSGTNSGNGTNGLLEGSPPSPFFKFQGEMIVNDLYVPSSPILAPVRSRSKLVSRPSRSFLLRHRPVPEIPGSTKGVSGSYFRERRNVATSTEKSVAWQNSNEENSSSIFPYGETFLFQRLENSKKRSIKNEFLTQGEALKGEAATATNSFIIKSSIYDNRKEKISEDKVEDIWIPREDKNNFLIDTASESEYSTVEECFQSLRRKNSKASKSRTQKALILDSVNRHSYPLSSTSGNADSSAVSSQAISPYACFYGASAKKVKSGWLDKLSPQGKRMFQKRWVKFDGLSISYYNNEKEMYSKGIIPLSAISTVRVQGDNKFEVVTTQRTFVFRVEKEEERNDWISILLNALKSQSLTSQSQAVVTPEKCGYLELRGYKAKIFTVLSGNSVWLCKNEQDFKSGLGITIIPMNVANVKQVDRTVKQSFEIITPYRSFSFTAETEKEKQDWIEAVQQSIAETLSDYEVAEKIWFNESNRSCADCKAPDPDWASINLCVVICKKCAGQHRSLGPKDSKVRSLKMDASIWSNELIELFIVIGNKRANDFWAGNLQKDEELHMDSPVEKRKNFITQKYKEGKFRKTLLASLTKEELNKALCAAVVKPDVLETMALLFSGADVMCATGDPVHSTPYLLAKKAGQSLQMEFLYHNKFSDFPQHDIHSEGVLSQESSQSTFLCDFLYQAPSAASKLSSEKKLLEETNKKWCVLEGGFLSYYENDKSTTPNGTININEVICLAIHKEDFYLNTGPIFIFEIYLPSERVFLFGAETSQAQRKWTEAIAKHFVPLFAENLTEADYDLIGQLFYKDCHALDQWRKGWFAMDKSSLHFCLQMQEVQGDRMHLRRLQELTISTMVQNGEKLDVLLLVEKGRTLYIHGHTKLDFTVWHTAIEKAAGTDGNALQDQQLSKNDVPIIVNSCIAFVTQYGLGCKYIYQKNGDPLHISELLESFKKDARSFKLRAGKHQLEDVTAVLKSFLSDIDDALLTKELYPYWISALDTQDDKERIKKYGAFIRSLPGVNRATLAAIIEHLYRVQKCSEINHMNAHNLALVFSSCLFQTKGQTSEEVNVIEDLINNYVEIFEVKEDQVKQMDIENSFITKWKDTQVSQAGDLLIEVYVERKEPDCSIIIRISPVMEAEELTNDILAIKNIIPTKGDIWATFEVIENEELERPLHYKENVLEQVLRWSSLAEPGSAYLVVKRFLTADTIKHCSDRSTLGSIKEGILKIKEEPSKILSGNKFQDRYFVLRDGFLFLYKDVKSSKHDKMFSLSSMKFYRGVKKKMKPPTSWGLTAYSEKHHWHLCCDSSRTQTEWMTSIFIAQHEYDIWPPAGKERKRSITKNPKIGGLPLIPIQHEGNATLARKNIESARAELERLRLSEKCDKESVDSSLKERASMVAHCLEHKDDKLRNRPRKHRSFNCLEDTEPEAPLGQPKGHKGLKTLRKTEDRNSKATLDSDHKLPSRVIEELNVVLQRSRTLPKELQDEQILK

SEQ ID NO: 3733 - protein, 309 aa, Homo sapiens
MSSPRAVVQLGKAQPAGEELATANQTAQQPSSPAMRRLTVDDFEIGRPLGKGKFGNVYLARLKESHFIVALKVLFKSQIEKEGLEHQLRREIEIQAHLQHPNILRLYNYFHDARRVYLILEYAPRGELYKELQKSEKLDEQRTATIIEELADALTYCHDKKVIHRDIKPENLLLGFRGEVKIADFGWSVHTPSLRRKTMCGTLDYLPPEMIEGRTYDEKVDLWCIGVLCYELLVGYPPFESASHSETYRRILKVDVRFPLSMPLGARDLISRLLRYQPLERLPLAQILKHPWVQAHSRRVLPPCAQMAS

SEQ ID NO: 3734 - protein, 790 aa, Homo sapiens
MNIMNTEQSQNSIVSRIKVFEGQTNIETSGLPKKPEITPRSLPPKPTVSSGKPSVAPKPAANRASGEWDSGTENRLKVTSKEGLTPYPPLQEAGSIPVTKPELPKKPNPGLIRSVNPEIPGRGPLAESSDSGKKVPTPAPRPLLLKKSVSSENPTYPSAPLKPVTVPPRLAGASQAKAYKSLGEGPPANPPVPVLQSKPLVDIDLISFDDDVLPTPSGNLAEESVGSEMVLDPFQLPAKTEPIKERAVQPAPTRKPTVIRIPAKPGKCLHEDPQSPPPLPAEKPIGNTFSTVSGKLSNVERTRNLESNHPGQTGGFVRVPPRLPPRPVNGKTIPTQQPPTKVPPERPPPPKLSATRRSNKKLPFNRSSSDMDLQKKQSNLATGLSKAKSQVFKNQDPVLPPRPKPGHPLYSKYMLSVPHGIANEDIVSQNPGELSCKRGDVLVMLKQTENNYLECQKGEDTGRVHLSQMKIITPLDEHLRSRPNDPSHAQKPVDSGAPHAVVLHDFPAEQVDDLNLTSGEIVYLLEKIDTDWYRGNCRNQIGIFPANYVKVIIDIPEGGNGKRECVSSHCVKGSRCVARFEYIGEQKDELSFSEGEIIILKEYVNEEWARGEVRGRTGIFPLNFVEPVEDYPTSGANVLSTKVPLKTKKEDSGSNSQVNSLPAEWCEALHSFTAETSDDLSFKRGDRIQILERLDSDWCRGRLQDREGIFPAVFVRPCPAEAKSMLAIVPKGRKAKALYDFRGENEDELSFKAGDIITELESVDDDWMSGELMGKSGIFPKNYIQFLQIS

SEQ ID NO: 3735 - protein, 293 aa, Homo sapiens
MATPLGWSKAGSGSVCLALDQLRDVIESQEELIHQLRNVMVLQDENFVSKEEFQAVEKKLVEEKAAHAKTKVLLAKEEEKLQFALGEVEVLSKQLEKEKLAFEKALSSVKSKVLQESSKKDQLITKCNEIESHIIKQEDILNGKENEIKELQQVISQQKQIFSPPPAGSVAGITCLTSGSRSSRRATWPRCWTRSIRKPQGHVRPAATSIPGKNKMAAAFLFSGCNPQPLPSLLWESPASSPCYFPPSWIVVGVHKVGACSLGEELGLCCLVGTTASFGYLIPSYINSPGYPV

SEQ ID NO: 3736 - protein, 1130 aa, Homo sapiens
MAVRKKDGGPNVKYYEAADTVTQFDNVRLWLGKNYKKYIQAEPPTNKSLSSLVVQLLQFQEEVFGKHVSNAPLTKLPIKCFLDFKAGGSLCHILAAAYKFKSDQGWRRYDFQNPSRMDRNVEMFMTIEKSLVQNNCLSRPNIFLCPEIEPKLLGKLKDIIKRHQGTVTEDKNNASHVVYPVPGNLEEEEWVRPVMKRDKQVLLHWGYYPDSYDTWIPASEIEASVEDAPTPEKPRKVHAKWILDTDTFNEWMNEEDYEVNDDKNPVSRRKKISAKTLTDEVNSPDSDRRDKKGGNYKKRKRSPSPSPTPEAKKKNAKKGPSTPYTKSKRGHREEEQEDLTKDMDEPSPVPNVEEVTLPKTVNTKKDSESAPVKGGTMTDLDEQEDESMETTGKDEDENSTGNKGEQTKNPDLHEDNVTEQTHHIIIPSYAAWFDYNSVHAIERRALPEFFNGKNKSKTPEIYLAYRNFMIDTYRLNPQEYLTSTACRRNLAGDVCAIMRVHAFLEQWGLINYQVDAESRPTPMGPPPTSHFHVLADTPSGLVPLQPKTPQGRQVDADTKAGRKGKELDDLVPETAKGKPELQTSASQQMLNFPDKGKEKPTDMQNFGLRTDMYTKKNVPSKSKAAASATREWTEQETLLLLEALEMYKDDWNKVSEHVGSRTQDECILHFLRLPIEDPYLEDSEASLGPLAYQPIPFSQSGNPVMSTVAFLASVVDPRVASAAAKSALEEFSKMKEEVPTALVEAHVRKVEEAAKVTGKADPAFGLESSGIAGTTSDEPERIEESGNDEARVEGQATDEKKEPKEPREGGGAIEEEAKEKTSEAPKKDEEKGKEGDSEKESEKSDGDPIVDPEKEKEPKEGQEEVLKEVVESEGERKTKVERDIGEGNLSTAAAAALAAAAVKAKHLAAVEERKIKSLVALLVETQMKKLEIKLRHFEELETIMDREREALEYQRQQLLADRQAFHMEQLKYAEMRARQQHFQQMHQQQQQPPPALPPGSQPIPPTGAAGPPAVHGLAVAPASVVPAPAGSGAPPGSLGPSEQIGQAGSTAGPQQQQPAGAPQPGAVPPGVPPPGPHGPSPFPNQQTPPSMMPGAVPGSGHPGVADPGTPLPPDPTAPSPGTVTPVPPPQ

SEQ ID NO: 3737 - protein, 1332 aa, Homo sapiens
MESHSRAGKSRKSAKFRSISRSLMLCNAKTSDDGSSPDEKYPDPFEISLAQGKEGIFHSSVQLADTSEAGPSSVPDLALASEAAQLQAAGNDRGKTCRRIFFMKESSTASSREKPGKLEAQSSNFLFPKACHQRARSNSTSVNPYCTREIDFPMTKKSAAPTDRQPYSLCSNRKSLSQQLDCPAGKAAGTSRPTRSLSTAQLVQPSGGLQASVISNIVLMKGQAKGLGFSIVGGKDSIYGPIGIYVKTIFAGGAAAADGRLQEGDEILELNGESMAGLTHQDALQKFKQAKKGLLTLTVRTRLTAPPSLCSHLSPPLCRSLSSSTCITKDSSSFALESPSAPISTAKPNYRIMVEVSLQKEAGVGLGIGLCSVPYFQCISGIFVHTLSPGSVAHLDGRLRCGDEIVEISDSPVHCLTLNEVYTILSHCDPGPVPIIVSRHPDPQVSEQQLKEAVAQAVENTKFGKERHQWSLEGVKRLESSWHGRPTLEKEREKNSAPPHRRAQKVMIRSSSDSSYMSGSPGGSPGSGSAEKPSSDVDISTHSPSLPLAREPVVLSIASSRLPQESPPLPESRDSHPPLRLKKSFEILVRKPMSSKPKPPPRKYFKSDSDPQKSLEERENSSCSSGHTPPTCGQEARELLPLLLPQEDTAGRSPSASAGCPGPGIGPQTKSSTEGEPGWRRASPVTQTSPIKHPLLKRQARMDYSFDTTAEDPWVRISDCIKNLFSPIMSENHGHMPLQPNASLNEEEGTQGHPDGTPPKLDTANGTPKVYKSADSSTVKKGPPVAPKPAWFRQSLKGLRNRASDPRGLPDPALSTQPAPASREHLGSHIRASSSSSSIRQRISSFETFGSSQLPDKGAQRLSLQPSSGEAAKPLGKHEEGRFSGLLGRGAAPTLVPQQPEQVLSSGSPAASEARDPGVSESPPPGRQPNQKTLPPGPDPLLRLLSTQAEESQGPVLKMPSQRARSFPLTRSQSCETKLLDEKTSKLYSISSQVSSAVMKSLLCLPSSISCAQTPCIPKEGASPTSSSNEDSAANGSAETSALDTGFSLNLSELREYTEGLTEAKEDDDGDHSSLQSGQSVISLLSSEELKKLIEEVKVLDEATLKQLDGIHVTILHKEEGAGLGFSLAGGADLENKVITVHRVFPNGLASQEGTIQKGNEVLSINGKSLKGTTHHDALAILRQAREPRQAVIVTRKLTPEAMPDLNSSTDSAASASAASDVSVESTAEATVCTVTLEKMSAGLGFSLEGGKGSLHGDKPLTINRIFKGAASEQSETVQPGDEILQLGGTAMQGLTRFEAWNIIKALPDGPVTIVIRRKSLQSKETTAAGDS

SEQ ID NO: 3738 - protein, 840 aa, Homo sapiens
MSVVGIDLGFQSCYVAVARAGGIETIANEYSDRCTPACISFGPKNRSIGAAAKSQVISNAKNTVQGFKRFHGRAFSDPFVEAEKSNLAYDIVQLPTGLTGIKVTYMEEERNFTTEQVTAMLLSKLKETAESVLKKPVVDCVVSVPCFYTDAERRSVMDATQIAGLNCLRLMNETTAVALAYGIYKQDLPALEEKPRNVVFVDMGHSAYQVSVCAFNRGKLKVLATAFDTTLGGRKFDEVLVNHFCEEFGKKYKLDIKSKIRALLRLSQECEKLKKLMSANASDLPLSIECFMNDVDVSGTMNRGKFLEMCNDLLARVEPPLRSVLEQTKLKKEDIYAVEIVGGATRIPAVKEKISKFFGKELSTTLNADEAVTRGCALQCAILSPAFKVREFSITDVVPYPISLRWNSPAEEGSSDCEVFSKNHAAPFSKVLTFYRKEPFTLEAYYSSPQDLPYPDPAIAQFSVQKVTPQSDGSSSKVKVKVRVNVHGIFSVSSASLVEVHKSEENEEPMETDQNAKEEEKMQVDQEEPHVEEQQQQTPAENKAESEEMETSQAGSKDKKMDQPPQAKKAKVKTSTVDLPIENQLLWQIDREMLNLYIENEGKMIMQDKLEKERNDAKNAVEEYVYEMRDKLSGEYEKFVSEDDRNSFTLKLEDTENWLYEDGEDQPKQVYVDKLAELKNLGQPIKIRFQESEERPKLFEELGKQIQQYMKIISSFKNKEDQYDHLDAADMTKVEKSTNEAMEWMNNKLNLQNKQSLTMDPVVKSKEIEAKIKELTSTCSPIISKPKPKVEPPKEEQKNAEQNGPVDGQGDNPGPQAAEQGTDTAVPSDSDKKLPEMDID

SEQ ID NO: 3739 - protein, 288 aa, Homo sapiens
MDAAVTDDFQQILPIEQLRSTHASNDYVERPPAPCKQALSSPSLIVQTHKSDWSLATMPTSLPRSLSQCHQLQPLPQHLSQSSIASSMSHSTTASDQRLLASITPSPSGQSIIRTQPGAGVHPKADGALKGEAEQSAGHPSEHLFICEECGRCKCVPCTAARPLPSCWLCNQRCLCSAESLLDYGTCLCCVKGLFYHCSTDDEDNCADEPCSCGPSSCFVRWAAMSLISLFLPCLCCYLPTRGCLHLCQQGYDSLRRPGCRCKRHTNTVCRKISSGSAPFPKAQEKSV

SEQ ID NO: 3740 - protein, 986 aa, Homo sapiens
MVSKSDQLLIVVSILEGRHFPKRPKHMLVVEAKFDGEQLATDPVDHTDQPEFATELAWEIDRKALHQHRLQRTPIKLQCFALDPVTSAKETIGYIVLDLRTAQETKQAPKWYQLLSNKYTKFKSEIQISIALETDTKPPVDSFKAKGAPPRDGKVPAILAGLDPRDIVAVLNEEGGYHQIGPAEYCTDSFIMSVTIAFATQLEQLIPCTMKLPERQPEFFFYYSLLGNDVTNEPFNDLINPNFEPERASVRIRSSVEILRVYLALQSKLQIHLCCGDQSLGSTEIPLTGLLKKGSTEINQHPVTVEGAFTLDPPNRAKQKLAPIPVELAPTVGVSVALQREGIDSQSLIELKTQNEHEPEHSKKKVLTPIKEKTLTGPKSPTVSPVPSHNQSPPTKDDATESEVESLQYDKDTKPNPKASSSVPASLAQLVTTSNASEVASGQKIAVPATSHHFCFSIDLRSIHALEIGFPINCILRYSYPFFGSAAPIMTNPPVEVRKNMEVFLPQSYCAFDFATMPHQLQDTFLRIPLLVELWHKDKMSKDLLLGIARIQLSNILSSEKTRFLGSNGEQCWRQTYSESVPVIAAQGSNNRIADLSYTVTLEDYGLVKMREIFISDSSQGVSAVQQKPSSLPPAPCPSEIQTEPRETLEYKAALELEMWKEMQEDIFENQLKQKELAHMQALAEEWKKRDRERESLVKKKVAEYTILEGKLQKTLIDLEKREQQLASVESELQREKKELQSERQRNLQELQDSIRRAKEDCIHQVELERLKIKQLEEDKHRLQQQLNDAENKYKILEKEFQQFKDQQNNKPEIRLQSEINLLTLEKVELERKLESATKSKLHYKQQWGRALKELARLKQREQESQMARLKKQQEELEQMRLRYLAAEEKDTVKTERQELLDIRNELNRLRQQEQKQYQDSTEIASGKKDGPHGSVLEEGLDDYLTRLIEERDTLMRTGVYNHEDRIISELDRQIREILAKSNASN

SEQ ID NO: 3741 - protein, 421 aa, Homo sapiens
MPTLSVFMDVPLAHKLEGSLLKTYKQDDYPNKIFLAYRVCMTNEGHPWVSLVVQKTRLQISQDPSLNYEYLPTMGLKSFIQASLALLFGKHSQAIVENRVGGVHTVGDSGAFQLGVQFLRAWHKDARIVYIISSQKELHGLVFQDMGFTVYEYSVWDPKKLCMDPDILLNVVEQIPHGCVLVMGNIIDCKLTPSGWAKLMSMIKSKQIFPFFDIPCQGLYTSDLEEDTRILQYFVSQGFEFFCSQSLSKNFGIYDEGVGMLVVVAVNNQQLLCVLSQLEGLAQALWLNPPNTGARVITSILCNPALLGEWKQSLKEVVENIMLTKEKVKEKLQLLGTPGSWGHITEQSGTHGYLGLNSQQVEYLVRKKHIYIPKNGQINFSCINANNINYITEGINEAVLLTESSEMCLPKEKKTLIGIKL

SEQ ID NO: 3742 - protein, 275 aa, Homo sapiens
MSACGRKALTLLSSVFAVCGLGLLGIAVSTDYWLYLEEGVIVPQNQSTEIKMSLHSGLWRVCFLAGEERGRCFTIEYVMPMNTQLTSESTVNVLKMIRSATPFPLVSLFFMFIGFILNNIGHIRPHRTILAFVSGIFFILSGLSLVVGLVLYISSINDEMLNRTKDAETYFNYKYGWSFAFAAISFLLTESAGVMSVYLFMKRYTAEDMYRPHPGFYRPRLSNCSDYSGQFLHPDAWVRGRSPSDISSEASLQMNSNYPALLKCPDYDQMSSSPC

SEQ ID NO: 3743 - protein, 315 aa, Homo sapiens
MSITKAWNSSSVTMFILLGFTDHPELQALLFVTFLGIYLTTLAWNLALIFLIRGDTHLHTPMYFFLSNLSFIDICYSSAVAPNMLTDFFWEQKTISFVGCAAQFFFFVGMGLSECLLLTAMAYDRYAAISSPLLYPTIMTQGLCTRMVVGAYVGGFLSSLIQASSIFRLHFCGPNIINHFFCDLPPVLALSCSDTFLSQVVNFLVVVTVGGTSFLQLLISYGYIVSAVLKIPSAEGRWKACNTCASHLMVVTLLFGTALFVYLRPSSSYLLGRDKVVSVFYSLVIPMLNPLIYSLRNKEIKDALWKVLERKKVFS

SEQ ID NO: 3744 - protein, 419 aa, Homo sapiens
MAKEGVEKAEETEQMIEKEAGKEPAEGGGGDGSHRLGDAQEMRAVVLAGFGGLNKLRLFRKAMPEPQDGELKIRVKACGLNFIDLMVRQGNIDNPPKTPLVPGFECSGIVEALGDSVKGYEIGDRVMAFVNYNAWAEVVCTPVEFVYKIPDDMSFSEAAAFPMNFVTAYVMLFEVANLREGMSVLVHSAGGGVGQAVAQLCSTVPNVTVFGTASTFKHEAIKDSVTHLFDRNADYVQEVKRISAEGVDIVLDCLCGDNTGKGLSLLKPLGTYILYGSSNMVTGETKSFFSFAKSWWQVEKVNPIKLYEENKVIAGFSLLNLLFKQGRAGLIRGVVEKLIGLYNQKKIKPVVDSLWALEEVKEAMQRIHDRGNIGKLILDVEKTPTPLMANDSTETSEAGEEEEDHEGDSENKERMPFIQ

SEQ ID NO: 3745 - protein, 803 aa, Homo sapiens
MKKQFNRMKQLANQTVGRAEKTEVLSEDLLQIERRLDTVRSICHHSHKRLVACFQGQHGTDAERRHKKLPLTALAQNMQEASTQLEDSLLGKMLETCGDAENQLALELSQHEVFVEKEIVDPLYGIAEVEIPNIQKQRKQLARLVLDWDSVRARWNQAHKSSGTNFQGLPSKIDTLKEEMDEAGNKVEQCKDQLAADMYNFMAKEGEYGKFFVTLLEAQADYHRKALAVLEKTLPEMRAHQDKWAEKPAFGTPLEEHLKRSGREIALPIEACVMLLLETGMKEEGLFRIGAGASKLKKLKAALDCSTSHLDEFYSDPHAVAGALKSYLRELPEPLMTFNLYEEWTQVASVQDQDKKLQDLWRTCQKLPPQNFVNFRYLIKFLAKLAQTSDVNKMTPSNIAIVLGPNLLWARNEGTLAEMAAATSVHVVAVIEPIIQHADWFFPEEVEFNVSEAFVPLTTPSSNHSFHTGNDSDSGTLERKRPASMAVMEGDLVKKESPPKPKDPVSAAVPAPGRNNSQIASGQNQPQAAAGSHQLSMGQPHNAAGPSPHTLRRAVKKPAPAPPKPGNPPPGHPGGQSSSGTSQHPPSLSPKPPTRSPSPPTQHTGQPPGQPSAPSQLSAPRRYSSSLSPIQAPNHPPPQPPTQATPLMHTKPNSQGPPNPMALPSEHGLEQPSHTPPQTPTPPSTPPLGKQNPSLPAPQTLAGGNPETAQPHAGTLPRPRPVPKPRNRPSVPPPPQPPGVHSAGDSSLTNTAPTASKIVTDSNSRVSEPHRSIFPEMHSDSASKDVPGRILLDIDNDTESTAL

SEQ ID NO: 3746 - protein, 219 aa, Homo sapiens
MSGLSGPPARRGPFPLALLLLFLLGPRLVLAISFHLPINSRKCLREEIHKDLLVTGAYEISDQSGGAGGLRSHLKITDSAGHILYSKEDATKGKFAFTTEDYDMFEVCFESKGTGRIPDQLVILDMKHGVEAKNYEEIAKVEKLKPLEVELRRLEDLSESIVNDFAYMKKREEEMRDTNESTNTRVLYFSIFSMFCLIGLATWQVFYLRRFFKAKKLIE

SEQ ID NO: 3747 - protein, 375 aa, Homo sapiens
MANASEPGGSGGGEAAALGLKLATLSLLLCVSLAGNVLFALLIVRERSLHRAPYYLLLDLCLADGLRALACLPAVMLAARRAAAAAGAPPGALGCKLLAFLAALFCFHAAFLLLGVGVTRYLAIAHHRFYAERLAGWPCAAMLVCAAWALALAAAFPPVLDGGGDDEDAPCALEQRPDGAPGALGFLLLLAVVVGATHLVYLRLLFFIHDRRKMRPARLVPAVSHDWTFHGPGATGQAAANWTAGFGRGPTPPALVGIRPAGPGRGARRLLVLEEFKTEKRLCKMFYAVTLLFLLLWGPYVVASYLRVLVRPGAVPQAYLTASVWLTFAQAGINPVVCFLFNRELRDCFRAQFPCCQSPRTTQATHPCDLKGIGL

SEQ ID NO: 3748 - protein, 1626 aa, Homo sapiens
MAGLRGNAVAGLLWMLLLWSGGGGCQAQRAGCKSVHYDLVFLLDTSSSVGKEDFEKVRQWVANLVDTFEVGPDRTRVGVVRYSDRPTTAFELGLFGSQEEVKAAARRLAYHGGNTNTGDALRYITARSFSPHAGGRPRDRAYKQVAILLTDGRSQDLVLDAAAAAHRAGIRIFAVGVGEALKEELEEIASEPKSAHVFHVSDFNAIDKIRGKLRRRLCENVLCPSVRVEGDRFKHTNGGTKEITGFDLMDLFSVKEILGKRENGAQSSYVRMGSFPVVQSTEDVFPQGLPDEYAFVTTFRFRKTSRKEDWYIWQVIDQYSIPQVSIRLDGENKAVEYNAVGAMKDAVRVVFRGSRVNDLFDRDWHKMALSIQAQNVSLHIDCALVQTLPIEERENIDIQGKTVIGKRLYDSVPIDFDLQRIVIYCDSRHAELETCCDIPSGPCQVTVVTEPPPPPPPQRPPTPGSEQIGFLKTINCSCPAGEKGEMGVAGPMGLPGPKGDIGAIGPVGAPGPKGEKGDVGIGPFGQGEKGEKGSLGLPGPPGRDGSKGMRGEPGELGEPGLPGEVGMRGPQGPPGLPGPPGRVGAPGLQGERGEKGTRGEKGERGLDGFPGKPGDTGQQGRPGPSGVAGPQGEKGDVGPAGPPGVPGSVVQQEGLKGEQGAPGPRGHQGAPGPPGARGPIGPEGRDGPPGLQGLRGKKGDMGPPGIPGLLGLQGPPGPPGVPGPPGPGGSPGLPGEIGFPGKPGPPGPTGPPGKDGPNGPPGPPGTKGEPGERGEDGLPGKPGLRGEIGEQGLAGRPGEKGEAGLPGAPGFPGVRGEKGDQGEKGELGLPGLKGDRGEKGEAGPAGPPGLPGTTSLFTPHPRMPGEQGPKGEKGDPGLPGEPGLQGRPGELGPQGPTGPPGAKGQEGAHGAPGAAGNPGAPGHVGAPGPSGPPGSVGAPGLRGTPGKDGERGEKGAAGEEGSPGPVGPRGDPGAPGLPGPPGKGKDGEPGLRGSPGLPGPLGTKAACGKVRGSENCALGGQCVKGDRGAPGIPGSPGSRGDPGIGVAGPPGPSGPPGDKGSPGSRGLPGFPGPQGPAGRDGAPGNPGERGPPGKPGLSSLLSPGDINLLAKDVCNDCPPGPPGLPGLPGFKGDKGVPGKPGREGTEGKKGEAGPPGLPGPPGIAGPQGSQGERGADGEVGQKGDQGHPGVPGFMGPPGNPGPPGADGIAGAAGPPGIQGSPGKEGPPGPQGPSGLPGIPGEEGKEGRDGKPGPPGEPGKAGEPGLPGPEGARGPPGFKGHTGDSGAPGPRGESGAMGLPGQEGLPGKDGDTGPTGPQGPQGPRGPPGKNGSPGSPGEPGPSGTPGQKGSKGENGSPGLPGFLGPRGPPGEPGEKGVPGKEGVPGKPGEPGFKGERGDPGIKGDKGPPGGKGQPGDPGIPGHKGHTGLMGPQGLPGENGPVGPPGPPGQPGFPGLRGESPSMETLRRLIQEELGKQLETRLAYLLAQMPPAYMKSSQGRPGPPGPPGKDGLPGRAGPMGEPGRPGQGGLEGPSGPIGPKGERGAKGDPGAPGVGLRGEMGPPGIPGQPGEPGYAKDGLPGIPGPQGETGPAGHPGLPGPPGPPGQCDPSQCAYFASLAARPGNVKGP

SEQ ID NO: 3749 - protein, 538 aa, Homo sapiens
MLQIGEDVDYLLIPREVRLAGGVWRVISKPATKEAEFRERLTQFLEEEGRTLEDVARIMEKSTPHPPQPPKKPKEPRVRRRVQQMVTPPPRLVVGTYDSSNASDSEFSDFETSRDKSRQGPRRGKKVRKMPVSYLGSKFLGSDLESEDDEELVEAFLRRQEKQPSAPPARRRVNLPVPMFEDNLGPQLSKADRWREYVSQVSWGKLKRRVKGWAPRAGPGVGEARLASTAVESAGVSSAPEGTSPGDRLGNAGDVCVPQASPRRWRPKINWASFRRRRKEQTAPTGQGADIEADQGGEAADSQREEAIADQREGAAGNQRAGAPADQGAEAADNQREEAADNQRAGAPAEEGAEAADNQREEAADNQRAEAPADQRSQGTDNHREEAADNQRAEAPADQGSEVTDNQREEAVHDQRERAPAVQGADNQRAQARAGQRAEAAHNQRAGAPGIQEAEVSAAQGTTGTAPGARARKQVKTVRFQTPGRFSWFCKRRRAFWHTPRLPTLPKRVPRAGEARNLRVLRAEARAEAEQGEQEDQL

SEQ ID NO: 3750 - protein, 532 aa, Homo sapiens
MACLLRSFQRISAGVFFLALWGMVVGDKLLVVPQDGSHWLSMKDIVEVLSDRGHEIVVVVPEVNLLLKESKYYTRKIYPVPYDQEELKNRYQSFGNNHFAERSFLTAPQTEYRNNMIVIGLYFINCQSLLQDRDTLNFFKESKFDALFTDPALPCGVILAEYLGLPSVYLFRGFPCSLEHTFSRSPDPVSYIPRCYTKFSDHMTFSQRVANFLVNLLEPYLFYCLFSKYEELASAVLKRDVDIITLYQKVSVWLLRYDFVLEYPRPVMPNMVFIGGINCKKRKDLSQEFEAYINASGEHGIVVFSLGSMVSEIPEKKAMAIADALGKIPQTVLWRYTGTRPSNLANNTILVKWLPQNDLLGHPMTRAFITHAGSHGVYESICNGVPMVMMPLFGDQMDNAKRMETKGAGVTLNVLEMTSEDLENALKAVINDKSYKENIMRLSSLHKDRPVEPLDLAVFWVEFVMRHKGAPHLRPAAHDLTWYQYHSLDVIGFLLAVVLTVAFITFKCCAYGYRKCLGKKGRVKKAHKSKTH

SEQ ID NO: 3751 - protein, 803 aa, Homo sapiens
MEVKPVGEPTQEVSKFKLSTKVESTGHWLVEDHVRIWEVLKTEESSIQDWGEEVEEGAVYHVTLKRVQIQQAANKGARWLGVEGDQLPPGHTVSQYETCKIRTIKAGTLEKLVENLLTAFGDNDFTYISIFLSTYRGFASTKEVLELLLDRYGNLTSPNCEEDGSQSSSESKMVIRNAIASILRAWLDQCAEDFREPPHFPCLQKLLDYLTRMMPGSDPERRAQNLLEQFQKQEVETDNGLPNTISFSLEEEEELEGGESAEFTCFSEDLVAEQLTYMDAQLFKKVVPHHCLGCIWSRRDKKENKHLAPTIRATISQFNTLTKCVVSTILGGKELKTQQRAKIIEKWINIAHECRLLKNFSSLRAIVSALQSNSIYRLKKTWAAVPRDRMLMFEELSDIFSDHNNHLTSRELLMKEGTSKFANLDSSVKENQKRTQRRLQLQKDMGVMQGTVPYLGTFLTDLTMLDTALQDYIEGGLINFEKRRREFEVIAQIKLLQSACNSYCMTPDQKFIQWFQRQQLLTEEESYALSCEIEAAADASTTSPKPRKSMVKRLSLLFLGSDMITSPTPTKEQPKSTASGSSGESMDSVSVSSCESNHSEAEEGSITPMDTPDEPQKKLSESSSSCSSIHSMDTNSSGMSSLINPLSSPPSCNNNPKIHKRSVSVTSITSTVLPPVYNQQNEDTCIIRISVEDNNGNMYKSIMLTSQDKTPAVIQRAMLKHNLDSDPAEEYELVQVISEDKELVIPDSANVFYAMNSQVNFDFILRKKNSMEEQVKLRSRTSLTLPRTAKRGCWSNRHSKITL

SEQ ID NO: 3752 - protein, 692 aa, Homo sapiens
MGTVSSRRSWWPLPLLLLLLLLLGPAGARAQEDEDGDYEELVLALRSEEDGLAEAPEHGTTATFHRCAKDPWRLPGTYVVVLKEETHLSQSERTARRLQAQAARRGYLTKILHVFHGLLPGFLVKMSGDLLELALKLPHVDYIEEDSSVFAQSIPWNLERITPPRYRADEYQPPDGGSLVEVYLLDTSIQSDHREIEGRVMVTDFENVPEEDGTRFHRQASKCDSHGTHLAGVVSGRDAGVAKGASMRSLRVLNCQGKGTVSGTLIGLEFIRKSQLVQPVGPLVVLLPLAGGYSRVLNAACQRLARAGVVLVTAAGNFRDDACLYSPASAPEVITVGATNAQDQPVTLGTLGTNFGRCVDLFAPGEDIIGASSDCSTCFVSQSGTSQAAAHVAGIAAMMLSAEPELTLAELRQRLIHFSAKDVINEAWFPEDQRVLTPNLVAALPPSTHGAGWQLFCRTVWSAHSGPTRMATAVARCAPDEELLSCSSFSRSGKRRGERMEAQGGKLVCRAHNAFGGEGVYAIARCCLLPQANCSVHTAPPAEASMGTRVHCHQQGHVLTGCSSHWEVEDLGTHKPPVLRPRGQPNQCVGHREASIHASCCHAPGLECKVKEHGIPAPQEQVTVACEEGWTLTGCSALPGTSHVLGAYAVDNTCVVRSRDVSTTGSTSEGAVTAVAICCRSRHLAQASQELQ

SEQ ID NO: 3753 - protein, 617 aa, Homo sapiens
MRPPQCLLHTPSLASPLLLLLLWLLGGGVGAEGREDAELLVTVRGGRLRGIRLKTPGGPVSAFLGIPFAEPPMGPRRFLPPEPKQPWSGVVDATTFQSVCYQYVDTLYPGFEGTEMWNPNRELSEDCLYLNVWTPYPRPTSPTPVLVWIYGGGFYSGASSLDVYDGRFLVQAERTVLVSMNYRVGAFGFLALPGSREAPGNVGLLDQRLALQWVQENVAAFGGDPTSVTLFGESAGAASVGMHLLSPPSRGLFHRAVLQSGAPNGPWATVGMGEARRRATQLAHLVGCPPGGTGGNDTELVACLRTRPAQVLVNHEWHVLPQESVFRFSFVPVVDGDFLSDTPEALINAGDFHGLQVLVGVVKDEGSYFLVYGAPGFSKDNESLISRAEFLAGVRVGVPQVSDLAAEAVVLHYTDWLHPEDPARLREALSDVVGDHNVVCPVAQLAGRLAAQGARVYAYVFEHRASTLSWPLWMGVPHGYEIEFIFGIPLDPSRNYTAEEKIFAQRLMRYWANFARTGDPNEPRDPKAPQWPPYTAGAQQYVSLDLRPLEVRRGLRAQACAFWNRFLPKLLSATASEAPSTCPGFTHGEAAPRPGLPLPLLLLHQLLLLFLSHLRRL

SEQ ID NO: 3754 - protein, 441 aa, Homo sapiens
MAEPRQEFEVMEDHAGTYGLGDRKDQGGYTMHQDQEGDTDAGLKESPLQTPTEDGSEEPGSETSDAKSTPTAEDVTAPLVDEGAPGKQAAAQPHTEIPEGTTAEEAGIGDTPSLEDEAAGHVTQARMVSKSKDGTGSDDKKAKGADGKTKIATPRGAAPPGQKGQANATRIPAKTPPAPKTPPSSGEPPKSGDRSGYSSPGSPGTPGSRSRTPSLPTPPTREPKKVAVVRTPPKSPSSAKSRLQTAPVPMPDLKNVKSKIGSTENLKHQPGGGKVQIINKKLDLSNVQSKCGSKDNIKHVPGGGSVQIVYKPVDLSKVTSKCGSLGNIHHKPGGGQVEVKSEKLDFKDRVQSKIGSLDNITHVPGGGNKKIETHKLTFRENAKAKTDHGAEIVYKSPVVSGDTSPRHLSNVSSTGSIDMVDSPQLATLADEVSASLAKQGL

SEQ ID NO: 3755 - protein, 586 aa, Homo sapiens
MEMQDLTSPHSRLSGSSESPSGPKLGNSHINSNSMTPNGTEVKTEPMSSSETASTTADGSLNNFSGSAIGSSSFSPRPTHQFSPPQIYPSKPYPHILPTPSSQTMAAYGQTQFTTGMQQATAYATYPQPGQPYGISSYGIKTEGGLSQSQSPGQTGFLSYGTSFSTPQPGQAPYSYQMQGSSFTTSSGIYTGNNSLTNSSGFNSSQQDYPSYPSFGQGQYAQYYNSSPYPAHYMTSSNTSPTTPSTNATYQLQEPPSGITSQAVTDPTAEYSTIHSPSTPIKDSDSDRLRRGSDGKSRGRGRRNNNPSPPPDSDLERVFIWDLDETIIVFHSLLTGSYANRYGRDPPTSVSLGLRMEEMIFNLADTHLFFNDLEECDQVHIDDVSSDDNGQDLSTYNFGTDGFPAAATSANLCLATGVRGGVDWMRKLAFRYRRVKEIYNTYKNNVGGLLGPAKREAWLQLRAEIEALTDSWLTLALKALSLIHSRTNCVNILVTTTQLIPALAKVLLYGLGIVFPIENIYSATKIGKESCFERIIQRFGRKVVYVVIGDGVEEEQGAKKHAMPFWRISSHSDLMALHHALELEYL

SEQ ID NO: 3756 - protein, 303 aa, Homo sapiens
MADAASQVLLGSGLTILSQPLMYVKVLIQVGYEPLPPTIGRNIFGRQVCQLPGLFSYAQHIASIDGRRGLFTGLTPRLCSGVLGTVVHGKVLQHYQESDKGEELGPGNVQKEVSSSFDHVIKETTREMIARSAATLITHPFHVITLRSMVQFIGRESKYCGLCDSIITIYREEGILGFFAGLVPRLLGDILSLWLCNSLAYLVNTYALDSGVSTMNEMKSYSQAVTGFFASMLTYPFVLVSNLMAVNNCGLAGGCPPYSPIYTSWIDCWCMLQKEGNMSRGNSLFFRKVPFGKTYCCDLKMLI

SEQ ID NO: 3757 - protein, 793 aa, Homo sapiens
MLGLRPPLLALVGLLSLGCVLSQECTKFKVSSCRECIESGPGCTWCQKLNFTGPGDPDSIRCDTRPQLLMRGCAADDIMDPTSLAETQEDHNGGQKQLSPQKVTLYLRPGQAAAFNVTFRRAKGYPIDLYYLMDLSYSMLDDLRNVKKLGGDLLRALNEITESGRIGFGSFVDKTVLPFVNTHPDKLRNPCPNKEKECQPPFAFRHVLKLTNNSNQFQTEVGKQLISGNLDAPEGGLDAMMQVAACPEEIGWRNVTRLLVFATDDGFHFAGDGKLGAILTPNDGRCHLEDNLYKRSNEFDYPSVGQLAHKLAENNIQPIFAVTSRMVKTYEKKRPPVKHVHPAFPLLVPCVQPEQKLTEIIPKSAVGELSEDSSNVVHLIKNAYNKLSSRVFLDHNALPDTLKVTYDSFCSNGVTHRNQPRGDCDGVQINVPITFQVKVTATECIQEQSFVIRALGFTDIVTVQVLPQCECRCRDQSRDRSLCHGKGFLECGICRCDTGYIGKNCECQTQGRSSQELEGSCRKDNNSIICSGLGDCVCGQCLCHTSDVPGKLIYGQYCECDTINCERYNGQVCGGPGRGLCFCGKCRCHPGFEGSACQCERTTEGCLNPRRVECSGRGRCRCNVCECHSGYQLPLCQECPGCPSPCGKYISCAECLKFEKGPFGKNCSAACPGLQLSNNPVKGRTCKERDSEGCWVAYTLEQQDGMDRYLIYVDESRECVAGPNIAAIVGGTVAGIVLIGILLLVIWKALIHLSDLREYRRFEKEKLKSQWNNDNPLFKSATTTVMNPKFAES

SEQ ID NO: 3758 - protein, 555 aa, Homo sapiens
MERPAPGEVVMSQAIQPAHATARGELSAGQLLKWIDTTACLAAEKHAGVSCVTASVDDIQFEETARVGQVITIKAKVTRAFSTSMEISIKVMVQDMLTGIEKLVSVAFSTFVAKPVGKEKIHLKPVTLLTEQDHVEHNLAAERRKVRLQHEDTFNNLMKESSKFDDLIFDEEEGAVSTRGTSVQSIELVLPPHANHHGNTFGGQIMAWMETVATISASRLCWAHPFLKSVDMFKFRGPSTVGDRLVFTAIVNNTFQTCVEVGVRVEAFDCQEWAEGRGRHINSAFLIYNAADDKENLITFPRIQPISKDDFRRYRGAIARKRIRLGRKYVISHKEEVPLCIHWDISKQASLSDSNVEALKKLAAKRGWEVTSTVEKIKIYTLEEHDVLSVWVEKHVGSPAHLAYRLLSDFTKRPLWDPHFVSCEVIDWVSEDDQLYHITCPILNDDKPKDLVVLVSRRKPLKDGNTYTVAVKSVILPSVPPSPQYIRSEIICAGFLIHAIDSNSCIVSYFNHMSASILPYFAGNLGGWSKSIEETAASCIQFLENPPDDGFVSTF

SEQ ID NO: 3759 - protein, 757 aa, Homo sapiens
MTSGSVFFYILIFGKYFSHGGGQDVKCSLGYFPCGNITKCLPQLLHCNGVDDCGNQADEDNCGDNNGWSLQFDKYFASYYKMTSQYPFEAETPECLVGSVPVQCLCQGLELDCDETNLRAVPSVSSNVTAMSLQWNLIRKLPPDCFKNYHDLQKLYLQNNKITSISIYAFRGLNSLTKLYLSHNRITFLKPGVFEDLHRLEWLIIEDNHLSRISPPTFYGLNSLILLVLMNNVLTRLPDKPLCQHMPRLHWLDLEGNHIHNLRNLTFISCSNLTVLVMRKNKINHLNENTFAPLQKLDELDLGSNKIENLPPLIFKDLKELSQLNLSYNPIQKIQANQFDYLVKLKSLSLEGIEISNIQQRMFRPLMNLSHIYFKKFQYCGYAPHVRSCKPNTDGISSLENLLASIIQRVFVWVVSAVTCFGNIFVICMRPYIRSENKLYAMSIISLCCADCLMGIYLFVIGGFDLKFRGEYNKHAQLWMESTHCQLVGSLAILSTEVSVLLLTFLTLEKYICIVYPFRCVRPGKCRTITVLILIWITGFIVAFIPLSNKEFFKNYYGTNGVCFPLHSEDTESIGAQIYSVAIFLGINLAAFIIIVFSYGSMFYSVHQSAITATEIRNQVKKEMILAKRFFFIVFTDALCWIPIFVVKFLSLLQVEIPGTITSWVVIFILPINSALNPILYTLTTRPFKEMIHRFWYNYRQRKSMDSKGQKTYAPSFIWVEMWPLQEMPPELMKPDLFTYPCEMSLISQSTRLNSYS

SEQ ID NO: 3760 - protein, 1209 aa, Homo sapiens
MECYYIVISSTHLSNGHFRNIKGVFRGPLSKNGNKTLDYAEKENTIAKALEDLKANFYCELCDKQYYKHQEFDNHINSYDHAHKQRLKELKQREFARNVASKSRKDERKQEKALQRLHKLAELRKETVCAPGSGPMFKSTTVTVRENCNEISQRVVVDSVNNQQDFKYTLIHSEENTKDATTVAEDPESANNYTAKNNQVGDQAQGIHRHKIGFSFAFPKKASVKLESSAAAFSEYSDDASVGKGFSRKSRFVPSACHLQQSSPTDVLLSSEEKTNSFHPPEAMCRDKETVQTQEIKEVSSEKDALLLPSFCKFQLQLSSDADNCQNSVPLADQIPLESVVINEDIPVSGNSFELLGNKSTVLDMSNDCISVQATTEENVKHNEASTTEVENKNGPETLAPSNTEEVNITIHKKTNFCKRQCEPFVPVLNKHRSTVLQWPSEMLVYTTTKPSISYSCNPLCFDFKSTKVNNNLDKNKPDLKDLCSQQKQEDICMGPLSDYKDVSTEGLTDYEIGSSKNKCSQVTPLLADDILSSSCDSGKNENTGQRYKNISCKIRETEKYNFTKSQIKQDTLDEKYNKIRLKETHEYWFHKSRRKKKRKKLCQHHHMEKTKESETRCKMEAENSYTENAGKYLLEPISEKQYLAAEQLLDSHQLLDKRPKSESISLSDNEEMCKTWNTEYNTYDTISSKNHCKKNTILLNGQSNATMIHSGKHNLTYSRTYCCWKTKMSSCSQDHRSLVLQNDMKHMSQNQAVKRGYNSVMNESERFYRKRRQHSHSYSSDESLNRQNHLPEEFLRPPSTSVAPCKPKKKRRRKRGRFHPGFETLELKENTDYPVKDNSSLNPLDRLISEDKKEKMKPQEVAKIERNSEQTNQLRNKLSFHPNNLLPSETNGETEHLEMETTSGELSDVSNDPTTSVCVASAPTKEAIDNTLLEHKERSENINLNEKQIPFQVPNIERNFRQSQPKSYLCHYELAEALPQGKMNETPTEWLRYNSGILNTQPPLPFKEAHVSGHTFVTAEQILAPLALPEQALLIPLENHDKFKNVPCEVYQHILQPNMLANKVKFTFPPAALPPPSTPLQPLPLQQSLCSTSVTTIHHTVLQQHAAAAAAAAAAAAAGTFKVLQPHQQFLSQIPALTRTSLPQLSVGPVGPRLCPGNQPTFVAPPQMPIIPASVLHPSHLAFPSLPHALFPSLLSPHPTVIPLQPLF

SEQ ID NO: 3761 - protein, 2689 aa, Homo sapiens
MASEVVCGLIFRLLLPICLAVACAFRYNGLSFVYLIYLLLIPLFSEPTKTTMQGHTGRLLKSLCFISLSFLLLHIIFHITLVSLEAQHRIAPGYNCSTWEKTFRQIGFESLKGADAGNGIRVFVPDIGMFIASLTIWLLCRNIVQKPVTDEAAQSNPEFENEELAEGEKIDSEEALIYEEDFNGGDGVEGELEESTKLKMFRRLASVASKLKEFIGNMITTAGKVVVTILLGSSGMMLPSLTSSVYFFVFLGLCTWWSWCRTFDPLLFSCLCVLLAIFTAGHLIGLYLYQFQFFQEAVPPNDYYARLFGIKSVIQTDCSSTWKIIVNPDLSWYHHANPILLLVMYYTLATLIRIWLQEPLVQDEGTKEEDKALACSPIQITAGRRRSLWYATHYPTDERKLLSMTQDDYKPSDGLLVTVNGNPVDYHTIHPSLPMENGPGKADLYSTPQYRWEPSDESSEKREEEEEEKEEFEEERSREEKRSIKVHAMVSVFQFIMKQSYICALIAMMAWSITYHSWLTFVLLIWSCTLWMIRNRRKYAMISSPFMVVYGNLLLILQYIWSFELPEIKKVPGFLEKKEPGELASKILFTITFWLLLRQHLTEQKALQEKEALLSEVKIGSQENEEKDEELQDIQVEGEPKEEEEEEAKEEKQERKKVEQEEAEEEDEQDIMKVLGNLVVAMFIKYWIYVCGGMFFFVSFEGKIVMYKIIYMVLFLFCVALYQVHYEWWRKILKYFWMSVVIYTMLVLIFIYTYQFENFPGLWQNMTGLKKEKLEDLGLKQFTVAELFTRIFIPTSFLLVCILHLHYFHDRFLELTDLKSIPSKEDNTIYRLAHPEGSLPDLTMMHLTASLEKPEVRKLAEPGEEKLEGYSEKAQKGDLGKDSEESEEDGEEEEESEEEEETSDLRNKWHLVIDRLTVLFLKFLEYFHKLQVFMWWILELHIIKIVSSYIIWVSVKEVSLFNYVFLISWAFALPYAKLRRLASSVCTVWTCVIIVCKMLYQLQTIKPENFSVNCSLPNENQTNIPFNELNKSLLYSAPIDPTEWVGLRKSSPLLVYLRNNLLMLAILAFEVTIYRHQEYYRGRNNLTAPVSRTIFHDITRLHLDDGLINCAKYFINYFFYKFGLETCFLMSVNVIGQRMDFYAMIHACWLIAVLYRRRRKAIAEIWPKYCCFLACIITFQYFICIGIPPAPCRDYPWRFKGASFNDNIIKWLYFPDFIVRPNPVFLVYDFMLLLCASLQRQIFEDENKAAVRIMAGDNVEICMNLDAASFSQHNPVPDFIHCRSYLDMSKVIIFSYLFWFVLTIIFITGTTRISIFCMGYLVACFYFLLFGGDLLLKPIKSILRYWDWLIAYNVFVITMKNILSIGACGYIGTLVHNSCWLIQAFSLACTVKGYQMPAANSPCTLPSGEAGIIWDSICFAFLLLQRRVFMSYYFLHVVADIKASQILASRGAELFQATIVKAVKARIEEEKKSMDQLKRQMDRIKARQQKYKKGKERMLSLTQEPGEGQDMQKLSEEDDEREADKQKAKGKKKQWWRPWVDHASMVRSGDYYLFETDSEEEEEEELKKEDEEPPRRSAFQFVYQAWITDPKTALRQRHKEKKRSAREERKRRRKGSKEGPVEWEDREDEPIKKKSDGPDNIIKRIFNILKFTWVLFLATVDSFTTWLNSISREHIDISTVLRIERCMLTREIKKGNVPTRESIHMYYQNHIMNLSRESGLDTIDEHPGAASGAQTAHRMDSLDSHDSISSEPTQCTMLYSRQGTTETIEEVEAEQEEEAGSTAPEPREAKEYEATGYDVGAMGAEEASLTPEEELTQFSTLDGDVEAPPSYSKAVSFEHLSFGSQDDSAGKNRMAVSPDDSRTDKLGSSILPPLTHELTASELLLKKMFHDDELEESEKFYVGQPRFLLLFYAMYNTLVARSEMVCYFVIILNHMVSASMITLLLPILIFLWAMLSVPRPSRRFWMMAIVYTEVAIVVKYFFQFGFFPWNKNVEVNKDKPYHPPNIIGVEKKEGYVLYDLIQLLALFFHRSILKCHGLWDEDDMTESGMAREESDDELSLGHGRRDSSDSLKSINLAASVESVHVTFPEQQTAVRRKRSGSSSEPSQRSSFSSNRSQRGSTSTRNSSQKGSSVLSIKQKGKRELYMEKLQEHLIKAKAFTIKKTLEIYVPIKQFFYNLIHPEYSAVTDVYVLMFLADTVDFIIIVFGFWAFGKHSAAADITSSLSEDQVPGPFLVMVLIQFGTMVVDRALYLRKTVLGKVIFQVILVFGIHFWMFFILPGVTERKFSQNLVAQLWYFVKCVYFGLSAYQIRCGYPTRVLGNFLTKSYNYVNLFLFQGFRLVPFLTELRAVMDWVWTDTTLSLSSWICVEDIYAHIFILKCWRESEKPIFTMSAQQSQLKVMDQQSFNKFIQAFSRDTGAMQFLENYEKEDITVAELEGNSNSLWTISPPSKQKMIHELLDPNSSFSVVFSWSIQRNLSLGAKSEIATDKLSFPLKNITRKNIAKMIAGNSTESSKTPVTIEKIYPYYVKAPSDSNSKPIKQLLSENNFMDITIILSRDNTTKYNSEWWVLNLTGNRIYNPNSQALELVVFNDKVSPPSLGFLAGYGIMGLYASVVLVIGKFVREFFSGISHSIMFEELPNVDRILKLCTDIFLVRETGELELEEDLYAKLIFLYRSPETMIKWTREKTN

SEQ ID NO: 3762 - protein, 465 aa, Homo sapiens
MATLPAAETWIDGGGGVGADAVNLTASLAAGAATGAVETGWLQLLDQAGNLSSSPSALGLPVASPAPSQPWANLTNQFVQPSWRIALWSLAYGVVVAVAVLGNLIVIWIILAHKRMRTVTNYFLVNLAFSDASMAAFNTLVNFIYALHSEWYFGANYCRFQNFFPITAVFASIYSMTAIAVDRYMAIIDPLKPRLSATATKIVIGSIWILAFLLAFPQCLYSKTKVMPGRTLCFVQWPEGPKQHFTYHIIVIILVYCFPLLIMGITYTIVGITLWGGEIPGDTCDKYHEQLKAKRKVVKMMIIVVMTFAICWLPYHIYFILTAIYQQLNRWKYIQQVYLASFWLAMSSTMYNPIIYCCLNKRFRAGFKRAFRWCPFIKVSSYDELELKTTRFHPNRQSSMYTVTRMESMTVVFDPNDADTTRSSRKKRATPRDPSFNGCSRRNSKSASATSSFISSPYTSVDEYS

SEQ ID NO: 3763 - protein, 798 aa, Homo sapiens
MNLQPIFWIGLISSVCCVFAQTDENRCLKANAKSCGECIQAGPNCGWCTNSTFLQEGMPTSARCDDLEALKKKGCPPDDIENPRGSKDIKKNKNVTNRSKGTAEKLKPEDITQIQPQQLVLRLRSGEPQTFTLKFKRAEDYPIDLYYLMDLSYSMKDDLENVKSLGTDLMNEMRRITSDFRIGFGSFVEKTVMPYISTTPAKLRNPCTSEQNCTSPFSYKNVLSLTNKGEVFNELVGKQRISGNLDSPEGGFDAIMQVAVCGSLIGWRNVTRLLVFSTDAGFHFAGDGKLGGIVLPNDGQCHLENNMYTMSHYYDYPSIAHLVQKLSENNIQTIFAVTEEFQPVYKELKNLIPKSAVGTLSANSSNVIQLIIDAYNSLSSEVILENGKLSEGVTISYKSYCKNGVNGTGENGRKCSNISIGDEVQFEISITSNKCPKKDSDSFKIRPLGFTEEVEVILQYICECECQSEGIPESPKCHEGNGTFECGACRCNEGRVGRHCECSTDEVNSEDMDAYCRKENSSEICSNNGECVCGQCVCRKRDNTNEIYSGKFCECDNFNCDRSNGLICGGNGVCKCRVCECNPNYTGSACDCSLDTSTCEASNGQICNGRGICECGVCKCTDPKFQGQTCEMCQTCLGVCAEHKECVQCRAFNKGEKKDTCTQECSYFNITKVESRDKLPQPVQPDPVSHCKEKDVDDCWFYFTYSVNGNNEVMVHVVENPECPTGPDIIPIVAGVVAGIVLIGLALLLIWKLLMIIHDRREFAKFEKEKMNAKWDTGENPIYKSAVTTVVNPKYEGK

SEQ ID NO: 3764 - protein, 356 aa, Homo sapiens
MAAEGWIWRWGWGRRCLGRPGLLGPGPGPTTPLFLLLLLGSVTADITDGNSEHLKREHSLIKPYQGVGSSSMPLWDFQGSTMLTSQYVRLTPDERSKEGSIWNHQPCFLKDWEMHVHFKVHGTGKKNLHGDGIALWYTRDRLVPGPVFGSKDNFHGLAIFLDTYPNDETTERVFPYISVMVNNGSLSYDHSKDGRWTELAGCTADFRNRDHDTFLAVRYSRGRLTVMTDLEDKNEWKNCIDITGVRLPTGYYFGASAGTGDLSDNHDIISMKLFQLMVEHTPDEESIDWTKIEPSVNFLKSPKDNVDDPTGNFRSGPLTGWRVFLLLLCALLGIVVCAVVGAVVFQKRQERNKRFY

SEQ ID NO: 3765 - protein, 904 aa, Homo sapiens
MDRYLLLVIWGEGKFPSAASREAEHGPEVSSGEGTENQPDFTAANVYHLLKRSISASINPEDSTFPACSVGGIPGSKKWFFAVQAIYGFYQFCSSDWQEIHFDTEKDKIEDVLQTNIEECLGAVECFEEEDSNSRESLSLADLYEEAAENLHQLSDKLPAPGRAMVDIILLLSDKDPPKLKDYLPTVGALKHLREWYSAKITIAGNHCEINCQKIAEYLSANVVSLEDLRNVIDSKELWRGKIQIWERKFGFEISFPEFCLKGVTLKNFSTSNLNTDFLAKKIIPSKDKNILPKVFHYYGPALEFVQMIKLSDLPSCYMSDIEFELGLTNSTKQNSVLLLEQISSLCSKVGALFVLPCTISNILIPPPNQLSSRKWKEYIAKKPKTISVPDVEVKGECSSYYLLLQGNGNRRCKATLIHSANQINGSFALNLIHGKMKTKTEEAKLSFPFDLLSLPHFSGEQIVQREKQLANVQVLALEECLKRRKLAKQPETVSVAELKSLLVLTRKHFLDYFDAVIPKMILRKMDKIKTFNILNDFSPVEPNSSSLMETNPLEWPERHVLQNLETFEKTKQKMRTGSLPHSSEQLLGHKEGPRDSITLLDAKELLKYFTSDGLPIGDLQPLPIQKGEKTFVLTPELSPGKLQVLPFEKASVCHYHGIEYCLDDRKALERDGGFSELQSRLIRYETQTTCTRESFPVPTVLSPLPSPVVSSDPGSVPDGEVLQNELRTEVSRLKRRSKDLNCLYPRKRLVKSESSESLLSQTTGNSNHYHHHVTSRKPQTERSLPVTCPLVPIPSCETPKLATKTSSGQKSMHESKTSRQIKESRSQKHTRILKEVVTETLKKHSITETHECFTACSQRLFEISKFYLKDLKTSRGLFEEMKKTANNNAVQVIDWVLEKTSKK

SEQ ID NO: 3766 - protein, 379 aa, Homo sapiens
MAATEGVGEAAQGGEPGQPAQPPPQPHPPPPQQQHKEEMAAEAGEAVASPMDDGFVSLDSPSYVLYRDRAEWADIDPVPQNDGPNPVVQIIYSDKFRDVYDYFRAVLQRDERSERAFKLTRDAIELNAANYTVWHFRRVLLKSLQKDLHEEMNYITAIIEEQPKNYQVWHHRRVLVEWLRDPSQELEFIADILNQDAKNYHAWQHRQWVIQEFKLWDNELQYVDQLLKEDVRNNSVWNQRYFVISNTTGYNDRAVLEREVQYTLEMIKLVPHNESAWNYLKGILQDRGLSKYPNLLNQLLDLQPSHSSPYLIAFLVDIYEDMLENQCDNKEDILNKALELCEILAKEKDTIRKEYWRYIGRSLQSKHSTENDSPTNVQQ

SEQ ID NO: 3767 - protein, 1337 aa, Homo sapiens
MDFTAQPKPATALCGVVSADGKIAYPPGVKEITDKITTDEMIKRLKMVVKTFMDMDQDSEDEKQQYLPLALHLASEFFLRNPNKDVRLLVACCLADIFRIYAPEAPYTSHDKLKDIFLFITRQLKGLEDTKSPQFNRYFYLLENLAWVKSYNICFELEDCNEIFIQLFRTLFSVINNSHNKKVQMHMLDLMSSIIMEGDGVTQELLDSILINLIPAHKNLNKQSFDLAKVLLKRTVQTIEACIANFFNQVLVLGRSSVSDLSEHVFDLIQELFAIDPHLLLSVMPQLEFKLKSNDGEERLAVVRLLAKLFGSKDSDLATQNRPLWQCFLGRFNDIHVPVRLESVKFASHCLMNHPDLAKDLTEYLKVRSHDPEEAIRHDVIVTIITAAKRDLALVNDQLLGFVRERTLDKRWRVRKEAMMGLAQLYKKYCLHGEAGKEAAEKVSWIKDKLLHIYYQNSIDDKLLVEKIFAQYLVPHNLETEERMKCLYYLYASLDPNAVKALNEMWKCQNMLRSHVRELLDLHKQPTSEANCSAMFGKLMTIAKNLPDPGKAQDFVKKFNQVLGDDEKLRSQLELLISPTCSCKQADICVREIARKLANPKQPTNPFLEMVKFLLERIAPVHIDSEAISALVKLMNKSIEGTADDEEEGVSPDTAIRSGLELLKVLSFTHPTSFHSAETYESLLQCLRMEDDKVAEAAIQIFRNTGHKIETDLPQIRSTLIPILHQKAKRGTPHQAKQAVHCIHAIFTNKEVQLAQIFEPLSRSLNADVPEQLITPLVSLGHISMLAPDQFASPMKSVVANFIVKDLLMNDRSTGEKNGKLWSPDEEVSPEVLAKVQAIKLLVRWLLGMKNNQSKSANSTLRLLSAMLVSEGDLTEQKRISKSDMSRLRLAAGSAIMKLAQEPCYHEIITPEQFQLCALVINDECYQVRQIFAQKLHKALVKLLLPLEYMAIFALCAKDPVKERRAHARQCLLKNISIRREYIKQNPMATEKLLSLLPEYVVPYMIHLLAHDPDFTRSQDVDQLRDIKECLWFMLEVLMTKNENNSHAFMKKMAENIKLTRDAQSPDESKTNEKLYTVCDVALCVINSKSALCNADSPKDPVLPMKFFTQPEKDFCNDKSYISEETRVLLLTGKPKPAGVLGAVNKPLSATGRKPYVRSTGTETGSNINVNSELNPSTGNRSREQSSEAAETGVSENEENPVRIISVTPVKNIDPVKNKEINSDQATQGNISSDRGKKRTVTAAGAENIQQKTDEKVDESGPPAPSKPRRGRRPKSESQGNATKNDDLNKPINKGRKRAAVGQESPGGLEAGNAKAPKLQDLAKKAAPAERQIDLQR

SEQ ID NO: 3768 - protein, 1042 aa, Homo sapiens
MDKILEGLVSSSHPLPLKRVIVRKVVESAEHWLDEAQCEAMFDLTTRLILEGQDPFQRQVGHQVLEAYARYHRPEFESFFNKTFVLGLLHQGYHSLDRKDVAILDYIHNGLKLIMSCPSVLDLFSLLQVEVLRMVCERPEPQLCARLSDLLTDFVQCIPKGKLSITFCQQLVRTIGHFQCVSTQERELREYVSQVTKVSNLLQNIWKAEPATLLPSLQEVFASISSTDASFEPSVALASLVQHIPLQMITVLIRSLTTDPNVKDASMTQALCRMIDWLSWPLAQHVDTWVIALLKGLAAVQKFTILIDVTLLKIELVFNRLWFPLVRPGALAVLSHMLLSFQHSPEAFHLIVPHVVNLVHSFKNDGLPSSTAFLVQLTELIHCMMYHYSGFPDLYEPILEAIKDFPKPSEEKIKLILNQSAWTSQSNSLASCLSRLSGKSETGKTGLINLGNTCYMNSVIQALFMATDFRRQVLSLNLNGCNSLMKKLQHLFAFLAHTQREAYAPRIFFEASRPPWFTPRSQQDCSEYLRFLLDRLHEEEKILKVQASHKPSEILECSETSLQEVASKAAVLTETPRTSDGEKTLIEKMFGGKLRTHIRCLNCRSTSQKVEAFTDLSLAFCPSSSLENMSVQDPASSPSIQDGGLMQASVPGPSEEPVVYNPTTAAFICDSLVNEKTIGSPPNEFYCSENTSVPNESNKILVNKDVPQKPGGETTPSVTDLLNYFLAPEILTGDNQYYCENCASLQNAEKTMQITEEPEYLILTLLRFSYDQKYHVRRKILDNVSLPLVLELPVKRITSFSSLSESWSVDVDFTDLSENLAKKLKPSGTDEASCTKLVPYLLSSVVVHSGISSESGHYYSYARNITSTDSSYQMYHQSEALALASSQSHLLGRDSPSAVFEQDLENKEMSKEWFLFNDSRVTFTSFQSVQKITSRFPKDTAYVLLYKKQHSTNGLSGNNPTSGLWINGDPPLQKELMDAITKDNKLYLQEQELNARARALQAASASCSFRPNGFDDNDPPGSCGPTGGGGGGGFNTVGRLVF

SEQ ID NO: 3769 - protein, 316 aa, Homo sapiens
MPTFNGSVFMPSAFILIGIPGLESVQCWIGIPFSAMYLIGVIGNSLILVIIKYENSLHIPMYIFLAMLAATDIALNTCILPKMLGIFWFHLPEISFDACLFQMWLIHSFQAIESGILLAMALDRYVAICIPLRHATIFSQQFLTHIGLGVTLRAAILIIPSLGLIKCCLKHYRTTVISHSYCEHMAIVKLATEDIRVNKIYGLFVAFAILGFDIIFITLSYVQIFITVFQLPQKEARFKAFNTCIAHICVFLQFYLLAFFSFFTHRFGSHIPPYIHILLSNLYLLVPPFLNPIVYGVKTKQIRDHIVKVFFFKKVT

SEQ ID NO: 3770 - protein, 2608 aa, Homo sapiens
MDGRDFAPPPHLLSERGSLGHRSAAAAARLAPAGPAAQPPAHFQPGKYFPSPLPMASHTASSRLMGSSPASSFMGSFLTSSLGSAASTHPSGPSSSPPEQAYRGSHPTTSQIWFSHSHEAPGYPRFSGSLASTFLPVSHLDHHGNSNVLYGQHRFYGTQKDNFYLRNLPPQPTLLPANHNFPSVARAAPAHPMGSCSRDRDRGEAGSLQKGPKDFDRFLVGKELGREKAGKAAEGKERPAAEEDGGKERHKLVLPVPADGHCREGGPAPRGACEGRPKHLTSCLLNTKVLNGEMGRAALASCAGGMLGRPGTGVVTSGRCAKEAAGPPEPGPAFSECLERRQMLHHTASYAGPPPPLSTAAGSFPCLQLHGGPDGLCPLQDKAPRDLKASGPTFVPSVGHLADKGRPFQAAEACAVAGEGKDRHLEGTMAPDHAAPYGVSYAHLKAEGKGERRPGGFEAALNPRLKGLDYLSSAGPEASFPGLPKSGLDKSGYFELPTSSQDCARPGHQDPLGGKAPQACCTLDKTVGKEAPAGPPGAQKVARIRHQQHLMAAEVEQGGIGAEAKRKSLELASLGYSGPHLPPWGVQAGQGTAMAISEERKAGAYLDPFGSGLQQAALLPQELPAPPDEVSAMKNLLKYSSQALVVGQKAPLVGLGGLKASCIQQEAKFLSSKGPGQSERPDCARSREHDTTHGDGEVRQPPVGIAVALARQKDTVSRSEAAYGTNTARQGRAAPAFKGGGGPRSTHALDLEAEEERTRLCDDRLGLASRELLLQDSKDRVEFARIHPPSSCPGDLAPHLMMQSGQLGGDPAPHTHPHPPWLPRTRSPSLWMGGHSYGLGHPALHQNLPPGFPASVAGPVPSVFPLPQDAPTQLVILPSEPTPHSAPHALADVMDQASLWPPMYGGRGPASHMQHPGQLPVYSRPQLLRQQELYALQQQRAAQFQRKPEDQHLDLEEPAQEKAPKSTHKPVALTPTAPGAPSPAAGPTKLPPCCHPPDPKPPASSPTPPPRPSAPCTLNVCPASSPGPGSRVRSAEEKNGEGQQSTADIITSEPDLPPGYLRPMAGLGFSLPSDVHSSNLEDPETMQTTAPGAQPEPTRTFLPGEPPPCSPRSLEEPGLLSGAREATQDLAATPYPTERGPQGKAADPSPLEGLQELQCAALLEAGGPEATGQAHSTQGGAREERSREEGEQGPSSGASSQVLEQRAGSPGALEDEGEQPAPEEDELEEDELGQQSMEDSEEDCGGAPDNSHPPRALPGLDALVAATINLGDLPSDSPPDPQPPAASGPPSTVPLPHSSGIHGIALLSELADLAIQRQRSERTVPEEEEDVLAFNLQHLATLATAWSLVEAAGLDSSTAPAQPPTANPCSGPRLTPRMQILQRKDTWTPKTKPVCPLKAAIDRLDTQEVGMRVRLAELQRRYKEKQRELARLQRKHDHERDESSRSPARRGPGRPRKRKHSSSLPAPRPTGPLPRSDGKKVKAVRTSLGLLCAELRGGSGGEPAKKRSKLERSVYAGLQTASVEKAQCKKSSCQGGLAPSVAHRVAQLKPKVKSKGLPTGLSSFQQKEATPGGRIREKLSRAKSAKVSGATRHPQPKGHGSRETPRCPAQPSVAASQEAGSGYDSEDCEGLLGTEAPPREAGLLLHTGASVAVLGPSPSSVVKMEANQKAKKKKERQGLLGACRLSSPESEVKIKRRSVKAKVGTTLERAPGQRPPGALGKKKAKGKAKGSLRAEPGATPSRDALFNPSRAFACREEGSQLASERLKRATRKGTVLQPVLRRKNGALSITLATRNAKAILGKGRKLSKVKHKAGKQGKGRAVSRLLESFAVEEDFEFDDNSSFSEEEEDEEEEEEDSGPLSAEQSAALARSCAIHKEDLRDGLPVLIPKEDSLLYAGSVRTLQPPDIYSIVIEGERGNRQRIYSLEQLLQEAVLDVRPQSSRYLPPGTRVCAYWSQKSRCLYPGNVVRGASGDEDEDLDSVVVEFDDGDTGHIAVSNVRLLPPDFKIQCTEPSPALLVSSSCRRTKKVSSEAPPPSEAATPSLSPKAQDGPEALKTPGKKSISKDKAGKAELLTSGAKSPTGASDHFLGRRGSPLLSWSAVAQTKRKAVAAASKGPGVLQNLFQLNGSSKKLRAREALFPVHSVATPIFGNGFRADSFSSLASSYAPFVGGTGPGLPRGAHKLLRAKKAERVEAEKGGRRRAGGEFLVKLDHEGVTSPKNKTCKALLMGDKDFSPKLGRPLPSPSYVHPALVGKDKKGRAPIPPLPMGLALRKYAGQAEFPLPYDSDCHSSFSDEDEDGPGLAAGVPSRFLARLSVSSSSSGSSTSSSSGSVSTSSLCSSDNEDSSYSSDDEDPALLLQTCLTHPVPTLLAQPEALRSKGSGPHAHAQRCFLSRATVAGTGAGSGPSSSSKSKLKRKEALSFSKAKELSRRQRPPSVENRPKISAFLPARQLWKWSGNPTQRRGMKGKARKLFYKAIVRGEETLRVGDCAVFLSAGRPNLPYIGRIESMWESWGSNMVVKVKWFYHPEETKLGKRQCDGKNALYQSCHEDENDVQTISHKCQVVAREQYEQMARSRKCQDRQDLYYLAGTYDPTTGRLVTADGVPILC

SEQ ID NO: 3771 - protein, 638 aa, Homo sapiens
MAAELRMILYEDDSVQVQYVDGSTLQLSPCGSEFLFEKSPPVSAHPLEQPERIRQRTHFVISTYREQLQRALDFRNSSATCPFLSETIIPSERKKHIFIDITEVRWPSLDTDGTMIYMESGIVKITSLDGHAYLCLPRSQHEFTVHFLCKVSQKSDSSAVLSETNNKAPKDKLVEKTGKICIRGNLPGQRLKNKENEFHCQIMKSKETLKKMSCVNGTEGREELPSPGTKHTCVYTWVKQCWSVAACPEEWKYPLSLALHFHNKISNMSKIDAHITQSRFLTSDISEERGKVVSVLPRALSLSCPVPHLHRWNFCDSLLQRQSDEYSYPELVKMVWYKGVTYRLTHQNMNSIEIYSGDGSVFKSEGAYFGNYFTYYSIQEGSGKREEKTYSVNNLPPDRPGSPFTVGSLIKQATRILQHCVKMRLSLSHNYRICCWKMVPGINDSNILPLVLKESLIPSVGRFLAYSDDKVHAIFLDGITLTLNWNFSSPIEKRQVNQGLNLGWCKLTFPDGQEQLIQIEHPEPYERYVTTVTSWCRRLTQTSPREMPTHSSSSVLQENWSVASELEKIQKFNLLLENSGILNQISNKKNEQQSFDHYKPGSSETLLGEVNENRVSIALKKTSEILHDIDCLLSNSKK

SEQ ID NO: 3772 - protein, 447 aa, Homo sapiens
MSALTPTLVFCHMHVETSYIEDNCNQNGAISLIFSLKEEVGALAKVLRLFEENDVNLTHIESRPSRLKKDEYEFFTHLDKRSLPALTNIIKILRHDIGATVHELSRDKKKDTVPWFPRTIQELDRFANQILSYGAELDADHPGFKDPVYRARRKQFADIAYNYRHGQPIPRVEYMEEEKKTWGTVFKTLKSLYKTHACYEYNHIFPLLEKYCGFHEDNIPQLEDVSQFLQTCTGFRLRPVAGLLSSRDFLGGLAFRVFHCTQYIRHGSKPMYTPEPDICHELLGHVPLFSDRSFAQFSQEIGLASLGAPDEYIEKLATIYWFTVEFGLCKQGDSIKAYGAGLLSSFGELQYCLSEKPKLLPLELEKTAIQNYTVTEFQPLYYVAESFNDAKEKVRNFAATIPRPFSVRYDPYTQRIEVLDNTQQLKILADSINSEIGILCSALQKIK

SEQ ID NO: 3773 - protein, 568 aa, Homo sapiens
MSGGASATGPRRGPPGLEDTTSKKKQKDRANQESKDGDPRKETGSRYVAQAGLEPLASGDPSASASHAAGITGSRHRTRLFFPSSSGSASTPQEEQTKEELLLDWRQSAEEVIVKLRVGVGPLQLEDVDAAFTDTDCVVRFAGGQQWGGVFYAEIKSSCAKVQTRKGSLLHLTLPKKVPMLTWPSLLKKPLGTQELVPGLRCQENGQELSPIALEPGPEPHRAKQEARNQKRAQGRGEVGAGAGPGAQAGPSAKRAVHLCRGPEGDGSRDDPGPRGDAPPFVADPATQVEADEQLCIPPLNSQTCLLGSEENLAPLAGEKAVPPGNDPVSPAMVRSRNPGKDDCAKEEMAVAADAATLVDEPESMVNLAFVKNDSYEKGPDSVVVHVYVKEICRDTSRVLFREQDFTLIFQTRDGNFLRLHPGCGPHTTFRWQVKLRNLIEPEQCTFCFTASRIDICLRKRQSQRWGGLEAPAARGAVGGAKVAVPTGPTPLDSTPPGGAPHPLTGQEEARAVEKDKSKARSEDTGLDSVATRTPMEHVTPKPETHLASPKPTCMVPPMPHSPVSGDS

SEQ ID NO: 3774 - protein, 1271 aa, Homo sapiens
MVDPVGFAEAWKAQFPDSEPPRMELRSVGDIEQELERCKASIRRLEQEVNQERFRMIYLQTLLAKEKKSYDRQRWGFRRAAQAPDGASEPRASASRPQPAPADGADPPPAEEPEARPDGEGSPGKARPGTARRPGAAASGERDDRGPPASVAALRSNFERIRKGHGQPGADAEKPFYVNVEFHHERGLVKVNDKEVSDRISSLGSQAMQMERKKSQHGAGSSVGDASRPPYRGRSSESSCGVDGDYEDAELNPRFLKDNLIDANGGSRPPWPPLEYQPYQSIYVGGMMEGEGKGPLLRSQSTSEQEKRLTWPRRSYSPRSFEDCGGGYTPDCSSNENLTSSEEDFSSGQSSRVSPSPTTYRMFRDKSRSPSQNSQQSFDSSSPPTPQCHKRHRHCPVVVSEATIVGVRKTGQIWPNDGEGAFHGDADGSFGTPPGYGCAADRAEEQRRHQDGLPYIDDSPSSSPHLSSKGRGSRDALVSGALESTKASELDLEKGLEMRKWVLSGILASEETYLSHLEALLLPMKPLKAAATTSQPVLTSQQIETIFFKVPELYEIHKEFYDGLFPRVQQWSHQQRVGDLFQKLASQLGVYRAFVDNYGVAMEMAEKCCQANAQFAEISENLRARSNKDAKDPTTKNSLETLLYKPVDRVTRSTLVLHDLLKHTPASHPDHPLLQDALRISQNFLSSINEEITPRRQSMTVKKGEHRQLLKDSFMVELVEGARKLRHVFLFTDLLLCTKLKKQSGGKTQQYDCKWYIPLTDLSFQMVDELEAVPNIPLVPDEELDALKIKISQIKNDIQREKRANKGSKATERLKKKLSEQESLLLLMSPSMAFRVHSRNGKSYTFLISSDYERAEWRENIREQQKKCFRSFSLTSVELQMLTNSCVKLQTVHSIPLTINKEDDESPGLYGFLNVIVHSATGFKQSSNLYCTLEVDSFGYFVNKAKTRVYRDTAEPNWNEEFEIELEGSQTLRILCYEKCYNKTKIPKEDGESTDRLMGKGQVQLDPQALQDRDWQRTVIAMNGIEVKLSVKFNSREFSLKRMPSRKQTGVFGVKIAVVTKRERSKVPYIVRQCVEEIERRGMEEVGIYRVSGVATDIQALKAAFDVNNKDVSVMMSEMDVNAIAGTLKLYFRELPEPLFTDEFYPNFAEGIALSDPVAKESCMLNLLLSLPEANLLTFLFLLDHLKRVAEKEAVNKMSLHNLATVFGPTLLRPSEKESKLPANPSQPITMTDSWSLEVMSQVQVLLYFLQLEAIPAPDSKRQSILFSTEV

SEQ ID NO: 3775 - protein, 597 aa, Homo sapiens
MFASCHCVPRGRRTMKMIHFRSSSVKSLSQEMRCTIRLLDDSEISCHIQRETKGQFLIDHICNYYSLLEKDYFGIRYVDPEKQRHWLEPNKSIFKQMKTHPPYTMCFRVKFYPHEPLKIKEELTRYLLYLQIKRDIFHGRLLCSFSDAAYLGACIVQAELGDYDPDEHPENYISEFEIFPKQSQKLERKIVEIHKNELRGQSPPVAEFNLLLKAHTLETYGVDPHPCKDSTGTTTFLGFTAAGFVVFQGNKRIHLIKWPDVCKLKFEGKTFYVIGTQKEKKAMLAFHTSTPAACKHLWKCGVENQAFYKYAKSSQIKTVSSSKIFFKGSRFRYSGKVAKEVVEASSKIQREPPEVHRANITQSRSSHSLNKQLIINMEPLQPLLPSPSEQEEELPLGEGVPLPKEENISAPLISSSPVKAAREYEDPPSEEEDKIKEEPLTISELVYNPSASLLPTPVDDDEIDMLFDCPSRLELEREDTDSFEDLEADENAFLIAEEEELKEARRALSWSYDILTGHIRVNPLVKSFSRLLVVGLGLLLFVFPLLLLLLESGIDLSFLCEIRQTPEFEQFHYEYYCPLKEWVAGKVHLILYMLGCS

SEQ ID NO: 3776 - protein, 980 aa, Homo sapiens
MALAVLRVLEPFPTETPPLAVLLPPGGPWPAAELGLVLALRPAGESPAGPALLVAALEGPDAGTEEQGPGPPQLLVSRALLRLLALGSGAWVRARAVRRPPALGWALLGTSLGPGLGPRVGPLLVRRGETLPVPGPRVLETRPALQGLLGPGTRLAVTELRGRARLCPESGDSSRPPPPPVVSSFAVSGTVRRLQGVLGGTGDSLGVSRSCLRGLGLFQGEWVWVAQARESSNTSQPHLARVQVLEPRWDLSDRLGPGSGPLGEPLADGLALVPATLAFNLGCDPLEMGELRIQRYLEGSIAPEDKGSCSLLPGPPFARELHIEIVSSPHYSTNGNYDGVLYRHFQIPRVVQEGDVLCVPTIGQVEILEGSPEKLPRWREMFFKVKKTVGEAPDGPASAYLADTTHTSLYMVGSTLSPVPWLPSEESTLWSSLSPPGLEALVSELCAVLKPRLQPGGALLTGTSSVLLRGPPGCGKTTVVAAACSHLGLHLLKVPCSSLCAESSGAVETKLQAIFSRARRCRPAVLLLTAVDLLGRDRDGLGEDARVMAVLRHLLLNEDPLNSCPPLMVVATTSRAQDLPADVQTAFPHELEVPALSEGQRLSILRALTAHLPLGQEVNLAQLARRCAGFVVGDLYALLTHSSRAACTRIKNSGLAGGLTEEDEGELCAAGFPLLAEDFGQALEQLQTAHSQAVGAPKIPSVSWHDVGGLQEVKKEILETIQLPLEHPELLSLGLRRSGLLLHGPPGTGKTLLAKAVATECSLTFLSVKGPELINMYVGQSEENVREVFARARAAAPCIIFFDELDSLAPSRGRSGDSGGVMDRVVSQLLAELDGLHSTQDVFVIGATNRPDLLDPALLRPGRFDKLVFVGANEDRASQLRVLSAITRKFKLEPSVSLVNVLDCCPPQLTGADLYSLCSDAMTAALKRRVHDLEEGLEPGSSALMLTMEDLLQAAARLQPSVSEQELLRYKRIQRKFAAC

SEQ ID NO: 3777 - protein, 407 aa, Homo sapiens
MDNVLPVDSDLSPNISTNTSEPNQFVQPAWQIVLWAAAYTVIVVTSVVGNVVVMWIILAHKRMRTVTNYFLVNLAFAEASMAAFNTVVNFTYAVHNEWYYGLFYCKFHNFFPIAAVFASIYSMTAVAFDRYMAIIHPLQPRLSATATKVVICVIWVLALLLAFPQGYYSTTETMPSRVVCMIEWPEHPNKIYEKVYHICVTVLIYFLPLLVIGYAYTVVGITLWASEIPGDSSDRYHEQVSAKRKVVKMMIVVVCTFAICWLPFHIFFLLPYINPDLYLKKFIQQVYLAIMWLAMSSTMYNPIIYCCLNDRFRLGFKHAFRCCPFISAGDYEGLEMKSTRYLQTQGSVYKVSRLETTISTVVGAHEEEPEDGPKATPSSLDLTSNCSSRSDSKTMTESFSFSSNVLS

SEQ ID NO: 3778 - protein, 2009 aa, Homo sapiens
MEQTVLVPPGPDSFNFFTRESLAAIERRIAEEKAKNPKPDKKDDDENGPKPNSDLEAGKNLPFIYGDIPPEMVSEPLEDLDPYYINKKTFIVLNKGKAIFRFSATSALYILTPFNPLRKIAIKILVHSLFSMLIMCTILTNCVFMTMSNPPDWTKNVEYTFTGIYTFESLIKIIARGFCLEDFTFLRDPWNWLDFTVITFAYVTEFVDLGNVSALRTFRVLRALKTISVIPGLKTIVGALIQSVKKLSDVMILTVFCLSVFALIGLQLFMGNLRNKCIQWPPTNASLEEHSIEKNITVNYNGTLINETVFEFDWKSYIQDSRYHYFLEGFLDALLCGNSSDAGQCPEGYMCVKAGRNPNYGYTSFDTFSWAFLSLFRLMTQDFWENLYQLTLRAAGKTYMIFFVLVIFLGSFYLINLILAVVAMAYEEQNQATLEEAEQKEAEFQQMIEQLKKQQEAAQQAATATASEHSREPSAAGRLSDSSSEASKLSSKSAKERRNRRKKRKQKEQSGGEEKDEDEFQKSESEDSIRRKGFRFSIEGNRLTYEKRYSSPHQSLLSIRGSLFSPRRNSRTSLFSFRGRAKDVGSENDFADDEHSTFEDNESRRDSLFVPRRHGERRNSNLSQTSRSSRMLAVFPANGKMHSTVDCNGVVSLVGGPSVPTSPVGQLLPEVIIDKPATDDNGTTTETEMRKRRSSSFHVSMDFLEDPSQRQRAMSIASILTNTVEELEESRQKCPPCWYKFSNIFLIWDCSPYWLKVKHVVNLVVMDPFVDLAITICIVLNTLFMAMEHYPMTDHFNNVLTVGNLVFTGIFTAEMFLKIIAMDPYYYFQEGWNIFDGFIVTLSLVELGLANVEGLSVLRSFRLLRVFKLAKSWPTLNMLIKIIGNSVGALGNLTLVLAIIVFIFAVVGMQLFGKSYKDCVCKIASDCQLPRWHMNDFFHSFLIVFRVLCGEWIETMWDCMEVAGQAMCLTVFMMVMVIGNLVVLNLFLALLLSSFSADNLAATDDDNEMNNLQIAVDRMHKGVAYVKRKIYEFIQQSFIRKQKILDEIKPLDDLNNKKDSCMSNHTAEIGKDLDYLKDVNGTTSGIGTGSSVEKYIIDESDYMSFINNPSLTVTVPIAVGESDFENLNTEDFSSESDLEESKEKLNESSSSSEGSTVDIGAPVEEQPVVEPEETLEPEACFTEGCVQRFKCCQINVEEGRGKQWWNLRRTCFRIVEHNWFETFIVFMILLSSGALAFEDIYIDQRKTIKTMLEYADKVFTYIFILEMLLKWVAYGYQTYFTNAWCWLDFLIVDVSLVSLTANALGYSELGAIKSLRTLRALRPLRALSRFEGMRVVVNALLGAIPSIMNVLLVCLIFWLIFSIMGVNLFAGKFYHCINTTTGDRFDIEDVNNHTDCLKLIERNETARWKNVKVNFDNVGFGYLSLLQVATFKGWMDIMYAAVDSRNVELQPKYEESLYMYLYFVIFIIFGSFFTLNLFIGVIIDNFNQQKKKFGGQDIFMTEEQKKYYNAMKKLGSKKPQKPIPRPGNKFQGMVFDFVTRQVFDISIMILICLNMVTMMVETDDQSEYVTTILSRINLVFIVLFTGECVLKLISLRHYYFTIGWNIFDFVVVILSIVGMFLAELIEKYFVSPTLFRVIRLARIGRILRLIKGAKGIRTLLFALMMSLPALFNIGLLLFLVMFIYAIFGMSNFAYVKREVGIDDMFNFETFGNSMICLFQITTSAGWDGLLAPILNSKPPDCDPNKVNPGSSVKGDCGNPSVGIFFFVSYIIISFLVVVNMYIAVILENFSVATEESAEPLSEDDFEMFYEVWEKFDPDATQFMEFEKLSQFAAALEPPLNLPQPNKLQLIAMDLPMVSGDRIHCLDILFAFTKRVLGESGEMDALRIQMEERFMASNPSKVSYQPITTTLKRKQEEVSAVIIQRAYRRHLLKRTVKQASFTYNKNKIKGGANLLIKEDMIIDRINENSITEKTDLTMSTAACPPSYDRVTKPIVEKHEQEGKDEKAKGK

SEQ ID NO: 3779 - protein, 136 aa, Homo sapiens
MRTPGPLPVLLLLLAGAPAARPTPPTCYSRMRALSQEITRDFNLLQVSEPSEPCVRYLPRLYLDIHNYCVLDKLRDFVASPPCWKVAQVDSLKDKARKLYTIMNSFCRRDLVFLLDDCNALEYPIPVTTVLPDRQR

SEQ ID NO: 3780 - protein, 441 aa, Homo sapiens
MVHIKKGELTQEEKELLEVIGKGTVQEAGTLLSSKNVRVNCLDENGMTPLMHAAYKGKLDMCKLLLRHGADVNCHQHEHGYTALMFAALSGNKDITWVMLEAGAETDVVNSVGRTAAQMAAFVGQHDCVTIINNFFPRERLDYYTKPQGLDKEPKLPPKLAGPLHKIITTTNLHPVKIVMLVNENPLLTEEAALNKCYRVMDLICEKCMKQRDMNEVLAMKMHYISCIFQKCINFLKDGENKLDTLIKSLLKGRASDGFPVYQEKIIRESIRKFPYCEATLLQQLVRSIAPVEIGSDPTAFSVLTQAITGQVGFVDVEFCTTCGEKGASKRCSVCKMVIYCDQTCQKTHWFTHKKICKNLKDIYEKQQLEAAKEKRQEENHGKLDVNSNCVNEEQPEAEVGISQKDSNPEDSGEGKKESLESEAELEGLQDAPAGPQVSEE

SEQ ID NO: 3781 - protein, 1427 aa, Homo sapiens
MSMLKPSGLKAPTKILKPGSTALKTPTAVVAPVEKTISSEKASSTPSSETQEEFVDDFRVGERVWVNGNKPGFIQFLGETQFAPGQWAGIVLDEPIGKNDGSVAGVRYFQCEPLKGIFTRPSKLTRKVQAEDEANGLQTTPASRATSPLCTSTASMVSSSPSTPSNIPQKPSQPAAKEPSATPPISNLTKTASESISNLSEAGSIKKGERELKIGDRVLVGGTKAGVVRFLGETDFAKGEWCGVELDEPLGKNDGAVAGTRYFQCQPKYGLFAPVHKVTKIGFPSTTPAKAKANAVRRVMATTSASLKRSPSASSLSSMSSVASSVSSRPSRTGLLTETSSRYARKISGTTALQEALKEKQQHIEQLLAERDLERAEVAKATSHVGEIEQELALARDGHDQHVLELEAKMDQLRTMVEAADREKVELLNQLEEEKRKVEDLQFRVEEESITKGDLETQTKLEHARIKELEQSLLFEKTKADKLQRELEDTRVATVSEKSRIMELEKDLALRVQEVAELRRRLESNKPAGDVDMSLSLLQEISSLQEKLEVTRTDHQREITSLKEHFGAREETHQKEIKALYTATEKLSKENESLKSKLEHANKENSDVIALWKSKLETAIASHQQAMEELKVSFSKGLGTETAEFAELKTQIEKMRLDYQHEIENLQNQQDSERAAHAKEMEALRAKLMKVIKEKENSLEAIRSKLDKAEDQHLVEMEDTLNKLQEAEIKVKELEVLQAKCNEQTKVIDNFTSQLKATEEKLLDLDALRKASSEGKSEMKKLRQQLEAAEKQIKHLEIEKNAESSKASSITRELQGRELKLTNLQENLSEVSQVKETLEKELQILKEKFAEASEEAVSVQRSMQETVNKLHQKEEQFNMLSSDLEKLRENLADMEAKFREKDEREEQLIKAKEKLENDIAEIMKMSGDNSSQLTKMNDELRLKERDVEELQLKLTKANENASFLQKSIEDMTVKAEQSQQEAAKKHEEEKKELERKLSDLEKKMETSHNQCQELKARYERATSETKTKHEEILQNLQKTLLDTEDKLKGAREENSGLLQELEELRKQADKAKAAQTAEDAMQIMEQMTKEKTETLASLEDTKQTNAKLQNELDTLKENNLKNVEELNKSKELLTVENQKMEEFRKEIETLKQAAAQKSQQLSALQEENVKLAEELGRSRDEVTSHQKLEEERSVLNNQLLEMKKRESKFIKDADEEKASLQKSISITSALLTEKDAELEKLRNEVTVLRGENASAKSLHSVVQTLESDKVKLELKVKNLELQLKENKRQLSSSSGNTDTQADEDERAQESQIDFLNSVIVDLQRKNQDLKMKVEMMSEAALNGNGDDLNNYDSDDQEKQSKKKPRLFCDICDCFDLHDTEDCPTQAQMSEDPPHSTHHGSRGEERPYCEICEMFGHWATNCNDDETF

SEQ ID NO: 3782 - protein, 987 aa, Homo sapiens
MDVTEDEEEEIKLEINMLKKYSHHRNIATYYGAFIKKSPPGHDDQLWLVMEFCGAGSITDLVKNTKGNTLKEDWIAYISREILRGLAHLHIHHVIHRDIKGQNVLLTENAEVKLDETEYEYSGSEEEEEEVPEQEGEPSSIVNVPGESTLRRDFLRLQQENKERSEALRRQQLLQEQQLREQEEYKRQLLAERQKRIEQQKEQRRRLEEQQRREREARRQQEREQRRREQEEKRRLEELERRRKEEEERRRAEEEKRRVEREQEYIRRQLEEEQRHLEVLQQQLLQEQAMLLECRWREMEEHRQAERLQRQLQQEQAYLLSLQHDHRRPHPQHSQQPPPPQQERSKPSFHAPEPKAHYEPADRAREVPVRTTSRSPVLSRRDSPLQGSGQQNSQAGQRNSTSSIEPRLLWERVEKLVPRPGSGSSSGSSNSGSQPGSHPGSQSGSGERFRVRSSSKSEGSPSQRLENAVKKPEDKKEVFRPLKPAGEVDLTALAKELRAVEDVRPPHKVTDYSSSSEESGTTDEEDDDVEQEGADESTSGPEDTRAASSLNLSNGETESVKTMIVHDDVESEPAMTPSKEGTLIVRQTQSASSTLQKHKSSSSFTPFIDPRLLQISPSSGTTVTSVVGFSCDGMRPEAIRQDPTRKGSVVNVNPTNTRPQSDTPEIRKYKKRFNSEILCAALWGVNLLVGTESGLMLLDRSGQGKVYPLINRRRFQQMDVLEGLNVLVTISGKKDKLRVYYLSWLRNKILHNDPEVEKKQGWTTVGDLEGCVHYKVVKYERIKFLVIALKSSVEVYAWAPKPYHKFMAFKSFGELVHKPLLVDLTVEEGQRLKVIYGSCAGFHAVDVDSGSVYDIYLPTHIQCSIKPHAIIILPNTDGMELLVCYEDEGVYVNTYGRITKDVVLQWGEMPTSVAYIRSNQTMGWGEKAIEIRSVETGHLDGVFMHKRAQRLKFLCERNDKVFFASVRSGGSSQVYFMTLGRTSLLSW

SEQ ID NO: 3783 - protein, 729 aa, Homo sapiens
MSTRTPLPTVNERDTENHTSHGDGRQEVTSRTSRSGARCRNSIASCADEQPHIGNYRLLKTIGKGNFAKVKLARHILTGREVAIKIIDKTQLNPTSLQKLFREVRIMKILNHPNIVKLFEVIETEKTLYLIMEYASGGEVFDYLVAHGRMKEKEARSKFRQIVSAVQYCHQKRIVHRDLKAENLLLDADMNIKIADFGFSNEFTVGGKLDTFCGSPPYAAPELFQGKKYDGPEVDVWSLGVILYTLVSGSLPFDGQNLKELRERVLRGKYRIPFYMSTDCENLLKRFLVLNPIKRGTLEQIMKDRWINAGHEEDELKPFVEPELDISDQKRIDIMVGMGYSQEEIQESLSKMKYDEITATYLLLGRKSSELDASDSSSSSNLSLAKVRPSSDLNNSTGQSPHHKVQRSVSSSQKQRRYSDHAGPAIPSVVAYPKRSQTSTADSDLKEDGISSRKSSGSAVGGKGIAPASPMLGNASNPNKADIPERKKSSTVPSSNTASGGMTRRNTYVCSERTTADRHSVIQNGKENSTIPDQRTPVASTHSISSAATPDRIRFPRGTASRSTFHGQPRERRTATYNGPPASPSLSHEATPLSQTRSRGSTNLFSKLTSKLTRSRNVSAEQKDENKEAKPRSLRFTWSMKTTSSMDPGDMMREIRKVLDANNCDYEQRERFLLFCVHGDGHAENLVQWEMEVCKLPRLSLNGVRFKRISGTSIAFKNIASKIANELKL

SEQ ID NO: 3784 - protein, 524 aa, Homo sapiens
MELGPEPPHRRRLLFACSPPPASQPVVKALFGASAAGGLSPVTNLTVTMDQLQGLGSDYEQPLEVKNNSNLQRMGSSESTDSGFCLDSPGPLDSKENLENPMRRIHSLPQKLLGCSPALKRSHSDSLDHDIFQLIDPDENKENEAFEFKKPVRPVSRGCLHSHGLQEGKDLFTQRQNSAPARMLSSNERDSSEPGNFIPLFTPQSPVTATLSDEDDGFVDLLDGENLKNEEETPSCMASLWTAPLVMRTTNLDNRCKLFDSPSLCSSSTRSVLKRPERSQEESPPGSTKRRKSMSGASPKESTNPEKAHETLHQSLSLASSPKGTIENILDNDPRDLIGDFSKGYLFHTVAGKHQDLKYISPEIMASVLNGKFANLIKEFVIIDCRYPYEYEGGHIKGAVNLHMEEEVEDFLLKKPIVPTDGKRVIVVFHCEFSSERGPRMCRYVRERDRLGNEYPKLHYPELYVLKGGYKEFFMKCQSYCEPPSYRPMHHEDFKEDLKKFRTKSRTWAGEKSKREMYSRLKKL

SEQ ID NO: 3785 - protein, 370 aa, Homo sapiens
MSHPSPQAKPSNPSNPRVFFDVDIGGERVGRIVLELFADIVPKTAENFRALCTGEKGIGHTTGKPLHFKGCPFHRIIKKFMIQGGDFSNQNGTGGESIYGEKFEDENFHYKHDREGLLSMANAGRNTNGSQFFITTVPTPHLDGKHVVFGQVIKGIGVARILENVEVKGEKPAKLCVIAECGELKEGDDGGIFPKDGSGDSHPDFPEDADIDLKDVDKILLITEDLKNIGNTFFKSQNWEMAIKKYAEVLRYVDSSKAVIETADRAKLQPIALSCVLNIGACKLKMSNWQGAIDSCLEALELDPSNTKALYRRAQGWQGLKEYDQALADLKKAQGIAPEDKAIQAELLKVKQKIKAQKDKEKAVYAKMFA

SEQ ID NO: 3786 - protein, 1076 aa, Homo sapiens
MAEFTSYKETASSRHLRFKLQSLSRRLDELEEATKNLQKAEDELLDLQDKVIQAEGSNSSMLAEIEVLRQRVLRIEGKDEEIKRAEDLCRLMKEKLEEEENLTRELKSEIERLQKRMAELEKLEEAFSRSKNDCTQLCLSLNEERNLTKKISSELEMLRVKVKELESSEDRLDKTEQSLASELEKLKSLTLSFVSERKYLNEKEKENEKLIKELTQKLEQNKKMNRDYTRNASNLERNDLRIEDGISSTLPSKESRRKGGLDYLKQVENETRNKSENEKNRNQEDNKVKDLNQEIEKLKTQIKHFESLEEELKKMKSKNNDLQDNYLSEQNKNKLLASQLEEIKLQIKKQKELENGEVEGEDAFLSSKGRHERTKFRGHGSEASVSKHTARELSPQHKRERLRNREFALNNENYSLSNRQVSSPSFTNRRAAKASHMGVSTDSGTQETKKTEDRFVPGSSQSEGKKSREQPSVLSRYPPAAQEHSKAWKGTSKPGTESGLKGKVEKTTRTFSDTTHGSVPSDPLGRADKASDTSSETVFGKRGHVLGNGSQVTQAANSGCSKAIGALASSRRSSSEGLSKGKKAANGLEADNSCPNSKAPVLSKYPYSCRSQENILQGFSTSHKEGVNQPAAVVMEDSSPHEALRCRVIKSSGREKPDSDDDLDIASLVTAKLVNTTITPEPEPKPQPNSREKAKTRGAPRTSLFENDKDAGMENESVKSVRASTNTMELPDTNGAGVKSQRPFSPREALRSRAIIKPVIVDKDVKKIMGGSGTETTLEKQKPVSKPGPNKVTSSITIYPSDSSSPRAAPGEALRERHTSTSNIQVGLAELTSVSNHVSSPFELSIHKHDITLQLAEAERMADGPLKDRPETVVSRSSIIIKPSDPVERNSHAPPAETIRWKSHSAPSEVGFSDARHVTVRNAWKSRRDLKSLEDPPTRIGKNVESTNSNAYTQRSSTDFSELEQPRSCLFEQGTRRVGPSSGDAPEPSSRRTQSSLTVSEVLTRRNRVGDTITVAAWNHSASMEEEGEDCTLSVYRQLHNSLDPSELPGKQGLPESGRVRAEERLRPTRPCAEEN

SEQ ID NO: 3787 - protein, 1439 aa, Homo sapiens
MASSETEIRWAEPGLGKGPQRRRWAWAEDKRDVDRSSSQSWEEERLFPNATSPELLEDFRLAQQHLPPLEWDPHPQPDGHQDSESGETSGEEAEAEDVDSPASSHEPLAWLPQQGRQLDMTEEEPDGTLGSLEVEEAGESSSRLGYEAGLSLEGHGNTSPMALGHGQARGWVASGEQASGDKLSEHSEVNPSVELSPARSWSSGTVSLDHPSDSLDSTWEGETDGPQPTALAETLPEGPSHHLLSPDGRTGGSVARATPMEFQDSSAPPAQSPQHATDRWRRETTRFFCPQPKEHIWKQTKTSPKPLPSRFIGSISPLNPQPRPTRQGRPLPRQGATLAGRSSSNAPKYGRGQLNYPLPDFSKVGPRVRFPKDESYRPPKSRSHNRKPQAPARPLIFKSPAEIVQEVLLSSGEAALAKDTPPAHPITRVPQEFQTPEQATELVHQLQEDYHRLLTKYAEAENTIDQLRLGAKVNLFSDPPQPNHSIHTGMVPQGTKVLSFTIPQPRSAEWWPGPAEDPQASAASGWPSARGDLSPSSLTSMPTLGWLPENRDISEDQSSAEQTQALASQASQFLAKVESFERLIQAGRLMPQDQVKGFQRLKAAHAALEEEYLKACREQHPAQPLAGSKGTPGRFDPRRELEAEIYRLGSCLEELKEHIDQTQQEPEPPGSDSALDSTPALPCLHQPTHLPAPSGQAPMPAIKTSCPEPATTTAAASTGPCPLHVNVEVSSGNSEVEDRPQDPLARLRHKELQMEQVYHGLMERYLSVKSLPEAMRMEEEEEGEEEEEEEGGGDSLEVDGVAATPGKAEATRVLPRQCPVQAEKSHGAPLEEATEKMVSMKPPGFQASLARDGHMSGLGKAEAAPPGPGVPPHPPGTKSAASHQSSMTSLEGSGISERLPQKPLHRGGGPHLEETWMASPETDSGFVGSETSRVSPLTQTPEHRLSHISTAGTLAQPFAASVPRDGASYPKARGSLIPRRATEPSTPRSQAQRYLSSPSGPLRQRAPNFSLERTLAAEMAVPGSEFEGHKRISEQPLPNKTISPPPAPAPAAAPLPCGPTETIPSFLLTRAGRDQAICELQEEVSRLRLRLEDSLHQPLQGSPTRPASAFDRPARTRGRPADSPATWGSHYGSKSTERLPGEPRGEEQIVPPGRQRARSSSVPREVLRLSLSSESELPSLPLFSEKSKTTKDSPQAARDGKRGVGSAGWPDRVTFRGQYTGHEYHVLSPKAVPKGNGTVSCPHCRPIRTQDAGGAVTGDPLGPPPADTLQCPLCGQVGSPPEADGPGSATSGAEKATTRRKASSTPSPKQRSKQAGSSPRPPPGLWYLATAPPAPAPPAFAYISSVPIMPYPPAAVYYAPAGPTSAQPAAKWPPTASPPPARRHRHSIQLDLGDLEELNKALSRAVQAAESVRSTTRQMRSSLSADLRQAHSLRGSCLF

SEQ ID NO: 3788 - protein, 393 aa, Homo sapiens
METTMGFMDDNATNTSTSFLSVLNPHGAHATSFPFNFSYSDYDMPLDEDEDVTNSRTFFAAKIVIGMALVGIMLVCGIGNFIFIAALVRYKKLRNLTNLLIANLAISDFLVAIVCCPFEMDYYVVRQLSWEHGHVLCTSVNYLRTVSLYVSTNALLAIAIDRYLAIVHPLRPRMKCQTATGLIALVWTVSILIAIPSAYFTTETVLVIVKSQEKIFCGQIWPVDQQLYYKSYFLFIFGIEFVGPVVTMTLCYARISRELWFKAVPGFQTEQIRKRLRCRRKTVLVLMCILTAYVLCWAPFYGFTIVRDFFPTVFVKEKHYLTAFYIVECIAMSNSMINTLCFVTVKNDTVKYFKKIMLLHWKASYNGGKSSADLDLKTIGMPATEEVDCIRLK

SEQ ID NO: 3789 - protein, 312 aa, Homo sapiens
MALRPEDPSSGFRHGNVVAFIIEKMARHTKGPEFYFENISLSWEEVEDKLRAILEDSEVPSEVKEACTWGSLALGVRFAHRQGQLQNRRVQWLQGFAKLHRSAALVLASNLTELKEQQEMECNEATFQLQLTETSLAEVQRERDMLRWKLFHAELAPPQGQGQATVFPGLATAGGDWTEGAGEQEKEAVAAAGAAGGKGEERYAEAGPAPAEVLQGLGGGFRQPLGAIVAGKLHLCGAEGERSQVSTNSHVCLLWAWVHSLTGASSCPAPYLIHILIPMPFVRLLSHTQYTPFTSKGHRTGSNSDAFQLGGL

SEQ ID NO: 3790 - protein, 345 aa, Homo sapiens
MPMQLLLTDFIIFSIRFIINSMEARNQTAISKFLLLGLIEDPELQPVLFSLFLSMYLVTILGNLLILLAVISDSHLHTPMYFFLSNLSFLDICLSTTTIPKMLVNIQAQNRSITYSGCLTQICFVLFFAGLENCLLAAMAYDRYVAICHPLRYTVIMNPRLCGLLILLSLLTSVVNALLLSLMVLRLSFCTDLEIPLFFCELAQVIQLTCSDTLINNILIYFAACIFGGVPLSGIILSYTQITSCVLRMPSASGKHKAVSTCGSHLSIVLLFYGAGLGVYISSVVTDSPRKTAVASVMYSVFPQMVNPFIYSLRNKDMKGTLRKFIGRIPSLLWCAICFGFRFLE

SEQ ID NO: 3791 - protein, 1382 aa, Homo sapiens
MATGGRRGAAAAPLLVAVAALLLGAAGHLYPGEVCPGMDIRNNLTRLHELENCSVIEGHLQILLMFKTRPEDFRDLSFPKLIMITDYLLLFRVYGLESLKDLFPNLTVIRGSRLFFNYALVIFEMVHLKELGLYNLMNITRGSVRIEKNNELCYLATIDWSRILDSVEDNYIVLNKDDNEECGDICPGTAKGKTNCPATVINGQFVERCWTHSHCQKVCPTICKSHGCTAEGLCCHSECLGNCSQPDDPTKCVACRNFYLDGRCVETCPPPYYHFQDWRCVNFSFCQDLHHKCKNSRRQGCHQYVIHNNKCIPECPSGYTMNSSNLLCTPCLGPCPKVCHLLEGEKTIDSVTSAQELRGCTVINGSLIINIRGGNNLAAELEANLGLIEEISGYLKIRRSYALVSLSFFRKLRLIRGETLEIGNYSFYALDNQNLRQLWDWSKHNLTITQGKLFFHYNPKLCLSEIHKMEEVSGTKGRQERNDIALKTNGDQASCENELLKFSYIRTSFDKILLRWEPYWPPDFRDLLGFMLFYKEAPYQNVTEFDGQDACGSNSWTVVDIDPPLRSNDPKSQNHPGWLMRGLKPWTQYAIFVKTLVTFSDERRTYGAKSDIIYVQTDATNPSVPLDPISVSNSSSQIILKWKPPSDPNGNITHYLVFWERQAEDSELFELDYCLKGLKLPSRTWSPPFESEDSQKHNQSEYEDSAGECCSCPKTDSQILKELEESSFRKTFEDYLHNVVFVPRKTSSGTGAEDPRPSRKRRSLGDVGNVTVAVPTVAAFPNTSSTSVPTSPEEHRPFEKVVNKESLVISGLRHFTGYRIELQACNQDTPEERCSVAAYVSARTMPEAKADDIVGPVTHEIFENNVVHLMWQEPKEPNGLIVLYEVSYRRYGDEELHLCVSRKHFALERGCRLRGLSPGNYSVRIRATSLAGNGSWTEPTYFYVTDYLDVPSNIAKIIIGPLIFVFLFSVVIGSIYLFLRKRQPDGPLGPLYASSNPEYLSASDVFPCSVYVPDEWEVSREKITLLRELGQGSFGMVYEGNARDIIKGEAETRVAVKTVNESASLRERIEFLNEASVMKGFTCHHVVRLLGVVSKGQPTLVVMELMAHGDLKSYLRSLRPEAENNPGRPPPTLQEMIQMAAEIADGMAYLNAKKFVHRDLAARNCMVAHDFTVKIGDFGMTRDIYETDYYRKGGKGLLPVRWMAPESLKDGVFTTSSDMWSFGVVLWEITSLAEQPYQGLSNEQVLKFVMDGGYLDQPDNCPERVTDLMRMCWQFNPKMRPTFLEIVNLLKDDLHPSFPEVSFFHSEENKAPESEELEMEFEDMENVPLDRSSHCQREEAGGRDGGSSLGFKRSYEEHIPYTHMNGGKKNGRILTLPRSNPS

SEQ ID NO: 3792 - protein, 303 aa, Homo sapiens
MSFSSLPTEIQSLLFLTFLTIYLVTLMGNCLIILVTLADPMLHSPMYFFLRNLSFLEIGFNLVIVPKMLGTLLAQDTTISFLGCATQMYFFFFFGVAECFLLATMAYDRYVAICSPLHYPVIMNQRTRAKLAAASWFPGFPVATVQTTWLFSFPFCGTNKVNHFFCDSPPVLRLVCADTALFEIYAIVGTILVVMIPCLLILCSYTHIAAAILKIPSAKGKNKAFSTCSSHLLVVSLFYISLSLTYFRPKSNNSPEGKKLLSLSYTVMTPMLNPIIYSLRNNEVKNALSRTVSKALALRNCIP

SEQ ID NO: 3793 - protein, 337 aa, Homo sapiens
MTMMAHQYPSWIFINEKTFITREQLNSLLKTYNIFYENQKNLHILYGETEDGKLIVEGMLDIFWGVKRPIQLKIQDEKPFSSFTSMKSSDVFSSKGMTRWGEFDDLYRISELDRTQIPMSEKRNSQEDYLSYHSNTLKPHAKDEPDSPVLYRTMSEAALVRKRMKPLMMDRKERQKNRASINGHFYNHETSIFIPAFESETKVRVNSNMRTEEVIKQLLQKFKIENSPQDFALHIIFATGEQRRLKKTDIPLLQRLLQGPSEKNARIFLMDKDAEEISSDVAQYINFHFSLLESILQRLNEEEKREIQRIVTKFNKEKAIILKCLQNKLVIKTETTV

SEQ ID NO: 3794 - protein, 284 aa, Homo sapiens
DLLGEDLLSGKKNQSDLSDEELNDDLLQSDNEDEENFSSQGVTISLNATSGMVTSFELSDNTNDQSGEQESEYEQEQGEDELVYHKSDGSELYTQEYPEEGQYEGHEAELTEDQIEYVEEPEEEQLYTDEVLDIEINEPLDEFTGGMETLELQKDIKEESDEEEEDDEESGRLRFKTERKEGTIIRLSDVTRERRNIPETLELSAEAKAALLEFEERERQHKQGRYSSRRGGRRGGPLMCRGVGDQRRESTERGRMKDHRPALLPTQPPVVILPEEELMSDLMP

SEQ ID NO: 3795 - protein, 783 aa, Homo sapiens
MASTRSIELEHFEERDKRPRPGSRRGAPSSSGGSSSSGPKGNGLIPSPAHSAHCSFYRTRTLQALSSEKKAKKARFYRNGDRYFKGLVFAISSDRFRSFDALLIELTRSLSDNVNLPQGVRTIYTIDGSRKVTSLDELLEGESYVCASNEPFRKVDYTKNINPNWSVNIKGGTSRALAAASSVKSEVKESKDFIKPKLVTVIRSGVKPRKAVRILLNKKTAHSFEQVLTDITEAIKLDSGVVKRLCTLDGKQVTCLQDFFGDDDVFIACGPEKFRYAQDDFVLDHSECRVLKSSYSRSSAVKYSGSKSPGPSRRSKSPASVKRGGHYSSAYSTAKSPVNGTPSSQLSTPKSTKSSSSSPTSPGSFRGLKQISAHGRSSSNVNGGPELDRCISPEGVNGNRCSESSTLLEKYKIGKVIGDGNFAVVKECIDRSTGKEFALKIIDKAKCCGKEHLIENEVSILRRVKHPNIIMLVEEMETATELFLVMELVKGGDLFDAITSSTKYTERDGSAMVYNLANALRYLHGLSIVHRDIKPENLLVCEYPDGTKSLKLGDFGLATVVEGPLYTVCGTPTYVAPEIIAETGYGLKVDIWAAGVITYILLCGFPPFRSENNLQEDLFDQILAGKLEFPAPYWDNITDSAKELISQMLQVNVEARCTAGQILSHPWVSDDASQENNMQAEVTGKLKQHFNNALPKQNSTTTGVSVIMNTALDKEGQIFCSKHCQDSGRPGMEPISPVPPSVEEIPVPGEAVPAPTPPESPTPHPPPAAPGGERAGTWRRHRD

SEQ ID NO: 3796 - protein, 624 aa, Homo sapiens
MAHKYVGLQYHGSVTFEDVAIAFSQQEWESLDSSQRGLYRDVMLENYRNLVSMAGHSRSKPHVIALLEQWKEPEVTVRKDGRRWCTDLQLEDDTIGCKEMPTSENCPSFALHQKISRQKPRECQEYGKTLCQDSKPVQHERIHSSEKPNRCKECGKNFSNGHQLTIHQRLHVGEKPYKYEKCGKAFISGSAFVKHGRIHTGEKPLKCKQCGKTISGSYQLTVHKSIHTGKKPYECGECGKAFLVYGKLTRHQSTHTGEKPFGCEECGKAFSTFSYLVQHQRIHTSEKPYECKECGKAFSTSSPLAKHQRIHTGEKPYECKECGKSFTVYGQLTRHQSIHTGEKPFECKECGKAFRLSSFLHAHQRIHAEIKPYGCKECGRTFSRASYLVQHGRLHTGEKPYECKECGKAFSTGSYLVQHQRIHTGEKPYECKECGKAFISRHQLTVHQRVHTGEKPYECKECGKAFRVHVHLTQHRKIHTDVKPYECKECGKTFSRASYLVQHSRIHTGKKPYECKECGKAFSSGSYLVQHQRIHTGEKPYECNKCGKAFTVYGQLIGHQSVHTGEKPFECKECGKAFRLNSFLTEHQRVHTGEKPFKCKKCGKTFRYSSALKVHLRKHMSVIP

SEQ ID NO: 3797 - protein, 859 aa, Homo sapiens
MEPLSHRGLPRLSWIDTLYSNFSYGTDEYDGEGNEEQKGPPEGSETMPYIDESPTMSPQLSARSQGGGDGVSPTPPEGLAPGVEAGKGLEMRKLVLSGFLASEEIYINQLEALLLPMKPLKATATTSQPVLTIQQIETIFYKIQDIYEIHKEFYDNLCPKVQQWDSQVTMGHLFQKLASQLGVYKAFVDNYKVALETAEKCSQSNNQFQKISEELKVKGPKDSKDSHTSVTMEALLYKPIDRVTRSTLVLHDLLKHTPVDHPDYPLLQDALRISQNFLSSINEDIDPRRTAVTTPKGETRQLVKDGFLVEVSESSRKLRHVFLFTDVLLCAKLKKTSAGKHQQYDCKWYIPLADLVFPSPEESEASPQVHPFPDHELEDMKMKISALKSEIQKEKANKGQSRAIERLKKKMFENEFLLLLNSPTIPFRIHNRNGKSYLFLLSSDYERSEWREAIQKLQKKDLQAFVLSSVELQVLTGSCFKLRTVHNIPVTSNKDDDESPGLYGFLHVIVHSAKGFKQSANLYCTLEVDSFGYFVSKAKTRVFRDTAEPKWDEEFEIELEGSQSLRILCYEKCYDKTKVNKDNNEIVDKIMGKGQIQLDPQTVETKNWHTDVIEMNGIKVEFSMKFTSRDMSLKRTPSKKQTGVFGVKISVVTKRERSKVPYIVRQCVEEVEKRGIEEVGIYRISGVATDIQALKAVFDANNKDILLMLSDMDINAIAGTLKLYFRELPEPLLTDRLYPAFMEGIALSDPAAKENCMMHLLRSLPDPNLITFLFLLEHLKRVAEKEPINKMSLHNLATVFGPTLLRPSEVESKAHLTSAADIWSHDVMAQVQVLLYYLQHPPISFAELKRNTLYFSTDV

SEQ ID NO: 3798 - protein, 189 aa, Homo sapiens
MRLSLPLLLLLLGAWAIPGGLGDRAPLTATAPQLDDEEMYSAHMPAHLRCDACRAVAYQMWQNLAKAETKLHTSNSGGRRELSELVYTDVLDRSCSRNWQDYGVREVDQVKRLTGPGLSEGPEPSISVMVTGGPWPTRLSRTCLHYLGEFGEDQIYEAHQQGRGALEALLCGGPQGACSEKVSATREEL

SEQ ID NO: 3799 - protein, 1395 aa, Homo sapiens
MYPICTVVVDGLPSESSSSSYPGPVSVSEMSLLHALGPVQTWLGQELEKCGIDAMIYTRYVLSLLLHDSYDYDLQEQENDIFLGWEKGAYKKWGKSKKKCSDLTLEEMKKQAAVQCLRSASDESSGIETLVEELCSRLKDLQSKQEEKIHKKLEGSPSPEAELSPPAKDQVEMYYEAFPPLSEKPVCLQEIMTVWNKSKVCSYSSSSSSSTAPPASTDTSSPKDCNSESEVTKERSSEVPTTVHEKTQSKSKNEKENKFSNGTIEEKPALYKKQIRHKPEGKIRPRSWSSGSSEAGSSSSGNQGELKASMKYVKVRHKAREIRNKKGRNGQSRLSLKHGEKAERNIHTGSSSSSSSGSVKQLCKRGKRPLKEIGRKDPGSTEGKDLYMENRKDTEYKEEPLWYTEPIAEYFVPLSRKSKLETTYRNRQDTSDLTSEAVEELSESVHGLCISNNNLHKTYLAAGTFIDGHFVEMPAVINEDIDLTGTSLCSLPEDNKYLDDIHLSELTHFYEVDIDQSMLDPGASETMQGESRILNMIRQKSKENTDFEAECCIVLDGMELQGERAIWTDSTSSVGAEGLFLQDLGNLAQFWECCSSSSGDADGESFGGDSPVRLSPILDSTVLNSHLLAGNQELFSDINEGSGINSCFSVFEVQCSNSVLPFSFETLNLGNENTDSSANMLGKTQSRLLIWTKNSAFEENEHCSNLSTRTCSPWSHSEETRSDNETLNIQFEESTQFNAEDINYVVPRVSSNYVDEELLDFLQDETCQQNSRTLGEIPTLVFKKTSKLESVCGIQLEQKTENKNFETTQVCNESPHGDGYSSGVIKDIWTKMADTNSVATVEIERTDAELFSADVNNYCCCLDAEAELETLQEPDKAVRRSEYHLWEGQKESLEKRAFASSELSNVDGGDYTTPSKPWDVAQDKENTFILGGVYGELKTFNSDGEWAVVPPSHTKGSLLQCAASDVVTIAGTDVFMTPGNSFAPGHRQLWKPFVSFEQNDQPKSGENGLNKGFSFIFHEDLLGACGNFQVEDPGLEYSFSSFDLSNPFSQVLHVECSFEPEGIASFSPSFKPKSILCSDSDSEVFHPRICGVDRTQYRAIRISPRTHFRPISASELSPGGGSESEFESEKDEANIPIPSQVDIFEDPQADLKPLEEDAEKEGHYYGKSELESGKFLPRLKKSGMEKSAQTSLDSQEESTGILSVGKQNQCLECSMNESLEIDLESSEANCKIMAQCEEEINNFCGCKAGCQFPAYEDNPVSSGQLEEFPVLNTDIQGMNRSQEKQTWWEKALYSPLFPASECEECYTNAKGESGLEEYPDAKETPSNEERLLDFNRVSSVYEARCTGERDSGAKSDGFRGKMCSSASSTSEETGSEGGGEWVGPSEEELFSRTHL

SEQ ID NO: 3800 - protein, 177 aa, Homo sapiens
MPAWGALFLLWATAEATKDCPSPCTCRALETMGLWVDCRGHGLTALPALPARTRHLLLANNSLQSVPPGAFDHLPQLQTLDVTQNPWHCDCSLTYLRLWLEDRTPEALLQVRCASPSLAAHGPLGRLTGYQLGSCGWQLQASWVRPGVLWDVALVAVAALGLALLAGLLCATTEALD

SEQ ID NO: 3801 - protein, 1582 aa, Homo sapiens
MPLAFCGSENHSAAYRVDQGVLNNGCFVDALNVVPHVFLLFITFPILFIGWGSQSSKVHIHHSTWLHFPGHNLRWILTFMLLFVLVCEIAEGILSDGVTESHHLHLYMPAGMAFMAAVTSVVYYHNIETSNFPKLLIALLVYWTLAFITKTIKFVKFLDHAIGFSQLRFCLTGLLVILYGMLLLVEVNVIRVRRYIFFKTPREVKPPEDLQDLGVRFLQPFVNLLSKGTYWWMNAFIKTAHKKPIDLRAIGKLPIAMRALTNYQRLCEAFDAQVRKDIQGTQGARAIWQALSHAFGRRLVLSSTFRILADLLGFAGPLCIFGIVDHLGKENDVFQPKTQFLGVYFVSSQEFLANAYVLAVLLFLALLLQRTFLQASYYVAIETGINLRGAIQTKIYNKIMHLSTSNLSMGEMTAGQICNLVAIDTNQLMWFFFLCPNLWAMPVQIIVGVILLYYILGVSALIGAAVIILLAPVQYFVATKLSQAQRSTLEYSNERLKQTNEMLRGIKLLKLYAWENIFRTRVETTRRKEMTSLRAFAIYTSISIFMNTAIPIAAVLITFVGHVSFFKEADFSPSVAFASLSLFHILVTPLFLLSSVVRSTVKALVSVQKLSEFLSSAEIREEQCAPHEPTPQGPASKYQAVPLRVVNRKRPAREDCRGLTGPLQSLVPSADGDADNCCVQIMGGYFTWTPDGIPTLSNITIRIPRGQLTMIVGQVGCGKSSLLLAALGEMQKVSGAVFWSSSLPDSEIGEDPSPERETATDLDIRKRGPVAYASQKPWLLNATVEENIIFESPFNKQRYKMVIEACSLQPDIDILPHGDQTQIGERGINLSGGQRQRISVARALYQHANVVFLDDPFSALDIHLSDHLMQAGILELLRDDKRTVVLVTHKLQYLPHADWIIAMKDGTIQREGTLKDFQRSECQLFEHWKTLMNRQDQELEKETVTERKATEPPQGLSRAMSSRDGLLQDEEEEEEEAAESEEDDNLSSMLHQRAEIPWRACAKYLSSAGILLLSLLVFSQLLKHMVLVAIDYWLAKWTDSALTLTPAARNCSLSQECTLDQTVYAMVFTVLCSLGIVLCLVTSVTVEWTGLKVAKRLHRSLLNRIILAPMRFFETTPLGSILNRFSSDCNTIDQHIPSTLECLSRSTLLCVSALAVISYVTPVFLVALLPLAIVCYFIQKYFRVASRDLQQLDDTTQLPLLSHFAETVEGLTTIRAFRYEARFQQKLLEYTDSNNIASLFLTAANRWLEVRMEYIGACVVLIAAVTSISNSLHRELSAGLVGLGLTYALMVSNYLNWMVRNLADMELQLGAVKRIHGLLKTEAESYEGLLAPSLIPKNWPDQGKIQIQNLSVRYDSSLKPVLKHVNALIAPGQKIGICGRTGSGKSSFSLAFFRMVDTFEGHIIIDGIDIAKLPLHTLRSRLSIILQDPVLFSGTIRFNLDPERKCSDSTLWEALEIAQLKLVVKALPGGLDAIITEGGENFSQGQRQLFCLARAFVRKTSIFIMDEATASIDMATENILQKVVMTAFADRTVVTIAHRVHTILSADLVIVLKRGAILEFDKPEKLLSRKDSVFASFVRADK

SEQ ID NO: 3802 - protein, 205 aa, Homo sapiens
MNGPADGEVDYKKKYRNLKRKLKFLIYEHECFQEELRKAQRKLLKVSRDKSFLLDRLLQYENVDEDSSDSDATASSDNSETEGTPKLSDTPAPKRKRSPPLGGAPSPSSLSLPPSTGFPLQASGVPSPYLSSMAVGPPDCPVGGPLTFPGRGSGAGVGTTLTPLPPPKMPPPTILSTVPRQMFSDAGSGDDALDGDDDLVIDIPE

SEQ ID NO: 3803 - protein, 350 aa, Homo sapiens
MLGSVKMEAHDLAEWSYYPEAGEVYSPVTPVPTMAPLNSYMTLNPLSSPYPPGGLPASPLPSGPLAPPAPAAPLGPTFPGLGVSGGSSSSGYGAPGPGLVHGKEMPKGYRRPLAHAKPPYSYISLITMAIQQAPGKMLTLSEIYQWIMDLFPYYRENQQRWQNSIRHSLSFNDCFVKVARSPDKPGKGSYWALHPSSGNMFENGCYLRRQKRFKLEEKVKKGGSGAATTTRNGTGSAASTTTPAATVTSPPQPPPPAPEPEAQGGEDVGALDCGSPASSTPYFTGLELPGELKLDAPYNFNHPFSINNLMSEQTPAPPKLDVGFGGYGAEGGEPGVYYQGLYSRSLLNAS

SEQ ID NO: 3804 - protein, 534 aa, Homo sapiens
MPHLMERMVGSGLLWLALVSCILTQASAVQRGYGNPIEASSYGLDLDCGAPGTPEAHVCFDPCQNYTLLDEPFRSTENSAGSQGCDKNMSGWYRFVGEGGVRMSETCVQVHRCQTDAPMWLNGTHPALGDGITNHTACAHWSGNCCFWKTEVLVKACPGGYHVYRLEGTPWCNLRYCTDPSTVEDKCEKACRPEEECLALNSTWGCFCRQDLNSSDVHSLQPQLDCGPREIKVKVDKCLLGGLGLGEEVIAYLRDPNCSSILQTEERNWVSVTSPVQASACRNILERNQTHAIYKNTLSLVNDFIIRDTILNINFQCAYPLDMKVSLQAALQPIVSSLNVSVDGNGEFIVRMALFQDQNYTNPYEGDAVELSVESVLYVGAILEQGDTSRFNLVLRNCYATPTEDKADLVKYFIIRNSCSNQRDSTIHVEENGQSSESRFSVQMFMFAGHYDLVFLHCEIHLCDSLNEQCQPSCSRSQVRSEVPAIDLARVLDLGPITRRGAQSPGVMNGTPSTAGFLVAWPMVLLTVLLAWLF

SEQ ID NO: 3805 - protein, 664 aa, Homo sapiens
MAAVGPPQQQVRMAHQQVWAALEVALRVPCLYIIDAIFNSYPDSSQSRFCIVLQIFLRLFGVFASSIVLILSQRSLFKFYTYSSAFLLAATSVLVNYYASLHIDFYGAYNTSAFGIELLPRKGPSLWMALIVLQLTFGIGYVTLLQIHSIYSQLIILDLLVPVIGLITELPLHIRETLLFTSSLILTLNTVFVLAVKLKWFYYSTRYVYLLVRHMYRIYGLQLLMEDTWKRIRFPDILRVFWLTRVTAQATVLMYILRMANETDSFFISWDDFWDLICNLIISGCDSTLTVLGMSAVISSVAHYLGLGILAFIGSTEEDDRRLGFVAPVLFFILALQTGLSGLRPEERLIRLSRNMCLLLTAVLHFIHGMTDPVLMSLSASHVSSFRRHFPVLFVSACLFILPVLLSYVLWHHYALNTWLFAVTAFCVELCLKVIVSLTVYTLFMIDGYYNVLWEKLDDYVYYVRSTGSIIEFIFGVVMFGNGAYTMMFESGSKIRAFMMCLHAYFNIYLQAKNGWKTFMNRRTAVKKINSLPEIKGSRLQEINDVCAICYHEFTTSARITPCNHYFHALCLRKWLYIQDTCPMCHQKVYIEDDIKDNSNVSNNNGFIPPNETPEEAVREAAAESDRELNEDDSTDCDDDVQRERNGVIQHTGAAAEEFNDDTD

SEQ ID NO: 3806 - protein, 316 aa, Homo sapiens
MAPENFTRVTEFILTGVSSCPELQIPLFLVFLVLYGLTMAGNLGIITLTSVDSRLQTPMYFFLQHLALINLGNSTVIAPKMLINFLVKKKTTSFYECATQLGGFLFFIVSEVIMLALMAYDRYVAICNPLLYMVVVSRRLCLLLVSLTYLYGFSTAIVVSSYVFSVSYCSSNIINHFYCDNVPLLALSCSDTYLPETVVFISAATNVVGSLIIVLVSYFNIVLSILKICSSEGRKKAFSTCASHMMAVTIFYGTLLFMYVQPRSNHSLDTDDKMASVFYTLVIPMLNPLIYSLRNKDVKTALQRFMTNLCYSFKTM

SEQ ID NO: 3807 - protein, 881 aa, Homo sapiens
MAADKGPAAGPRSRAAMAQWRKKKGLRKRRGAASQARGSDSEDGEFEIQAEDDARARKLGPGRPLPTFPTSECTSDVEPDTREMVRAQNKKKKKSGGFQSMGLSYPVFKGIMKKGYKVPTPIQRKTIPVILDGKDVVAMARTGSGKTACFLLPMFERLKTHSAQTGARALILSPTRELALQTLKFTKELGKFTGLKTALILGGDRMEDQFAALHENPDIIIATPGRLVHVAVEMSLKLQSVEYVVFDEADRLFEMGFAEQLQEIIARLPGGHQTVLFSATLPKLLVEFARAGLTEPVLIRLDVDTKLNEQLKTSFFLVREDTKAAVLLHLLHNVVRPQDQTVVFVATKHHAEYLTELLTTQRVSCAHIYSALDPTARKINLAKFTLGKCSTLIVTDLAARGLDIPLLDNVINYSFPAKGKLFLHRVGRVARAGRSGTAYSLVAPDEIPYLLDLHLFLGRSLTLARPLKEPSGVAGVDGMLGRVPQSVVDEEDSGLQSTLEASLELRGLARVADNAQQQYVRSRPAPSPESIKRAKEMDLVGLGLHPLFSSRFEEEELQRLRLVDSIKNYRSRATIFEINASSRDLCSQVMRAKRQKDRKAIARFQQGQQGRQEQQEGPVGPAPSRPALQEKQPEKEEEEEAGESVEDIFSEVVGRKRQRSGPNRGAKRRREEARQRDQEFYIPYRPKDFDSERGLSISGEGGAFEQQAAGAVLDLMGDEAQNLTRGRQQLKWDRKKKRFVGQSGQEDKKKIKTESGRYISSSYKRDLYQKWKQKQKIDDRDSDEEGASDRRGPERRGGKRDRGQGASRPHAPGTPAGRVRPELKTKQQILKQRRRAQKLHFLQRGGLKQLSARNRRRVQELQQGAFGRGARSKKGKMRKRM

SEQ ID NO: 3808 - protein, 348 aa, Homo sapiens
MLTSLTDLCFSPIQVAEIKSLPKSMNETNHSRVTEFVLLGLSSSRELQPFLFLTFSLLYLAILLGNFLIILTVTSDSRLHTPMYFLLANLSFIDVCVASFATPKMIADFLVERKTISFDACLAQIFFVHLFTGSEMVLLVSMAYDRYVAICKPLHYMTVMSRRVCVVLVLISWFVGFIHTTSQLAFTVNLPFCGPNKVDSFFCDLPLVTKLACIDTYVVSLLIVADSGFLSLSSFLLLVVSYTVILVTVRNRSSASMAKARSTLTAHITVVTLFFGPCIFIYVWPFSSYSVDKVLAVFYTIFTLILNPVIYTLRNKEVKAAMSKLKSRYLKPSQVSVVIRNVLFLETK

SEQ ID NO: 3809 - protein, 1011 aa, Homo sapiens
METSSMLSSLNDECKSDNYIEPHYKEWYRVAIDILIEHGLEAYQEFLVQERVSDFLAEEEINYILKNVQKVAQSTAHGTDDSCDDTLSSGTYWPVESDVEAPNLDLGWPYVMPGLLGGTHIDLLFHPPRAHLLTIKETIRKMIKEARKVIALVMDIFTDVDIFKEIVEASTRGVSVYILLDESNFNHFLNMTEKQGCSVQRLRNIRVRTVKGQDYLSKTGAKFHGKMEQKFLLVDCQKVMYGSYSYMWSFEKAHLSMVQIITGQLVESFDEEFRTLYARSCVPSSFAQEESARVKHGKALWENGTYQHSVSSLASVSSQRNLFGRQDKIHKLDSSYFKNRGIYTLNEHDKYNIRSHGYKPHFVPNFNGPNAIRQFQPNQINENWKRHSYAGEQPETVPYLLLNRALNRTNNPPGNWKKPSDSLSVASSSREGYVSHHNTPAQSFANRLAQRKTTNLADRNSNVRRSFNGTDNHIRFLQQRMPTLEHTTKSFLRNWRIESYLNDHSEATPDSNGSALGDRFEGYDNPENLKANALYTHSRLRSSLVFKPTLPEQKEVNSCTTGSSNSTIIGSQGSETPKEVPDTPTNVQHLTDKPLPESIPKLPLQSEAPKMHTLQVPENHSVALNQTTNGHTESNNYIYKTLGVNKQTENLKNQQTENLLKRRSFPLFDNSKANLDPGNSKHYVYSTLTRNRVRQPEKPKEDLLKSSKSMHNVTHNLEEDEEEVTKRNSPSGTTTKSVSIAALLDVNKEESNKELASKKEVKGSPSFLKKGSQKLRSLLSLTPDKKENLSKNKAPAFYRLCSSSDTLVSEGEENQKPKKSDTKVDSSPRRKHSSSSNSQGSIHKSKEDVTVSPSQEINAPPDENKRTPSPGPVESKFLERAGDASAPRFNTEQIQYRDSREINAVVTPERRPTSSPRPTSSELLRSHSTDRRVYSRFEPFCKIESSIQPTSNMPNTSINRPEIKSATMGNSYGRSSPLLNYNTGVYRSYQPNENKFRGFMQKFGNFIHKNK

SEQ ID NO: 3810 - protein, 840 aa, Homo sapiens
ASLASCEGNSSNKQVSSESQMGFFSLSSERNESVIHYPESTEPEIQQEMSTSQPDCNVDSCSVSSGYGTFCISELNLYKSKDPKEFMEHIDVPKGQYVAPAVPAESLVDGVKNENFYIQTPEECHVSLKEDVSISPGEFEHNFLGENKVSEVYSGKTNSNAITSWAQKLKQNQPKRAHVEDGGSRSKQGNEQSKKTPIEKSDFAAATHPRAFYLSKPDETPNAWMSDSGTGLTYWKLEEKDMHHSLPETLEKTFISLSSTDVSPNQVLTLDPTLHMKPKQQISGIQPHGLPNALDDRISFSPDSVLEPSMSSPSDIDSFSQASNVTSQLPGFPKYPSHTKASPVDSWKNQTFQNESRTSSTFPSVYTITSNDISVNTVDEENTVMVASASVSQSQLPGTANSVPECISLTSLEDPVILSKIRQNLKEKHARHIADLRAYYESEINSLKQKLEAKEISGVEDWKITNQILVDRCGQLDSALHEATSRVRTLENKNNLLEIEVNDLRERFSAASSASKILQERIEEMRTSSKEKDNTIIRLKSRLQDLEEAFENAYKLSDDKEAQLKQENKMFQDLLGEYESLGKEHRRVKDALNTTENKLLDAYTQISDLKRMISKLEAQVKQVEHENMLSLRHNSRIHVRPSRANTLATSDVSRRKWLIPGAEYSIFTGQPLDTQDSNVDNQLEETCSLGHRSPLEKDSSPGSSSTSLLIKKQRETSDTPIMRALKELDEGKIFKNWGTQTEKEDTSNINPRQTETSVNASRSPEKCAQQRQKRLNSASQRSSSLPPSNRKSSTPTKREIMLTPVTVAYSPKRSPKENLSPGFSHLLSKNESSPIRKNLF

SEQ ID NO: 3811 - protein, 327 aa, Homo sapiens
MAAAAAAAAATNGTGGSSGMEVDAAVVPSVMACGVTGSVSVALHPLVILNISDHWIRMRSQEGRPVQVIGALIGKQEGRNIEVMNSFELLSHTVEEKIIIDKEYYYTKEEQFKQVFKELEFLGWYTTGGPPDPSDIHVHKQVCEIIESPLFLKLNPMTKHTDLPVSVFESVIDIINGEATMLFAELTYTLATEEAERIGVDHVARMTATGSGENSTVAEHLIAQHSAIKMLHSRVKLILEYVKASEAGEVPFNHEILREAYALCHCLPVLSTDKFKTDFYDQCNDVGLMAYLGTITKTCNTMNQFVNKFNVLYDRQGIGRRMRGLFF

SEQ ID NO: 3812 - protein, 826 aa, Homo sapiens
MARLCRRVPCTLLLGLAVVLLKARLVPAAARAELSRSDLSLIQQQQQQQQQQQQQQKQLEEAEEERTEVPGATSTLTVPVSVFMLKVQVNDIISRQYLSQAVVEVFVNYTKTNSTVTKSNGAVLIKVPYKLGLSLTIIAYKDGYVLTPLPWKTRRMPIYSSVTLSLFPQSQANIWLFEDTVLITGKLADAKSQPSVQFSKALIKLPDNHHISNVTGYLTVLQQFLKVDNFLHTTGITLNKPGFENIELTPLAAICVKIYSGGKELKVNGSIQVSLPLLRLNDISAGDRIPAWTFDMNTGAWVNHGRGMVKEHNNHLIWTYDAPHLGYWIAAPLPGTRGSGINEDSKDITAYHTVFLTAILGGTIVIVIGFFAVLLCYCRDKCGTPQKRERNITKLEVLKRDQTTSTTHINHISTVKVALKAEDKSQLFNAKNSSYSPQKKEPSKAETEERVSMVKTRDDFKIYNEDVSFLSVNQNNYSRNPTQSLEPNVGSKQPKHINNNLSSSLGDAQDEKRYLTGNEEAYGRSHIPEQLMHIYSQPIAILQTSDLFSTPEQLHTAKSATLPRKGQLVYGQLMEPVNRENFTQTLPKMPIHSHAQPPDAREEDIILEGQQSLPSQASDWSRYSSSLLESVSVPGTLNEAVVMTPFSSELQGISEQTLLELSKGKPSPHPRAWFVSLDGKPVAQVRHSFIDLKKGKRTQSNDTSLDSGVDMNELHSSRKLEREKTFIKSMHQPKILYLEDLDLSSSESGTTVCSPEDPALRHILDGGSGVIMEHPGEESPGRKSTVEDFEANTSPTKRRGRPPLAKRDSKTNIWKKREERPLIPIN

SEQ ID NO: 3813 - protein, 617 aa, Homo sapiens
MAEAKTHWLGAALSLIPLIFLISGAEAASFQRNQLLQKEPDLRLENVQKFPSPEMIRALEYIENLRQQAHKEESSPDYNPYQGVSVPLQQKENGDESHLPERDSLSEEDWMRIILEALRQAENEPQSAPKENKPYALNSEKNFPMDMSDDYETQQWPERKLKHMQFPPMYEENSRDNPFKRTNEIVEEQYTPQSLATLESVFQELGKLTGPNNQKRERMDEEQKLYTDDEDDIYKANNIAYEDVVGGEDWNPVEEKIESQTQEEVRDSKENIEKNEQINDEMKRSGQLGIQEEDLRKESKDQLSDDVSKVIAYLKRLVNAAGSGRLQNGQNGERATRLFEKPLDSQSIYQLIEISRNLQIPPEDLIEMLKTGEKPNGSVEPERELDLPVDLDDISEADLDHPDLFQNRMLSKSGYPKTPGRAGTEALPDGLSVEDILNLLGMESAANQKTSYFPNPYNQEKVLPRLPYGAGRSRSNQLPKAAWIPHVENRQMAYENLNDKDQELGEYLARMLVKYPEIINSNQVKRVPGQGSSEDDLQEEEQIEQAIKEHLNQGSSQETDKLAPVSKRFPVGPPKNDDTPNRQYWDEDLLMKVLEYLNQEKAEKGREHIAKRAMENM

SEQ ID NO: 3814 - protein, 392 aa, Homo sapiens
MVEADRPGKLFIGGLNLETDEKALEAEFGKYGRIVEVLLMKDRETNKSRGFAFVTFESPADAKAAARDMNGKSLDGKAIKVAQATKPAFESSRRGPPPPRSRGRPRFLRGTRGGGGGPRRSPSRGGPDDDGGYTADFDLRPSRAPMPMKRGPPPRRVGPPPKRAAPSGPARSSGGGMRGRALAVRGRDGYSGPPRREPLPPRRDPYLGPRDEGYSSRDGYSSRDYREPRGFAPSPGEYTHRDYGHSSVRDDCPLRGYSDRDGYGGRDRDYGDHLSRGSHREPFESYGELRGAAPGRGTPPSYGGGGRYEEYRGYSPDAYSGGRDSYSSSYGRSDRYSRGRHRVGRPDRGLSLSMERGCPPQRDSYSRSGCRVPRGGGRLGGRLERGGGRSRY

SEQ ID NO: 3815 - protein, 771 aa, Homo sapiens
GVPVIKWKKDGIHLALGMDERKQQLSNGSLLIQNILHSRHHKPDEGLYQCEASLGDSGSIISRTAKVAVAGPLRFLSQTESVTAFMGDTVLLKCEVIGEPMPTIHWQKNQQDLTPIPGDSRVVVLPSGALQISRLQPGDIGIYRCSARNPASSRTGNEAEVRILSDPGLHRQLYFLQRPSNVVAIEGKDAVLECCVSGYPPPSFTWLRGEEVIQLRSKKYSLLGGSNLLISNVTDDDSGMYTCVVTYKNENISASAELTVLVPPWFLNHPSNLYAYESMDIEFECTVSGKPVPTVNWMKNGDVVIPSDYFQIVGGSNLRILGVVKSDEGFYQCVAENEAGNAQTSAQLIVPKPAIPSSSVLPSAPRDVVPVLVSSRFVRLSWRPPAEAKGNIQTFTVFFSREGDNRERALNTTQPGSLQLTVGNLKPEAMYTFRVVAYNEWGPGESSQPIKVATQPELQVPGPVENLQAVSTSPTSILITWEPPAYANGPVQGYRLFCTEVSTGKEQNIEVDGLSYKLEGLKKFTEYSLRFLAYNRYGPGVSTDDITVVTLSDVPSAPPQNVSLEVVNSRSIKVSWLPPPSGTQNGFITGYKIRHRKTTRRGEMETLEPNNLWYLFTGLEKGSQYSFQVSAMTVNGTGPPSNWYTAETPENDLDESQVPDQPSSLHVRPQTNCIIMSWTPPLNPNIVVRGYIIGYGVGSPYAETVRVDSKQRYYSIERLESSSHYVISLKAFNNAGEGVPLYESATTRSITVRRHNISKLHSNRPQTKHNV

SEQ ID NO: 3816 - protein, 2341 aa, Homo sapiens
MGSQTLQILRQGVWAALSGGWYYDPHQATFVNALHLYLWLFLLGLPFTLYMALPSTMIIVAVYCPVIAAVFIVLKMVNYRLHRALDAGEVVDRTANEFTDQRTKAEQGNCSTRRKDSNGPSDPGGGIEMSEFIREATPPVGCSSRNSYAGLDPSNQIGSGSSRLGTAATIKGDTDTAKTSDDISLSLGQSSSLCKEGSEEQDLAADRKLFRLVSNDSFISIQPSLSSCGQDLPRDFSDKVNLPSHNHHHHVDQSLSSACDTEVASLVPLHSHSYRKDHRPRGVPRTSSSAVAFPDTSLNDFPLYQQRRGLDPVSELESSKPLSGSKESLVENSGLSGEFQLAGDLKINTSQPPTKSGKSKPLKAEKSMDSLRSLSTRSSGSTESYCSGTDRDTNSTVSSYKSEQTSSTHIESILSEHEESPKAGTKSGRKKECCAGPEEKNSCASDKRTSSEKIAMEASTNSGVHEAKDPTPSDEMHNQRGLSTSASEEANKNPHANEFTSQGDRPPGNTAENKEEKSDKSAVSVDSKVRKDVGGKQKEGDVRPKSSSVIHRTASAHKSGRRRTGKKRASSFDSSRHRDYVCFRGVSGTKPHSAIFCHDEDSSDQSDLSRASSVQSAHQFSSDSSSSTTSHSCQSPEGRYSALKTKHTHKERGTDSEHTHKAHLVPEGTSKKRATRRTSSTNSAKTRARVLSLDSGTVACLNDSNRLMAPESIKPLTTSKSDLEAKEGEVLDELSLLGRASQLETVTRSRNSLPNQVAFPEGEEQDAVSGAAQASEEAVSFRRERSTFRRQAVRRRHNAGSNPTPPTLLIGSPLSLQDGQQGQQSTAQVKVQSRPPSQAAVLSASASLLVRNGSVHLEASHDNASAVGGSSLHDELGKFSSTLYETGGCDMSLVNFEPAARRASNICDTDSHVSSSTSVRFYPHDVLSLPQIRLNRLLTIDTDLLEQQDIDLSPDLAATYGPTEEAAQKVKHYYRFWILPQLWIGINFDRLTLLALFDRNREILENVLAVILAILVAFLGSILLIQGFFRDIWVFQFCLVIASCQYSLLKSVQPDSSSPRHGHNRIIAYSRPVYFCICCGLIWLLDYGSRNLTATKFKLYGITFTNPLVFISARDLVIVFTLCFPIVFFIGLLPQVNTFVMYLCEQLDIHIFGGNATTSLLAALYSFICSIVAVALLYGLCYGALKDSWDGQHIPVLFSIFCGLLVAVSYHLSRQSSDPSVLFSLVQSKIFPKTEEKNPEDPLSEVKDPLPEKLRNSVSERLQSDLVVCIVIGVLYFAIHVSTVFTVLQPALKYVLYTLVGFVGFVTHYVLPQVRKQLPWHCFSHPLLKTLEYNQYEVRNAATMMWFEKLHVWLLFVEKNIIYPLIVLNELSSSAETIASPKKLNTELGALMITVAGLKLLRSSFSSPTYQYVTVIFTVLFFKFDYEAFSETMLLDLFFMSILFNKLWELLYKLQFVYTYIAPWQITWGSAFHAFAQPFAVPHSAMLFIQAAVSAFFSTPLNPFLGSAIFITSYVRPVKFWERDYNTKRVDHSNTRLASQLDRNPGSDDNNLNSIFYEHLTRSLQHSLCGDLLLGRWGNYSTGDCFILASDYLNALVHLIEIGNGLVTFQLRGLEFRGTYCQQREVEAITEGVEEDEGFCCCEPGHIPHMLSFNAAFSQRWLAWEVIVTKYILEGYSITDNSAASMLQVFDLRKVLTTYYVKGIIYYVTTSSKLEEWLANETMQEGLRLCADRNYVDVDPTFNPNIDEDYDHRLAGISRESFCVIYLNWIEYCSSRRAKPVDVDKDSSLVTLCYGLCVLGRRALGTASHHMSSNLESFLYGLHALFKGDFRISSIRDEWIFADMELLRKVVVPGIRMSIKLHQDHFTSPDEYDDPTVLYEAIVSHEKNLVIAHEGDPAWRSAVLANSPSLLALRHVMDDGTNEYKIIMLNRRYLSFRVIKVNKECVRGLWAGQQQELVFLRNRNPERGSIQNAKQALRNMINSSCDQPIGYPIFVSPLTTSYSDSHEQLKDILGGPISLGNIRNFIVSTWHRLRKGCGAGCNSGGNIEDSDTGGGTSCTGNNATTANNPHSNVTQGSIGNPGQGSGTGLHPPVTSYPPTLGTSHSSHSVQSGLVRQSPARASVASQSSYCYSSRHSSLRMSTTGFVPCRRSSTSQISLRNLPSSIQSRLSMVNQMEPSGQSGLACVQHGLPSSSSSSQSIPACKHHTLVGFLATEGGQSSATDAQPGNTLSPANNSHSRKAEVIYRVQIVDPSQILEGINLSKRKELQWPDEGIRLKAGRNSWKDWSPQEGMEGHVIHRWVPCSRDPGTRSHIDKAVLLVQIDDKYVTVIETGVLELGAEV

SEQ ID NO: 3817 - protein, 194 aa, Homo sapiens
MAKSSQRKQRDCVNQCKSKPGLSTSIPLRMSSYTFKRPVTRITPHPGNEVRYHQWEESLEKPQQVCWQRRLQGLQAYSSAGELSSTLDLANTLQKLVPSYTGGSLLEDLASGLEHSCPMPHLACSSDAVEIIPAEGVGISQLLCKQFLVTEEDIRKQEGKVKTVRERLAIALIADGLANEAEKVRDQEGRPEKR

SEQ ID NO: 3818 - protein, 1215 aa, Homo sapiens
MASQVLVYPPYVYQTQSSAFCSVKKLKVEPSSCVFQERNYPRTYVNGRNFGNSHPPTKGSAFQTKIPFNRPRGHNFSLQTSAVVLKNTAGATKVIAAQAQQAHVQAPQIGAWRNRLHFLEGPQRCGLKRKSEELDNHSSAMQIVDELSILPAMLQTNMGNPVTVVTATTGSKQNCTTGEGDYQLVQHEVLCSMKNTYEVLDFLGRGTFGQVVKCWKRGTNEIVAIKILKNHPSYARQGQIEVSILARLSTENADEYNFVRAYECFQHRNHTCLVFEMLEQNLYDFLKQNKFSPLPLKVIRPILQQVATALKKLKSLGLIHADLKPENIMLVDPVRQPYRVKVIDFGSASHVSKTVCSTYLQSRYYRAPEIILGLPFCEAIDMWSLGCVIAELFLGWPLYPGALEYDQIRYISQTQGLPGEQLLNVGTKSTRFFCKETDMSHSGWRLKTLEEHEAETGMKSKEARKYIFNSLDDVAHVNTVMDLEGSDLLAEKADRREFVSLLKKMLLIDADLRITPAETLNHPFVNMKHLLDFPHSNHVKSCFHIMDICKSHLNSCDTNNHNKTSLLRPVASSSTATLTANFTKIGTLRSQALTTSAHSVVHHGIPLQAGTAQFGCGDAFQQTLIICPPAIQGIPATHGKPTSYSIRVDNTVPLVTQAPAVQPLQIRPGVLSQTWSGRTQQMLVPAWQQVTPLAPATTTLTSESVAGSHRLGDWGKMISCSNHYNSVMPQPLLTNQITLSAPQPVSVGIAHVVWPQPATTKKNKQCQNRGILVKLMEWEPGREEINAFSWSNSLQNTNIPHSAFISPKIINGKDVEEVSCIETQDNQNSEGEARNCCETSIRQDSDSSVSDKQRQTIIIADSPSPAVSVITISSDTDEEETSQRHSLRECKGSLDCEACQSTLNIDRMCSLSSPDSTLSTSSSGQSSPSPCKRPNSMSDEEQESSCDTVDGSPTSDSSGHDSPFAESTFVEDTHENTELVSSADTETKPAVCSVVVPPVELENGLNADEHMANTDSICQPLIKGRSAPGRLNQPSAVGTRQQKLTSAFQQQHLNFSQVQHFGSGHQEWNGNFGHRRQQAYIPTSVTSNPFTLSHGSPNHTAVHAHLAGNTHLGGQPTLLPYPSSATLSSAAPVAHLLASPCTSRPMLQHPTYNISHPSGIVHQVPVGLNPRLLPSPTIHQTQYKPIFPPHSYIAASPAYTGFPLSPTKLSQYPYM

SEQ ID NO: 3819 - protein, 948 aa, Homo sapiens
MVSRCSCLGVQCLLLSLLLLAAWEVGSGQLHYSVYEEARHGTFVGRIAQDLGLELAELVQRLFRVASKRHGDLLEVNLQNGILFVNSRIDREELCGRSVECSIHLEVIVDRPLQVFHVDVEVKDINDNPPRFSVTEQKLSIPESRLLDSRFPLEGASDADVGENALLTYKLSPNEYFVLDIINKKDKDKFPVLVLRKLLDREENPQLKLLLTATDGGKPEFTGSVSLLILVLDANDNAPIFDRPVYEVKMYENQVNQTLVIRLNASDSDEGINKEMMYSFSSLVPPTIRRKFWINERTGEIKVNDAIDFEDSNTYEIHVDVTDKGNPPMVGHCTVLVELLDENDNSPEVIVTSLSLPVKEDAQVGTVIALISVSDHDSGANGQVTCSLTPHVPFKLVSTYKNYYSLVLDSALDRERVSAYELVVTARDGGSPPLWATASVSVEVADVNDNAPAFAQSEYTVFVKENNPPGCHIFTVSAWDADAQENALVSYSLVERRLGERSLSSYVSVHAESGKVYALQPLDHEELELLQFQVSARDGGVPPLGSNLTLQVFVLDENDNAPALLASPAGSAGGAVSELVLRSVVAGHVVAKVRAVDADSGYNAWLSYELQSAAVGARIPFRVGLYTGEISTTRALDETDSPRQRLLVLVKDHGEPSLTATATVLVSLVEGSQAPKASSRASVGVAPEVALVDVNVYLIIAICAVSSLLVLTLLLYTALRCSAAPTEGACGPVKPTLVCSSAVGSWSYSQQRRQRVCSGEGLPKADLMAFSPSLPPCPMVDVDGEDQSIGGDHSRKPRQPNPDWRYSASLRAGMHSSVHLEEAGILRAGPGGPDQQWPTVSSATPEPEAGEVSPPVGAGVNSNSWTFKYGPGNPKQSGPGELPDKFIIPGSPAIISIRQEPTNSQIDKSDFITFGKKEETKKKKKKKKGNKTQEKKEKGNSTTDNSDQ

SEQ ID NO: 3820 - protein, 746 aa, Homo sapiens
MDFLEEPIPGVGTYDDFNTIDWVREKSRDRDRHREITNKSKESTWALIHSVSDAFSGWLLMLLIGLLSGSLAGLIDISAHWMTDLKEGICTGGFWFNHEHCCWNSEHVTFEERDKCPEWNSWSQLIISTDEGAFAYIVNYFMYVLWALLFAFLAVSLVKVFAPYACGSGIPEIKTILSGFIIRGYLGKWTLVIKTITLVLAVSSGLSLGKEGPLVHVACCCGNILCHCFNKYRKNEAKRREVLSAAAAAGVSVAFGAPIGGVLFSLEEVSYYFPLKTLWRSFFAALVAAFTLRSINPFGNSRLVLFYVEFHTPWHLFELVPFILLGIFGGLWGALFIRTNIAWCRKRKTTQLGKYPVIEVLVVTAITAILAFPNEYTRMSTSELISELFNDCGLLDSSKLCDYENRFNTSKGGELPDRPAGVGVYSAMWQLALTLILKIVITIFTFGMKIPSGLFIPSMAVGAIAGRLLGVGMEQLAYYHQEWTVFNSWCSQGADCITPGLYAMVGAAACLGGVTRMTVSLVVIMFELTGGLEYIVPLMAAAMTSKWVADALGREGIYDAHIRLNGYPFLEAKEEFAHKTLAMDVMKPRRNDPLLTVLTQDSMTVEDVETIISETTYSGFPVVVSRESQRLVGFVLRRDLIISIENARKKQDGVVSTSIIYFTEHSPPLPPYTPPTLKLRNILDLSPFTVTDLTPMEIVVDIFRKLGLRQCLVTHNGRLLGIITKKDVLKHIAQMANQDPDSILFN

SEQ ID NO: 3821 - protein, 829 aa, Homo sapiens
MCPRGYPEQSNWMSSPLYSTEVEQKSQESVSFKDVTVGFTQEEWQHLDPSQRALYRDVMLENYSNLVSVGYCVHKPEVIFRLQQGEEPWKQEEEFPSQSFPEVWTADHLKERSQENQSKHLWEVVFINNEMLTKEQGDVIGIPFNVDVSSFPSRKMFCQCDSCGMSFNTVSELVISKINYLGKKSDEFNACGKLLLNIKHDETHTQEKNEVLKNRNTLSHHEETLQHEKIQTLEHNFEYSICQETLLEKAVFNTQKRENAEENNCDYNEFGRTLCDSSSLLFHQISPSRDNHYEFSDCEKFLCVKSTLSKPHGVSMKHYDCGESGNNFRRKLCLSHLQKGDKGEKHFECNECGKAFWEKSHLTRHQRVHTGQKPFQCNECEKAFWDKSNLTKHQRSHTGEKPFECNECGKAFSHKSALTLHQRTHTGEKPYQCNACGKTFCQKSDLTKHQRTHTGLKPYECYECGKSFRVTSHLKVHQRTHTGEKPFECLECGKSFSEKSNLTQHQRIHIGDKSYECNACGKTFYHKSLLTRHQIIHTGWKPYECYECGKTFCLKSDLTVHQRTHTGQKPFACPECGKFFSHKSTLSQHYRTHTGEKPYECHECGKIFYNKSYLTKHNRTHTGEKPYECNECGKAFYQKSQLTQHQRIHIGEKPYKCNECGKAFCHKSALIVHQRTHTQEKPYKCNECGKSFCVKSGLIFHERKHTGEKPYECNECGKFFRHKSSLTVHHRAHTGEKSCQCNECGKIFYRKSELAQHQRSHTGEKPYECNTCRKTFSQKSNLIVHQRRHIGENLMNEMDIRNFQPQVSLHNASEYSHCGESPDDILNVQ

SEQ ID NO: 3822 - protein, 378 aa, Homo sapiens
MSSFDLPAPSPPRCSPQFPSIGQEPPEMNLYYENFFHPQGVPSPQRPSFEGGGEYGATPNPYLWFNGPTMTPPPYLPGPNASPFLPQAYGVQRPLLPSVSGLGGSDLGWLPIPSQEELMKLVRPPYSYSALIAMAIHGAPDKRLTLSQIYQYVADNFPFYNKSKAGWQNSIRHNLSLNDCFKKVPRDEDDPGKGNYWTLDPNCEKMFDNGNFRRKRKRKSDVSSSTASLALEKTESSLPVDSPKTTEPQDILDGASPGGTTSSPEKRPSPPPSGAPCLNSFLSSMTAYVSGGSPTSHPLVTPGLSPEPSDKTGQNSLTFNSFSPLTNLSNHSGGGDWANPMPTNMLSYGGSVLSQFSPHFYNSVNTSGVLYPREGTEV

SEQ ID NO: 3823 - protein, 501 aa, Homo sapiens
MTPGALLMLLGALGAPLAPGVRGSEAEGRLREKLFSGYDSSVRPAREVGDRVRVSVGLILAQLISLNEKDEEMSTKVYLDLEWTDYRLSWDPAEHDGIDSLRITAESVWLPDVVLLNNNDGNFDVALDISVVVSSDGSVRWQPPGIYRSSCSIQVTYFPFDWQNCTMVFSSYSYDSSEVSLQTGLGPDGQGHQEIHIHEGTFIENGQWEIIHKPSRLIQPPGDPRGGREGQRQEVIFYLIIRRKPLFYLVNVIAPCILITLLAIFVFYLPPDAGEKMGLSIFALLTLTVFLLLLADKVPETSLSVPIIIKYLMFTMVLVTFSVILSVVVLNLHHRSPHTHQMPLWVRQIFIHKLPLYLRLKRPKPERDLMPEPPHCSSPGSGWGRGTDEYFIRKPPSDFLFPKPNRFQPELSAPDLRRFIDGPNRAVALLPELREVVSSISYIARQLQEQEDHDALKEDWQFVAMVVDRLFLWTFIIFTSVGTLVIFLDATYHLPPPDPFP

SEQ ID NO: 3824 - protein, 1050 aa, Homo sapiens
MALYDEDLLKNPFYLALQKCRPDLCSKVAQIHGIVLVPCKGSLSSSIQSTCQFESYILIPVEEHFQTLNGKDVFIQGNRIKLGAGFACLLSVPILFEETFYNEKEESFSILCIAHPLEKRESSEEPLAPSDPFSLKTIEDVREFLGRHSERFDRNIASFHRTFRECERKSLRHHIDSANALYTKCLQQLLRDSHLKMLAKQEAQMNLMKQAVEIYVHHEIYNLIFKYVGTMEASEDAAFNKITRSLQDLQQKDIGVKPEFSFNIPRAKRELAQLNKCTSPQQKLVCLRKVVQLITQSPSQRVNLETMCADDLLSVLLYLLVKTEIPNWMANLSYIKNFRFSSLAKDELGYCLTSFEAAIEYIRQGSLSAKPPESEGFGDRLFLKQRMSLLSQMTSSPTDCLFKHIASGNQKEVERLLSQEDHDKDTVQKMCHPLCFCDDCEKLVSGRLNDPSVVTPFSRDDRGHTPLHVAAVCGQASLIDLLVSKGAMVNATDYHGATPLHLACQKGYQSVTLLLLHYKASAEVQDNNGNTPLHLACTYGHEDCVKALVYYDVESCRLDIGNEKGDTPLHIAARWGYQGVIETLLQNGASTEIQNRLKETPLKCALNSKILSVMEAYHLSFERRQKSSEAPVQSPQRSVDSISQESSTSSFSSMSASSRQEETKKDYREVEKLLRAVADGDLEMVRYLLEWTEEDLEDAEDTVSAADPEFCHPLCQCPKCAPAQKRLAKVPASGLGVNVTSQDGSSPLHVAALHGRADLIPLLLKHGANAGARNADQAVPLHLACQQGHFQVVKCLLDSNAKPNKKDLSGNTPLIYACSGGHHELVALLLQHGASINASNNKGNTALHEAVIEKHVFVVELLLLHGASVQVLNKRQRTAVDCAEQNSKIMELLQVVPSCVASLDDVAETDRKEYVTVKIRKKWNSKLYDLPDEPFTRQFYFVHSAGQFKGKTSREIMARDRSVPNLTEGSLHEPGRQSVTLRQNNLPAQSGSHAAEKGNSDWPERPGLTQTGPGHRRMLRRHTVEDAVVSQGPEAAGPLSTPQEVSASRS

SEQ ID NO: 3825 - protein, 1048 aa, Homo sapiens
MQSKVTGNMPTQSLLMYMDGPEVIGSSLGSPMEMEDALSMKGTAVVPFRATQEKNVIQIEGYMPLDCMFCSQTFTHSEDLNKHVLMQHRPTLCEPAVLRVEAEYLSPLDKSQVRTEPPKEKNCKENEFSCEVCGQTFRVAFDVEIHMRTHKDSFTYGCNMCGRRFKEPWFLKNHMRTHNGKSGARSKLQQGLESSPATINEVVQVHAAESISSPYKICMVCGFLFPNKESLIEHRKVHTKKTAFGTSSAQTDSPQGGMPSSREDFLQLFNLRPKSHPETGKKPVRCIPQLDPFTTFQAWQLATKGKVAICQEVKESGQEGSTDNDDSSSEKELGETNKGSCAGLSQEKEKCKHSHGEAPSVDADPKLPSSKEKPTHCSECGKAFRTYHQLVLHSRVHKKDRRAGAESPTMSVDGRQPGTCSPDLAAPLDENGAVDRGEGGSEDGSEDGLPEGIHLDKNDDGGKIKHLTSSRECSYCGKFFRSNYYLNIHLRTHTGEKPYKCEFCEYAAAQKTSLRYHLERHHKEKQTDVAAEVKNDGKNQDTEDALLTADSAQTKNLKRFFDGAKDVTGSPPAKQLKEMPSVFQNVLGSAVLSPAHKDTQDFHKNAADDSADKVNKNPTPAYLDLLKKRSAVETQANNLICRTKADVTPPPDGSTTHNLEVSPKEKQTETAADCRYRPSVDCHEKPLNLSVGALHNCPAISLSKSLIPSITCPFCTFKTFYPEVLMMHQRLEHKYNPDVHKNCRNKSLLRSRRTGCPPALLGKDVPPLSSFCKPKPKSAFPAQSKSLPSAKGKQSPPGPGKAPLTSGIDSSTLAPSNLKSHRPQQNVGVQGAATRQQQSEMFPKTSVSPAPDKTKRPETKLKPLPVAPSQPTLGSSNINGSIDYPAKNDSPWAPPGRDYFCNRSASNTAAEFGEPLPKRLKSSVVALDVDQPGANYRRGYDLPKYHMVRGITSLLPQDCVYPSQALPPKPRFLSSSEVDSPNVLTVQKPYGGSGPLYTCVPAGSPASSSTLEGKRPVSYQHLSNSMAQKRNYENFIGNAHYRPNDKKT

SEQ ID NO: 3826 - protein, 175 aa, Homo sapiens
MLPPMALPSVSWMLLSCLMLLSQVQGEEPQRELPSARIRCPKGSKAYGSHCYALFLSPKSWTDADLACQKRPSGNLVSVLSGAEGSFVSSLVKSIGNSYSYVWIGLHDPTQGTEPNGEGWEWSSSDVMNYFAWERNPSTISSPGHCASLSRSTAFLRWKDYNCNVRLPYVCKFTD

SEQ ID NO: 3827 - protein, 378 aa, Homo sapiens
MKTGHFEIVTMLLATMILVDIFQVKAEVLDMADNAFDDEYLKCTDRMEIKYVPQLLKEEKASHQQLDTVWENAKAKWAARKTQIFLPMNFKDNHGIALMAYISEAQEQTPFYHLFSEAVKMAGQSREDYIYGFQFKAFHFYLTRALQLLRKPCEASSKTVVYRTSQGTSFTFGGLNQARFGHFTLAYSAKPQAANDQLTVLSIYTCLGVDIENFLDKESERITLIPLNEVFQVSQEGAGNNLILQSINKTCSHYECAFLGGLKTENCIENLEYFQPIYVYNPGEKNQKLEDHSEKNWKLEDHGEKNQKLEDHGVKILEPTQIPEDKSQGNINNPTPGPVPVPGPKSHPSASSGKLLLPQFGMVIILISVSAINLFVAL

SEQ ID NO: 3828 - protein, 2335 aa, Homo sapiens
MAGVFPYRGPGNPVPGPLAPLPDYMSEEKLQEKARKWQQLQAKRYAEKRKFGFVDAQKEDMPPEHVRKIIRDHGDMTNRKFRHDKRVYLGALKYMPHAVLKLLENMPMPWEQIRDVPVLYHITGAISFVNEIPWVIEPVYISQWGSMWIMMRREKRDRRHFKRMRFPPFDDEEPPLDYADNILDVEPLEAIQLELDPEEDAPVLDWFYDHQPLRDSRKYVNGSTYQRWQFTLPMMSTLYRLANQLLTDLVDDNYFYLFDLKAFFTSKALNMAIPGGPKFEPLVRDINLQDEDWNEFNDINKIIIRQPIRTEYKIAFPYLYNNLPHHVHLTWYHTPNVVFIKTEDPDLPAFYFDPLINPISHRHSVKSQEPLPDDDEEFELPEFVEPFLKDTPLYTDNTANGIALLWAPRPFNLRSGRTRRALDIPLVKNWYREHCPAGQPVKVRVSYQKLLKYYVLNALKHRPPKAQKKRYLFRSFKATKFFQSTKLDWVEVGLQVCRQGYNMLNLLIHRKNLNYLHLDYNFNLKPVKTLTTKERKKSRFGNAFHLCREVLRLTKLVVDSHVQYRLGNVDAFQLADGLQYIFAHVGQLTGMYRYKYKLMRQIRMCKDLKHLIYYRFNTGPVGKGPGCGFWAAGWRVWLFFMRGITPLLERWLGNLLARQFEGRHSKGVAKTVTKQRVESHFDLELRAAVMHDILDMMPEGIKQNKARTILQHLSEAWRCWKANIPWKVPGLPTPIENMILRYVKAKADWWTNTAHYNRERIRRGATVDKTVCKKNLGRLTRLYLKAEQERQHNYLKDGPYITAEEAVAVYTTTVHWLESRRFSPIPFPPLSYKHDTKLLILALERLKEAYSVKSRLNQSQREELGLIEQAYDNPHEALSRIKRHLLTQRAFKEVGIEFMDLYSHLVPVYDVEPLEKITDAYLDQYLWYEADKRRLFPPWIKPADTEPPPLLVYKWCQGINNLQDVWETSEGECNVMLESRFEKMYEKIDLTLLNRLLRLIVDHNIADYMTAKNNVVINYKDMNHTNSYGIIRGLQFASFIVQYYGLVMDLLVLGLHRASEMAGPPQMPNDFLSFQDIATEAAHPIRLFCRYIDRIHIFFRFTADEARDLIQRYLTEHPDPNNENIVGYNNKKCWPRDARMRLMKHDVNLGRAVFWDIKNRLPRSVTTVQWENSFVSVYSKDNPNLLFNMCGFECRILPKCRTSYEEFTHKDGVWNLQNEVTKERTAQCFLRVDDESMQRFHNRVRQILMASGSTTFTKIVNKWNTALIGLMTYFREAVVNTQELLDLLVKCENKIQTRIKIGLNSKMPSRFPPVVFYTPKELGGLGMLSMGHVLIPQSDLRWSKQTDVGITHFRSGMSHEEDQLIPNLYRYIQPWESEFIDSQRVWAEYALKRQEAIAQNRRLTLEDLEDSWDRGIPRINTLFQKDRHTLAYDKGWRVRTDFKQYQVLKQNPFWWTHQRHDGKLWNLNNYRTDMIQALGGVEGILEHTLFKGTYFPTWEGLFWEKASGFEESMKWKKLTNAQRSGLNQIPNRRFTLWWSPTINRANVYVGFQVQLDLTGIFMHGKIPTLKISLIQIFRAHLWQKIHESIVMDLCQVFDQELDALEIETVQKETIHPRKSYKMNSSCADILLFASYKWNVSRPSLLADSKDVMDSTTTQKYWIDIQLRWGDYDSHDIERYARAKFLDYTTDNMSIYPSPTGVLIAIDLAYNLHSAYGNWFPGSKPLIQQAMAKIMKANPALYVLRERIRKGLQLYSSEPTEPYLSSQNYGELFSNQIIWFVDDTNVYRVTIHKTFEGNLTTKPINGAIFIFNPRTGQLFLKIIHTSVWAGQKRLGQLAKWKTAEEVAALIRSLPVEEQPKQIIVTRKGMLDPLEVHLLDFPNIVIKGSELQLPFQACLKVEKFGDLILKATEPQMVLFNLYDDWLKTISSYTAFSRLILILRALHVNNDRAKVILKPDKTTITEPHHIWPTLTDEEWIKVEVQLKDLILADYGKKNNVNVASLTQSEIRDIILGMEISAPSQQRQQIAEIEKQTKEQSQLTATQTRTVNKHGDEIITSTTSNYETQTFSSKTEWRVRAISAANLHLRTNHIYVSSDDIKETGYTYILPKNVLKKFICISDLRAQIAGYLYGVSPPDNPQVKEIRCIVMVPQWGTHQTVHLPGQLPQHEYLKEMEPLGWIHTQPNESPQLSPQDVTTHAKIMADNPSWDGEKTIIITCSFTPGSCTLTAYKLTPSGYEWGRQNTDKGNNPKGYLPSHYERVQMLLSDRFLGFFMVPAQSSWNYNFMGVRHDPNMKYELQLANPKEFYHEVHRPSHFLNFALLQEGEVYSADREDLYA

SEQ ID NO: 3829 - protein, 579 aa, Homo sapiens
MSAAIAALAASYGSGSGSESDSDSESSRCPLPAADSLMHLTKSPSSKPSLAVAVDSAPEVAVKEDLETGVHLDPAVKEVQYNPTYETMFAPEFGPENPFRTQQMAAPRNMLSGYAEPAHINDFMFEQQRRTFATYGYALDPSLDNHQVSAKYIGSVEEAEKNQGLTVFETGQKKTEKRKKFKENDASNIDGFLGPWAKYVDEKDVAKPSEEEQKELDEITAKRQKKGKQEEEKPGEEKTILHVKEMYDYQGRSYLHIPQDVGVNLRSTMPPEKCYLPKKQIHVWSGHTKGVSAVRLFPLSGHLLLSCSMDCKIKLWEVYGERRCLRTFIGHSKAVRDICFNTAGTQFLSAAYDRYLKLWDTETGQCISRFTNRKVPYCVKFNPDEDKQNLFVAGMSDKKIVQWDIRSGEIVQEYDRHLGAVNTIVFVDENRRFVSTSDDKSLRVWEWDIPVDFKYIAEPSMHSMPAVTLSPNGKWLACQSMDNQILIFGAQNRFRLNKKKIFKGHMVAGYACQVDFSPDMSYVISGDGNGKLNIWDWKTTKLYSRFKAHDKVCIGAVWHPHETSKVITCGWDGLIKLWD

SEQ ID NO: 3830 - protein, 1380 aa, Homo sapiens
PSYSRSKSISASGRPPLKRMERASSRVGETEELPEIRVDAASPGPRVTFNIQDTLKNTVWGSTPQSSCPGEGYFQFPEETELDLLSVTIEGPSHYSSNSEGSCSVFSSPKTPGGFSPGIPFQTEEGRRDDSLSSTSEDSEKDEKDEDHERERFYIYRKPSHTSRKKATGFAAVHQLFTERWPTTPVNRSLSGTATERNIDFELDIRVEIDSGKCVLHPTTLLQEHDDISLRRSYDRSSRSLDQDSPSKKKKFQTNYASTTHLMTGKKVPSSLQTKPSDLETTVFYIPGVDVKLHYNSKTLKTESPNASRGSSLPRTLSKESKLYAKGKGSGGVKTAKLYAWVALQSLPEEMVISPCLLDFLEKALETIPITPVERNYTAVSSQDEDMGHFEIPDPMEESTTSLVSSSTSAYSSFPVDVVVYVRVQPSQIKFSCLPVSRVECMLKLPSLDLVFSSNRGELETLGTTYPAETLSPGGNATQSGTKTSASKTGIPGSSGLGSPLGRSRHSSSQSDLTSSSSSSSGLSFTACMSDFSLYVFHPYGAGKQKTAVSGLTPGSGGLGNVDEEPTSVTGRKDSLSINLEFVKVSLSRIRRSGGASFFESQSVSKSASKMDTTLINISAVCDIGSASFKYDMRRLSEILAFPRAWYRRSIARRLFLGDQTINLPTSGPGTPDSIEGVSQHLSPESSRKAYCKTWEQPSQSASFTHMPQSPNVFNEHMTNSTMSPGTVGQSLKSPASIRSRSVSDSSVPRRDSLSKTSTPFNKSNKAASQQGTPWETLVVFAINLKQLNVQMNMSNVMGNTTWTTSGLKSQGRLSVGSNRDREISMSVGLGRSQLDSKGGVVGGTIDVNALEMVAHISEHPNQQPSHKIQITMGSTEARVDYMGSSILMGIFSNADLKLQDEWKVNLYNTLDSSITDKSEIFVHGDLKWDIFQVMISRSTTPDLIKIGMKLQEFFTQQFDTSKRALSTWGPVPYLPPKTMTSNLEKSSQEQLLDAAHHRHWPGVLKVVSGCHISLFQIPLPEDGMQFGGSMSLHGNHMTLACFHGPNFRSKSWALFHLEEPNIAFWTEAQKIWEDGSSDHSTYIVQTLDFHLGHNTMVTKPCGALESPMATITKITRRRHENPPHGVASVKEWFNYVTATRNEELNLLRNVDANNTENSTTVKNSSLLSGFRGGSSYNHETETIFALPRMQLDFKSIHVQEPQEPSLQDASLKPKVECSVVTEFTDHICVTMDAELIMFLHDLVSAYLKEKEKAIFPPRILSTRPGQKSPIIIHDDNSSDKDREDSITYTTVDWRDFMCNTWHLEPTLRLISWTGRKIDPVGVDYILQKLGFHHARTTIPKWLQRGVMDPLDKVLSVLIKKLGTALQDEKEKKGKDKEEH

SEQ ID NO: 3831 - protein, 633 aa, Homo sapiens
MANQVNGNAVQLKEEEEPMDTSSVTHTEHYKTLIEAGLPQKVAERLDEIFQTGLVAYVDLDERAIDALREFNEEGALSVLQQFKESDLSHVQNKSAFLCGVMKTYRQREKQGSKVQESTKGPDEAKIKALLERTGYTLDVTTGQRKYGGPPPDSVYSGVQPGIGTEVFVGKIPRDLYEDELVPLFEKAGPIWDLRLMMDPLSGQNRGYAFITFCGKEAAQEAVKLCDSYEIRPGKHLGVCISVANNRLFVGSIPKNKTKENILEEFSKVTEGLVDVILYHQPDDKKKNRGFCFLEYEDHKSAAQARRRLMSGKVKVWGNVVTVEWADPVEEPDPEVMAKVKVLFVRNLATTVTEEILEKSFSEFGKLERVKKLKDYAFVHFEDRGAAVKAMDEMNGKEIEGEEIEIVLAKPPDKKRKERQAARQASRSTAYEDYYYHPPPRMPPPIRGRGRGGGRGGYGYPPDYYGYEDYYDDYYGYDYHDYRGGYEDPYYGYDDGYAVRGRGGGRGGRGAPPPPRGRGAPPPRGRAGYSQRGAPLGPPRGSRGGRGGPAQQQRGRGSRGSRGNRGGNVGGKRKADGYNQPDSKRRQTNNQQNWGSQPIAQQPLQQGGDYSGNYGYNNDNQEFYQDTYGQQWK

SEQ ID NO: 3832 - protein, 1466 aa, Homo sapiens
MMSFVQKGSWLLLALLHPTIILAQQEAVEGGCSHLGQSYADRDVWKPEPCQICVCDSGSVLCDDIICDDQELDCPNPEIPFGECCAVCPQPPTAPTRPPNGQGPQGPKGDPGPPGIPGRNGDPGIPGQPGSPGSPGPPGICESCPTGPQNYSPQYDSYDVKSGVAVGGLAGYPGPAGPPGPPGPPGTSGHPGSPGSPGYQGPPGEPGQAGPSGPPGPPGAIGPSGPAGKDGESGRPGRPGERGLPGPPGIKGPAGIPGFPGMKGHRGFDGRNGEKGETGAPGLKGENGLPGENGAPGPMGPRGAPGERGRPGLPGAAGARGNDGARGSDGQPGPPGPPGTAGFPGSPGAKGEVGPAGSPGSNGAPGQRGEPGPQGHAGAQGPPGPPGINGSPGGKGEMGPAGIPGAPGLMGARGPPGPAGANGAPGLRGGAGEPGKNGAKGEPGPRGERGEAGIPGVPGAKGEDGKDGSPGEPGANGLPGAAGERGAPGFRGPAGPNGIPGEKGPAGERGAPGPAGPRGAAGEPGRDGVPGGPGMRGMPGSPGGPGSDGKPGPPGSQGESGRPGPPGPSGPRGQPGVMGFPGPKGNDGAPGKNGERGGPGGPGPQGPPGKNGETGPQGPPGPTGPGGDKGDTGPPGPQGLQGLPGTGGPPGENGKPGEPGPKGDAGAPGAPGGKGDAGAPGERGPPGLAGAPGLRGGAGPPGPEGGKGAAGPPGPPGAAGTPGLQGMPGERGGLGSPGPKGDKGEPGGPGADGVPGKDGPRGPTGPIGPPGPAGQPGDKGEGGAPGLPGIAGPRGSPGERGETGPPGPAGFPGAPGQNGEPGGKGERGAPGEKGEGGPPGVAGPPGGSGPAGPPGPQGVKGERGSPGGPGAAGFPGARGLPGPPGSNGNPGPPGPSGSPGKDGPPGPAGNTGAPGSPGVSGPKGDAGQPGEKGSPGAQGPPGAPGPLGIAGITGARGLAGPPGMPGPRGSPGPQGVKGESGKPGANGLSGERGPPGPQGLPGLAGTAGEPGRDGNPGSDGLPGRDGSPGGKGDRGENGSPGAPGAPGHPGPPGPVGPAGKSGDRGESGPAGPAGAPGPAGSRGAPGPQGPRGDKGETGERGAAGIKGHRGFPGNPGAPGSPGPAGQQGAIGSPGPAGPRGPVGPSGPPGKDGTSGHPGPIGPPGPRGNRGERGSEGSPGHPGQPGPPGPPGAPGPCCGGVGAAAIAGIGGEKAGGFAPYYGDEPMDFKINTDEIMTSLKSVNGQIESLISPDGSRKNPARNCRDLKFCHPELKSGEYWVDPNQGCKLDAIKVFCNMETGETCISANPLNVPRKHWWTDSSAEKKHVWFGESMDGGFQFSYGNPELPEDVLDVHLAFLRLLSSRASQNITYHCKNSIAYMDQASGNVKKALKLMGSNEGEFKAEGNSKFTYTVLEDGCTKHTGEWSKTVFEYRTRKAVRLPIVDIAPYDIGGPDQEFGVDVGPVCFL

SEQ ID NO: 3833 - protein, 357 aa, Homo sapiens
MNWVNKSVPQEFILLVFSDQPWLEIPPFVMFLFSYILTIFGNLTIILVSHVDFKLHTPMYFFLSNLSLLDLCYTTSTVPQMLVNICNTRKVISYGGCVAQLFIFLALGSTECLLLAVMCFDRFVAICRPLHYSIIMHQRLCFQLAAASWISGFSNSVLQSTWTLKMPLCGHKEVDHFFCEVPALLKLSCVDTTANEAELFFISVLFLLIPVTLILISYAFIVQAVLRIQSAEGQRKAFGTCGSHLIVVSLFYGTAISMYLQPPSPSSKDRGKMVSLFCGIIAPMLNPLIYTLRNKEVKEAFKRLVAKSLLNQEIRNMQMISFAKDTVLTYLTNFSASCPIFVITIENYCNLPQRKFP

SEQ ID NO: 3834 - protein, 1749 aa, Homo sapiens
MQAMDPAAADLYEEDGKDLDFYDFEPLPTLPEDEENVSLADILSLRDRGLSEQEAWAVCLECSLSMRSVAHAAIFQSLCITPDTLAFNTSGNVCFMEQLSDDPEGAFVPPEFDVTGNTFEAHIYSLGATLKAALEYVAEPTLEPRLSQDLEALLSRMQAEDPGDRPDLESIIALCEEKLQLTSSCRVCRSLSAVGRRVLSIESFGALQDVSESSWRERPAPGNAGPRRPPGDPSTDPEVLPTPEGPESETSRGPRASPTKALLSTPVRNGESHSREGLAGLVLDAERTLGELDRDALRRSRLRKVQTFPRLLSDSPEATLCLPLTRGKSQLPISELFSPDPRKAFLDRKNGLSSFQAQPKCRLWPEQEPEHQLGRVPCAGRSTDRGPGVPGSPGQPETSHPSQGPAEAPADPRDASGEAQTPRDDERIPEGARQLESAAAEQWVSLQDLLSQLGRPFREYELWALCLACLRALQTRPEHPAYLCLDSVLVAEDGAVLFQPPPANGSYDSFFLAPELAEERLVTEKASVYCVAAVLWTAAKFSVPRNHKLALPRRLKTLLLDMARRSAPERPSAAEAIKVCGSYLLQRGMDSRKILAHLRASICQVYQEEETISLQNAFSVVELKPSVAPAPEPSPGFLPVNSDTGLVAVPGPVPGQHPCGEEATQLPAAFTSEATHFKPIVLAQNASVARDQPALAQEESEERGGQREGEGEEKLSLEAHAGSPSLKTPDGPVPGPGPQGAAPEPLGASVQRDSAQGRPCPPPQAPANQPEGASSAAPGSPVPAPPTKASALPVEQGPAEPIPPGVASGGLRPDALGPTTAHHGPRHPPKPPRSKATERPGQEPEGPGATPAGERDDQSPDSVPERPRPADRRLCLPCVDASPLPGRTACPSLQEATRLIQEEFAFDGYLDNGLEALIMGEYIFALKDLTFATFCGAISEKFCDLYWDEKLLQNLFKVVNGQASPSPSTAEEAGSQLEGSQSPRSPSSKRPSLHRLGKEKPAMARTSSRAPCSPTSVSDVDSDALSRGNFEVGFRPQRSVKAERAQQPEAGEDRRPAGGASDVEAVTRLARSKGVGPALSPGPAGFQSCSPGWCSAFYEADCFGADVHNYVKDLGRQQADGALPDAQSPELEQQLMMEKRNYRKTLKFYQKLLQKEKRNKGSDVKTMLSKLKGQLEEMKSRVQFLSLVKKYLQVMYAERWGLEPCTLPVIVNIAAAPCDTLDFSPLDESSSLIFYNVNKHPGGRQKARILQAGTPLGLMAYLYSSDAFLEGYVQQFLYTFRYFCTPHDFLHFLLDRINSTLTRAHQDPTSTFTKIYRRSLCVLQAWVEDCYAVDFPRNSGLLGKLEDFISSKILPLDGSAKHLLGLLEVGMDRRAEGNPRGTDLENPREAEEDARPFNALCKRLSEDGISRKSFPWRLPRGNGLVLPPHKERPYTIAAALPKPCFLEDFYGPCAKTSEKGPYFLTEYSTHQLFSQLTLLQQELFQKCHPVHFLNSRALGVMDKSTAIPKASSSESLSAKTCSLFLPNYVQDKYLLQLLRNADDVSTWVAAEIVTSHTSKLQVNLLSKFLLIAKSCYEQRNFATAMQILSGLEHLAVRQSPAWRILPAKIAEVMEELKAVEVFLKSDSLCLMEGRRFRAQPTLPSAHLLAMHIQQLETGGFTMTNGAHRWSKLRNIAKVVSQVHAFQENPYTFSPDPKLQSYLKQRIARFSGADISTLAADSRANFHQVSSEKHSRKIQDKLRRMKATFQ

SEQ ID NO: 3835 - protein, 1136 aa, Homo sapiens
MADQIPLYPVRSAAAAAANRKRAAYYSAAGPRPGADRHSRYQLEDESAHLDEMPLMMSEEGFENEESDYHTLPRARIMQRKRGLEWFVCDGWKFLCTSCCGWLINICRRKKELKARTVWLGCPEKCEEKHPRNSIKNQKYNVFTFIPGVLYEQFKFFLNLYFLVISCSQFVPALKIGYLYTYWAPLGFVLAVTMTREAIDEFRRFQRDKEVNSQLYSKLTVRGKVQVKSSDIQVGDLIIVEKNQRIPSDMVFLRTSEKAGSCFIRTDQLDGETDWKLKVAVSCTQQLPALGDLFSISAYVYAQKPQMDIHSFEGTFTREDSDPPIHESLSIENTLWASTIVASGTVIGVVIYTGKETRSVMNTSNPKNKVGLLDLELNRLTKALFLALVALSIVMVTLQGFVGPWYRNLFRFLLLFSYIIPISLRVNLDMGKAVYGWMMMKDENIPGTVVRTSTIPEELGRLVYLLTDKTGTLTQNEMIFKRLHLGTVSYGADTMDEIQSHVRDSYSQMQSQAGGNNTGSTPLRKAQSSAPKVRKSVSSRIHEAVKAIVLCHNVTPVYESRAGVTEETEFAEADQDFSDENRTYQASSPDEVALVQWTESVGLTLVSRDLTSMQLKTPSGQVLSFCILQLFPFTSESKRMGVIVRDESTAEITFYMKGADVAMSPIVQYNDWLEEECGNMAREGLRTLVVAKKALTEEQYQDFESRYTQAKLSMHDRSLKVAAVVESLEREMELLCLTGVEDQLQADVRPTLEMLRNAGIKIWMLTGDKLETATCIAKSSHLVSRTQDIHIFRQVTSRGEAHLELNAFRRKHDCALVISGDSLEVCLKYYEHEFVELACQCPAVVCCRCSPTQKARIVTLLQQHTGRRTCAIGDGGNDVSMIQAADCGIGIEGKEGKQASLAADFSITQFRHIGRLLMVHGRNSYKRSAALGQFVMHRGLIISTMQAVFSSVFYFASVPLYQGFLMVGYATIYTMFPVFSLVLDQDVKPEMAMLYPELYKDLTKGRSLSFKTFLIWVLISIYQGGILMYGALVLFESEFVHVVAISFTALILTELLMVALTVRTWHWLMVVAEFLSLGCYVSSLAFLNEYFDVAFITTVTFLWKVSAITVVSCLPLYVLKYLRRKLSPPSYCKLAS

SEQ ID NO: 3836 - protein, 1608 aa, Homo sapiens
MVQKKKFCPRLLDYLVIVGARHPSSDSVAQTPELLRRYPLEDHTEFPLPPDVVFFCQPEGCLSVRQRRMSLRDDTSFVFTLTDKDTGVTRYGICVNFYRSFQKRISKEKGEGGAGSRGKEGTHATCASEEGGTESSESGSSLQPLSADSTPDVNQSPRGKRRAKAGSRSRNSTLTSLCVLSHYPFFSTFRECLYTLKRLVDCCSERLLGKKLGIPRGVQRDTMWRIFTGSLLVEEKSSALLHDLREIEAWIYRLLRSPVPVSGQKRVDIEVLPQELQPALTFALPDPSRFTLVDFPLHLPLELLGVDACLQVLTCILLEHKVVLQSRDYNALSMSVMAFVAMIYPLEYMFPVIPLLPTCMASAEQLLLAPTPYIIGVPASFFLYKLDFKMPDDVWLVDLDSNRVIAPTNAEVLPILPEPESLELKKHLKQALASMSLNTQPILNLEKFHEGQEIPLLLGRPSNDLQSTPSTEFNPLIYGNDVDSVDVATRVAMVRFFNSANVLQGFQMHTRTLRLFPRPVVAFQAGSFLASRPRQTPFAEKLARTQAVEYFGEWILNPTNYAFQRIHNNMFDPALIGDKPKWYAHQLQPIHYRVYDSNSQLAEALSVPPERDSDSEPTDDSGSDSMDYDDSSSSYSSLGDFVSEMMKCDINGDTPNVDPLTHAALGDASEVEIDELQNQKEAEEPGPDSENSQENPPLRSSSSTTASSSPSTVIHGANSEPADSTEMDDKAAVGVSKPLPSVPPSIGKSNVDRRQAEIGEGSVRRRIYDNPYFEPQYGFPPEEDEDEQGESYTPRFSQHVSGNRAQKLLRPNSLRLASDSDAESDSRASSPNSTVSNTSTEGFGGIMSFASSLYRNHSTSFSLSNLTLPTKGAREKATPFPSLKVFGLNTLMEIVTEAGPGSGEGNRRALVDQKSSVIKHSPTVKREPPSPQGRSSNSSENQQFLKEVVHSVLDGQGVGWLNMKKVRRLLESEQLRVFVLSKLNRMVQSEDDARQDIIPDVEISRKVYKGMLDLLKCTVLSLEQSYAHAGLGGMASIFGLLEIAQTHYYSKEPDKRKRSPTESVNTPVGKDPGLAGRGDPKAMAQLRVPQLGPRAPSATGKGPKELDTRSLKEENFIASIGPEVIKPVFDLGETEEKKSQISADSGVSLTSSSQRTDQDSVIGVSPAVMIRSSSQDSEVSTVVSNSSGETLGADSDLSSNAGDGPGGEGSVHLASSRGTLSDSEIETNSATSTIFGKAHSLKPSIKEKLAGSPIRTSEDVSQRVYLYEGLLGKERSTLWDQMQFWEDAFLDAVMLEREGMGMDQGPQEMIDRYLSLGEHDRKRLEDDEDRLLATLLHNLISYMLLMKVNKNDIRKKVRRLMGKSHIGLVYSQQINEVLDQLANLNGRDLSIWSSGSRHMKKQTFVVHAGTDTNGDIFFMEVCDDCVVLRSNIGTVYERWWYEKLINMTYCPKTKVLCLWRRNGSETQLNKFYTKKCRELYYCVKDSMERAAARQQSIKPGPELGGEFPVQDLKTGEGGLLQVTLEGINLKFMHNQVFIELNHIKKCNTVRGVFVLEEFVPEIKEVVSHKYKTPMAHEICYSVLCLFSYVAAVHSSEEDLRTPPRPVSS

SEQ ID NO: 3837 - protein, 224 aa, Homo sapiens
MSAVGAATPYLHHPGDSHSGRVSFLGAQLPPEVAAMARLLGDLDRSTFRKLLKFVVSSLQGEDCREAVQRLGVSANLPEEQLGALLAGMHTLLQQALRLPPTSLKPDTFRDQLQELCIPQDLVGDLASVVFGSQRPLLDSVAQQQGAWLPHVADFRWRVDVAISTSALARSLQPSVLMQLKLSDGSAYRFEVPTAKFQELRYSVALVLKEMADLEKRCERRLQD

SEQ ID NO: 3838 - protein, 2511 aa, Homo sapiens
MEEVVIAGMSGKLPESENLQEFWDNLIGGVDMVTDDDRRWKAGLYGLPRRSGKLKDLSRFDASFFGVHPKQAHTMDPQLRLLLEVTYEAIVDGGINPDSLRGTHTGVWVGVSGSETSEALSRDPETLVGYSMVGCQRAMMANRLSFFFDFRGPSIALDTACSSSLMALQNAYQAIHSGQCPAAIVGGINVLLKPNTSVQFLRLGMLSPEGTCKAFDTAGNGYCRSEGVVAVLLTKKSLARRVYATILNAGTNTDGFKEQGVTFPSGDIQEQLIRSLYQSAGVAPESFEYIEAHGTGTKVGDPQELNGITRALCATRQEPLLIGSTKSNMGHPEPASGLAALAKVLLSLEHGLWAPNLHFHSPNPEIPALLDGRLQVVDQPLPVRGGNVGINSFGFGGSNVHIILRPNTQPPPAPAPHATLPRLLRASGRTPEAVQKLLEQGLRHSQDLAFLSMLNDIAAVPATAMPFRGYAVLGGERGGPEVQQVPAGERPLWFICSGMGTQWRGMGLSLMRLDRFRDSILRSDEAVKPFGLKVSQLLLSTDESTFDDIVHSFVSLTAIQIGLIDLLSCMGLRPDGIVGHSLGEVACGYADGCLSQEEAVLAAYWRGQCIKEAHLPPGAMAAVGLSWEECKQRCPPGVVPACHNSKDTVTISGPQAPVFEFVEQLRKEGVFAKEVRTGGMAFHSYFMEAIAPPLLQELKKVIREPKPRSARWLSTSIPEAQWHSSLARTSSAEYNVNNLVSPVLFQEALWHVPEHAVVLEIAPHALLQAVLKRGLKPSCTIIPLMKKDHRDNLEFFLAGIGRLHLSGIDANPNALFPPVEFPAPRGTPLISPLIKWDHSLAWDVPAAEDFPNGSGSPSAAIYNIDTSSESPDHYLVDHTLDGRVLFPATGYLSIVWKTLARALGLGVEQLPVVFEDVVLHQATILPKTGTVSLEVRLLEASRAFEVSENGNLVVSGKVYQWDDPDPRLFDHPESPTPNPTEPLFLAQAEVYKELRLRGYDYGPHFQGILEASLEGDSGRLLWKDNWVSFMDTMLQMSILGSAKHGLYLPTRVTAIHIDPATHRQKLYTLQDKAQVADVVVSRWLRVTVAGGVHISGLHTESAPRRQQEQQVPILEKFCFTPHTEEGCLSERAALQEELQLCKGLVQALQTKVTQQGLKMVVPGLDGAQIPRDPSQQELPRLLSAACRLQLNGNLQLELAQVLAQERPKLPEDPLLSGLLDSPALKACLDTAVENMPSLKMKVVEVLAGHGHLYSRIPGLLSPHPLLQLSYTATDRHPQALEAAQAELQQHDVAQGQWDPADPAPSALGSADLLVCNCAVAALGDPASALSNMVAALREGGFLLLHTLLRGHPLGDIVAFLTSTEPQYGQGILSQDAWESLFSRVSLRLVGLKKSFYGSTLFLCRRPTPQDSPIFLPVDDTSFRWVESLKGILADEDSSRPVWLKAINCATSGVVGLVNCLRREPGGNRLRCVLLSNLSSTSHVPEVDPGSAELQKVLQGDLVMNVYRDGAWGAFRHFLLEEDKPEEPTAHAFVSTLTRGDLSSIRWVCSSLRHAQPTCPGAQLCTVYYASLNFRDIMLATGKLSPDAIPGKWTSQDSLLGMEFSGRDASGKRVMGLVPAKGLATSVLLSPDFLWDVPSNWTLEEAASVPVVYSTAYYALVVRGRVRPGETLLIHSGSGGVGQAAIAIALSLGCRVFTTVGSAEKRAYLQARFPQLDSTSFANSRDTSFEQHVLWHTGGKGVDLVLNSLAEEKLQASVRCLATHGRFLEIGKFDLSQNHPLGMAIFLKNVTFHGVLLDAFFNESSADWREVWALVQAGIRDGVVRPLKCTVFHGAQVEDAFRYMAQGKHIGKVVVQVLAEEPEAVLKGAKPKLMSAISKTFCPAHKSYIIAGGLGGFGLELAQWLIQRGVQKLVLTSRSGIRTGYQAKQVRRWRRQGVQVQVSTSNISSLEGARGLIAEAAQLGPVGGVFNLAVVLRDGLLENQTPEFFQDVCKPKYSGTLNLDRVTREACPELDYFVVFSSVSCGRGNAGQSNYGFANSAMERICEKRRHEGLPGLAVQWGAIGDVGILVETMSTNDTIVSGTLPQRMASCLEVLDLFLNQPHMVLSSFVLAEKAAAYRDRDSQRDLVEAVAHILGIRDLAAVNLDSSLADLGLDSLMSVEVRQTLERELNLVLSVREVRQLTLRKLQELSSKADEASELACPTPKEDGLAQQQTQLNLRSLLVNPEGPTLMRLNSVQSSERPLFLVHPIEGSTTVFHSLASRLSIPTYGLQCTRAAPLDSIHSLAAYYIDCIRQVQPEGPYRVAGYSYGACVAFEMCSQLQAQQSPAPTHNSLFLFDGSPTYVLAYTQSYRAKLTPGCEAEAETEAICFFVQQFTDMEHNRVLEALLPLKGLEERVAAAVDLIIKSHQGLDRQELSFAARSFYYKLRAAEQYTPKAKYHGNVMLLRAKTGGAYGEDLGADYNLSQVCDGKVSVHVIEGDHRTLLEGSGLESIISIIHSSLAEPRVSVREG

SEQ ID NO: 3839 - protein, 1481 aa, Homo sapiens
MSKTLKKKKHWLSKVQECAVSWAGPPGDFGAEIRGGAERGEFPYLGRLREEPGGGTCCVVSGKAPSPGDVLLEVNGTPVSGLTNRDTLAVIRHFREPIRLKTVKPGKVINKDLRHYLSLQFQKGSIDHKLQQVIRDNLYLRTIPCTTRAPRDGEVPGVDYNFISVEQFKALEESGALLESGTYDGNFYGTPKPPAEPSPFQPDPVDQVLFDNEFDAESQRKRTTSVSKMERMDSSLPEEEEDEDKEAINGSGNAENRERHSESSDWMKTVPSYNQTNSSMDFRNYMMRDETLEPLPKNWEMAYTDTGMIYFIDHNTKTTTWLDPRLCKKAKAPEDCEDGELPYGWEKIEDPQYGTYYVDHLNQKTQFENPVEEAKRKKQLGQVEIGSSKPDMEKSHFTRDPSQLKGVLVRASLKKSTMGFGFTIIGGDRPDEFLQVKNVLKDGPAAQDGKIAPGDVIVDINGNCVLGHTHADVVQMFQLVPVNQYVNLTLCRGYPLPDDSEDPVVDIVAATPVINGQSLTKGETCMNPQDFKPGAMVLEQNGKSGHTLTGDGLNGPSDASEQRVSMASSGSSQPELVTIPLIKGPKGFGFAIADSPTGQKVKMILDSQWCQGLQKGDIIKEIYHQNVQNLTHLQVVEVLKQFPVGADVPLLILRGGPPSPTKTAKMKTDKKENAGSLEAINEPIPQPMPFPPSIIRSGSPKLDPSEVYLKSKTLYEDKPPNTKDLDVFLRKQESGFGFRVLGGDGPDQSIYIGAIIPLGAAEKDGRLRAADELMCIDGIPVKGKSHKQVLDLMTTAARNGHVLLTVRRKIFYGEKQPEDDSSQAFISTQNGSPRLNRAEVPARPAPQEPYDVVLQRKENEGFGFVILTSKNKPPPGVIPHKIGRVIEGSPADRCGKLKVGDHISAVNGQSIVELSHDNIVQLIKDAGVTVTLTVIAEEEHHGPPSGTNSARQSPALQHRPMGQSQANHIPGDRSALEGEIGKDVSTSYRHSWSDHKHLAQPDTAVISVVGSRHNQNLGCYPVELERGPRGFGFSLRGGKEYNMGLFILRLAEDGPAIKDGRIHVGDQIVEINGEPTQGITHTRAIELIQAGGNKVLLLLRPGTGLIPDHGDWDINNPSSSNVIYDEQSPLPPSSHFASIFEESHVPVIEESLRVQICEKAEELKDIVPEKKSTLNENQPEIKHQSLLQKNVSKRDPPSSHGHSNKKNLLKVENGVTRRGRSVSPKKPASQHSEEHLDKIPSPLKNNPKRRPRDQSLSPSKGENKSCQVSTRAGSGQDQCRKSRGRSASPKKQQKIEGSKAPSNAEAKLLEGKSRRIAGYTGSNAEQIPDGKEKSDVIRKDAKQNQLEKSRTRSPEKKIKRMVEKSLPSKMTNKTTSKEVSENEKGKKVTTGETSSSNDKIGENVQLSEKRLKQEPEEKVVSNKTEDHKGKELEAADKNKETGRFKPESSSPVKKTLITPGPWKVPSGNKVTGTIGMAEKRQ

SEQ ID NO: 3840 - protein, 647 aa, Homo sapiens
MPGKMVVILGASNILWIMFAASQAFKIETTPESRYLAQIGDSVSLTCSTTGCESPFFSWRTQIDSPLNGKVTNEGTTSTLTMNPVSFGNEHSYLCTATCESRKLEKGIQVEIYSFPKDPEIHLSGPLEAGKPITVKCSVADVYPFDRLEIDLLKGDHLMKSQEFLEDADRKSLETKSLEVTFTPVIEDIGKVLVCRAKLHIDEMDSVPTVRQAVKELQVYISPKNTVISVNPSTKLQEGGSVTMTCSSEGLPAPEIFWSKKLDNGNLQHLSGNATLTLIAMRMEDSGIYVCEGVNLIGKNRKEVELIVQAFPRDPEIEMSGGLVNGSSVTVSCKVPSVYPLDRLEIELLKGETILENIEFLEDTDMKSLENKSLEMTFIPTIEDTGKALVCQAKLHIDDMEFEPKQRQSTQTLYVNVAPRDTTVLVSPSSILEEGSSVNMTCLSQGFPAPKILWSRQLPNGELQPLSENATLTLISTKMEDSGVYLCEGINQAGRSRKEVELIIQVTPKDIKLTAFPSESVKEGDTVIISCTCGNVPETWIILKKKAETGDTVLKSIDGAYTIRKAQLKDAGVYECESKNKVGSQLRSLTLDVQGRENNKDYFSPELLVLYFASSLIIPAIGMIIYFARKANMKGSYSLVEAQKSKV

SEQ ID NO: 3841 - protein, 497 aa, Homo sapiens
MASPAPPEHAEEGCPAPAAEEQAPPSPPPPQASPAERQQQEEEAQEAGAAEGAGLQVEEAAGRAAAAVTWLLGEPVLWLGCRADELLSWKRPLRSLLGFVAANLLFWFLALTPWRVYHLISVMILGRVIMQIIKDMVLSRTRGAQLWRSLSESWEVINSKPDERPRLSHCIAESWMNFSIFLQEMSLFKQQSPGKFCLLVCSVCTFFTILGSYIPGVILSYLLLLCAFLCPLFKCNDIGQKIYSKIKSVLLKLDFGIGEYINQKKRERSEADKEKSHKDDSELDFSALCPKISLTVAAKELSVSDTDVSEVSWTDNGTFNLSEGYTPQTDTSDDLDRPSEEVFSRDLSDFPSLENGMGTNDEDELSLGLPTELKRKKEQLDSGHRPSKETQSAAGLTLPLNSDQTFHLMSNLAGDVITAAVTAAIKDQLEGVQQALSQAAPIPEEDTDTEEGDDFELLDQSELDQIESELGLTQDQEAEAQQNKKSSGFLSNLLGGH

SEQ ID NO: 3842 - protein, 906 aa, Homo sapiens
MTAVHAGNINFKWDPKSLEIRTLAVERLLEPLVTQVTTLVNTNSKGPSNKKRGRSKKAHVLAASVEQATENFLEKGDKIAKESQFLKEELVAAVEDVRKQGDLMKAAAGEFADDPCSSVKRGNMVRAARALLSAVTRLLILADMADVYKLLVQLKVVEDGILKLRNAGNEQDLGIQYKALKPEVDKLNIMAAKRQQELKDVGHRDQMAAARGILQKNVPILYTASQACLQHPDVAAYKANRDLIYKQLQQAVTGISNAAQATASDDASQHQGGGGGELAYALNNFDKQIIVDPLSFSEERFRPSLEERLESIISGAALMADSSCTRDDRRERIVAECNAVRQALQDLLSEYMGNAGRKERSDALNSAIDKMTKKTRDLRRQLRKAVMDHVSDSFLETNVPLLVLIEAAKNGNEKEVKEYAQVFREHANKLIEVANLACSISNNEEGVKLVRMSASQLEALCPQVINAALALAAKPQSKLAQENMDLFKEQWEKQVRVLTDAVDDITSIDDFLAVSENHILEDVNKCVIALQEKDVDGLDRTAGAIRGRAARVIHVVTSEMDNYEPGVYTEKVLEATKLLSNTVMPRFTEQVEAAVEALSSDPAQPMDENEFIDASRLVYDGIRDIRKAVLMIRTPEELDDSDFETEDFDVRSRTSVQTEDDQLIAGQSARAIMAQLPQEQKAKIAEQVASFQEEKSKLDAEVSKWDDSGNDIIVLAKQMCMIMMEMTDFTRGKGPLKNTSDVISAAKKIAEAGSRMDKLGRTIADHCPDSACKQDLLAYLQRIALYCHQLNICSKVKAEVQNLGGELVVSGVDSAMSLIQAAKNLMNAVVQTVKASYVASTKYQKSQGMASLNLPAVSWKMKAPEKKPLVKREKQDETQTKIKRASQKKHVNPVQALSEFKAMDSI

SEQ ID NO: 3843 - protein, 723 aa, Homo sapiens
MSESSGSALQPGRPSRQPAVHPENLSLDSSCFSSPPVNFLQELPSYRSIARRRTTVHSRDKQSGTLLKPTDSYSSQLEDRIAENLSSHSLRNYALNISEKRRLRDIQETQMKYLSEWDQWKRYSSKSWKRFLEKAREMTTHLELWREDIRSIEGKFGTGIQSYFSFLRFLVLLNLVIFLIIFMLVLLPVLLTKYKITNSSFVLIPFKDMDKQCTVYPVSSSGLIYFYSYIIDLLSGTGFLEETSLFYGHYTIDGVKFQNFTYDLPLAYLLSTIASLALSLLWIVKRSVEGFKINLIRSEEHFQSYCNKIFAGWDFCITNRSMADLKHSSLRYELRADLEEERMRQKIAERTSEETIRIYSLRLFLNCIVLAVLGACFYAIYVATVFSQEHMKKEIDKMVFGENLFILYLPSIVITLANFITPMIFAKIIRYEDYSPGFEIRLTILRCVFMRLATICVLVFTLGSKITSCDDDTCDLCGYNQKLYPCWETQVGQEMYKLMIFDFIIILAVTLFVDFPRKLLVTYCSSCKLIQCWGQQEFAIPDNVLGIVYGQTICWIGAFFSPLLPAIATLKFIIIFYVKEWSLLYTCRPSPRPFRASNSNFFFLLVLLIGLCLAIIPLTISISRIPSSKACGPFTNFNTTWEVIPKTVSTFPSSLQSFIHGVTSEAFAVPFFMIICLIMFYFIALAGAHKRVVIQLREQLSLESRDKCYLIQKLTEAQRDMRN

SEQ ID NO: 3844 - protein, 345 aa, Homo sapiens
MKQLKRKRKSNFSVQETQTLLKEITKRKEVIFSKQLNTTINVMKRMAWEEIAQCVNAVGEGEQRTGTEVKRRYLDWRALMKRKRMKANIKLVGSGFPLPSSDLDDSLTEEIDEKIGFRNDANFDWQNVADFRDAGGSLTEVKVEEEERDPQSPEFEIEEEEEMLSSVIPDSRRENELPDFPHIDEFFTLNSTPSRSAYDEPHLLVNIEKQKLELEKRRLDIEAERLQVEKERLQIEKERLRHLDMEHERLQLEKERLQIEREKLRLQIVNSEKPSLENELGQGEKSMLQPQDIETEKLKLERERLQLEKDRLQFLKFESEKLQIEKERLQVEKDRLRIQKEGHLQ

SEQ ID NO: 3845 - protein, 1988 aa, Homo sapiens
MAMLPPPGPQSFVHFTKQSLALIEQRIAERKSKEPKEEKKDDDEEAPKPSSDLEAGKQLPFIYGDIPPGMVSEPLEDLDPYYADKKTFIVLNKGKTIFRFNATPALYMLSPFSPLRRISIKILVHSLFSMLIMCTILTNCIFMTMNNPPDWTKNVEYTFTGIYTFESLVKILARGFCVGEFTFLRDPWNWLDFVVIVFAYLTEFVNLGNVSALRTFRVLRALKTISVIPGLKTIVGALIQSVKKLSDVMILTVFCLSVFALIGLQLFMGNLKHKCFRNSLENNETLESIMNTLESEEDFRKYFYYLEGSKDALLCGFSTDSGQCPEGYTCVKIGRNPDYGYTSFDTFSWAFLALFRLMTQDYWENLYQQTLRAAGKTYMIFFVVVIFLGSFYLINLILAVVAMAYEEQNQANIEEAKQKELEFQQMLDRLKKEQEEAEAIAAAAAEYTSIRRSRIMGLSESSSETSKLSSKSAKERRNRRKKKNQKKLSSGEEKGDAEKLSKSESEDSIRRKSFHLGVEGHRRAHEKRLSTPNQSPLSIRGSLFSARRSSRTSLFSFKGRGRDIGSETEFADDEHSIFGDNESRRGSLFVPHRPQERRSSNISQASRSPPMLPVNGKMHSAVDCNGVVSLVDGRSALMLPNGQLLPEVIIDKATSDDSGTTNQIHKKRRCSSYLLSEDMLNDPNLRQRAMSRASILTNTVEELEESRQKCPPWWYRFAHKFLIWNCSPYWIKFKKCIYFIVMDPFVDLAITICIVLNTLFMAMEHHPMTEEFKNVLAIGNLVFTGIFAAEMVLKLIAMDPYEYFQVGWNIFDSLIVTLSLVELFLADVEGLSVLRSFRLLRVFKLAKSWPTLNMLIKIIGNSVGALGNLTLVLAIIVFIFAVVGMQLFGKSYKECVCKINDDCTLPRWHMNDFFHSFLIVFRVLCGEWIETMWDCMEVAGQAMCLIVYMMVMVIGNLVVLNLFLALLLSSFSSDNLTAIEEDPDANNLQIAVTRIKKGINYVKQTLREFILKAFSKKPKISREIRQAEDLNTKKENYISNHTLAEMSKGHNFLKEKDKISGFGSSVDKHLMEDSDGQSFIHNPSLTVTVPIAPGESDLENMNAEELSSDSDSEYSKVRLNRSSSSECSTVDNPLPGEGEEAEAEPMNSDEPEACFTDGCVWRFSCCQVNIESGKGKIWWNIRKTCYKIVEHSWFESFIVLMILLSSGALAFEDIYIERKKTIKIILEYADKIFTYIFILEMLLKWIAYGYKTYFTNAWCWLDFLIVDVSLVTLVANTLGYSDLGPIKSLRTLRALRPLRALSRFEGMRVVVNALIGAIPSIMNVLLVCLIFWLIFSIMGVNLFAGKFYECINTTDGSRFPASQVPNRSECFALMNVSQNVRWKNLKVNFDNVGLGYLSLLQVATFKGWTIIMYAAVDSVNVDKQPKYEYSLYMYIYFVVFIIFGSFFTLNLFIGVIIDNFNQQKKKLGGQDIFMTEEQKKYYNAMKKLGSKKPQKPIPRPGNKIQGCIFDLVTNQAFDISIMVLICLNMVTMMVEKEGQSQHMTEVLYWINVVFIILFTGECVLKLISLRHYYFTVGWNIFDFVVVIISIVGMFLADLIETYFVSPTLFRVIRLARIGRILRLVKGAKGIRTLLFALMMSLPALFNIGLLLFLVMFIYAIFGMSNFAYVKKEDGINDMFNFETFGNSMICLFQITTSAGWDGLLAPILNSKPPDCDPKKVHPGSSVEGDCGNPSVGIFYFVSYIIISFLVVVNMYIAVILENFSVATEESTEPLSEDDFEMFYEVWEKFDPDATQFIEFSKLSDFAAALDPPLLIAKPNKVQLIAMDLPMVSGDRIHCLDILFAFTKRVLGESGEMDSLRSQMEERFMSANPSKVSYEPITTTLKRKQEDVSATVIQRAYRRYRLRQNVKNISSIYIKDGDRDDDLLNKKDMAFDNVNENSSPEKTDATSSTTSPPSYDSVTKPDKEKYEQDRTEKEDKGKDSKESKK

SEQ ID NO: 3846 - protein, 571 aa, Homo sapiens
MERAVRVESGVLVGVVCLLLACPATATGPEVAQPEVDTTLGRVRGRQVGVKGTDRLVNVFLGIPFAQPPLGPDRFSAPHPAQPWEGVRDASTAPPMCLQDVESMNSSRFVLNGKQQIFSVSEDCLVLNVYSPAEVPAGSGRPVMVWVHGGALITGAATSYDGSALAAYGDVVVVTVQYRLGVLGFFSTGDEHAPGNQGFLDVVAALRWVQENIAPFGGDLNCVTVFGGSAGGSIISGLVLSPVAAGLFHRAITQSGVITTPGIIDSHPWPLAQKIANTLACSSSSPAEMVQCLQQKEGEELVLSKKLKNTIYPLTVDGTVFPKSPKELLKEKPFHSVPFLMGVNNHEFSWLIPRGWGLLDTMEQMSREDMLAISTPVLTSLDVPPEMMPTVIDEYLGSNSDAQAKCQAFQEFMGDVFINVPTVSFSRYLRDSGSPVFFYEFQHRPSSFAKIKPAWVKADHGAEGAFVFGGPFLMDESSRLAFPEATEEEKQLSLTMMAQWTHFARTGDPNSKALPPWPQFNQAEQYLEINPVPRAGQKFREAWMQFWSETLPSKIQQWHQKQKNRKAQEDL

SEQ ID NO: 3847 - protein, 744 aa, Homo sapiens
MDHAEENEILAATQRYYVERPIFSHPVLQERLHTKDKVPDSIADKLKQAFTCTPKKIRNIIYMFLPITKWLPAYKFKEYVLGDLVSGISTGVLQLPQGLAFAMLAAVPPIFGLYSSFYPVIMYCFLGTSRHISIGPFAVISLMIGGVAVRLVPDDIVIPGGVNATNGTEARDALRVKVAMSVTLLSGIIQFCLGVCRFGFVAIYLTEPLVRGFTTAAAVHVFTSMLKYLFGVKTKRYSGIFSVVYSTVAVLQNVKNLNVCSLGVGLMVFGLLLGGKEFNERFKEKLPAPIPLEFFAVVMGTGISAGFNLKESYNVDVVGTLPLGLLPPANPDTSLFHLVYVDAIAIAIVGFSVTISMAKTLANKHGYQVDGNQELIALGLCNSIGSLFQTFSISCSLSRSLVQEGTGGKTQLAGCLASLMILLVILATGFLFESLPQAVLSAIVIVNLKGMFMQFSDLPFFWRTSKIELTIWLTTFVSSLFLGLDYGLITAVIIALLTVIYRTQSPSYKVLGKLPETDVYIDIDAYEEVKEIPGIKIFQINAPIYYANSDLYSNALKRKTGVNPAVIMGARRKAMRKYAKEVGNANMANATVVKADAEVDGEDATKPEEEDGEVKYPPIVIKSTFPEEMQRFMPPGDNVHTVILDFTQVNFIDSVGVKTLAGIVKEYGDVGIYVYLAGCSAQVVNDLTRNRFFENPALWELLFHSIHDAVLGSQLREALAEQEASAPPSQEDLEPNATPATPEA

SEQ ID NO: 3848 - protein, 325 aa, Homo sapiens
MTTIILEVDNHTVTTRFILLGFPTRPAFQLLFFSIFLATYLLTLLENLLIILAIHSDGQLHKPMYFFLSHLSFLEMWYVTVISPKMLVDFLSHDKSISFNGCMTQLYFFVTFVCTEYILLAIMAFDRYVAICNPLRYPVIMTNQLCGTLAGGCWFCGLMTAMIKMVFIAQLHYCGMPQINHYFCDISPLLNVSCEDASQAEMVDFFLALMVIAIPLCVVVASYAAILATILRIPSAQGRQKAFSTCASHLTVVILFYSMTLFTYARPKLMYAYNSNKVVSVLYTVIVPLLNPIIYCLRNHEVKAALRKTIHCRGSGPQGNGAFSS

SEQ ID NO: 3849 - protein, 529 aa, Homo sapiens
MSVKWTSVILLIQLSFCFSSGNCGKVLVWAAEYSHWMNIKTILDELIQRGHEVTVLASSASILFDPNNSSALKIEIYPTSLTKTELENFIMQQIKRWSDLPKDTFWLYFSQVQEIMSIFGDITRKFCKDVVSNKKFMKKVQESRFDVIFADAIFPCSELLAELFNIPFVYSLSFSPGYTFEKHSGGFIFPPSYVPVVMSELTDQMTFMERVKNMIYVLYFDFWFEIFDMKKWDQFYSEVLGRPTTLSETMGKADVWLIRNSWNFQFPYPLLPNVDFVGGLHCKPAKPLPKEMEDFVQSSGENGVVVFSLGSMVSNMTEERANVIASALAQIPQKVLWRFDGNKPDTLGLNTRLYKWIPQNDLLGHPKTRAFITHGGANGIYEAIYHGIPMVGIPLFADQPDNIAHMKARGAAVRVDFNTMSSTDLLNALKRVINDPSYKENVMKLSRIQHDQPVKPLDRAVFWIEFVMRHKGAKHLRVAAHDLTWFQYHSLDVIGFLLVCVATVIFIVTKCCLFCFWKFARKAKKGKND

SEQ ID NO: 3850 - protein, 533 aa, Homo sapiens
MAVESQGGRPLVLGLLLCVLGPVVSHAGKILLIPVDGSHWLSMLGAIQQLQQRGHEIVVLAPDASLYIRDGAFYTLKTYPVPFQREDVKESFVSLGHNVFENDSFLQRVIKTYKKIKKDSAMLLSGCSHLLHNKELMASLAESSFDVMLTDPFLPCSPIVAQYLSLPTVFFLHALPCSLEFEATQCPNPFSYVPRPLSSHSDHMTFLQRVKNMLIAFSQNFLCDVVYSPYATLASEFLQREVTVQDLLSSASVWLFRSDFVKDYPRPIMPNMVFVGGINCLHQNPLSQEFEAYINASGEHGIVVFSLGSMVSEIPEKKAMAIADALGKIPQTVLWRYTGTRPSNLANNTILVKWLPQNDLLGHPMTRAFITHAGSHGVYESICNGVPMVMMPLFGDQMDNAKRMETKGAGVTLNVLEMTSEDLENALKAVINDKSYKENIMRLSSLHKDRPVEPLDLAVFWVEFVMRHKGAPHLRPAAHDLTWYQYHSLDVIGFLLAVVLTVAFITFKCCAYGYRKCLGKKGRVKKAHKSKTH

SEQ ID NO: 3851 - protein, 226 aa, Homo sapiens
MALSDVDVKKQIKHMMAFIEQEANEKAEEIDAKAEEEFNIEKGRLVQTQRLKIMEYYEKKEKQIEQQKKILMSTMRNQARLKVLRARNDLISDLLSEAKLRLSRIVEDPEVYQGLLDKLVLQGLLRLLEPVMIVRCRPQDLLLVEAAVQKAIPEYMTISQKHVEVQIDKEAYLAVNAAGGVEVYSGNQRIKVSNTLESRLDLSAKQKMPEIRMALFGANTNRKFFI

SEQ ID NO: 3852 - protein, 1242 aa, Homo sapiens
MASPPESDGFSDVRKVGYLRKPKSMHKRFFVLRAASEAGGPARLEYYENEKKWRHKSSAPKRSIPLESCFNINKRADSKNKHLVALYTRDEHFAIAADSEAEQDSWYQALLQLHNRAKGHHDGAAALGAGGGGGSCSGSSGLGEAGEDLSYGDVPPGPAFKEVWQVILKPKGLGQTKNLIGIYRLCLTSKTISFVKLNSEAAAVVLQLMNIRRCGHSENFFFIEVGRSAVTGPGEFWMQVDDSVVAQNMHETILEAMRAMSDEFRPRSKSQSSSNCSNPISVPLRRHHLNNPPPSQVGLTRRSRTESITATSPASMVGGKPGSFRVRASSDGEGTMSRPASVDGSPVSPSTNRTHAHRHRGSARLHPPLNHSRSIPMPASRCSPSATSPVSLSSSSTSGHGSTSDCLFPRRSSASVSGSPSDGGFISSDEYGSSPCDFRSSFRSVTPDSLGHTPPARGEEELSNYICMGGKGPSTLTAPNGHYILSRGGNGHRCTPGTGLGTSPALAGDEAASAADLDNRFRKRTHSAGTSPTITHQKTPSQSSVASIEEYTEMMPAYPPGGGSGGRLPGHRHSAFVPTRSYPEEGLEMHPLERRGGHHRPDSSTLHTDDGYMPMSPGVAPVPSGRKGSGDYMPMSPKSVSAPQQIINPIRRHPQRVDPNGYMMMSPSGGCSPDIGGGPSSSSSSSNAVPSGTSYGKLWTNGVGGHHSHVLPHPKPPVESSGGKLLPCTGDYMNMSPVGDSNTSSPSDCYYGPEDPQHKPVLSYYSLPRSFKHTQRPGEPEEGARHQHLRLSTSSGRLLYAATADDSSSSTSSDSLGGGYCGARLEPSLPHPHHQVLQPHLPRKVDTAAQTNSRLARPTRLSLGDPKASTLPRAREQQQQQQPLLHPPEPKSPGEYVNIEFGSDQSGYLSGPVAFHSSPSVRCPSQLQPAPREEETGTEEYMKMDLGPGRRAAWQESTGVEMGRLGPAPPGAASICRPTRAVPSSRGDYMTMQMSCPRQSYVDTSPAAPVSYADMRTGIAAEEVSLPRATMAAASSSSAASASPTGPQGAAELAAHSSLLGGPQGPGGMSAFTRVNLSPNRNQSAKVIRADPQGCRRRHSSETFSSTPSATRVGNTVPFGAGAAVGGGGGSSSSSEDVKRHSSASFENVWLRPGELGGAPKEPAKLCGAAGGLENGLNYIDLDLVKDFKQCPQECTPEPQPPPPPPPHQPLGSGESSSTRRSSEDLSAYASISFQKQPEDRQ

SEQ ID NO: 3853 - protein, 553 aa, Homo sapiens
MDVDKELGMESVKAGASGKPEMRLGTQEETSEGDANESSLLVLSSNVPLLALEFLEIAQAKEKAFLPMVSHTFHMRTEESDASQEGDDLPKSSANTSHPKQDDSPKSSEETIQPKEGDIPKAPEETIQSKKEDLPKSSEKAIQPKESNIPKSSAKPIQPKLGNIPKASVKPSQPKEGDIPKAPEETIQSKKEDLPKSSEEAIQPKEGDIPKSSAKPIQPKLGNIAKTSVKPSQPKESDIPKSPEETIQPKEGDIPKSSAKPIQPKLGNIPKASVKPSQPKEGDISKSPEEAIQPKEGDLPKSLEEAIQPKEGDIPKSPEEAIQPKEGDIPKSLEEAIQPKEGDIPKSPEETIQPKKGDIPKSPEEAIQPKEGDIPKSPKQAIQPKEGDIPKSLEEAIPPKEIDIPKSPEETIQPKEDDSPKSLEEATPSKEGDILKPEEETMEFPEGDKVKVILSKEDFEASLKEAGERLVAVDFSATWCGPCRTIRPFFHALSVKHEDVVFLEVDADNCEEVVRECAIMCVPTFQFYKKEEKVDELCGALKEKLEAVIAELK

SEQ ID NO: 3854 - protein, 146 aa, Homo sapiens
MHPLLNPLLLALGLMALLLTTVIALTCLGGFASPGPVPPSTALRELIEELVNITQNQKAPLCNGSMVWSINLTAGMYCAALESLINVSGCSAIEKTQRMLSGFCPHKVSAGQFSSLHVRDTKIEVAQFVKDLLLHLKKLFREGQFN

SEQ ID NO: 3855 - protein, 367 aa, Homo sapiens
MASELCKTISVARLEKHKNLFLNYRNLHHFPLELLKDEGLQYLERLYMKRNSLTSLPENLAQKLPNLVELYLHSNNIVVVPEAIGSLVKLQCLDLSDNALEIVCPEIGRLRALRHLRLANNQLQFLPPEVGDLKELQTLDISTNRLLTLPERLHMCLSLQYLTVDRNRLWYVPRHLCQLPSLNELSMAGNRLAFLPLDLGRSRELQYVYVDNNIHLKGLPSYLYNKVIGCSGCGAPIQVSEVKLLSFSSGQRTVFLPAEVKAIGTEHDHVLPLQELAMRGLYHTYHSLLKDLNFLSPISLPRSLLELLHCPLGHCHRCSEPMFTIVYPKLFPLRETPMAGLHQWKTTVSFVAYCCSTQCLQTFDLLS

SEQ ID NO: 3856 - protein, 1007 aa, Homo sapiens
MGSGGDSLLGGRGSLPLLLLLIMGGMAQDSPPQILVHPQDQLFQGPGPARMSCQASGQPPPTIRWLLNGQPLSMVPPDPHHLLPDGTLLLLQPPARGHAHDGQALSTDLGVYTCEASNRLGTAVSRGARLSVAVLREDFQIQPRDMVAVVGEQFTLECGPPWGHPEPTVSWWKDGKPLALQPGRHTVSGGSLLMARAEKSDEGTYMCVATNSAGHRESRAARVSIQEPQDYTEPVELLAVRIQLENVTLLNPDPAEGPKPRPAVWLSWKVSGPAAPAQSYTALFRTQTAPGGQGAPWAEELLAGWQSAELGGLHWGQDYEFKVRPSSGRARGPDSNVLLLRLPEKVPSAPPQEVTLKPGNGTVFVSWVPPPAENHNGIIRGYQVWSLGNTSLPPANWTVVGEQTQLEIATHMPGSYCVQVAAVTGAGAGEPSRPVCLLLEQAMERATQEPSEHGPWTLEQLRATLKRPEVIATCGVALWLLLLGTAVCIHRRRRARVHLGPGLYRYTSEDAILKHRMDHSDSQWLADTWRSTSGSRDLSSSSSLSSRLGADARDPLDCRRSLLSWDSRSPGVPLLPDTSTFYGSLIAELPSSTPARPSPQVPAVRRLPPQLAQLSSPCSSSDSLCSRRGLSSPRLSLAPAEAWKAKKKQELQHANSSPLLRGSHSLELRACELGNRGSKNLSQSPGAVPQALVAWRALGPKLLSSSNELVTRHLPPAPLFPHETPPTQSQQTQPPVAPQAPSSILLPAAPIPILSPCSPPSPQASSLSGPSPASSRLSSSSLSSLGEDQDSVLTPEEVALCLELSEGEETPRNSVSPMPRAPSPPTTYGYISVPTASEFTDMGRTGGGVGPKGGVLLCPPRPCLTPTPSEGSLANGWGSASEDNAASARASLVSSSDGSFLADAHFARALAVAVDSFGFGLEPREADCVFIDASSPPSPRDEIFLTPNLSLPLWEWRPDWLEDMEVSHTQRLGRGMPPWPPDSQISSQRSQLHCRMPKAGASPVDYS

SEQ ID NO: 3857 - protein, 1320 aa, Homo sapiens
MFGLDQFEPQVNSRNAGQGERNFNETGLSMNTHFKAPAFHTGGPPGPVDPAMSALGEPPILGMNMEPYGFHARGHSELHAGGLQAQPVHGFFGGQQPHHGHPGSHHPHQHHPHFGGNFGGPDPGASCLHGGRLLGYGGAAGGLGSQPPFAEGYEHMAESQGPESFGPQRPGNLPDFHSSGASSHAVPAPCLPLDQSPNRAASFHGLPSSSGSDSHSLEPRRVTNQGAVDSLEYNYPGEAPSGHFDMFSPSDSEGQLPHYAAGRQVPGGAFPGASAMPRAAGMVGLSKMHAQPPQQQPQQQQQPQQQQQQHGVFFERFSGARKMPVGLEPSVGSRHPLMQPPQQAPPPPQQQPPQQPPQQQPPPPPGLLVRQNSCPPALPRPQQGEAGTPSGGLQDGGPMLPSQHAQFEYPIHRLENRSMHPYSEPVFSMQHPPPQQAPNQRLQHFDAPPYMNVAKRPRFDFPGSAGVDRCASWNGSMHNGALDNHLSPSAYPGLPGEFTPPVPDSFPSGPPLQHPAPDHQSLQQQQQQQQQQQQQQQQQQQQQQQQQQQQRQNAALMIKQMASRNQQQRLRQPNLAQLGHPGDVGQGGLVHGGPVGGLAQPNFEREGGSTGAGRLGTFEQQAPHLAQESAWFSGPHPPPGDLLPRRMGGSGLPADCGPHDPSLAPPPPPGGSGVLFRGPLQEPMRMPGEGHVPALPSPGLQFGGSLGGLGQLQSPGAGVGLPSAASERRPPPPDFATSALGGQPGFPFGAAGRQSTPHSGPGVNSPPSAGGGGGSSGGGGGGGAYPPQPDFQPSQRTSASKLGALSLGSFNKPSSKDNLFGQSCLAALSTACQNMIASLGAPNLNVTFNKKNPPEGKRKLSQNETDGAAVAGNPGSDYFPGGTAPGAPGPGGPSGTSSSGSKASGPPNPPAQGDGTSLSPNYTLESTSGNDGKPVSGGGGRGRGRRKRDSGHVSPGTFFDKYSAAPDSGGAPGVSPGQQQASGAAVGGSSAGETRGAPTPHEKALTSPSWGKGAELLLGDQPDLIGSLDGGAKSDSSSPNVGEFASDEVSTSYANEDEVSSSSDNPQALVKASRSPLVTGSPKLPPRGVGAGEHGPKAPPPALGLGIMSNSTSTPDSYGGGGGPGHPGTPGLEQVRTPTSSSGAPPPDEIHPLEILQAQIQLQRQQFSISEDQPLGLKGGKKGECAVGASGAQNGDSELGSCCSEAVKSAMSTIDLDSLMAEHSAAWYMPADKALVDSADDDKTLAPWEKAKPQNPNSKEAHDLPANKASASQPGSHLQCLSVHCTDDVGDAKARASVPTWRSLHSDISNRFGTFVAALT

SEQ ID NO: 3858 - protein, 856 aa, Homo sapiens
MKSARAKTPRKPTVKKGSQTNLKDPVGVYCRVRPLGFPDQECCIEVINNTTVQLHTPEGYRLNRNGDYKETQYSFKQVFGTHTTQKELFDVVANPLVNDLIHGKNGLLFTYGVTGSGKTHTMTGSPGEGGLLPRCLDMIFNSIGSFQAKRYVFKSNDRNSMDIQCEVDALLERQKREAMPNPKTSSSKRQVDPEFADMITVQEFCKAEEVDEDSVYGVFVSYIEIYNNYIYDLLEEVPFDPIKPKPPQSKLLREDKNHNMYVAGCTEVEVKSTEEAFEVFWRGQKKRRIANTHLNRESSRSHSVFNIKLVQAPLDADGDNVLQEKEQITISQLSLVDLAGSERTNRTRAEGNRLREAGNINQSLMTLRTCMDVLRENQMYGTNKMVPYRDSKLTHLFKNYFDGEGKVRMIVCVNPKAEDYEENLQVMRFAEVTQEVEVARPVDKAICGLTPGRRYRNQPRGPVGNEPLVTDVVLQSFPPLPSCEILDINDEQTLPRLIEALEKRHNLRQMMIDEFNKQSNAFKALLQEFDNAVLSKENHMQGKLNEKEKMISGQKLEIERLEKKNKTLEYKIEILEKTTTIYEEDKRNLQQELETQNQKLQRQFSDKRRLEARLQGMVTETTMKWEKECERRVAAKQLEMQNKLWVKDEKLKQLKAIVTEPKTEKPERPSRERDREKVTQRSVSPSPVPLLFQPDQNAPPIRLRHRRSRSAGDRWVDHKPASNMQTETVMQPHVPHAITVSVANEKALAKCEKYMLTHQELASDGEIETKLIKGDIYKTRGGGQSVQFTDIETLKQESPNGSRKRRSSTVAPAQPDGAESEWTDVETRCSVAVEMRAGSQLGPGYQHHAQPKRKKP

SEQ ID NO: 3859 - protein, 805 aa, Homo sapiens
MDEDGLELQQEPNSFFDATGADGTHMDGDQIVVEVQETVFVSDVVDSDITVHNFVPDDPDSVVIQDVIEDVVIEDVQCPDIMEEADVSETVIIPEQVLDSDVTEEVSLAHCTVPDDVLASDITSASMSMPEHVLTGDSIHVSDVGHVGHVGHVEHVVHDSVVEAEIVTDPLTTDVVSEEVLVADCASEAVIDANGIPVDQQDDDKGNCEDYLMISLDDAGKIEHDGSSGMTMDTESEIDPCKVDGTCPEVIKVYIFKADPGEDDLGGTVDIVESEPENDHGVELLDQNSSIRVPREKMVYMTVNDSQPEDEDLNVAEIADEVYMEVIVGEEDAAAAAAAAAVHEQQMDDNEIKTFMPIAWAAAYGNNSDGIENRNGTASALLHIDESAGLGRLAKQKPKKRRRPDSRQYQTAIIIGPDGHPLTVYPCMICGKKFKSRGFLKRHMKNHPEHLAKKKYRCTDCDYTTNKKISLHNHLESHKLTSKAEKAIECDECGKHFSHAGALFTHKMVHKEKGANKMHKCKFCEYETAEQGLLNRHLLAVHSKNFPHICVECGKGFRHPSELKKHMRIHTGEKPYQCQYCEYRSADSSNLKTHVKTKHSKEMPFKCDICLLTFSDTKEVQQHALIHQESKTHQCLHCDHKSSNSSDLKRHIISVHTKDYPHKCDMCDKGFHRPSELKKHVAAHKGKKMHQCRHCDFKIADPFVLSRHILSVHTKDLPFRCKRCRKGFRQQSELKKHMKTHSGRKVYQCEYCEYSTTDASGFKRHVISIHTKDYPHRCEYCKKGFRRPSEKNQHIMRHHKEVGLP

SEQ ID NO: 3860 - protein, 415 aa, Homo sapiens
MSERRVVVDLPTSASSSMPLQRRRASFRGPRSSSSLESPPASRTNAMSGLVRAPGVYVGTAPSGCIGGLGARVTRRALGISSVFLQGLRSSGLATVPAPGLERDHGAVEDLGGCLVEYMAKVHALEQVSQELETQLRMHLESKATRSGNWGALRASWASSCQQVGEAVLENARLMLQTETIQAGADDFKERYENEQPFRKAAEEEINSLYKVIDEANLTKMDLESQIESLKEELGSLSRNYEEDVKLLHKQLAGCELEQMDAPIGTGLDDILETIRIQWERDVEKNRVEAGALLQAKQQAEVAHMSQTQEEKLAAALRVELHNTSCQVQSLQAETESLRALKRGLENTLHDAKHWHDMELQNLGAVVGRLEAELREIRAEAEQQQQERAHLLARKCQLQKDVASYHALLDREESG

SEQ ID NO: 3861 - protein, 310 aa, Homo sapiens
MDPQNYSLVSEFVLHGLCTSRHLQNFFFIFFFGVYVAIMLGNLLILVTVISDPCLHSSPMYFLLGNLAFLDMWLASFATPKMIRDFLSDQKLISFGGCMAQIFFLHFTGGAEMVLLVSMAYDRYVAICKPLHYMTLMSWQTCIRLVLASWVVGFVHSISQVAFTVNLPYCGPNEVDSFFCDLPLVIKLACMDTYVLGIIMISDSGLLSLSCFLLLLISYTVILLAIRQRAAGSTSKALSTCSAHIMVVTLFFGPCIFVYVRPFSRFSVDKLLSVFYTIFTPLLNPIIYTLRNEEMKAAMKKLQNRRVTFQ

SEQ ID NO: 3862 - protein, 1905 aa, Homo sapiens
METLNGPAGGGAPDAKLQPPGQHHRHHHLHPVAERRRLHRAPSPARPFLKDLHARPAAPGPAVPSSGRAPAPAAPRSPNLAGKAPPSPGSLAAPGRLSRRSGGVPGAKDKPPPGAGARAAGGAKAALGSRRAARVAPAEPLSRAGKPPGAEPPSAAAKGRKAKRGSRAPPARTVGPPTPAARIPAVTLAVTSVAGSPARCSRISHTDSSSDLSDCPSEPLSDEQRLLPAASSDAESGTGSSDREPPRGAPTPSPAARGAPPGSPEPPALLAAPLAAGACPGGRSIPSGVSGGFAGPGVAEDVRGRSPPERPVPGTPKEPSLGEQSRLVPAAEEEELLREMEELRSENDYLKDELDELRAEMEEMRDSYLEEDVYQLQELRRELDRANKNCRILQYRLRKAEQKSLKVAETGQVDGELIRSLEQDLKVAKDVSVRLHHELKTVEEKRAKAEDENETLRQQMIEVEISKQALQNELERLKESSLKRRSTREMYKEKKTFNQDDSADLRCQLQFAKEEAFLMRKKMAKLGREKDELEQELQKYKSLYGDVDSPLPTGEAGGPPSTREAELKLRLKLVEEEANILGRKIVELEVENRGLKAEMEDMRGQQEREGPGRDHAPSIPTSPFGDSLESSTELRRHLQFVEEEAELLRRSISEIEDHNRQLTHELSKFKFEPPREPGWLGEGASPGAGGGAPLQEELKSARLQISELSGKVLKLQHENHALLSNIQRCDLAAHLGLRAPSPRDSDAESDAGKKESDGEESRLPQPKREGPVGGESDSEEMFEKTSGFGSGKPSEASEPCPTELLKAREDSEYLVTLKHEAQRLERTVERLITDTDSFLHDAGLRGGAPLPGPGLQGEEEQGEGDQQEPQLLGTINAKMKAFKKELQAFLEQVNRIGDGLSPLPHLTESSSFLSTVTSVSRDSPIGNLGKELGPDLQSRLKEQLEWQLGPARGDERESLRLRAARELHRRADGDTGSHGLGGQTCFSLEMEEEHLYALRWKELEMHSLALQNTLHERTWSDEKNLMQQELRSLKQNIFLFYVKLRWLLKHWRQGKQMEEEGEEFTEGEHPETLSRLGELGVQGGHQADGPDHDSDRGCGFPVGEHSPHSRVQIGDHSLRLQTADRGQPHKQVVENQQLFSAFKALLEDFRAELREDERARLRLQQQYASDKAAWDVEWAVLKCRLEQLEEKTENKLGELGSSAESKGALKKEREVHQKLLADSHSLVMDLRWQIHHSEKNWNREKVELLDRLDRDRQEWERQKKEFLWRIEQLQKENSPRRGGSFLCDQKDGNVRPFPHQGSLRMPRPVAMWPCADADSIPFEDRPLSKLKESDRCSASENLYLDALSLDDEPEEPPAHRPEREFRNRLPEEEENHKGNLQRAVSVSSMSEFQRLMDISPFLPEKGLPSTSSKEDVTPPLSPDDLKYIEEFNKSWDYTPNRGHNGGGPDLWADRTEVGRAGHEDSTEPFPDSSWYLTTSVTMTTDTMTSPEHCQKQPLRSHVLTEQSGLRVLHSPPAVRRVDSITAAGGEGPFPTSRARGSPGDTKGGPPEPMLSRWPCTSPRHSRDYVEGARRPLDSPLCTSLGFASPLHSLEMSKNLSDDMKEVAFSVRNAICSGPGELQVKDMACQTNGSRTMGTQTVQTISVGLQTEALRGSGVTSSPHKCLTPKAGGGATPVSSPSRSLRSRQVAPAIEKVQAKFERTCCSPKYGSPKLQRKPLPKADQPNNRTSPGMAQKGYSESAWARSTTTRESPVHTTINDGLSSLFNIIDHSPVVQDPFQKGLRAGSRSRSAEPRPELGPGQETGTNSRGRSPSPIGVGSEMCREEGGEGTPVKQDLSAPPGYTLTENVARILNKKLLEHALKEERRQAAHGPPGLHSDSHSLGDTAEPGPMENQTVLLTAPWGL

SEQ ID NO: 3863 - protein, 557 aa, Homo sapiens
MAFMEKPPAGKVLLDDTVPLTAAIEASQSLQSHTEYIIRVQRGISVENSWQIVRRYSDFDLLNNSLQIAGLSLPLPPKKLIGNMDREFIAERQKGLQNYLNVITTNHILSNCELVKKFLDPNNYSANYTEIALQQVSMFFRSEPKWEVVEPLKDIGWRIRKKYFLMKIKNQPKERLVLSWADLGPDKYLSDKDFQCLIKLLPSCLHPYIYRVTFATANESSALLIRMFNEKGTLKDLIYKAKPKDPFLKKYCNPKKIQGLELQQIKTYGRQILEVLKFLHDKGFPYGHLHASNVMLDGDTCRLLDLENSLLGLPSFYRSYFSQFRKINTLESVDVHCFGHLLYEMTYGRPPDSVPVDSFPPAPSMAVVAVLESTLSCEACKNGMPTISRLLQMPLFSDVLLTTSEKPQFKIPTKLKEALRIAKECIEKRLIEEQKQIHQHRRLTRAQSHHGSEEERKKRKILARKKSKRSALENSEEHSAKYSNSNNSGISALPPPPPPPPPPAAPLPPASTEAPAQLSSQAVNGMSRGALLSSIQNFQKGTLRKAKTCDHSAPKIG

SEQ ID NO: 3864 - protein, 839 aa, Homo sapiens
MNRKDFVVLPWGKPGNSVKLKYRNAQELRMEKVQLEFENQEMEKKLQEFRSTRNKEKEDRESSEYYWKSGKVGKLVNQSYMMSQNKGNVVKFSAGKVKLKLLKEQIQEPVKPTVNYKMANSSECEKPKINGKVCGQCENKAALLVCLECGEDYCSGCFAKVHQKGALKLHRTTLLQAKSQILFNVLDVAHQFIKDVNPDEPKEENNSTKETSKIQHKPKSVLLQRSSSEVEITTMKRAQRTKPRKSLLCEGSFDEEASAQSFQEVLSQWRTGNHDDNKKQNLHAAVKDSLEECEVQTNLKIWREPLNIELKEDILSYMEKLWLKKHRRTPQEQLFKMLPDTFPHPHETTGDAQCSQNENDEDSDGEETKVQHTALLLPVETLNIERPEPSLKIVELDDTYEEEFEEAENIVPYKVKLADADSQRSCAFHDCQKNSFPYENGIHQHHVFDKGKRDFLNLCLRNSSTYYKDNSKAETSNTDFDNIVDPDVYSSDIEKIEESTSFERNLKEKNIGLESNQKSDDSCVSLESKDTLLGRDLEKAPIEEKLSQDIKESLELSNLYKRPSFEESKTTKSSLLLQEIACRSKPITKQYQGLERFFIFDTNERLNLLPSHRLECNNSSTRITLAEDREWIPDHSLSEYADNAIVLGVLQGAQSPSSSRKQQKMGQKSQRPSTANFPLSNSVKESSSCLSSSHPRSRSAAAQSSSRAASEISEIEYIDITDQNELSLDDTTDQHTLDNLEKELQVLRSLADTSEKLYSLTSEEFPDFSSQSLNISQISTDFLKTSHVRGPCGVEELSCSGRDTKIQSLLSLSESSTDEEEEDFLNKQHVITLPWSKST

SEQ ID NO: 3865 - protein, 499 aa, Homo sapiens
MLSLSPILLYTCEMFQDPVAFKDVAVNFTQEEWALLDISQKNLYREVMLETFWNLTSIGKKWKDQNIEYEYQNPRRNFRSVTEEKVNEIKEDSHCGETFTPVPDDRLNFQKKKASPEVKSCDSFVCEVGLGNSSSNMNIRGDTGHKACECQEYGPKPWKSQQPKKAFRYHPSLRTQERDHTGKKPYACKECGKNIIYHSSIQRHMVVHSGDGPYKCKFCGKAFHCLSLYLIHERTHTGEKPYECKQCGKSFSYSATHRIHERTHIGEKPYECQECGKAFHSPRSCHRHERSHMGEKAYQCKECGKAFMCPRYVRRHERTHSRKKLYECKQCGKALSSLTSFQTHIRMHSGERPYECKTCGKGFYSAKSFQRHEKTHSGEKPYKCKQCGKAFTRSGSFRYHERTHTGEKPYECKQCGKAFRSAPNLQLHGRTHTGEKPYQCKECGKAFRSASQLRIHRRIHTGEKPYECKKCGKAFRYVQNFRFHERTQTHKNALWRKTL

SEQ ID NO: 3866 - protein, 665 aa, Homo sapiens
MSEQSCQMSELRLLLLGKCRSGKSATGNAILGKHVFKSKFSDQTVIKMCQRESWVLRERKVVVIDTPDLFSSIACAEDKQRNIQHCLELSAPSLHALLLVIAIGHFTREDEETAKGIQQVFGAEARRHIIIVFTRKDDLGDDLLQDFIEKNKPLKQLVQDYEGRYCIFNNKTNSKDEQITQVLELLRKVESLVNTNGGPYHVNFKTEGSRFQDCVNEAASQEGDKPQGPRERQLQSTGPEQNPGTSELTVLLVGKRGAGKSAAGNSILGRQAFQTGFSEQSVTQSFLSESRSWRKKKVSIIDAPDISSLKNIDSEVRKHICTGPHAFLLVTPLGFYTKNDEAVLSTIQNNFGEKFFEYMIILLTRKEDLGDQDLDTFLRNSNKALYGLIQKCKNRYSAFNYRATGEEEQRQADELLEKIESMVHQNGNKHCVFREKETLNIVLVGRSGTGKSATGNSILGSLVFTSRLRAQPVTKTSQSGRRTWDGQEVVVVDTPSFNQMLDVEKDPSRLEEEVKRCLSCCEKGDTFFVLVFQLGRFTEEDKTAVAKLEAIFGADFTKYAIMLFTRKEDLGAGNLEDFMKNSDNKALRRIFKKCGRRVCAFNNKETGQAQETQVKALLTKVNDLRKESGWSGYPHTQENVSKLIKNVQEMSQAEKLLKNLIGILQ

SEQ ID NO: 3867 - protein, 1536 aa, Homo sapiens
MGVVNFVFRASEDLQVLENYSDAPMTPKQILQVIEAEGLKEMSGTSPLACLNAMLHSNSRGGEGLFYKLPGRISLFTLKKDALQWSRHPATVEGEEPEDTADVESCGSNEASTVSGENDVSLDETSSNASCSTESQSRPLSNPRDSYRASSQANKQKKKTGVMLPRVVLTPLKVNGAHVESASGFSGCHADGESGSPSSSSSGSLALGSAAIRGQAEVTQDPAPLLRGFRKPATGQMKRNRGEEIDFETPGSILVNTNLRALINSRTFHALPSHFQQQLLFLLPEVDRQVGTDGLLRLSSSALNNEFFTHAAQSWRERLADGEFTHEMQVRIRQEMEKEKKVEQWKEKFFEDYYGQKLGLTKEESLQQNVGQEEAEIKSGLCVPGESVRIQRGPATRQRDGHFKKRSRPDLRTRARRNLYKKQESEQAGVAKDAKSVASDVPLYKDGEAKTDPAGLSSPHLPGTSSAAPDLEGPEFPVESVASRIQAEPDNLARASASPDRIPSLPQETVDQEPKDQKRKSFEQAASASFPEKKPRLEDRQSFRNTIESVHTEKPQPTKEEPKVPPIRIQLSRIKPPWVVKGQPTYQICPRIIPTTESSCRGWTGARTLADIKARALQVRGARGHHCHREAATTAIGGGGGPGGGGGGATDEGGGRGSSSGDGGEACGHPEPRGGPSTPGKCTSDLQRTQLLPPYPLNGEHTQAGTAMSRARREDLPSLRKEESCLLQRATVGLTDGLGDASQLPVAPTGDQPCQALPLLSSQTSVAERLVEQPQLHPDVRTECESGTTSWESDDEEQGPTVPADNGPIPSLVGDDTLEKGTGQALDSHPTMKDPVNVTPSSTPESSPTDCLQNRAFDDELGLGGSCPPMRESDTRQENLKTKALVSNSSLHWIPIPSNDEVVKQPKPESREHIPSVEPQVGEEWEKAAPTPPALPGDLTAEEGLDPLDSLTSLWTVPSRGGSDSNGSYCQQVDIEKLKINGDSEALSPHGESTDTASDFEGHLTEDSSEADTREAAVTKGSSVDKDEKPNWNQSAPLSKVNGDMRLVTRTDGMVAPQSWVSRVCAVRQKIPDSLLLASTEYQPRAVCLSMPGSSVEATNPLVMQLLQGSLPLEKVLPPAHDDSMSESPQVPLTKDQSHGSLRMGSLHGLGKNSGMVDGSSPSSLRALKEPLLPDSCETGTGLARIEATQAPGAPQKNCKAVPSFDSLHPVTNPITSSRKLEEMDSKEQFSSFSCEDQKEVRAMSQDSNSNAAPGKSPGDLTTSRTPRFSSPNVISFGPEQTGRALGDQSNVTGQGKKLFGSGNVAATLQRPRPADPMPLPAEIPPVFPSGKLGPSTNSMSGGVQTPREDWAPKPHAFVGSVKNEKTFVGGPLKANAENRKATGHSPLELVGHLEGMPFVMDLPFWKLPREPGKGLSEPLEPSSLPSQLSIKQAFYGKLSKLQLSSTSFNYSSSSPTFPKGLAGSVVQLSHKANFGASHSASLSLQMFTDSSTVESISLQCACSLKAMIMCQGCGAFCHDDCIGPSKLCVLCLVVR

SEQ ID NO: 3868 - protein, 536 aa, Homo sapiens
MDKVGKMWNNFKYRCQNLFGHEGGSRSENVDMNSNRCLSVKEKNISIGDSTPQQQSSPLRENIALQLGLSPSKNSSRRNQNCATEIPQIVEISIEKDNDSCVTPGTRLARRDSYSRHAPWGGKKKHSCSTKTQSSLDADKKFGRTRSGLQRRERRYGVSSVHDMDSVSSRTVGSRSLRQRLQDTVGLCFPMRTYSKQSKPLFSNKRKIHLSELMLEKCPFPAGSDLAQKWHLIKQHTAPVSPHSTFFDTFDPSLVSTEDEEDRLRERRRLSIEEGVDPPPNAQIHTFEATAQVNPLYKLGPKLAPGMTEISGDSSAIPQANCDSEEDTTTLCLQSRRQKQRQISGDSHTHVSRQGAWKVHTQIDYIHCLVPDLLQITGNPCYWGVMDRYEAEALLEGKPEGTFLLRDSAQEDYLFSVSFRRYNRSLHARIEQWNHNFSFDAHDPCVFHSSTVTGLLEHYKDPSSCMFFEPLLTISLNRTFPFSLQYICRAVICRCTTYDGIDGLPLPSMLQDFLKEYHYKQKVRVRWLEREPVKAK

SEQ ID NO: 3869 - protein, 1899 aa, Homo sapiens
MRSRLPPALAALGAALLLSSIEAEGMECLTRAEADIVLLVDGSWSIGRANFRTVRSFISRIVEVFDIGPKRVQIALAQYSGDPRTEWQLNAHRDKKSLLQAVANLPYKGGNTLTGMALNFIRQQNFRTQAGMRPRARKIGVLITDGKSQDDVEAPSKKLKDEGVELFAIGIKNADEVELKMIATDPDDTHAYNVADFESLSRIVDDLTINLCNSVKGPGDLEAPSNLVISERTHRSFRVSWTPPSDSVDRYKVEYYPVSGGKRQEFYVSRMETSTVLKDLKPETEYVVNVYSVVEDEYSEPLKGTEKTLPVPVVSLNIYDVGPTTMHVQWQPVGGATGYILSYKPVKDTEPTRPKEVRLGPTVNDMQLTDLVPNTEYAVTVQAVLHDLTSEPVTVREVTLPLPRPQDLKLRDVTHSTMNVFWEPVPGKVRKYIVRYKTPEEDVKEVEVDRSETSTSLKDLFSQTLYTVSVSAVHDEGESPPVTAQETTRPVPAPTNLKITEVTSEGFRGTWDHGASDVSLYRITWAPFGSSDKMETILNGDENTLVFENLNPNTIYEVSITAIYPDESESDDLIGSERTLPILTTQAPKSGPRNLQVYNATSNSLTVKWDPASGRVQKYRITYQPSTGEGNEQTTTIGGRQNSVVLQKLKPDTPYTITVSSLYPDGEGGRMTGRGKTKPLNTVRNLRVYDPSTSTLNVRWDHAEGNPRQYKLFYAPAAGGPEELVPIPGNTNYAILRNLQPDTSYTVTVVPVYTEGDGGRTSDTGRTLMRGLARNVQVYNPTPNSLDVRWDPAPGPVLQYRVVYSPVDGTRPSESIVVPGNTRMVHLERLIPDTLYSVNLVALYSDGEGNPSPAQGRTLPRSGPRNLRVFGETTNSLSVAWDHADGPVQQYRIIYSPTVGDPIDEYTTVPGRRNNVILQPLQPDTPYKITVIAVYEDGDGGHLTGNGRTVGLLPPQNIHISDEWYTRFRVSWDPSPSPVLGYKIVYKPVGSNEPMEAFVGEMTSYTLHNLNPSTTYDVNVYAQYDSGLSVPLTDQGTTLYLNVTDLKTYQIGWDTFCVKWSPHRAATSYRLKLSPADGTRGQEITVRGSETSHCFTGLSPDTDYGVTVFVQTPNLEGPGVSVKEHTTVKPTEAPTEPPTPPPPPTIPPARDVCKGAKADIVFLTDASWSIGDDNFNKVVKFIFNTVGGFDEISPAGIQVSFVQYSDEVKSEFKLNTYNDKALALGALQNIRYRGGNTRTGKALTFIKEKVLTWESGMRKNVPKVLVVVTDGRSQDEVKKAALVIQQSGFSVFVVGVADVDYNELANIASKPSERHVFIVDDFESFEKIEDNLITFVCETATSSCPLIYLDGYTSPGFKMLEAYNLTEKNFASVQGVSLESGSFPSYSAYRIQKNAFVNQPTADLHPNGLPPSYTIILLFRLLPETPSDPFAIWQITDRDYKPQVGVIADPSSKTLSFFNKDTRGEVQTVTFDTEEVKTLFYGSFHKVHIVVTSKSVKIYIDCYEIIEKDIKEAGNITTDGYEILGKLLKGERKSAAFQIQSFDIVCSPVWTSRDRCCDIPSRRDEGKCPAFPNSCTCTQDSVGPPGPPGPAGGPGAKGPRGERGISGAIGPPGPRGDIGPPGPQGPPGPQGPNGLSIPGEQGRQGMKGDAGEPGLPGRTGTPGLPGPPGPMGPPGDRGFTGKDGAMGPRGPPGPPGSPGSPGVTGPSGKPGKPGDHGRPGPSGLKGEKGDRGDIASQNMMRAVARQVCEQLISGQMNRFNQMLNQIPNDYQSSRNQPGPPGPPGPPGSAGARGEPGPGGRPGFPGTPGMQGPPGERGLPGEKGERGTGSSGPRGLPGPPGPQGESRTGPPGSTGSRGPPGPPGRPGNSGIRGPPGPPGYCDSSQCASIPYNGQGYPGSG

SEQ ID NO: 3870 - protein, 755 aa, Homo sapiens
MAAVAAEAAATAASPGEGGAGEAEPEMEPIPGSEAGTDPLPVTATEASVPDGETDGQQSAPQADEPPLPPPPPPPGELARSPEAVGPELEAEEKLSVRVAESAAAAPQGGPELPPSPASPPEQPPAPEEREEPPLPQPVAPALVPPAGGDSTVSQLIPGSEVRVTLDHIIEDALVVSFRFGEKLFSGVLMDLSKRFGPHGIPVTVFPKREYKDKPEAMPLQSNTFQEGTEVKCEANGAVPDDPSPVPHPELSLAESLWTSKPPPLFHEGAPYPPPLFIRDTYNQSIPQPPPRKIKRPKRKMYREEPTSIMNAIKLRPRQVLCDKCKNSVVAEKKEIRKGSSATDSSKYEDKKRRNESVTTVNKKLKTDHKVDGKNQNESQKRNAVVKVSNIAHSRGRVVKVSAQANTSKAQLSTKKVLQSKNMDHAKAREVLKIAKEKAQKKQNETSTSKNAHSKVHFTRRYQNPSSGSLPPRVRLKPQRYRNEENDSSLKTGLEKMRSGKMAPKPQSRCTSTRSAGEAPSENQSPSKGPEEASSEVQDTNEVHVPGDQDEPQTLGKKGSKNNISVYMTLNQKKSDSSSASVCSIDSTDDLKSSNSECSSSESFDFPPGSMHAPSTSSTSSSSKEEKKLSNSLKMKVFSKNVSKCVTPDGRTICVGDIVWAKIYGFPWWPARILTITVSRKDNGLLVRQEARISWFGSPTTSFLALSQLSPFLENFQSRFNKKRKGLYRKAITEAAKAAKQLTPEVRALLTQFET

SEQ ID NO: 3871 - protein, 755 aa, Homo sapiens
MVSHGSSPSLLEALSSDFLACKICLEQLRAPKTLPCLHTYCQDCLAQLADGGRVRCPECRETVPVPPEGVASFKTNFFVNGLLDLVKARACGDLRAGKPACALCPLVGGTSTGGPATARCLDCADDLCQACADGHRCTRQTHTHRVVDLVGYRAGWYDEEARERQAAQCPQHPGEALRFLCQPCSQLLCRECRLDPHLDHPCLPLAEAVRARRPGLEGLLAGVDNNLVELEAARRVEKEALARLREQAARVGTQVEEAAEGVLRALLAQKQEVLGQLRAHVEAAEEAARERLAELEGREQVARAAAAFARRVLSLGREAEILSLEGAIAQRLRQLQGCPWAPGPAPCLLPQLELHPGLLDKNCHLLRLSFEEQQPQKDGGKDGAGTQGGEESQSRREDEPKTERQGGVQPQAGDGAQTPKEEKAQTTREEGAQTLEEDRAQTPHEDGGPQPHRGGRPNKKKKFKGRLKSISREPSPALGPNLDGSGLLPRPIFYCSFPTRMPGDKRSPRITGLCPFGPREILVADEQNRALKRFSLNGDYKGTVPVPEGCSPCSVAALQSAVAFSASARLYLINPNGEVQWRRALSLSQASHAVAALPSGDRVAVSVAGHVEVYNMEGSLATRFIPGGKASRGLRALVFLTTSPQGHFVGSDWQQNSVVICDGLGQVVGEYKGPGLHGCQPGSVSVDKKGYIFLTLREVNKVVILDPKGSLLGDFLTAYHGLEKPRVTTMVDGRYLVVSLSNGTIHIFRVRSPDS

SEQ ID NO: 3872 - protein, 437 aa, Homo sapiens
GDSANLTCRAFFGYSGDVSPLIYWMKGEKFIEDLDENRVWESDIRILKEHLGEQEVSISLIVDSVEEGDLGNYSCYVENGNGRRHASVLLHKRELMYTVELAGGLGAILLLLVCLVTIYKCYKIEIMLFYRNHFGAEELDGDNKDYDAYLSYTKVDPDQWNQETGEEERFALEILPDMLEKHYGYKLFIPDRDLIPTGTYIEDVARCVDQSKRLIIVMTPNYVVRRGWSIFELETRLRNMLVTGEIKVILIECSELRGIMNYQEVEALKHTIKLLTVIKWHGPKCNKLNSKFWKRLQYEMPFKRIEPITHEQALDVSEQGPFGELQTVSAISMAAATSTALATAHPDLRSTFHNTYHSQMRQKHYYRSYEYDVPPTGTLPLTSIGNQHTYCNIPMTLINGQRPQTKSSREQNPDEAHTNSAILPLLPRETSISSVIW

SEQ ID NO: 3873 - protein, 687 aa, Homo sapiens
MLENYENLASVGHHLFQPSVIYWLEQEEELRAGRRAVLQEWRLKTKGPALRQDRSWFRASNETQTARSHNGGQLCDRTQCGEAFSEHSGLSTHVRTQNTGDSCVSNHYERDFFIPCQKTLFKIGEQFSVLGQCGKAFSSTPNVVSQQACTRDRSLDYSSCGEVFLNQSYLQARAGSHNGEETWKWKPCGKALTHSMGCATPVEMHAVRNPHVCRECGKAFRYTAYLTGRVQVHPGEKPCELEECGKASPVSSSLTQHVRIHAAEKPCECKECGKAFTGLSGLSKHVQTDPGQKPYECKDCGKACGGFYLLNEHGKTHTREKPFACVVCGKYFRNSSCLNNHVRIHTGIKPYTCSYCGKAFTVRCGLTRHVRTHTGEKPYTCKDCGKAFCTSSGLTEHVRTHTGEKPYECKDCGKSFTVSSSLTEHARIHTGEKPYECKQCGKAFTGRSGLTKHMRTHTGEKPYECKDCGKAYNRVYLLNEHVKTHTEEKPFICTVCRKSFRNSSCLNKHIQIHTGIKPYECKDCGKTFTVSSSLTEHIRTHTGEKPYECKVCGKAFTTSSHLIVHIRTHTGEKPYICKECGKAFASSSHLIEHRRTHTGEKPYICNECGKAFRASSHLHKHGRIHTGQKPYKCKECGKAYNRFYLLKEHLKTYTEEQVFVCKDCGKSFKNSSCLNHHTQIHTDEKPF

SEQ ID NO: 3874 - protein, 745 aa, Homo sapiens
MVGPGPTAAAAVEERQRKLQEYLAAKGKLKSQNTKPYLKSKNNCQNQPPSKSTIRPKNDVTNHVVLPVKPKRSISIKLQPRPPNTAGSQKPKLEPPKLLGKRLTSECVSSNPYSKPSSKSFQQCEAGSSTTGELSRKPVGSLNIEQLKTTKQQLTDQGNGKCIDFMNNIHVENESLDNFLKETNKENLLDILTEPERKPDPKLYTRSKPKTDSYNQTKNSLVPKQALGKSSVNSAVLKDRVNKQFVGETQSRTFPVKSQQLSRGADLARPGVKPSRTVPSHFIRTLSKVQSSKKPVVKNIKDIKVNRSQYERPNETKIRSYPVTEQRVKHTKPRTYPSLLQGEYNNRHPNIKQDQKSSQVCIPQTSCVLQKSKAISQRPNLTVGRFNSAIPSTPSIRPNGTSGNKHNNNGFQQKAQTLDSKLKKAVPQNHFLNKTAPKTQADVTTVNGTQTNPNIKKKATAEDRRKQLEEWQKSKGKTYKRPPMELKTKRKVIKEMNISFWKSIEKEEEEKKAQLELSSKINNTLTECLNLIEGGVPSNEILNILSSIPEAEKFAKFWICKAKLLASKGTFDVIGLYEEAIKNGATPIQELRKVVLNILQDSNRTTEGITSDSLVAETSITSVEELAKKMESVKSCLSPKEREQVTATPRIAKAEQHNYPGIKLQIGPIPRINGMPEVQDMKFITPVRRSSRIERAVSRYPEMLQEHDLVVASLDELLEVEETKCFIFRRNEALPVTLGFQTPES

SEQ ID NO: 3875 - protein, 309 aa, Homo sapiens
MRENNQSSTLEFILLGVTGQQEQEDFFYILFLFIYPITLIGNLLIVLAICSDVRLHNPMYFLLANLSLVDIFFSSVTIPKMLANHLLGSKSISFGGCLTQMYFMIALGNTDSYILAAMAYDRAVAISRPLHYTTIMSPRSCIWLIAGSWVIGNANALPHTLLTASLSFCGNQEVANFYCDITPLLKLSCSDIHFHVKMMYLGVGIFSVPLLCIIVSYIRVFSTVFQVPSTKGVLKAFSTCGSHLTVVSLYYGTVMGTYFRPLTNYSLKDAVITVMYTAVTPMLNPFIYSLRNRDMKAALRKLFNKRISS

SEQ ID NO: 3876 - protein, 528 aa, Homo sapiens
MSMKWTSALLLIQLSCYFSSGSCGKVLVWPTEFSHWMNIKTILDELVQRGHEVTVLASSASISFDPNSPSTLKFEVYPVSLTKTEFEDIIKQLVKRWAELPKDTFWSYFSQVQEIMWTFNDILRKFCKDIVSNKKLMKKLQESRFDVVLADAVFPFGELLAELLKIPFVYSLRFSPGYAIEKHSGGLLFPPSYVPVVMSELSDQMTFIERVKNMIYVLYFEFWFQIFDMKKWDQFYSEVLGRPTTLSETMAKADIWLIRNYWDFQFPHPLLPNVEFVGGLHCKPAKPLPKEMEEFVQSSGENGVVVFSLGSMVSNTSEERANVIASALAKIPQKVLWRFDGNKPDTLGLNTRLYKWIPQNDLLGHPKTRAFITHGGANGIYEAIYHGIPMVGVPLFADQPDNIAHMKAKGAAVSLDFHTMSSTDLLNALKTVINDPLYKENAMKLSRIHHDQPVKPLDRAVFWIEFVMRHKGAKHLRVAAHDLTWFQYHSLDVTGFLLACVATVIFIITKCLFCVWKFVRTGKKGKRD

SEQ ID NO: 3877 - protein, 480 aa, Homo sapiens
MSFPQLGYPQYLSAAGPGAYGGERPGVLAAAAAAAAAASSGRPGAAELGGGAGAAAVTSVLGMYAAAGPYAGAPNYSAFLPYAADLSLFSQMGSQYELKDNPGVHPATFAAHTAPAYYPYGQFQYGDPGRPKNATRESTSTLKAWLNEHRKNPYPTKGEKIMLAIITKMTLTQVSTWFANARRRLKKENKVTWGARSKDQEDGALFGSDTEGDPEKAEDDEEIDLESIDIDKIDEHDGDQSNEDDEDKAEAPHAPAAPSALARDQGSPLAAADVLKPQDSPLGLAKEAPEPGSTRLLSPGAAAGGLQGAPHGKPKIWSLAETATSPDGAPKASPPPPAGHPGAHGPSAGAPLQHPAFLPSHGLYTCHIGKFSNWTNSAFLAQGSLLNMRSFLGVGAPHAAPHGPHLPAPPPPQPPVAIAPGALNGDKASVRSSPTLPERDLVPRPDSPAQQLKSPFQPVRDNSLAPQEGTPRILAALPSA

SEQ ID NO: 3878 - protein, 464 aa, Homo sapiens
MSLQFSNGSRHVCLRSGAGSVRPLNGGAGFAGSSACGGSVAGSEFSCALGGGLGSVPGGSHAGGALGNAACIGFAGSEGGLLSGNEKVTMQNLNDRLASYLDNVRALEEANAELERKIKGWYEKYGPGSCRGLDHDYSRYHLTIEDLKNKIISSTTTNANVILQIDNARLAADDFRLKYENELTLHQNVEADINGLRRVLDELTLCRTDQELQYESLSEEMTYLKKNHEEEMKALQCAAGGNVNVEMNAAPGVDLAVLLNNMRAEYEALAEQNRKDAEAWFNEKSASLQQQISHDSGAATFARSQLTEMRRTLQTLEIQLQSLMATKHSLECSLTETESNYCTQLAQIQAQIGALEEQLHQVRTETEGQKLEYEHLLDVKVHLEKEIETYCRLIDGDGNSCSKSKGFGSGSPGNSSKDLSKTTLVKTVVEELDQRGKVLSSRIHSIEEKTSKMTNGKTEQRVPF

SEQ ID NO: 3879 - protein, 835 aa, Homo sapiens
MWLLALCLVGLAGAQRGGGGPGGGAPGGPGLGLGSLGEERFPVVNTAYGRVRGVRRELNNEILGPVVQFLGVPYATPPLGARRFQPPEAPASWPGVRNATTLPPACPQNLHGALPAIMLPVWFTDNLEAAATYVQNQSEDCLYLNLYVPTEDGPLTKKRDEATLNPPDTDIRDPGKKPVMLFLHGGSYMEGTGNMFDGSVLAAYGNVIVATLNYRLGVLGFLSTGDQAAKGNYGLLDQIQALRWLSENIAHFGGDPERITIFGSGAGASCVNLLILSHHSEGLFQKAIAQSGTAISSWSVNYQPLKYTRLLAAKVGCDREDSAEAVECLRRKPSRELVDQDVQPARYHIAFGPVVDGDVVPDDPEILMQQGEFLNYDMLIGVNQGEGLKFVEDSAESEDGVSASAFDFTVSNFVDNLYGYPEGKDVLRETIKFMYTDWADRDNGEMRRKTLLALFTDHQWVAPAVATAKLHADYQSPVYFYTFYHHCQAEGRPEWADAAHGDELPYVFGVPMVGATDLFPCNFSKNDVMLSAVVMTYWTNFAKTGDPNQPVPQDTKFIHTKPNRFEEVVWSKFNSKEKQYLHIGLKPRVRDNYRANKVAFWLELVPHLHNLHTELFTTTTRLPPYATRWPPRPPAGAPGTRRPPPPATLPPEPEPEPGPRAYDRFPGDSRDYSTELSVTVAVGASLLFLNILAFAALYYKRDRRQELRCRRLSPPGGSGSGVPGGGPLLPAAGRELPPEEELVSLQLKRGGGVGADPAEALRPACPPDYTLALRRAPDDVPLLAPGALTLLPSGLGPPPPPPPPSLHPFGPFPPPPPTATSHNNTLPHPHSTTRV

SEQ ID NO: 3880 - protein, 550 aa, Homo sapiens
MQDRLHILEDLNMLYIRQMALSLEDTELQRKLDHEIRMREGACKLLAACSQREQALEATKSLLVCNSRILSYMGELQRRKEAQVLGKTSRRPSDSGPPAERSPCRGRVCISDLRIPLMWKDTEYFKNKGDLHRWAVFLLLQLGEHIQDTEMILVDRTLTDISFQSNVLFAEAGPDFELRLELYGACVEEEGALTGGPKRLATKLSSSLGRSSGRRVRASLDSAGGSGSSPILLPTPVVGGPRYHLLAHTTLTLAAVQDGFRTHDLTLASHEENPAWLPLYGSVCCRLAAQPLCMTQPTASGTLRVQQAGEMQNWAQVHGVLKGTNLFCYRQPEDADTGEEPLLTIAVNKETRVRAGELDQALGRPFTLSISNQYGDDEVTHTLQTESREALQSWMEALWQLFFDMSQWKQCCDEIMKIETPAPRKPPQALAKQGSLYHEMAIEPLDDIAAVTDILTQREGARLETPPPWLAMFTDQPALPNPCSPASVAPAPDWTHPLPWGRPRTFSLDAVPPDHSPRARSVAPLPPQRSPRTRGLCSKGQPRTWLQSPV

SEQ ID NO: 3881 - protein, 430 aa, Homo sapiens
MTTSPILQLLLRLSLCGLLLQRAETGSKGQTAGELYQRWERYRRECQETLAAAEPPSVAAGFVLRQCGSDGQWGLWRDHTQCENPEKNEAFLDQRLILERLQVMYTVGYSLSLATLLLALLILSLFRRLHCTRNYIHINLFTSFMLRAAAILSRDRLLPRPGPYLGDQALALWNQALAACRTAQIVTQYCVGANYTWLLVEGVYLHSLLVLVGGSEEGHFRYYLLLGWGAPALFVIPWVIVRYLYENTQCWERNEVKAIWWIIRTPILMTILINFLIFIRILGILLSKLRTRQMRCRDYRLRLARSTLTLVPLLGVHEVVFAPVTEEQARGALRFAKLGFEIFLSSFQGFLVSVLYCFINKEVQSEIRRGWHHCRLRRSLGEEQRQLPERAFRALPSGSGPGEVPTSRGLSSGTLPGPGNEASRELESYC

SEQ ID NO: 3882 - protein, 847 aa, Homo sapiens
MFKCWSVVLVLGFIFLESEGRPTKEGGYGLKSYQPLMRLRHKQEKNQESSRVKGFMIQDGPFGSCENKYCGLGRHCVTSRETGQAECACMDLCKRHYKPVCGSDGEFYENHCEVHRAACLKKQKITIVHNEDCFFKGDKCKTTEYSKMKNMLLDLQNQKYIMQENENPNGDDISRKKLLVDQMFKYFDADSNGLVDINELTQVIKQEELGKDLFDCTLYVLLKYDDFNADKHLALEEFYRAFQVIQLSLPEDQKLSITAATVGQSAVLSCAIQGTLRPPIIWKRNNIILNNLDLEDINDFGDDGSLYITKVTTTHVGNYTCYADGYEQVYQTHIFQVNVPPVIRVYPESQAREPGVTASLRCHAEGIPKPQLGWLKNGIDITPKLSKQLTLQANGSEVHISNVRYEDTGAYTCIAKNEAGVDEDISSLFVEDSARKTLANILWREEGLGIGNMFYVFYEDGIKVIQPIECEFQRHIKPSEKLLGFQDEVCPKAEGDEVQRCVWASAVNVKDKFIYVAQPTLDRVLIVDVQSQKVVQAVSTDPVPVKLHYDKSHDQVWVLSWGTLEKTSPTLQVITLASGNVPHHTIHTQPVGKQFDRVDDFFIPTTTLIITHMRFGFILHKDEAALQKIDLETMSYIKTINLKDYKCVPQSLAYTHLGGYYFIGCKPDSTGAVSPQVMVDGVTDSVIGFNSDVTGTPYVSPDGHYLVSINDVKGLVRVQYITIRGEIQEAFDIYTNLHISDLAFQPSFTEAHQYNIYGSSSTQTDVLFVELSSGKVKMIKSLKEPLKAEEWPWNRKNRQIQDSGLFGQYLMTPSKDSLFILDGRLNKLNCEITEVEKGNTVIWVGDA

SEQ ID NO: 3883 - protein, 413 aa, Homo sapiens [sequence omitted]

SEQ ID NO: 3884 - protein, 595 aa, Homo sapiens
MDPVAFKDVAVNFTQEEWALLDISQRKLYREVMLETFRNLTSLGKRWKDQNIEYEHQNPRRNFRSLIEEKVNEIKDDSHCGETFTPVPDDRLNFQEKKASPEVKSCESFVCGEVGLGNSSFNMNIRGDIGHKAYEYQEYGPKPCKCQQPKKAFRYRPSFRTQERDHTGEKPNACKVCGKTFISHSSVRRHMVMHSGDGPYKCKFCGKAFHCLRLYLIHERIHTGEKPCECKQCGKSFSYSATHRIHKRTHTGEKPYEYQECGKAFHSPRSYRRHERIHMGEKAYQCKECGKAFTCPRYVRIHERTHSRKNLYECKQCGKALSSLTSFQTHVRLHSGERPYECKICGKDFCSVNSFQRHEKIHSGEKPYKCKQCGKAFPHSSSLRYHERTHTGEKPYECKQCGKAFRSASHLRVHGRTHTGEKPYECKECGKAFRYVNNLQSHERTQTHIRIHSGERRYKCKICGKGFYCPKSFQRHEKTHTGEKLYECKQRSVVPSVVPVPFDIMKGLTLERSPINASNVGKPSELCQSFECMVGLTLKRNPMSVSNDGKPSDLPHTFEYVVGHTMERSPMHVRNVGNPSDLPRTFEFMKGHKHT

SEQ ID NO: 3885 - protein, 340 aa, Homo sapiens
MDSTFTGYNLYNLQVKTEMDKLSSGLDIYRNPLKNKTEVTMFILTGFTDDFELQVFLFLLFFAIYLFTLIGNLGLVVLVIEDSWLHNPMYYFLSVLSFLDACYSTVVTPKMLVNFLAKNKSISFIGCATQMLLFVTFGTTECFLLAAMAYDHYVAIYNPLLYSVSMSPRVYVPLITASYVAGILHATIHIVATFSLSFCGSNEIRHVFCDMPPLLAISCSDTHTNQLLLFYFVGSIEIVTILIVLISCDFILLSILKMHSAKGRQKAFSTCGSHLTGVTIYHGTILVSYMRPSSSYASDHDIIVSIFYTIVIPKLNPIIYSLRNKEVKKAVKKMLKLVYK

SEQ ID NO: 3886 - protein, 312 aa, Homo sapiens
MSGTNQSSVSEFLLLGLSRQPQQQHLLFVFFLSMYLATVLGNLLIILSVSIDSCLHTPMYFFLSNLSFVDICFSFTTVPKMLANHILETQTISFCGCLTQMYFVFMFVDMDNFLLAVMAYDHFVAVCHPLHYTAKMTHQLCALLVAGLWVVANLNVLLHTLLMAPLSFCADNAITHFFCDVTPLLKLSCSDTHLNEVIILSEGALVMITPFLCILASYMHITCTVLKVPSTKGRWKAFSTCGSHLAVVLLFYSTIIAVYFNPLSSHSAEKDTMATVLYTVVTPMLNPFIYSLRNRYLKGALKKVVGRVVFSV

SEQ ID NO: 3887 - protein, 561 aa, Homo sapiens
MGARTPLPSFWVSFFAETGILFPGGTPWPMGSQHSKQHRKPGPLKRGHRRDRRTTRRKYWKEGREIARVLDDEGRNLRQQKLDRQRALLEQKQKKKRQEPLMVQANADGRPRSRRARQSEEQAPLVESYLSSSGSTSYQVQEADSLASVQLGATRPTAPASAKRTKAAATAGGQGGAARKEKKGKHKGTSGPAALAEDKSEAQGPVQILTVGQSDHAQDAGETAAGGGERPSGQDLRATMQRKGISSSMSFDEDEEDEEENSSSSSQLNSNTRPSSATSRKSVREAASAPSPTAPEQPVDVEVQDLEEFALRPAPQGITIKCRITRDKKGMDRGMYPTYFLHLDREDGKKVFLLAGRKRKKSKTSNYLISVDPTDLSRGGDSYIGKLRSNLMGTKFTVYDNGVNPQKASSSTLESGTLRQELAAVCYETNVLGFKGPRKMSVIVPGMNMVHERVSIRPRNEHETLLARWQNKNTESIIELQNKTPVWNDDTQSYVLNFHGRVTQASVKNFQIIHGNDPDYIVMQFGRVAEDVFTMDYNYPLCALQAFAIALSSFDSKLACE

SEQ ID NO: 3888 - protein, 264 aa, Homo sapiens
MNIILEILLLLITIIYSYLESLVKFFIPQRRKSVAGEIVLITGAGHGIGRQTTYEFAKRQSILVLWDINKVKKEVGDVTIVVNNAGTVYPADLLSTKDEEITKTFEVNILGHFWITKALLPSMMERNHGHIVTVASVCGHEGIPYLIPYCSSKFAAVGFHRGLTSELQALGKTGIKTSCLCPVFVNTGFTKNPSTRLWPVLETDEVVRSLIDGILTNKKMIFVPSYINIFLRLQKFLPERASAILNRMQNIQFEAVVGHKIKMK

SEQ ID NO: 3889 - protein, 584 aa, Homo sapiens
MDLLWMPLLLVAACVSAVHSSPEVNAGVSSIHITKPVHILEERSLLVLTPAGLTQMLNQTRFLMVLFHNPSSKQSRNLAEELGKAVEIMGKGKNGIGFGKVDITIEKELQQEFGITKAPELKLFFEGNRSEPISCKGVVESAALVVWLRRQISQKAFLFNSSEQVAEFVISRPLVIVGFFQDLEEEVAELFYDVIKDFPELTFGVITIGNVIGRFHVTLDSVLVFKKGKIVNRQKLINDSTNKQELNRVIKQHLTDFVIEYNTENKDLISELHIMSHMLLFVSKSSESYGIIIQHYKLASKEFQNKILFILVDADEPRNGRVFKYFRVTEVDIPSVQILNLSSDARYKMPSDDITYESLKKFGRSFLSKNATKHQSSEEIPKYWDQGLVKQLVGKNFNVVVFDKEKDVFVMFYAPWSKKCKMLFPLLEELGRKYQNHSTIIIAKIDVTANDIQLMYLDRYPFFRLFPSGSQQAVLYKGEHTLKGFSDFLESHIKTKIEDEDELLSVEQNEVIEEEVLAEEKEVPMMRKGLPEQQSPELENMTKYVSKLEEPAGKKKTSEEVVVVVAKPKGPPVQKKKPKVKEEL

SEQ ID NO: 3890 - protein, 757 aa, Homo sapiens
MPALPLDQLQITHKDPKTGKLRTSPALHPEQKADRYFVLYKPPPKDNIPALVEEYLERATFVANDLDWLLALPHDKFWCQVIFDETLQKCLDSYLRYVPRKFDEGVASAPEVVDMQKRLHRSVFLTFLRMSTHKESKDHFISPSAFGEILYNNFLFDIPKILDLCVLFGKGNSPLLQKMIGNIFTQQPSYYSDLDETLPTILQVFSNILQHCGLQGDGANTTPQKLEERGRLTPSDMPLLELKDIVLYLCDTCTTLWAFLDIFPLACQTFQKHDFCYRLASFYEAAIPEMESAIKKRRLEDSKLLGDLWQRLSHSRKKLMEIFHIILNQICLLPILESSCDNIQGFIEEFLQIFSSLLQEKRFLRDYDALFPVAEDISLLQQASSVLDETRTAYILQAVESAWEGVDRRKATDAKDPSVIEEPNGEPNGVTVTAEAVSQASSHPENSEEEECMGAAAAVGPAMCGVELDSLISQVKDLLPDLGEGFILACLEYYHYDPEQVINNILEERLAPTLSQLDRNLDREMKPDPTPLLTSRHNVFQNDEFDVFSRDSVDLSRVHKGKSTRKEENTRSLLNDKRAVAAQRQRYEQYSVVVEEVPLQPGESLPYHSVYYEDEYDDTYDGNQVGANDADSDDELISRRPFTIPQVLRTKVPREGQEEDDDDEEDDADEEAPKPDHFVQDPAVLREKAEARRMAFLAKKGYRHDSSTAVAGSPRGHGQSRETTQERRKKEANKATRANHNRRTMADRKRSKGMIPS

SEQ ID NO: 3891 - protein, 356 aa, Homo sapiens
MPARALLPRRMGHRTLASTPALWASIPCPRSELRLDLVLPSGQSFRWREQSPAHWSGVLADQVWTLTQTEEQLHCTVYRGDKSQASRPTPDELEAVRKYFQLDVTLAQLYHHWGSVDSHFQEVAQKFQGVRLLRQDPIECLFSFICSSNNNIARITGMVERLCQAFGPRLIQLDDVTYHGFPSLQALAGPEVEAHLRKLGLGYRARYVSASARAILEEQGGLAWLQQLRESSYEEAHKALCILPGVGTKVADCICLMALDKPQAVPVDVHMWHIAQRDYSWHPTTSQAKGPSPQTNKELGNFFRSLWGPYAGWAQALCQVITTFMTFLGPHRLDQMPPEELQTSSSRLGGPPWQCI

SEQ ID NO: 3892 - protein, 387 aa, Homo sapiens
MPVPASWPHPPGPFLLLTLLLGLTEVAGEEELQMIQPEKLLLVTVGKTATLHCTVTSLLPVGPVLWFRGVGPGRELIYNQKEGHFPRVTTVSDLTKRNNMDFSIRISSITPADVGTYYCVKFRKGSPENVEFKSGPGTEMALGAKPSAPVVLGPAARTTPEHTVSFTCESHGFSPRDITLKWFKNGNELSDFQTNVDPTGQSVAYSIRSTARVVLDPWDVRSQVICEVAHVTLQGDPLRGTANLSEAIRVPPTLEVTQQPMRVGNQVNVTCQVRKFYPQSLQLTWSENGNVCQRETASTLTENKDGTYNWTSWFLVNISDQRDDVVLTCQVKHDGQLAVSKRLALEVTVHQKDQSSDATPGPASSLTALLLIAVLLGPIYVPWKQKT

SEQ ID NO: 3893 - protein, 554 aa, Homo sapiens
MDNAVDGLDKASIANSDGPTAGSQTPPFKRKGKLSTIGKIFKPWKWRKKKTSDKFRETSAVLERKISTRQSREELIRRGVLKELPDQDGDVTVNFENSNGHMIPIGEESTREENVVKSEEGNGSVSEKTPPLEEQAEDKKAGSSHSKKTTGSKASASPSTSSTSSRPKASKETVSSKAGTVGTTKGKRKTDKQPITSHLSSDTTTSGTSDLKGEPAETRVESFKLEQTVPGAEEQNTGKFKSMVPPPPVAPAPSPLAPPLPLEDQCITASDTPVVLVSVGADLPVSALDPSQLLWAEEPTNRTTLYSGTGLSVNRENAKCFTTKEELGKTVPQLLTPGLMGESSESFSASEDEGHREYQANDSDSDGPILYTDDEDEDEDEDGSGESALASKIRRRDTLAIKLGNRPSKKELEDKNILQRTSEEERQEIRQQIGTKLVRRLSQRPTTEELEQRNILKQKNEEEEQEAKMELKRRLSRKLSLRPTVAELQARRILRFNEYVEVTDSPDYDRRADKPWARLTPADKAAIRKELNEFKSTEMEVHEESRQFTRFHRP

SEQ ID NO: 3894 - protein, 903 aa, Homo sapiens
MTRSCSAVGCSTRDTVLSRERGLSFHQFPTDTIQRSKWIRAVNRVDPRSKKIWIPGPGAILCSKHFQESDFESYGIRRKLKKGAVPSVSLYKIPQGVHLKGKARQKILKQPLPDNSQEVATEDHNYSLKTPLTIGAEKLAEVQQMLQVSKKRLISVKNYRMIKKRKGLRLIDALVEEKLLSEETECLLRAQFSDFKWELYNWRETDEYSAEMKQFACTLYLCSSKVYDYVRKILKLPHSSILRTWLSKCQPSPGFNSNIFSFLQRRVENGDQLYQYCSLLIKSMPLKQQLQWDPSSHSLQGFMDFGLGKLDADETPLASETVLLMAVGIFGHWRTPLGYFFVNRASGYLQAQLLRLTIGKLSDIGITVLAVTSDATAHSVQMAKALGIHIDGDDMKCTFQHPSSSSQQIAYFFDSCHLLRLIRNAFQNFQSIQFINGIAHWQHLVELVALEEQELSNMERIPSTLANLKNHVLKVNSATQLFSESVASALEYLLSLDLPPFQNCIGTIHFLRLINNLFDIFNSRNCYGKGLKGPLLPETYSKINHVLIEAKTIFVTLSDTSNNQIIKGKQKLGFLGFLLNAESLKWLYQNYVFPKVMPFPYLLTYKFSHDHLELFLKMLRQVLVTSSSPTCMAFQKAYYNLETRYKFQDEVFLSKVSIFDISIARRKDLALWTVQRQYGVSVTKTVFHEEGICQDWSHCSLSEALLDLSDHRRNLICYAGYVANKLSALLTCEDCITALYASDLKASKIGSLLFVKKKNGLHFPSESLCRVINICERVVRTHSRMAIFELVSKQRELYLQQKILCELSGHINLFVDVNKHLFDGEVCAINHFVKLLKDIIICFLNIRAKNVAQNPLKHHSERTDMKTLSRKHWSSVQDYKCSSFANTSSKFRHLLSNDGYPFK

SEQ ID NO: 3895 - protein, 283 aa, Homo sapiens
MEKTCIDALPLTMNSSEKQETVCIFGTGDFGRSLGLKMLQCGYSVVFGSRNPQKTTLLPSGAEVLSYSEAAKKSGIIIIAIHREHYDFLTELTEVLNGKILVDISNNLKINQYPESNAEYLAHLVPGAHVVKAFNTISAWALQSGALDASRQAILKKENPFSTSSAWLSDSYVALGILGFFLFVLLGITSLPSVSNAVNWREFRFVQSKLGYLTLILCTAHTLVYGGKRFLSPSNLRWYLPAAYVLGLIIPCTVLVIKFVLIMPCVDNTLTRIRQGWERNSKH

SEQ ID NO: 3896 - protein, 356 aa, Homo sapiens
MDAGVTESGLNVTLTIRLLMHGKEVGSIIGKKGESVKRIREESGARINISEGNCPERIITLTGPTNAIFKAFAMIIDKLEEDINSSMTNSTAASRPPVTLRLVVPATQCGSLIGKGGCKIKEIRESTGAQVQVAGDMLPNSTERAITIAGVPQSVTECVKQICLVMLETLSQSPQGRVMTIPYQPMPASSPVICAGGQDRCSDAAGYPHATHDLEGPPLDAYSIQGQHTISPLDLAKLNQVARQQSHFAMMHGGTGFAGIDSSSPEVKGYWASLDASTQTTHELTIPNNLIGCIIGRQGANINEIRQMSGAQIKIANPVEGSSGRQVTITGSAASISLAQYLINARLSSEKGMGCS

SEQ ID NO: 3897 - protein, 675 aa, Homo sapiens
MPRAQPSSASYQPVPADPFAIVSRAQQMVEILSDENRNLRQELEGCYEKVARLQKVETEIQRVSEAYENLVKSSSKREALEKAMRNKLEGEIRRMHDFNRDLRERLETANKQLAEKEYEGSEDTRKTISQLFAKNKESQREKEKLEAELATARSTNEDQRRHIEIRDQALSNAQAKVVKLEEELKKKQVYVDKVEKMQQALVQLQAACEKREQLEHRLRTRLERELESLRIQQRQGNCQPTNVSEYNAAALMELLREKEERILALEADMTKWEQKYLEENVMRHFALDAAATVAAQRDTTVISHSPNTSYDTALEARIQKEEEEILMANKRCLDMEGRIKTLHAQIIEKDAMIKVLQQRSRKEPSKTEQLSCMRPAKSLMSISNAGSGLLSHSSTLTGSPIMEEKRDDKSWKGSLGILLGGDYRAEYVPSTPSPVPPSTPLLSAHSKTGSRDCSTQTERGTESNKTAAVAPISVPAPVAAAATAAAITATAATITTTMVAAAPVAVAAAAAPAAAAAPSPATAAATAAAVSPAAAGQIPAAASVASAAAVAPSAAAAAAVQVAPAAPAPVPAPALVPVPAPAAAQASAPAQTQAPTSAPAVAPTPAPTPTPAVAQAEVPASPATGPGPHRLSIPSLTCNPDKTDGPVFHSNTLERKTPIQILGQEPDAEMVEYLI

SEQ ID NO: 3898 - protein, 1687 aa, Homo sapiens
MTSSSPAGLEGSDLSSINTMMSAVMSVGKVTENGGSPQGIKSPSKPPGPNRIGRRNQETKEEKSSYNCPLCEKICTTQHQLTMHIRQHNTDTGGADHSCSICGKSLSSASSLDRHMLVHSGERPYKCTVCGQSFTTNGNMHRHMKIHEKDPNSATATAPPSPLKRRRLSSKRKLSHDAESEREDPAPAKKMVEDGQSGDLEKKADEVFHCPVCFKEFVCKYGLETHMETHSDNPLRCDICCVTFRTHRGLLRHNALVHKQLPRDAMGRPFIQNNPSIPAGFHDLGFTDFSCRKFPRISQAWCETNLRRCISEQHRFVCDTCDKAFPMLCSLALHKQTHVAADQGQEKPQATPLPGDALDQKGFLALLGLQHTKDVRPAPAEEPLPDDNQAIQLQTLKCQLPQDPGCTNLLSLSPFEAASLGGSLTVLPATKDSIKHLSLQPFQKGFIIQPDSSIVVKPISGESAIELADIQQILKMAASAPPQISLPPFSKAPAAPLQAIFKHMPPLKPKPLVTPRTVVATSTPPPLINAQQASPGCISPSLPPPPLKLLKGSVEAASNAHLLQSKSGTQPHAATRLSLQQPRAELPGQPEMKTQLEQDSIIEALLPLSMEAKIKQEITEGELKAFMTAPGGKKTPAMRKVLYPCRFCNQVFAFSGVLRAHVRSHLGISPYQCNICDYIAADKAALIRHLRTHSGERPYICKICHYPFTVKANCERHLRKKHLKATRKDIEKNIEYVSSSAAELVDAFCAPDTVCRLCGEDLKHYRALRIHMRTHCGRGLGGGHKGRKPFECKECSAAFAAKRNCIHHILKQHLHVPEQDIESYVLAADGLGPAEAPAAEASGRGEDSGCAALGDCKPLTAFLEPQNGFLHRGPTQPPPPHVSIKLEPASSFAVDFNEPLDFSQKGLALVQVKQENISFLSPSSLVPYDCSMEPIDLSIPKNFRKGDKDLATPSEAKKPEEEAGSSEQPSPCPAPGPSLPVTLGPSGILESPMAPAPAATPEPPAQPLQGPVQLAVPIYSSALVSSPPLVGSSALLSGTALLRPLRPKPPLLLPKPPVTEELPPLASIAQIISSVSSAPTLLKTKVADPGPASTGSNTTASDSLGGSVPKAATTATPAATTSPKESSEPPAPASSPEAASPTEQGPAGTSKKRGRKRGMRSRPRANSGGVDLDSSGEFASIEKMLATTDTNKFSPFLQTAEDNTQDEVAGAPADHHGPSDEEQGSPPEDKLLRAKRNSYTNCLQKITCPHCPRVFPWASSLQRHMLTHTDSQSDAETAAAAGEVLDLTSRDREQPSEGATELRQVAGDAPVEQATAETASPVHREEHGRGESHEPEEEHGTEESTGDADGAEEDASSNQSLDLDFATKLMDFKLAEGDGEAGAGGAASQEQKLACDTCGKSFKFLGTLSRHRKAHGRQEPKDEKGDGASTAEEGPQPAPEQEEKPPETPAEVVESAPGAGEAPAEKLAEETEGPSDGESAAEKRSSEKSDDDKKPKTDSPKSVASKADKRKKVCSVCNKRFWSLQDLTRHMRSHTGERPYKCQTCERTFTLKHSLVRHQRIHQKARHAKHHGKDSDKEERGEEDSENESTHSGNNAVSENEAELAPNASNHMAVTRSRKEGLASATKDCSHREEKVTAGWPSEPGQGDLNPESPAALGQDLLEPRSKRPAHPILATADGASQLVGME

SEQ ID NO: 3899 - protein, 410 aa, Homo sapiens
MPARALLPRRMGHRTLASTPALWASIPCPRSELRLDLVLPSGQSFRWREQSPAHWSGVLADQVWTLTQTEEQLHCTVYRGDKSQASRPTPDELEAVRKYFQLDVTLAQLYHHWGSVDSHFQEVAQKFQGVRLLRQDPIECLFSFICSSNNNIARITGMVERLCQAFGPRLIQLDDVTYHGFPSLQALAGPEVEAHLRKLGLGYRARYVSASARAILEEQGGLAWLQQLRESSYEEAHKALCILPGVGTKVADCICLMALDKPQAVPVDVHMWHIAQRDYSWHPTTSQAKGPSPQTNKELGNFFRSLWGPYAGWAQATPPSYRCCSVPTCANPAMLRSHQQSAERVPKGRKARWGTLDKEIPQAPSPPFPTSLSPSPPSLMLGRGLPVTTSKARHPQIKQSVCTTRWGGGY

SEQ ID NO: 3900 - protein, 605 aa, Homo sapiens
MSNESCLPYYTAHSYSSMSAFKTSMGDLQRQLYNRGEYNIFKYAPMFESNFIQINKKGEVIDVHNRVRMVTVGIVCTSPILPLPDVMVLAQPTKICEQHVRWGRFAKGRGRRPVKTLELTRLLPLKFVKISIHDHEKQQLRLKLATGRTFYLQLCPSSDTREDLFCYWEKLVYLLRPPVESYCSTPTLLSGDAPPEDNKSLVAAELHREGDQSETGLYKPCDVSAATSSAYAGGEGIQHASHGTASAASPSTSTPGAAEGGAARTAGGMAVAGTATGPRTDVAIAGAAMSPATGAMSIATTKSAGPGQVTTALAGAAIKNPGENESSKSMAGAANISSEGISLALVGAASTSLEGTSTSMAGAASLSQDSSLSAAFAGSITTSKCAAERTEGPAVGPLISTLQSEGYMSERDGSQKVSQPSAEVWNENKERREKKDRHPSRKSSHHRKAGESHRRRAGDKNQKASSHRSASGHKNTRDDKKEKGYSNVRGKRHGSSRKSSTHSSTKKESRTTQELGKNQSASSTGALQKKASKISSFLRSLRATPGSKTRVTSHDREVDIVAKMVEKQNIEAKVEKAQGGQELEMISGTMTSEKTEMIVFETKSI

SEQ ID NO: 3901 - protein, 361 aa, Homo sapiens
MDPLGAAKPQWPWRRCLAALLFQLLVAVCFFSYLRVSRDDATGSPRAPSGSSRQDTTPTRPTLLILLRTWPFHIPVALSRCSEMVPGTADCHITADRKVYPQADMVIVHHWDIMSNPKSRLPPSPRPQGQRWIWFNLEPPPNCQHLEALDRYFNLTMSYRSDSDIFTPYGWLEPWSGQPAHPPLNLSAKTELVAWAVSNWKPDSARVRYYQSLQAHLKVDVYGRSHKPLPKGTMMETLSRYKFYLAFENSLHPDYITEKLWRNALEAWAVPVVLGPSRSNYERFLPPDAFIHVDDFQSPKDLARYLQELDKDHARYLSYFRWRETLRPRSFSWALDFCKACWKLQQESRYQTVRSIAAWFT

SEQ ID NO: 3902 - protein, 829 aa, Homo sapiens
MNSGVAMKYGNDSSAELSELHSAALASLKGDIVELNKRLQQTERERDLLEKKLAKAQCEQSHLMREHEDVQERTTLRYEERITELHSVIAELNKKIDRLQGTTIREEDEYSELRSELSQSQHEVNEDSRSMDQDQTSVSIPENQSTMVTADMDNCSDLNSELQRVLTGLENVVCGRKKSSCSLSVAEVDKHIEQLTTASEHCDLAIKTVEEIEGVLGRDLYPNLAEERSRWEKELAGLREENESLTAMLCSKEEELNRTKATMNAIREERDRLRRRVRELQTRLQSVQATGPSSPGRLTSTNRPINPSTGELSTSSSSNDIPIAKIAERVKLSKTRSESSSSDRPVLGSEISSIGVSSSVAEHLAHSLQDCSNIQEIFQTLYSHGSAISESKIREFEVETERLNSRIEHLKSQNDLLTITLEECKSNAERMSMLVGKYESNATALRLALQYSEQCIEAYELLLALAESEQSLILGQFRAAGVGSSPGDQSGDENITQMLKRAHDCRKTAENAAKALLMKLDGSCGGAFAVAGCSVQPWESLSSNSHTSTTSSTASSCDTEFTKEDEQRLKDYIQQLKNDRAAVKLTMLELESIHIDPLSYDVKPRGDSQRLDLENAVLMQELMAMKEEMAELKAQLYLLEKEKKALELKLSTREAQEQAYLVHIEHLKSEVEEQKEQRMRSLSSTSSGSKDKPGKECADAASPALSLAELRTTCSENELAAEFTNAIRREKKLKARVQELVSALERLTKSSEIRHQQSAEFVNDLKRANSNLVAAYEKAKKKHQNKLKKLESQMMAMVERHETQVRMLKQRIALLEEENSRPHTNETSL

SEQ ID NO: 3903 - protein, 212 aa, Homo sapiens
MASLFSGRILIRNNSDQDELDTEAEVSRRLENRLVLLFFGAGACPQCQAFVPILKDFFVRLTDEFYVLRAAQLALVYVSQDSTEEQQDLFLKDMPKKWLFLPFEDDLRRDLGRQFSVERLPAVVVLKPDGDVLTRDGADEIQRLGTACFANWQEAAEVLDRNFQLPEDLEDQEPRSLTECLRRHKYRVEKAARGGRDPGGGGGEEGGAGGLF

SEQ ID NO: 3904 - protein, 308 aa, Homo sapiens
MDTGNKTLPQDFLLLGFPGSQTLQLSLFMLFLVMYILTVSGNVAILMLVSTSHQLHTPMYFFLSNLSFLEIWYTTAAVPKALAILLGRSQTISFTSCLLQMYFVFSLGCTEYFLLAAMAYDRCLAICYPLHYGAIMSSLLSAQLALGSWVCGFVAIAVPTALISGLSFCGPRAINHFFCDIAPWIALACTNTQAVELVAFVIAVVVILSSCLITFVSYVYIISTILRIPSASGRSKAFSTCSSHLTVVLIWYGSTVFLHVRTSIKDALDLIKAVHVLNTVVTPVLNPFIYTLRNKEVRETLLKKWKGK

SEQ ID NO: 3905 - protein, 739 aa, Homo sapiens
MASILLRSCRGRAPARLPPPPRYTVPRGSPGDPAHLSCASTLGLRNCLNVPFGCCTPIHPVYTSSRGDHLGCWALRPECLRIVSRAPWTSTSVGFVAVGPQCLPVRGWHSSRPVRDDSVVEKSLKSLKDKNKKLEEGGPVYSPPAEVVVKKSLGQRVLDELKHYYHGFRLLWIDTKIAARMLWRILNGHSLTRRERRQFLRICADLFRLVPFLVFVVVPFMEFLLPVAVKLFPNMLPSTFETQSLKEERLKKELRVKLELAKFLQDTIEEMALKNKAAKGSATKDFSVFFQKIRETGERPSNEEIMRFSKLFEDELTLDNLTRPQLVALCKLLELQSIGTNNFLRFQLTMRLRSIKADDKLIAEEGVDSLNVKELQAACRARGMRALGVTEDRLRGQLKQWLDLHLHQEIPTSLLILSRAMYLPDTLSPADQLKSTLQTLPEIVAKEAQVKVAEVEGEQVDNKAKLEATLQEEAAIQQEHREKELQKRSEVAKDFEPERVVAAPQRPGTEPQPEMPDTVLQSETLKDTAPVLEGLKEEEITKEEIDILSDACSKLQEQKKSLTKEKEELELLKEDVQDYSEDLQEIKKELSKTGEEKYVEESKASKRLTKRVQQMIGQIDGLISQLEMDQQAGKLAPANGMPTGENVISVAELINAMKQVKHIPESKLTSLAAALDENKDGKVNIDDLVKVIELVDKEDVHISTSQVAEIVATLEKEEKVEEKEKAKEKAEKEVAEVKS

SEQ ID NO: 3906 - protein, 425 aa, Homo sapiens
MGEDAAQAEKFQHPGSDMRQEKPSSPSPMPSSTPSPSLNLGNTEEAIRDNSQVNAVTVLTLLDKLVNMLDAVQENQHKMEQRQISLEGSVKGIQNDLTKLSKYQASTSNTVSKLLEKSRKVSAHTRAVKERMDRQCAQVKRLENNHAQLLRRNHFKVLIFQEENEIPASVFVKQPVSGAVEGKEELPDENKSLEETLHTVDLSSDDDLPHDEEALEDSAEEKVEESRAEKIKRSSLKKVDSLKKAFSRQNIEKKMNKLGTKIVSVERREKIKKSLTSNHQKISSGKSSPFKVSPLTFGRKKVREGESHAENETKSEDLPSSEQMPNDQEEESFAEGHSEASLASALVEGEIAEEAAEKATSRGSNSGMDSNIDLTIVEDEEEESVALEQAQKVRYEGSYALTSEEAERSDGDPVQPAVLQVHQTS

SEQ ID NO: 3907 - protein, 1210 aa, Homo sapiens
MAAQSSLYNDDRNLLRIREKERRNQEAHQEKEAFPEKIPLFGEPYKTAKGDELSSRIQNMLGNYEEVKEFLSTKSHTHRLDASENRLGKPKYPLIPDKGSSIPSSSFHTSVHHQSIHTPASGPLSVGNISHNPKMAQPRTEPMPSLHAKSCGPPDSQHLTQDRLGQEGFGSSHHKKGDRRADGDHCASVTDSAPERELSPLISLPSPVPPLSPIHSNQQTLPRTQGSSKVHGSSNNSKGYCPAKSPKDLAVKVHDKETPQDSLVAPAQPPSQTFPPPSLPSKSVAMQQKPTAYVRPMDGQDQAPSESPELKPLPEDYRQQTFEKTDLKVPAKAKLTKLKMPSQSVEQTYSNEVHCVEEILKEMTHSWPPPLTAIHTPSTAEPSKFPFPTKDSQHVSSVTQNQKQYDTSSKTHSNSQQGTSSMLEDDLQLSDSEDSDSEQTPEKPPSSSAPPSAPQSLPEPVASAHSSSAESESTSDSDSSSDSESESSSSDSEENEPLETPAPEPEPPTTNKWQLDNWLTKVSQPAAPPEGPRSTEPPRRHPESKGSSDSATSQEHSESKDPPPKSSSKAPRAPPEAPHPGKRSCQKSPAQQEPPQRQTVGTKQPKKPVKASARAGSRTSLQGEREPGLLPYGSRDQTSKDKPKVKTKGRPRAAASNEPKPAVPPSSEKKKHKSSLPAPSKALSGPEPAKDNVEDRTPEHFALVPLTESQGPPHSGSGSRTSGCRQAVVVQEDSRKDRLPLPLRDTKLLSPLRDTPPPQSLMVKITLDLLSRIPQPPGKGSRQRKAEDKQPPAGKKHSSEKRSSDSSSKLAKKRKGEAERDCDNKKIRLEKEIKSQSSSSSSSHKESSKTKPSRPSSQSSKKEMLPPPPVSSSSQKPAKPALKRSRREADTCGQDPPKSASSTKSNHKDSSIPKQRRVEGKGSRSSSEHKGSSGDTANPFPVPSLPNGNSKPGKPQVKFDKQQADLHMREAKKMKQKAELMTDRVGKAFKYLEAVLSFIECGIATESESQSSKSAYSVYSETVDLIKFIMSLKSFSDATAPTQEKIFAVLCMRCQSILNMAMFRCKKDIAIKYSRTLNKHFESSSKVAQAPSPCIASTGTPSPLSPMPSPASSVGSQSSAGSVGSSGVAATISTPVTIQNMTSSYVTITSHVLTAFDLWEQAEALTRKNKEFFARLSTNVCTLALNSSLVDLVHYTRQGFQQLQELTKTP

SEQ ID NO: 3908 - protein, 986 aa, Homo sapiens
MPGVARLPLLLGLLLLPRPGRPLDLADYTYDLAEEDDSEPLNYKDPCKAAAFLGDIALDEEDLRAFQVQQAVDLRRHTARKSSIKAAVPGNTSTPSCQSTNGQPQRGACGRWRGRSRSRRAATSRPERVWPDGVIPFVIGGNFTGSQRAVFRQAMRHWEKHTCVTFLERTDEDSYIVFTYRPCGCCSYVGRRGGGPQAISIGKNCDKFGIVVHELGHVVGFWHEHTRPDRDRHVSIVRENIQPGQEYNFLKMEPQEVESLGETYDFDSIMHYARNTFSRGIFLDTIVPKYEVNGVKPPIGQRTRLSKGDIAQARKLYKCPACGETLQDSTGNFSSPEYPNGYSAHMHCVWRISVTPGEKIILNFTSLDLYRSRLCWYDYVEVRDGFWRKAPLRGRFCGSKLPEPIVSTDSRLWVEFRSSSNWVGKGFFAVYEAICGGDVKKDYGHIQSPNYPDDYRPSKVCIWRIQVSEGFHVGLTFQSFEIERHDSCAYDYLEVRDGHSESSTLIGRYCGYEKPDDIKSTSSRLWLKFVSDGSINKAGFAVNFFKEVDECSRPNRGGCEQRCLNTLGSYKCSCDPGYELAPDKRRCEAACGGFLTKLNGSITSPGWPKEYPPNKNCIWQLVAPTQYRISLQFDFFETEGNDVCKYDFVEVRSGLTADSKLHGKFCGSEKPEVITSQYNNMRVEFKSDNTVSKKGFKAHFFSDKDECSKDNGGCQQDCVNTFGSYECQCRSGFVLHDNKHDCKEAGCDHKVTSTSGTITSPNWPDKYPSKKECTWAISSTPGHRVKLTFMEMDIESQPECAYDHLEVFDGRDAKAPVLGRFCGSKKPEPVLATGSRMFLRFYSDNSVQRKGFQASHATECGGQVRADVKTKDLYSHAQFGDNNYPGGVDCEWVIVAEEGYGVELVFQTFEVEEETDCGYDYMELFDGYDSTAPRLGRYCGSGPPEEVYSAGDSVLVKFHSDDTITKKGFHLRYTSTKFQDTLHSRK

SEQ ID NO: 3909 - protein, 1353 aa, Homo sapiens
MSSPMPDCTSKCRSLKHALDVLSVVTKGSENQIKAFLSSHCYNAATIKDVFGRNALHLVSSCGKKGVLDWLIQKGVDLLVKDKESGWTALHRSIFYGHIDCVWSLLKHGVSLYIQDKEGLSALDLVMKDRPTHVVFKNTDPTDVYTWGDNTNFTLGHGSQNSKHHPELVDLFSRSGIYIKQVVLCKFHSVFLSQKGQVYTCGHGPGGRLGHGDEQTCLVPRLVEGLNGHNCSQVAAAKDHTVVLTEDGCVYTFGLNIFHQLGIIPPPSSCNVPRQIQAKYLKGRTIIGVAAGRFHTVLWTREAVYTMGLNGGQLGCLLDPNGEKCVTAPRQVSALHHKDIALSLVAASDGATVCVTTRGDIYLLADYQCKKMASKQLNLKKVLVSGGHMEYKVDPEHLKENGGQKICILAMDGAGRVFCWRSVNSSLKQCRWAYPRQVFISDIALNRNEILFVTQDGEGFRGRWFEEKRKSSEKKEILSNLHNSSSDVSYVSDINSVYERIRLEKLTFAHRAVSVSTDPSGCNFAILQSDPKTSLYEIPAVSSSSFFEEFGKLLREADEMDSIHDVTFQVGNRLFPAHKYILAVHSDFFQKLFLSDGNTSEFTDIYQKDEDSAGCHLFVVEKVHPDMFEYLLQFIYTDTCDFLTHGFKPRIHLNKNPEEYQGTLNSHLNKVNFHEDDNQKSAFEVYKSNQAQTVSERQKSKPKSCKKGKNIREDDPVRMLQTVAKKFDFSNLSSRLDGVRFENEKINVIAKNTGNKLKLSQKKCSFLCDVTMKSVDGKEFPCHKCVLCARLEYFHSMLSSSWIEASSCAALEMPIHSDILKVILDYLYTDEAVVIKESQNVDFICSVLVVADQLLITRLKEICEVALTEKLTLKNAAMLLEFAAMYSAKQLKLSCLQFIGLNMAALLEARSLDVLSDGVLKDLSEFYRKMIPAMDRRVITPYQDGPDISYLEVEDGDIFLKEEINMEQNHSETMFKKAKTKAKKKPRKRSDSSGGYNLSDIIQSPSSTGLLKSGKTNSVESLPELLTSDSEGSYAGVGSPRDLQSPDFTTGFHSDKIEAKVKPYVNGTSPVYSREDLKPWEKSPILKISAPQPIPSNRIDTTSSASWVAGSFSPVSPPVVDLRTIMEIEESRQKCGATPKSHLGKTVSHGVKLSQKQRKMIALTTKENNSGMNSMETVLFTPSKAPKPVNAWASSLHSVSSKSFRDFLLEEKKSVTSHSSGDHVKKVSFKGIENSQAPKIVRCSTHGTPGPEGNHISDLPLLDSPNPWLSSSVTAPSMVAPVTFASIVEEELQQEAALIRSREKPLALIQIEEHAIQDLLVFYEAFGNPEEFVIVERTPQGPLAVPMWNKHGC

SEQ ID NO: 3910 - protein, 352 aa, Homo sapiens
MKPALLEVMRMNRICRMVLATCLGSFILVIFYFQSMLHPVMRRNPFGVDICCRKGSRSPLQELYNPIQLELSNTAVLHQMRRDQVTDTCRANSATSRKRRVLTPNDLKHLVVDEDHELIYCYVPKVACTNWKRLMMVLTGRGKYSDPMEIPANEAHVSANLKTLNQYSIPEINHRLKSYMKFLFVREPFERLVSAYRNKFTQKYNISFHKRYGTKIIKRQRKNATQEALRKGDDVKFEEFVAYLIDPHTQREEPFNEHWQTVYSLCHPCHIHYDLVGKYETLEEDSNYVLQLAGVGSYLKFPTYAKSTRTTDEMTTEFFQNISSEHQTQLYEVYKLDFLMFNYSVPSYLKLE

SEQ ID NO: 3911 - protein, 322 aa, Homo sapiens
MDPTISTLDTELTPINGTEETLCYKQTLSLTVLTCIVSLVGLTGNAVVLWLLGCRMRRNAFSIYILNLAAADFLFLSGRLIYSLLSFISIPHTISKILYPVMMFSYFAGLSFLSAVSTERCLSVLWPIWYRCHRPTHLSAVVCVLLWALSLLRSILEWMLCGFLFSGADSAWCQTSDFITVAWLIFLCVVLCGSSLVLLIRILCGSRKIPLTRLYVTILLTVLVFLLCGLPFGIQFFLFLWIHVDREVLFCHVHLVSIFLSALNSSANPIIYFFVGSFRQRQNRQNLKLVLQRALQDASEVDEGGGQLPEEILELSGSRLEQ

SEQ ID NO: 3912 - protein, 422 aa, Homo sapiens
MDHPSREKDERQRTTKPMAQRSAHCSRPSGSSSSSGVLMVGPNFRVGKKIGCGNFGELRLGKNLYTNEYVAIKLEPIKSRAPQLHLEYRFYKQLGSAGEGLPQVYYFGPCGKYNAMVLELLGPSLEDLFDLCDRTFTLKTVLMIAIQLLSRMEYVHSKNLIYRDVKPENFLIGRQGNKKEHVIHIIDFGLAKEYIDPETKKHIPYREHKSLTGTARYMSINTHLGKEQSRRDDLEALGHMFMYFLRGSLPWQGLKADTLKERYQKIGDTKRNTPIEALCENFPEEMATYLRYVRRLDFFEKPDYEYLRTLFTDLFEKKGYTFDYAYDWVGRPIPTPVGSVHVDSGASAITRESHTHRDRPSQQQPLRNQVVSSTNGELNVDDPTGAHSNAPITAHAEVEVVEEAKCCCFFKRKRKKTAQRHK

SEQ ID NO: 3913 - protein, 1217 aa, Homo sapiens
MFLYNLTLQRATGISFAIHGNFSGTKQQEIVVSRGKILELLRPDPNTGKVHTLLTVEVFGVIRSLMAFRLTGGTKDYIVVGSDSGRIVILEYQPSKNMFEKIHQETFGKSGCRRIVPGQFLAVDPKGRAVMISAIEKQKLVYILNRDAAARLTISSPLEAHKANTLVYHVVGVDVGFENPMFACLEMDYEEADNDPTGEAAANTQQTLTFYELDLGLNHVVRKYSEPLEEHGNFLITVPGGSDGPSGVLICSENYITYKNFGDQPDIRCPIPRRRNDLDDPERGMIFVCSATHKTKSMFFFLAQTEQGDIFKITLETDEDMVTEIRLKYFDTVPVAAAMCVLKTGFLFVASEFGNHYLYQIAHLGDDDEEPEFSSAMPLEEGDTFFFQPRPLKNLVLVDELDSLSPILFCQIADLANEDTPQLYVACGRGPRSSLRVLRHGLEVSEMAVSELPGNPNAVWTVRRHIEDEFDAYIIVSFVNATLVLSIGETVEEVTDSGFLGTTPTLSCSLLGDDALVQVYPDGIRHIRADKRVNEWKTPGKKTIVKCAVNQRQVVIALTGGELVYFEMDPSGQLNEYTERKEMSADVVCMSLANVPPGEQRSRFLAVGLVDNTVRIISLDPSDCLQPLSMQALPAQPESLCIVEMGGTEKQDELGERGSIGFLYLNIGLQNGVLLRTVLDPVTGDLSDTRTRYLGSRPVKLFRVRMQGQEAVLAMSSRSWLSYSYQSRFHLTPLSYETLEFASGFASEQCPEGIVAISTNTLRILALEKLGAVFNQVAFPLQYTPRKFVIHPESNNLIIIETDHNAYTEATKAQRKQQMAEEMVEAAGEDERELAAEMAAAFLNENLPESIFGAPKAGNGQWASVIRVMNPIQGNTLDLVQLEQNEAAFSVAVCRFSNTGEDWYVLVGVAKDLILNPRSVAGGFVYTYKLVNNGEKLEFLHKTPVEEVPAAIAPFQGRVLIGVGKLLRVYDLGKKKLLRKCENKHIANYISGIQTIGHRVIVSDVQESFIWVRYKRNENQLIIFADDTYPRWVTTASLLDYDTVAGADKFGNICVVRLPPNTNDEVDEDPTGNKALWDRGLLNGASQKAEVIMNYHVGETVLSLQKTTLIPGGSESLVYTTLSGGIGILVPFTSHEDHDFFQHVEMHLRSEHPPLCGRDHLSFRSYYFPVKNVIDGDLCEQFNSMEPNKQKNVSEELDRTPPEVSKKLEDIRTRYAF

SEQ ID NO: 3914 - protein, 589 aa, Homo sapiens
MEAEETMECLQEFPEHHKMILDRLNEQREQDRFTDITLIVDGHHFKAHKAVLAACSKFFYKFFQEFTQEPLVEIEGVSKMAFRHLIEFTYTAKLMIQGEEEANDVWKAAEFLQMLEAIKALEVRNKENSAPLEENTTGKNEAKKRKIAETSNVITESLPSAESEPVEIEVEIAEGTIEVEDEGIETLEEVASAKQSVKYIQSTGSSDDSALALLADITSKYRQGDRKGQIKEDGCPSDPTSKQEHMKSHSTESFKCEICNKRYLRESAWKQHLNCYHLEEGGVSKKQRTGKKIHVCQYCEKQFDHFGHFKEHLRKHTGEKPFECPNCHERFARNSTLKCHLTACQTGVGAKKGRKKLYECQVCNSVFNSWDQFKDHLVIHTGDKPNHCTLCDLWFMQGNELRRHLSDAHNISERLVTEEVLSVETRVQTEPVTSMTIIEQVGKVHVLPLLQVQVDSAQVTVEQVHPDLLQDSQVHDSHMSELPEQVQVSYLEVGRIQTEEGTEVHVEELHVERVNQMPVEVQTELLEADLDHVTPEIMNQEERESSQADAAEAAREDHEDAEDLETKPTVDSEAEKAENEDRTALPVLE

SEQ ID NO: 3915 - protein, 491 aa, Homo sapiens
MVFGEFFHRPGQDEELVNLNVGGFKQSVDQSTLLRFPHTRLGKLLTCHSEEAILELCDDYSVADKEYYFDRNPSLFRYVLNFYYTGKLHVMEELCVFSFCQEIEYWGINELFIDSCCSNRYQERKEENHEKDWDQKSHDVSTDSSFEESSLFEKELEKFDTLRFGQLRKKIWIRMENPAYCLSAKLIAISSLSVVLASIVAMCVHSMSEFQNEDGEVDDPVLEGVEIACIAWFTGELAVRLAAAPCQKKFWKNPLNIIDFVSIIPFYATLAVDTKEEESEDIENMGKVVQILRLMRIFRILKLARHSVGLRSLGATLRHSYHEVGLLLLFLSVGISIFSVLIYSVEKDDHTSSLTSIPICWWWATISMTTVGYGDTHPVTLAGKLIASTCIICGILVVALPITIIFNKFSKYYQKQKDIDVDQCSEDAPEKCHELPYFNIRDIYAQRMHTFITSLSSVGIVVSDPDSTDASSIEDNEDICNTTSLENCTAK

SEQ ID NO: 3916 - protein, 1008 aa, Homo sapiens
MDTAEDPAWLQLLQKDSSPPGPRPTAFFCPQDGSLGAGSSAMRDYCPSQQKASPAPPRHTPDQSPGMESRHRSPSGAGEGASCSDGPRGSLACPSPTCFSPQESPSKETLEAHGASISGTPEATTSGKPEPVSSVKTEPKSSDDRNPMFLEKMDFKSSKQADSTSIGKEDPGSSRKADPMFTGKAEPEILGKGDPVAPGRMDPMTVRKEDLGSLGKVDPLCSSKTYTVSPRKEDPGSLRKVDPVSSDKVDPVFPRKEEPRYSGKEHPVSSEKVAPTSAEKVDLVLSGKRDPGPSGKADPMPLESMDSASTGKTEPGLLGKLIPGSSGKNGPVSSGTGAPGSLGRLDPTCLGMADPASVGNVETVPATKEDSRFLGKMDPASSGEGRPVSGHTDTTASAKTDLTSLKNVDPMSSGKVDPVSLGKMDPMCSGKPELLSPGQAERVSVGKAGTVSPGKEDPVSSRREDPISAGSRKTSSEKVNPESSGKTNPVSSGPGDPRSLGTAGPPSAVKAEPATGGKGDPLSSEKAGLVASGKAAPTASGKAEPLAVGKEDPVSKGKADAGPSGQGDSVSIGKVVSTPGKTVPVPSGKVDPVSLGKAEAIPEGKVGSLPLEKGSPVTTTKADPRASGKAQPQSGGKAETKLPGQEGAAAPGEAGAVCLKKETPQASEKVDPGSCRKAEPLASGKGEPVSLGKADSAPSRKTESPSLGKVVPLSLEKTKPSSSSRQLDRKALGSARSPEGARGSEGRVEPKAEPVSSTEASSLGQKDLEAAGAERSPCPEAAAPPPGPRTRDNFTKAPSWEASAPPPPREDAGTQAGAQACVSVAVSPMSPQDGAGGSAFSFQAAPRAPSPPSRRDAGLQVSLGAAETRSVATGPMTPQAAAPPAFPEVRVRPGSALAAAVAPPEPAEPVRDVSWDEKGMTWEVYGAAMEVEVLGMAIQKHLERQIEEHGRQGAPAPPPAARAGPGRSGSVRTAPPDGAAKRPPGLFRALLQSVRRPRCCSRAGPTAE

SEQ ID NO: 3917 - protein, 336 aa, Homo sapiens
MSEEQFGGDGAAAAATAAVGGSAGEQEGAMVAATQGAAAAAGSGAGTGGGTASGGTEGGSAESEGAKIDASKNEEDEGKMFIGGLSWDTTKKDLKDYFSKFGEVVDCTLKLDPITGRSRGFGFVLFKESESVDKVMDQKEHKLNGKVIDPKRAKAMKTKEPVKKIFVGGLSPDTPEEKIREYFGGFGEVESIELPMDNKTNKRRGFCFITFKEEEPVKKIMEKKYHNVGLSKCEIKVAMSKEQYQQQQQWGSRGGFAGRARGRGGGPSQNWNQGYSNYWNQGYGNYGYNSQGYGGYGGYDYTGYNNYYGYGDYSNQQSGYGKVSRRGGHQNSYKPY

SEQ ID NO: 3918 - protein, 1090 aa, Homo sapiens
MAEAELHKERLQAIAEKRKRQTEIEGKRQQLDEQILLLQHSKSKVLREKWLLQGIPAGTAEEEEARRRQSEEDEFRVKQLEDNIQRLEQEIQTLESEESQISAKEQIILEKLKETEKSFKDFQKGFSSTDGDAVNYISSQLPDLPILCSRTAEPSPGQDGTSRAAGVGWENVLLKEGESASNATETSGPDMTIKKPPQLSEDDIWLKSEGDNYSATLLEPAASSLSPDHKNMEIEVSVAECKSVPGITSTPHPMDHPSAFYSPPHNGLLTDHHESLDNDVAREIRYLDEVLEANCCDSAVDGTYNGTSSPEPGAVVLVGGLSPPVHEATQPEPTERTASRQAPPHIELSNSSPDPMAEAERTNGHSPSQPRDALGDSLQVPVSPSSTTSSRCSSRDGEFTLTTLKKEAKFELRAFHEDKKPSKLFEDDEHEKEQYCIRKVRPSEEMLELEKERRELIRSQAVKKNPGIAAKWWNPPQEKTIEEQLDEEHLESHKKYKERKERRAQQEQLLLQKQLQQQQQQPPSQLCTAPASSHERASMIDKAKEDIVTEQIDFSAARKQFQLMENSRQAVAKGQSTPRLFSIKPFYRPLGSVNSDKPLTNPRPPSVGGPPEDSGASAAKGQKSPGALETPSAAGSQGNTASQGKEGPYSEPSKRGPLSKLWAEDGEFTSARAVLTVVKDDDHGILDQFSRSVNVSLTQEELDSGLDELSVRSQDTTVLETLSNDFSMDNISDSGASNETTNALQENSLADFSLPQTPQTDNPSEGRGEGVSKSFSDHGFYSPSSTLGDSPLVDDPLEYQAGLLVQNAIQQAIAEQVDKAVSKTSRDGAEQQGPEATVEEAEAAAFGSEKPQSMFEPPQVSSPVQEKRDVLPKILPAEDRALRERGPPQPLPAVQPSGPINMEETRPEGSYFSKYSEAAELRSTASLLATQESDVMVGPFKLRSRKQRTLSMIEEEIRAAQEREEELKRQRQVLQSTQSPRTKNAPSLPSRTCYKTAPGKIEKVKPPPSPTTEGPSLQPDLAPEEAAGTQRPKNLMQTLMEDYETHKSKRRERMDDSSVLEATRVNRRKSALALRWEAGIYANQEEEDNE

SEQ ID NO: 3919 - protein, 885 aa, Homo sapiens
MKWLGESKNMVVNGRRNGGKLSNDHQQNQSKLQHTGKDTLKAGKNAVERRSNRCNGNSGFEGQSRYVPSSGMSAKELCENDDLATSLVLDPYLGFQTHKMNTSAFPSRSSRHFSKSDSFSHNNPVRFRPIKGRQEELKEVIERFKKDEHLEKAFKCLTSGEWARHYFLNKNKMQEKLFKEHVFIYLRMFATDSGFEILPCNRYSSEQNGAKIVATKEWKRNDKIELLVGCIAELSEIEENMLLRHGENDFSVMYSTRKNCAQLWLGPAAFINHDCRPNCKFVSTGRDTACVKALRDIEPGEEISCYYGDGFFGENNEFCECYTCERRGTGAFKSRVGLPAPAPVINSKYGLRETDKRLNRLKKLGDSSKNSDSQSVSSNTDADTTQEKNNATSNRKSSVGVKKNSKSRTLTRQSMSRIPASSNSTSSKLTHINNSRVPKKLKKPAKPLLSKIKLRNHCKRLEQKNASRKLEMGNLVLKEPKVVLYKNLPIKKDKEPEGPAQAAVASGCLTRHAAREHRQNPVRGAHSQGESSPCTYITRRSVRTRTNLKEASDIKLEPNTLNGYKSSVTEPCPDSGEQLQPAPVLQEEELAHETAQKGEAKCHKSDTGMSKKKSRQGKLVKQFAKIEESTPVHDSPGKDDAVPDLMGPHSDQGEHSGTVGVPVSYTDCAPSPVGCSVVTSDSFKTKDSFRTAKSKKKRRITRYDAQLILENNSGIPKLTLRRRHDSSSKTNDQENDGMNSSKISIKLSKDHDNDNNLYVAKLNNGFNSGSGSSSTKLKIQLKRDEENRGSYTEGLHENGVCCSDPLSLLESRMEVDDYSQYEEESTDDSSSSEGDEEEDDYDDDFEDDFIPLPPAKRLRLIVGKDSIDIDISSRRREDQSLRLNA

SEQ ID NO: 3920 - protein, 1180 aa, Homo sapiens
MVLLLILSVLLLKEDVRGSAQSSERRVVAHMPGDIIIGALFSVHHQPTVDKVHERKCGAVREQYGIQRVEAMLHTLERINSDPTLLPNITLGCEIRDSCWHSAVALEQSIEFIRDSLISSEEEEGLVRCVDGSSSSFRSKKPIVGVIGPGSSSVAIQVQNLLQLFNIPQIAYSATSMDLSDKTLFKYFMRVVPSDAQQARAMVDIVKRYNWTYVSAVHTEGNYGESGMEAFKDMSAKEGICIAHSYKIYSNAGEQSFDKLLKKLTSHLPKARVVACFCEGMTVRGLLMAMRRLGLAGEFLLLGSDGWADRYDVTDGYQREAVGGITIKLQSPDVKWFDDYYLKLRPETNHRNPWFQEFWQHRFQCRLEGFPQENSKYNKTCNSSLTLKTHHVQDSKMGFVINAIYSMAYGLHNMQMSLCPGYAGLCDAMKPIDGRKLLESLMKTNFTGVSGDTILFDENGDSPGRYEIMNFKEMGKDYFDYINVGSWDNGELKMDDDEVWSKKSNIIRSVCSEPCEKGQIKVIRKGEVSCCWTCTPCKENEYVFDEYTCKACQLGSWPTDDLTGCDLIPVQYLRWGDPEPIAAVVFACLGLLATLFVTVVFIIYRDTPVVKSSSRELCYIILAGICLGYLCTFCLIAKPKQIYCYLQRIGIGLSPAMSYSALVTKTNRIARILAGSKKKICTKKPRFMSACAQLVIAFILICIQLGIIVALFIMEPPDIMHDYPSIREVYLICNTTNLGVVTPLGYNGLLILSCTFYAFKTRNVPANFNEAKYIAFTMYTTCIIWLAFVPIYFGSNYKIITMCFSVSLSATVALGCMFVPKVYIILAKPERNVRSAFTTSTVVRMHVGDGKSSSAASRSSSLVNLWKRRGSSGETLSSNGKSVTWAQNEKSSRGQHLWQRLSIHINKKENPNQTAVIKPFPKSTESRGLGAGAGAGGSAGGVGATGGAGCAGAGPGGPESPDAGPKALYDVAEAEEHFPAPARPRSPSPISTLSHRAGSASRTDDDVPSLHSEPVARSSSSQGSLMEQISSVVTRFTANISELNSMMLSTAAPSPGVGAPLCSSYLIPKEIQLPTTMTTFAEIQPLPAIEVTGGAQPAAGAQAAGDAARESPAAGPEAAAAKPDLEELVALTPPSPFRDSVDSGSTTPNSPVSESALCIPSSPKYDTLIIRDYTQSSSSL

SEQ ID NO: 3921 - protein, 703 aa, Homo sapiens
MLGTLTPLSSLLLLLLVLVLGCGPRASSGGGAGGAAGYAPVKYIQPMQKGPVGPPFREGKGQYLEMPLPLLPMDLKGEPGPPGKPGPRGPPGPPGFPGKPGMGKPGLHGQPGPAGPPGFSRMGKAGPPGLPGKVGPPGQPGLRGEPGIRGDQGLRGPPGPPGLPGPSGITIPGKPGAQGVPGPPGFQGEPGPQGEPGPPGDRGLKGDNGVGQPGLPGAPGQGGAPGPPGLPGPAGLGKPGLDGLPGAPGDKGESGPPGVPGPRGEPGAVGPKGPPGVDGVGVPGAAGLPGPQGPSGAKGEPGTRGPPGLIGPTGYGMPGLPGPKGDRGPAGVPGLLGDRGEPGEDGEPGEQGPQGLGGPPGLPGSAGLPGRRGPPGPKGEAGPGGPPGVPGIRGDQGPSGLAGKPGVPGERGLPGAHGPPGPTGPKGEPGFTGRPGGPGVAGALGQKGDLGLPGQPGLRGPSGIPGLQGPAGPIGPQGLPGLKGEPGLPGPPGEGRAGEPGTAGPTGPPGVPGSPGITGPPGPPGPPGPPGAPGAFDETGIAGLHLPNGGVEGAVLGKGGKPQFGLGELSAHATPAFTAVLTSPFPASGMPVKFDRTLYNGHSGYNPATGIFTCPVGGVYYFAYHVHVKGTNVWVALYKNNVPATYTYDEYKKGYLDQASGGAVLQLRPNDQVWVQMPSDQANGLYSTEYIHSSFSGFLLCPT

SEQ ID NO: 3922 - protein, 726 aa, Homo sapiens
MSTATTVAPAGIPATPGPVNPPPPEVSNPSKPGRKTNQLQYMQNVVVKTLWKHQFAWPFYQPVDAIKLNLPDYHKIIKNPMDMGTIKKRLENNYYWSASECMQDFNTMFTNCYIYNKPTDDIVLMAQALEKIFLQKVAQMPQEEVELLPPAPKGKGRKPAAGAQSAGTQQVAAVSSVSPATPFQSVPPTVSQTPVIAATPVPTITANVTSVPVPPAAAPPPPATPIVPVVPPTPPVVKKKGVKRKADTTTPTTSAITASRSESPPPLSDPKQAKVVARRESGGRPIKPPKKDLEDGEVPQHAGKKGKLSEHLRYCDSILREMLSKKHAAYAWPFYKPVDAEALELHDYHDIIKHPMDLSTVKRKMDGREYPDAQGFAADVRLMFSNCYKYNPPDHEVVAMARKLQDVFEMRFAKMPDEPVEAPALPAPAAPMVSKGAESSRSSEESSSDSGSSDSEEERATRLAELQEQLKAVHEQLAALSQAPVNKPKKKKEKKEKEKKKKDKEKEKEKHKVKAEEEKKAKVAPPAKQAQQKKAPAKKANSTTTAGRQLKKGGKQASASYDSEEEEEGLPMSYDEKRQLSLDINRLPGEKLGRVVHIIQSREPSLRDSNPDEIEIDFETLKPTTLRELERYVKSCLQKKQRKPFSASGKKQAAKSKEELAQEKKKELEKRLQDVSGQLSSSKKPARKEKPGSAPSGGPSRLSSSSSSESGSSSSSGSSSDSSDSE

SEQ ID NO: 3923 - protein, 551 aa, Homo sapiens
MSGGEQKPERYYVGVDVGTGSVRAALVDQSGVLLAFADQPIKNWEPQFNHHEQSSEDIWAACCVVTKKVVQGIDLNQIRGLGFDATCSLVVLDKQFHPLPVNQEGDSHRNVIMWLDHRAVSQVNRINETKHSVLQYVGGVMSVEMQAPKLLWLKENLREICWDKAGHFFDLPDFLSWKATGVTARSLCSLVCKWTYSAEKGWDDSFWKMIGLEDFVADNYSKIGNQVLPPGASLGNGLTPEAARDLGLLPGIAVAASLIDAHAGGLGVIGADVRGHGLICEGQPVTSRLAVICGTSSCHMGISKDPIFVPGVWGPYFSAMVPGFWLNEGGQSVTGKLIDHMVQGHAAFPELQVKATARCQSIYAYLNSHLDLIKKAQPVGFLTVDLHVWPDFHGNRSPLADLTLKGMVTGLKLSQDLDDLAILYLATVQAIALGTRFIIEAMEAAGHSISTLFLCGGLSKNPLFVQMHADITGMPVVLSQEVESVLVGAAVLGACASGDFASVQEAMAKMSKVGKVVFPRLQDKKYYDKKYQVFLKLVEHQKEYLAIMNDD

SEQ ID NO: 3924 - protein, 873 aa, Homo sapiens
MHPPPPAAAMDFSQNSLFGYMEDLQELTIIERPVRRSLKTPEEIERLTVDEDLSDIERAVYLLSAGQDVQGTSVIANLPFLMRQNPTETLRRVLPKVREALHVAGVEMQLTAAMSFLTILQDESVSIHAYTHSFLQVILLHLEHRDTGVSNAWLETLLSVIEVLPKETLRHEILNPLVSKAQLSQTVQSRLVSCKILGKLTNKFDAHTIKREILPLVKSLCQDVEYEVRSCMCRQLENIAQGIGTELTKSVVLPELIELSRDEGSSVRLAAFETLVNLLDIFDTDDRSQTILPLVKSFCEKSFKADESILISLSFHLGKLCHGLYGIFTPDQHLRFLEFYKKLCTLGLQQENGHNENQIPPQILEQEKKYISVRKNCAYNFPAMIVFVDPKNFHMELYSTFFCLCHDPEVPVRYTIAICFYEVSKLLNSGVYLIHKELITLLQDESLEVLDALIDHLPEILELMSTGGESSVQENKLSSLPDLIPALTAAEQRAAASLKWRTHEKLLQKYACLPHVISSDQIYYRFLQRMFTIMMTNNVLPVQKAASRTLCIFLRYNRKQEQRHEVIQKLIEQLGQGKSYWNRLRFLDTCEFIIEIFSKSFFCKYFFLPAIELTHDPVANVRMKLCYLLPKVKSTLKIPADKHLLQQLEMCVRKLLCQEKDKDVLAIVKRTVLELDRMEMSMDAFQKKFYEKDLLDQEKEREELLLLEMEQLEKEKQQNDGRPMSDKMFEKKRRDTKTPTQSLPKNIPISVPGPSSVTPSTSKEIKKSKLIRSQSFNNQAFHAKYGNLEKCASKSSTTGYTTSVSGLGKTSVLSLADDSFRTRNASSVPSSFSPNTPLPSTSRGTGNSVDPKSSGSKDTQPRKATLKSRKSNP

SEQ ID NO: 3925 - protein, 926 aa, Homo sapiens
MVSSVLPNPTSAECWAALLHDPMTLDMDAVLSDFVRSTGAEPGLARDLLEGKNWDLTAALSDYEQLRQVHTANLPHVFNEGRGPKQPEREPQPGHKVERPCLQRQDDIAQEKRLSRGISHASSAIVSLARSHVASECNNEQFPLEMPIYTFQLPDLSVYSEDFRSFIERDLIEQATMVALEQAGRLNWWSTVCTSCKRLLPLATTGDGNCLLHAASLGMWGFHDRDLVLRKALYTMMRTGAEREALKRRWRWQQTQQNKEEEWEREWTELLKLASSEPRTHFSKNGGTGGGVDNSEDPVYESLEEFHVFVLAHILRRPIVVVADTMLRDSGGEAFAPIPFGGIYLPLEVPPNRCHCSPLVLAYDQAHFSALVSMEQRDQQREQAVIPLTDSEHKLLPLHFAVDPGKDWEWGKDDNDNARLAHLILSLEAKLNLLHSYMNVTWIRIPSETRAPLAQPESPTASAGEDVQSLADSLDSDRDSVCSNSNSNNGKNGKDKEKEKQRKEKDKTRADSVANKLGSFSKTLGIKLKKNMGGLGGLVHGKMGRANSANGKNGDSAERGKEKKAKSRKGSKEESGASASTSPSEKTTPSPTDKAAGASPAEKGGGPRGDAWKYSTDVKLSLNILRAAMQGERKFIFAGLLLTSHRHQFHEEMIGYYLTSAQERFSAEQEQRRRDAATAAAAAAAAAAATAKRPPRRPETEGVPVPERASPGPPTQLVLKLKERPSPGPAAGRAARAAAGGTASPGGGARRASASGPVPGRSPPAPARQSVIHVQASGARDEACAPAVGALRPCATYPQQNRSLSSQSYSPARAAALRTVNTVESLARAVPGALPGAAGTAGAAEHKSQTYTNGFGALRDGLEFADADAPTARSNGECGRGGPGPVQRRCQRENCAFYGRAETEHYCSYCYREELRRRREARGARP

SEQ ID NO: 3926 - protein, 5202 aa, Homo sapiens
MNCPVLSLGSGFLFQVIEMLIFAYFASISLTESRGLFPRLENVGAFKKVSIVPTQAVCGLPDRSTFCHSSAAAESIQFCTQRFCIQDCPYRSSHPTYTALFSAGLSSCITPDKNDLHPNAHSNSASFIFGNHKSCFSSPPSPKLMASFTLAVWLKPEQQGVMCVIEKTVDGQIVFKLTISEKETMFYYRTVNGLQPPIKVMTLGRILVKKWIHLSVQVHQTKISFFINGVEKDHTPFNARTLSGSITDFASGTVQIGQSLNGLEQFVGRMQDFRLYQVALTNREILEVFSGDLLRLHAQSHCRCPGSHPRVHPLAQRYCIPNDAGDTADNRVSRLNPEAHPLSFVNDNDVGTSWVSNVFTNITQLNQGVTISVDLENGQYQVFYIIIQFFSPQPTEIRIQRKKENSLDWEDWQYFARNCGAFGMKNNGDLEKPDSVNCLQLSNFTPYSRGNVTFSILTPGPNYRPGYNNFYNTPSLQEFVKATQIRFHFHGQYYTTETAVNLRHRYYAVDEITISGRCQCHGHADNCDTTSQPYRCLCSQESFTEGLHCDRCLPLYNDKPFRQGDQVYAFNCKPCQCNSHSKSCHYNISVDPFPFEHFRGGGGVCDDCEHNTTGRNCELCKDYFFRQVGADPSAIDVCKPCDCDTVGTRNGSILCDQIGGQCNCKRHVSGRQCNQCQNGFYNLQELDPDGCSPCNCNTSGTVDGDITCHQNSGQCKCKANVIGLRCDHCNFGFKFLRSFNDVGCEPCQCNLHGSVNKFCNPHSGQCECKKEAKGLQCDTCRENFYGLDVTNCKACDCDTAGSLPGTVCNAKTGQCICKPNVEGRQCNKCLEGNFYLRQNNSFLCLPCNCDKTGTINGSLLCNKSTGQCPCKLGVTGLRCNQCEPHRYNLTIDNFQHCQMCECDSLGTLPGTICDPISGQCLCVPNRQGRRCNQCQPGFYISPGNATGCLPCSCHTTGAVNHICNSLTGQCVCQDASIAGQRCDQCKDHYFGFDPQTGRCQPCNCHLSGALNETCHLVTGQCFCKQFVTGSKCDACVPSASHLDVNNLLGCSKTPFQQPPPRGQVQSSSAINLSWSPPDSPNAHWLTYSLLRDGFEIYTTEDQYPYSIQYFLDTDLLPYTKYSYYIETTNVHGSTRSVAVTYKTKPGVPEGNLTLSYIIPIGSDSVTLTWTTLSNQSGPIEKYILSCAPLAGGQPCVSYEGHETSATIWNLVPFAKYDFSVQACTSGGCLHSLPITVTTAQAPPQRLSPPKMQKISSTELHVEWSPPAELNGIIIRYELYMRRLRSTKETTSEESRVFQSSGWLSPHSFVESANENALKPPQTMTTITGLEPYTKYEFRVLAVNMAGSVSSAWVSERTGESAPVFMIPPSVFPLSSYSLNISWEKPADNVTRGKVVGYDINMLSEQSPQQSIPMAFSQLLHTAKSQELSYTVEGLKPYRIYEFTITLCNSVGCVTSASGAGQTLAAAPAQLRPPLVKGINSTTIHLRWFPPEELNGPSPIYQLERRESSLPALMTTMMKGIRFIGNGYCKFPSSTHPVNTDFTGIKASFRTKVPEGLIVFAASPGNQEEYFALQLKKGRLYFLFDPQGSPVEVTTTNDHGKQYSDGKWHEIIAIRHQAFGQITLDGIYTGSSAILNGSTVIGDNTGVFLGGLPRSYTILRKDPEIIQKGFVGCLKDVHFMKNYNPSAIWEPLDWQSSEEQINVYNSWEGCPASLNEGAQFLGAGFLELHPYMFHGGMNFEISFKFRTDQLNGLLLFVYNKDGPDFLAMELKSGILTFRLNTSLAFTQVDLLLGLSYCNGKWNKVIIKKEGSFISASVNGLMKHASESGDQPLVVNSPVYVGGIPQELLNSYQHLCLEQGFGGCMKDVKFTRGAVVNLASVSSGAVRVNLDGCLSTDSAVNCRGNDSILVYQGKEQSVYEGGLQPFTEYLYRVIASHEGGSVYSDWSRGRTTGAAPQSVPTPSRVRSLNGYSIEVTWDEPVVRGVIEKYILKAYSEDSTRPPRMPSASAEFVNTSNLTGILTGLLPFKNYAVTLTACTLAGCTESSHALNISTPQEAPQEVQPPVAKSLPSSLLLSWNPPKKANGIITQYCLYMDGRLIYSGSEENYIVTDLAVFTPHQFLLSACTHVGCTNSSWVLLYTAQLPPEHVDSPVLTVLDSRTIHIQWKQPRKISGILERYVLYMSNHTHDFTIWSVIYNSTELFQDHMLQYVLPGNKYLIKLGACTGGGCTVSEASEALTDEDIPEGVPAPKAHSYSPDSFNVSWTEPEYPNGVITSYGLYLDGILIHNSSELSYRAYGFAPWSLHSFRVQACTAKGCALGPLVENRTLEAPPEGTVNVFVKTQGSRKAHVRWEAPFRPNGLLTHSVLFTGIFYVDPVGNNYTLLNVTKVMYSGEETNLWVLIDGLVPFTNYTVQVNISNSQGSLITDPITIAMPPGAPDGVLPPRLSSATPTSLQVVWSTPARNNAPGSPRYQLQMRSGDSTHGFLELFSNPSASLSYEVSDLQPYTEYMFRLVASNGFGSAHSSWIPFMTAEDKPGPVVPPILLDVKSRMMLVTWQHPRKSNGVITHYNIYLHGRLYLRTPGNVTNCTVMHLHPYTAYKFQVEACTSKGCSLSPESQTVWTLPGAPEGIPSPELFSDTPTSVIISWQPPTHPNGLVENFTIERRVKGKEEVTTLVTLPRSHSMRFIDKTSALSPWTKYEYRVLMSTLHGGTNSSAWVEVTTRPSRPAGVQPPVVTVLEPDAVQVTWKPPLIQNGDILSYEIHMPDPHITLTNVTSAVLSQKVTHLIPFTNYSVTIVACSGGNGYLGGCTESLPTYVTTHPTVPQNVGPLSVIPLSESYVVISWQPPSKPNGPNLRYELLRRKIQQPLASNPPEDLNRWHNIYSGTQWLYEDKGLSRFTTYEYMLFVHNSVGFTPSREVTVTTLAGLPERGANLTASVLNHTAIDVRWAKPTVQDLQGEVEYYTLFWSSATSNDSLKILPDVNSHVIGHLKPNTEYWIFISVFNGVHSINSAGLHATTCDGEPQGMLPPEVVIINSTAVRVIWTSPSNPNGVVTEYSIYVNNKLYKTGMNVPGSFILRDLSPFTIYDIQVEVCTIYACVKSNGTQITTVEDTPSDIPTPTIRGITSRSLQIDWVSPRKPNGIILGYDLLWKTWYPCAKTQKLVQDQSDELCKAVRCQKPESICGHICYSSEAKVCCNGVLYNPKPGHRCCEEKYIPFVLNSTGVCCGGRIQEAQPNHQCCSGYYARILPGEVCCPDEQHNRVSVGIGDSCCGRMPYSTSGNQICCAGRLHDGHGQKCCGRQIVSNDLECCGGEEGVVYNRLPGMFCCGQDYVNMSDTICCSASSGESKAHIKKNDPVPVKCCETELIPKSQKCCNGVGYNPLKYVCSDKISTGMMMKETKECRILCPASMEATEHCGRCDFNFTSHICTVIRGSHNSTGKASIEEMCSSAEETIHTGSVNTYSYTDVNLKPYMTYEYRISAWNSYGRGLSKAVRARTKEDVPQGVSPPTWTKIDNLEDTIVLNWRKPIQSNGPIIYYILLRNGIERFRGTSLSFSDKEGIQPFQEYSYQLKACTVAGCATSSKVVAATTQGVPESILPPSITALSAVALHLSWSVPEKSNGVIKEYQIRQVGKGLIHTDTTDRRQHTVTGLQPYTNYSFTLTACTSAGCTSSEPFLGQTLQAAPEGVWVTPRHIIINSTTVELYWSLPEKPNGLVSQYQLSRNGNLLFLGGSEEQNFTDKNLEPNSRYTYKLEVKTGGGSSASDDYIVQTPMSTPEEIYPPYNITVIGPYSIFVAWIPPGILIPEIPVEYNVLLNDGSVTPLAFSVGHHQSTLLENLTPFTQYEIRIQACQNGSCGVSSRMFVKTPEAAPMDLNSPVLKALGSACIEIKWMPPEKPNGIIINYFIYRRPAGIEEESVLFVWSEGALEFMDEGDTLRPFTLYEYRVRACNSKGSVESLWSLTQTLEAPPQDFPAPWAQATSAHSVLLNWTKPESPNGIISHYRVVYQERPDDPTFNSPTVHAFTVKGTSHQAHLYGLEPFTTYRIGVVAANHAGEILSPWTLIQTLESSPSGLRNFIVEQKENGRALLLQWSEPMRTNGVIKTYNIFSDGFLEYSGLNRQFLFRRLDPFTLYTLTLEACTRAGCAHSAPQPLWTDEAPPDSQLAPTVHSVKSTSVELSWSEPVNPNGKIIRYEVIRRCFEGKAWGNQTIQADEKIVFTEYNTERNTFMYNDTGLQPWTQCEYKIYTWNSAGHTCSSWNVVRTLQAPPEGLSPPVISYVSMNPQKLLISWIPPEQSNGIIQSYRLQRNEMLYPFSFDPVTFNYTDEELLPFSTYSYALQACTSGGCSTSKPTSITTLEAAPSEVSPPDLWAVSATQMNVCWSPPTVQNGKITKYLVRYDNKESLAGQGLCLLVSHLQPYSQYNFSLVACTNGGCTASVSKSAWTMEALPENMDSPTLQVTGSESIEITWKPPRNPNGQIRSYELRRDGTIVYTGLETRYRDFTLTPGVEYSYTVTASNSQGGILSPLVKDRTSPSAPSGMEPPKLQARGPQEILVNWDPPVRTNGDIINYTLFIRELFERETKIIHINTTHNSFGMQSYIVNQLKPFHRYEIRIQACTTLGCASSDWTFIQTPEIAPLMQPPPHLEVQMAPGGFQPTVSLLWTGPLQPNGKVLYYELYRRQIATQPRKSNPVLIYNGSSTSFIDSELLPFTEYEYQVWAVNSAGKAPSSWTWCRTGPAPPEGLRAPTFHVISSTQAVVNISAPGKPNGIVSLYRLFSSSAHGAETVLSEGMATQQTLHGLQAFTNYSIGVEACTCFNCCSKGPTAELRTHPAPPSGLSSPQIGTLASRTASFRWSPPMFPNGVIHSYELQFHVACPPDSALPCTPSQIETKYTGLGQKASLGGLQPYTTYKLRVVAHNEVGSTASEWISFTTQKELPQYRAPFSVDSNLSVVCVNWSDTFLLNGQLKEYVLTDGGRRVYSGLDTTLYIPRTADKTFFFQVICTTDEGSVKTPLIQYDTSTGLGLVLTTPGKKKGSRSKSTEFYSELWFIVLMAMLGLILLAIFLSLILQRKIHKEPYIRERPPLVPLQKRMSPLNVYPPGENHMGLADTKIPRSGTPVSIRSNRSACVLRIPSQNQTSLTYSQGSLHRSVSQLMDIQDKKVLMDNSLWEAIMGHNSGLYVDEEDLMNAIKDFSSVTKERTTFTDTHL

SEQ ID NO: 3927 - protein, 517 aa, Homo sapiens
MAQPVHSLCSAFGLQCCLLFLLASWGAGATTFQEYQKTGELSTSDHIFPLTPGLVYSIPFDHIVLHSGQRPPELPKSTEIHEQKRHCNTTRHSKPTDKPTGNSKTIDHKSSTDNHEAPPTSEENSSNQGKDPMIRNQRSVDPADSTTTHKESAGKKHITPAPKSKINCRKSTTGKSTVTRKSDKTGRPLEKSMSTLDKTSTSSHKTTTSFHNSGNSQTKQKSTSFPEKITAASKTTYKTTGTPEESEKTEDSRTTVASDKLLTKTTKNIQETISANELTQSLAEPTEHGGRTANENNTPSPAEPTENRERTANENKKTICTKGKNTPVPEKPTENLGNTTLTTETIKAPVKSTENPEKTAAVTKTIKPSVKVTGDKSLTTTSSHLNKTEVTHQVPTGSFTLITSRTKLSSITSEATGNESHPYLNKDGSQKGIHAGQMGENDSFPAWAIVIVVLVAVILLLVFLGLIFLVSYMMRTRRTLTQNTQYNDAEDEGGPNSYPVYLMEQQNLGMGQIPSPR

SEQ ID NO: 3928 - protein, 543 aa, Homo sapiens
MEQVNELKEKGNKALSVGNIDDALQCYSEAIKLDPHNHVLYSNRSAAYAKKGDYQKAYEDGCKTVDLKPDWGKGYSRKAAALEFLNRFEEAKRTYEEGLKHEANNPQLKEGLQNMEARLAERKFMNPFNMPNLYQKLESDPRTRTLLSDPTYRELIEQLRNKPSDLGTKLQDPRIMTTLSVLLGVDLGSMDEEEEIATPPPPPPPKKETKPEPMEEDLPENKKQALKEKELGNDAYKKKDFDTALKHYDKAKELDPTNMTYITNQAAVYFEKGDYNKCRELCEKAIEVGRENREDYRQIAKAYARIGNSYFKEEKYKDAIHFYNKSLAEHRTPDVLKKCQQAEKILKEQERLAYINPDLALEEKNKGNECFQKGDYPQAMKHYTEAIKRNPKDAKLYSNRAACYTKLLEFQLALKDCEECIQLEPTFIKGYTRKAAALEAMKDYTKAMDVYQKALDLDSSCKEAADGYQRCMMAQYNRHDSPEDVKRRAMADPEVQQIMSDPAMRLILEQMQKDPQALSEHLKNPVIAQKIQKLMDVGLIAIR

SEQ ID NO: 3929 - protein, 318 aa, Homo sapiens
MNPANHSQVAGFVLLGLSQVWELRFVFFTVFSAVYFMTVVGNLLIVVIVTSDPHLHTTMYFLLGNLSFLDFCYSSITAPRMLVDLLSGNPTISFGGCLTQLFFFHFIGGIKIFLLTVMAYDRYIAISQPLHYTLIMNQTVCALLMAASWVGGFIHSIVQIALTIQLPFCGPDKLDNFYCDVPQLIKLACTDTFVLELLMVSNNGLVTLMCFLVLLGSYTALLVMLRSHSREGRSKALSTCASHIAVVTLIFVPCIYVYTRPFRTFPMDKAVSVLYTIVTPMLNPAIYTLRNKEVIMAMKKLWRRKKDPIGPLEHRPLH

SEQ ID NO: 3930 - protein, 264 aa, Homo sapiens
MIMSSYLMDSNYIDPKFPPCEEYSQNSYIPEHSPEYYGRTRESGFQHHHQELYPPPPPRPSYPERQYSCTSLQGPGNSRGHGPAQAGHHHPEKSQSLCEPAPLSGASASPSPAPPACSQPAPDHPSSAASKQPIVYPWMKKIHVSTVNPNYNGGEPKRSRTAYTRQQVLELEKEFHYNRYLTRRRRIEIAHSLCLSERQIKIWFQNRRMKWKKDHRLPNTKVRSAPPAGAAPSTLSAATPGTSEDHSQSATPPEQQRAEDITRL

SEQ ID NO: 3931 - protein, 670 aa, Homo sapiens
MGETEKRIETHRIRCLSKLKMFLLAITCAFVSKTLSGSYMNSMLTQIERQFNIPTSLVGFINGSFEIGNLLLIIFVSYFGTKLHRPIMIGIGCVVMGLGCFLKSLPHFLMNQYEYESTVSVSGNLSSNSFLCMENGTQILRPTQDPSECTKEVKSLMWVYVLVGNIVRGMGETPILPLGISYIEDFAKFENSPLYIGLVETGAIIGPLIGLLLASFCANVYVDTGFVNTDDLIITPTDTRWVGAWWFGFLICAGVNVLTAIPFFFLPNTLPKEGLETNADIIKNENEDKQKEEVKKEKYGITKDFLPFMKSLSCNPIYMLFILVSVIQFNAFVNMISFMPKYLEQQYGISSSDAIFLMGIYNLPPICIGYIIGGLIMKKFKITVKQAAHIGCWLSLLEYLLYFLSFLMTCENSSVVGINTSYEGIPQDLYVENDIFADCNVDCNCPSKIWDPVCGNNGLSYLSACLAGCETSIGTGINMVFQNCSCIQTSGNSSAVLGLCDKGPDCSLMLQYFLILSAMSSFIYSLAAIPGYMVLLRCMKSEEKSLGVGLHTFCTRVFAGIPAPIYFGALMDSTCLHWGTLKCGESGACRIYDSTTFRYIYLGLPAALRGSSFVPALIILILLRKCHLPGENASSGTELIETKVKGKENECKDIYQKSTVLKDDELKTKL

SEQ ID NO: 3932 - protein, 926 aa, Homo sapiens
MVMADGPRHLQRGPVRVGFYDIEGTLGKGNFAVVKLGRHRITKTEVAIKIIDKSQLDAVNLEKIYREVQIMKMLDHPHIIKLYQVMETKSMLYLVTEYAKNGEIFDYLANHGRLNESEARRKFWQILSAVDYCHGRKIVHRDLKAENLLLDNNMNIKIADFGFGNFFKSGELLATWCGSPPYAAPEVFEGQQYEGPQLDIWSMGVVLYVLVCGALPFDGPTLPILRQRVLEGRFRIPYFMSEDCEHLIRRMLVLDPSKRLTIAQIKEHKWMLIEVPVQRPVLYPQEQENEPSIGEFNEQVLRLMHSLGIDQQKTIESLQNKSYNHFAAIYFLLVERLKSHRSSFPVEQRLDGRQRRPSTIAEQTVAKAQTVGLPVTMHSPNMRLLRSALLPQASNVEAFSFPASGCQAEAAFMEEECVDTPKVNGCLLDPVPPVLVRKGCQSLPSNMMETSIDEGLETEGEAEEDPAHAFEAFQSTRSGQRRHTLSEVTNQLVVMPGAGKIFSMNDSPSLDSVDSEYDMGSVQRDLNFLEDNPSLKDIMLANQPSPRMTSPFISLRPTNPAMQALSSQKREVHNRSPVSFREGRRASDTSLTQGIVAFRQHLQNLARTKGILELNKVQLLYEQIGPEADPNLAPAAPQLQDLASSCPQEEVSQQQESVSTLPASVHPQLSPRQSLETQYLQHRLQKPSLLSKAQNTCQLYCKEPPRSLEQQLQEHRLQQKRLFLQKQSQLQAYFNQMQIAESSYPQPSQQLPLPRQETPPPSQQAPPFSLTQPLSPVLEPSSEQMQYSPFLSQYQEMQLQPLPSTSGPRAAPPLPTQLQQQQPPPPPPPPPPRQPGAAPAPLQFSYQTCELPSAASPAPDYPTPCQYPVDGAQQSDLTGPDCPRSPGLQEAPSSYDPLALSELPGLFDCEMLDAVDPQHNGYVLVN

SEQ ID NO: 3933 - protein, 550 aa, Homo sapiens
MSQTSLKQKKNEPGMRSSKESLEAEKRKESDKTGVRLSNQGSQESSLRKTDSRGYLVRSQWSRISRSPSTKAPSIDEPRSRNTSAKLPSSSTSSRTPSTSPSLHDSSPPPLSGQPSLQPPASPQLPRSLDSRPPTPPEPDPGSRRSTKMQENPEAWAQGIVREIRQTRDSQPLEYSRTSPTEWKSSSQRRGIYPASTQLDRNSLSEQQQQQREDEDDYEAAYWASMRSFYEKNPSCSRPWPPKPKNAITIALSSCALFNMVDGRKIYEQEGLEKYMEYQLTNENVILTPGPAFRFVKALQYVNARLRDLYPDEQDLFDIVLMTNNHAQVGVRLINSVNHYGLLIDRFCLTGGKDPIGYLKAYLTNLYIAADSEKVQEAIQEGIASATMFDGAKDMAYCDTQLRVAFDGDAVLFSDESEHFTKEHGLDKFFQYDTLCESKPLAQGPLKGFLEDLGRLQKKFYAKNERLLCPIRTYLVTARSAASSGARVLKTLRRWGLEIDEALFLAGAPKSPILVKIRPHIFFDDHMFHIEGAQRLGSIAAYGFNKKFSS

SEQ ID NO: 3934 - protein, 583 aa, Homo sapiens
MESKGASSCRLLFCLLISATVFRPGLGWYTVNSAYGDTIIIPCRLDVPQNLMFGKWKYEKPDGSPVFIAFRSSTKKSVQYDDVPEYKDRLNLSENYTLSISNARISDEKRFVCMLVTEDNVFEAPTIVKVFKQPSKPEIVSKALFLETEQLKKLGDCISEDSYPDGNITWYRNGKVLHPLEGAVVIIFKKEMDPVTQLYTMTSTLEYKTTKADIQMPFTCSVTYYGPSGQKTIHSEQAVFDIYYPTEQVTIQVLPPKNAIKEGDNITLKCLGNGNPPPEEFLFYLPGQPEGIRSSNTYTLTDVRRNATGDYKCSLIDKKSMIASTAITVHYLDLSLNPSGEVTRQIGDALPVSCTISASRNATVVWMKDNIRLRSSPSFSSLHYQDAGNYVCETALQEVEGLKKRESLTLIVEGKPQIKMTKKTDPSGLSKTIICHVEGFPKPAIQWTITGSGSVINQTEESPYINGRYYSKIIISPEENVTLTCTAENQLERTVNSLNVSAISIPEHDEADEISDENREKVNDQAKLIVGIVVGLLLAALVAGVVYWLYMKKSKTASKHVNKDLGNMEENKKLEENNHKTEA

SEQ ID NO: 3935 - protein, 417 aa, Homo sapiens
MSLSKKLTLDKLDVRGKRVIMRVDFNVPMKKNQITNNQRIKASIPSIKYCLDNGAKAVVLMSHLGRPDGVPMPDKYSLAPVAVELKSLLGKDVLFLKDCVGAEVEKACANPAPGSVILLENLRFHVEEEGKGQDPSGKKIKAEPDKIEAFRASLSKLGDVYVNDAFGTAHRAHSSMVGVNLPHKASGFLMKKELDYFAKALENPVRPFLAILGGAKVADKIQLIKNMLDKVNEMIIGGGMAYTFLKVLNNMEIGASLFDEEGAKIVKDIMAKAQKNGVRITFPVDFVTGDKFDENAQVGKATVASGISPGWMGLDCGPESNKNHAQVVAQARLIVWNGPLGVFEWDAFAKGTKALMDEIVKATSKGCITVIGGGDTATCCAKWNTEDKVSHVSTGGGASLELLEGKILPGVEALSNM

SEQ ID NO: 3936 - protein, 1261 aa, Homo sapiens
MGTGDFICISMTGGAPWGFRLQGGKEQKQPLQVAKIRNQSKASGSGLCEGDEVVSINGNPCADLTYPEVIKLMESITDSLQMLIKRPSSGISEALISENENKNLEHLTHGGYVESTTLQIRPATKTQCTEFFLAPVKTEVPLAENQRSGPDCAGSLKEETGPSYQRAPQMPDSQRGRVAEELILREKVEAVQPGPVVELQLSLSQERHKGASGPLVALPGAEKSKSPDPDPNLSHDRIVHINSIPTNEKADPFLRSSKIIQISSGRELRVIQESEAGDAGLPRVEVILDCSDRQKTEGCRLQAGKECVDSPVEGGQSEAPPSLVSFAVSSEGTEQGEDPRSEKDHSRPHKHRARHARLRRSESLSEKQVKEAKSKCKSIALLLTDAPNPNSKGVLMFKKRRRRARKYTLVSYGTGELEREADEEEEGDKEDTCEVAFLGASESEVDEELLSDVDDNTQVVNFDWDSGLVDIEKKLNRGDKMEMLPDTTGKGALMFAKRRERMDQITAQKEEDKVGGTPSREQDAAQTDGLRTTTSYQRKEEESVRTQSSVSKSYIEVSHGLGHVPQQNGFSGTSETANIQRMVPMNRTAKPFPGSVNQPATPFSPTRNMTSPIADFPAPPPYSAVTPPPDAFSRGVSSPIAGPAQPPPWPQPAPWSQPAFYDSSERIASRDERISVPAKRTGILQEAKRRSTTKPMFTFKEPKVSPNPELLSLLQNSEGKRGTGAGGDSGPEEDYLSLGAEACNFMQSSSAKQKTPPPVAPKPAVKSSSSQPVTPVSPVWSPGVAPTQPPAFPTSNPSKGTVVSSIKIAQPSYPPARPASTLNVAGPFKGPQAAVASQNYTPKPTVSTPTVNAVQPGAVGPSNELPGMSGRGAQLFAKRQSRMEKYVVDSDTVQAHAARAQSPTPSLPASWKYSSNVRAPPPVAYNPIHSPSYPLAALKSQPSAAQPSKMGKKKGKKPLNALDVMKHQPYQLNASLFTFQPPDAKDGLPQKSSVKVNSALAMKQALPPRPVNAASPTNVQASSVYSVPAYTSPPSFFAEASSPVSASPVPVGIPTSPKQESASSSYFVAPRPKFSAKKSGVTIQESGRSLSLPGRSVPPPISTSPWVYQPTYSYSSKPTDGLEKANKRPTPWEAAAKSPLGLVDDAFQPRNIQESIVANVVSAARRKVLPGPPEDWNERLSYIPQTQKAYMGSCGRQEYNVTANNNMSTTSQYGSQLPYAYYRQASRNDSAIMSMETRSDYCLPVADYNYNPHPRGWRRQT

SEQ ID NO: 3937 - protein, 316 aa, Homo sapiens
MRQPLSWGRWRAMLARTYGPGPSAGYRWASGAQGYVRNPPVGACDLQGELDRFGGISVRLARLDALDRLDAAAFQKGLQAAVQQWRSEGRTAVWLHIPILQSRFIAPAASLGFCFHHAESDSSTLTLWLREGPSRLPGYASHQVGVAGAVFDESTRKILVVQDRNKLKNMWKFPGGLSEPEEDIGDTAVREVFEETGIKSEFRSVLSIRQQHTNPGAFGKSDMYIICRLKPYSFTINFCQEECLRCEWMDLNDLAKTENTTPITSRVARLLLYGYREGFDKIDLTVEELPAVYTGLFYKLYHKELPENYKTMKGID

SEQ ID NO: 3938 - protein, 420 aa, Homo sapiens
MAALVRPARFVVRPLLQVVQAWDLDARRWVRALRRSPVKVVFPSGEVVEQKRAPGKQPRKAPSEASAQEQREKQPLEESASRAPSTWEESGLRYDKAYPGDRRLSSVMTIVKSRPFREKQGKILLEGRRLISDALKAGAVPKMFFFSRLEYLKELPVDKLKGVSLIKVKFEDIKDWSDLVTPQGIMGIFAKPDHVKMTYPKTQLQHSLPLLLICDNLRDPGNLGTILRSAAGAGCSKVLLTKGCVDAWEPKVLRAGMGAHFRMPIINNLEWETVPNYLPPDTRVYVADNCGLYAQAEMSNKASDHGWVCDQRVMKFHKYEEEEDVETGASQDWLPHVEVQSYDSDWTEAPAAVVIGGETYGVSLESLQLAESTGGKRLLIPVVPGVDSLNSAMAASILLFEGKRQLRGRAEDLSRDRSYH

SEQ ID NO: 3939 - protein, 491 aa, Homo sapiens
MKRMVSWSFHKLKTMKHLLLLLLCVFLVKSQGVNDNEEGFFSARGHRPLDKKREEAPSLRPAPPPISGGGYRARPAKAAATQKKVERKAPDAGGCLHADPDLGVLCPTGCQLQEALLQQERPIRNSVDELNNNVEAVSQTSSSSFQYMYLLKDLWQKRQKQVKDNENVVNEYSSELEKHQLYIDETVNSNIPTNLRVLRSILENLRSKIQKLESDVSAQMEYCRTPCTVSCNIPVVSGKECEEIIRKGGETSEMYLIQPDSSVKPYRVYCDMNTENGGWTVIQNRQDGSVDFGRKWDPYKQGFGNVATNTDGKNYCGLPGEYWLGNDKISQLTRMGPTELLIEMEDWKGDKVKAHYGGFTVQNEANKYQISVNKYRGTAGNALMDGASQLMGENRTMTIHNGMFFSTYDRDNDGWLTSDPRKQCSKEDGGGWWYNRCHAANPNGRYYWGGQYTWDMAKHGTDDGVVWMNWKGSWYSMRKMSMKIRPFFPQQ

SEQ ID NO: 3940 - protein, 974 aa, Homo sapiens
MAGRVPSLLVLLVFPSSCLAFRSPLSVFKRFKETTRPFSNECLGTTRPVVPIDSSDFALDIRMPGVTPKQSDTYFCMSMRIPVDEEAFVIDFKPRASMDTVHHMLLFGCNMPSSTGSYWFCDEGTCTDKANILYAWARNAPPTRLPKGVGFRVGGETGSKYFVLQVHYGDISAFRDNNKDCSGVSLHLTRLPQPLIAGMYLMMSVDTVIPAGEKVVNSDISCHYKNYPMHVFAYRVHTHHLGKVVSGYRVRNGQWTLIGRQSPQLPQAFYPVGHPVDVSFGDLLAARCVFTGEGRTEATHIGGTSSDEMCNLYIMYYMEAKHAVSFMTCTQNVAPDMFRTIPPEANIPIPVKSDMVMMHEHHKETEYKDKIPLLQQPKREEEEVLDQGDFYSLLSKLLGEREDVVHVHKYNPTEKAESESDLVAEIANVVQKKDLGRSDAREGAEHERGNAILVRDRIHKFHRLVSTLRPPESRVFSLQQPPPGEGTWEPEHTGDFHMEEALDWPGVYLLPGQVSGVALDPKNNLVIFHRGDHVWDGNSFDSKFVYQQIGLGPIEEDTILVIDPNNAAVLQSSGKNLFYLPHGLSIDKDGNYWVTDVALHQVFKLDPNNKEGPVLILGRSMQPGSDQNHFCQPTDVAVDPGTGAIYVSDGYCNSRIVQFSPSGKFITQWGEESSGSSPLPGQFTVPHSLALVPLLGQLCVADRENGRIQCFKTDTKEFVREIKHSSFGRNVFAISYIPGLLFAVNGKPHFGDQEPVQGFVMNFSNGEIIDIFKPVRKHFDMPHDIVASEDGTVYIGDAHTNTVWKFTLTEKLEHRSVKKAGIEVQEIKEAEAVVETKMENKPTSSELQKMQEKQKLIKEPGSGVPVVLITTLLVIPVVVLLAIAIFIRWKKSRAFGADSEHKLETSSGRVLGRFRGKGSGGLNLGNFFASRKGYSRKGFDRLSTEGSDQEKEDDGSESEEEYSAPLPALAPSSS

SEQ ID NO: 3941 - protein, 536 aa, Homo sapiens
MARKLVMFRDVAIDFSQEEWECLDSAQRDLYRDVMLENYSNLVSLDLPSRCASKDLSPEKNTYETELSQWEMSDRLENCDLEESNSRDYLEAKGKMEKQQENQKEYFRQGMIIYDKMSIFNQHTYLSQHSRCHSTEKPYKCKECGKAFRRASHLTQHQSIHTGEKPYECKQCGKAFSRDSQLSLHQRLHTGEKPYACKECGKAFTQSSQLILHHRIHTGEKPYKCEECGKAFIRSSQLTRHQKVHTGEKPYECKECGKAFTQNSQLTLHQRLHTGEKLYECKECRKVFTQLSQLILHKRIHTGEKPYECKECGKAFICGSQLSQHQKIHNGEKPYECKECGRAFIRGSLLMQHQRIHTGEKPYKCEECGKAFIRGSQLTQHQRIHTNEKPYECKECGKMFSHGSQLTQHQRIHTGEKPYQCKECGKAFNRGSLLTRHQRIHTGEKPYECKECGKTFSRGSELTQHERIHTAFLAGQQDRSDIYMSRRFTKSIFPVFFSVPTMWTSKLELRYSHGDFENGIWVLWIMEQKYRRSLQP

SEQ ID NO: 3942 - protein, 783 aa, Homo sapiens
MLLGFRRGRRSHFKHIIHGLLPAASVAPKAAVPRTPPPRSPNPSPERPRSALAAAILATTLTGRTVAIPQPRQRSRSESDVSSVEQDSFIEPYATTSQLRPRPNWQSEMGRRSSLPSFETLDYGDEEDIETQLSSSGKELGDVSAREDRGGHSDDLYAVPHRNQVPLLHEVNSEDDENISHQDGFPGSPPAPQRTQQKDGKHPVLNLKDEKPPLCEKPPPSPDITGRARQRYTEITREKFEALKEENMDLNNMNQSLTLELNTMKQAMKELQLKLKGMEKEKRKLKEAEKASSQEVAAPELLYLRKQAQELVDENDGLKMTVHRLNVELSRYQTKFRHLSKEESLNIEGLPSKGPIPPWLLDIKYLSPLLLAYEDMMKEKDELNATLKEEMRMFRMRVQEVVKENEELHQELNKSSAVTSEEWRQLQTQAKLVLEENKLLLEQLEIQQRKAKDSHQERLQEVSKLTKQLMLLEAKTHGQEKELAENREQLEILRAKCQELKTHSDGKIAVEVHKSIVNELKSQLQKEEEKERAEMEELMEKLTVLQAQKKSLLLEKNSLTEQNKALEAELERAQKINRKSQKKIEVLKKQVEKAMGNEMSAHQYLANLVGLAENITQERDSLMCLAKCLESEKDGVLNKVIKSNIRLGKLEEKVKGYKKQAALKLGDISHRLLEQQEDFAGKTAQYRQEMRHLHQVLKDKQEVLDQALQQNREMEGELEVIWESTFRENRRIRELLQDTLTRTGVQDNPRALVAPSLNGVSQADLLDGCDVCSYDLKSHAPTC

SEQ ID NO: 3943 - protein, 1393 aa, Homo sapiens
MLSRPKPGESEVDLLHFQSQFLAAGAAPAVQLVKKGNRGGGDANSDRPPLQDHRDVVMLDNLPDLPPALVPSPPKRARPSPGHCLPEDEDPEERLRRHDQHITAVLTKIIERDTSSVAVNLPVPSGVAFPAVFLRSRDTQGKSATSGKRSIFAQEIAARRIAEAKGPSVGEVVPNVGPPEGAVTCETPTPRNQGCQLPGSSHSFQGPNLVTGKGLRDQEAEQEAQTIHEENIARLQAMAPEEILQEQQRLLAQLDPSLVAFLRSHSHTQEQTGETASEEQRPGGPSANVTKEEPLMSAFASEPRKRDKLEPEAPALALPVTPQKEWLHMDTVELEKLHWTQDLPPVRRQQTQERMQARFSLQGELLAPDVDLPTHLGLHHHGEEAERAGYSLQELFHLTRSQVSQQRALALHVLAQVISRAQAGEFGDRLAGSVLSLLLDAGFLFLLRFSLDDRVDGVIATAIRALRALLVAPGDEELLDSTFSWYHGALTFPLMPSQEDKEDEDEDEECPAGKAKRKSPEEESRPPPDLARHDVIKGLLATSLLPRLRYVLEVTYPGPAVVLDILAVLIRLARHSLESATRVLECPRLIETIVREFLPTSWSPVGAGPTPSLYKVPCATAMKLLRVLASAGRNIAARLLSSFDLRSRLCRIIAEAPQELALPPEEAEMLSTEALRLWAVAASYGQGGYLYRELYPVLMRALQVVPRELSTHPPQPLSMQRIASLLTLLTQLTLAAGSTPAETISDSAEASLSATPSLVTWTQVSGLQPLVEPCLRQTLKLLSRPEMWRAVGPVPVACLLFLGAYYQAWSQQPSSCPEDWLQDMQRLSEELLLPLLSQPTLGSLWDSLRHCSLLCNPLSCVPALEAPPSLVSLGCSGGCPRLSLAGSASPFPFLTALLSLLNTLAQIHKGLCGQLAAILAAPGLQNYFLQCVAPGAAPHLTPFSAWALRHEYHLQYLALALAQKAAALQPLPATHAALYHGMALALLSRLLPGSEYLTHELLLSCVFRLEFLPERTSGGPEAADFSDQLSLGSSRVPRCGQGTLLAQACQDLPSIRNCYLTHCSPARASLLASQALHRGELQRVPTLLLPMPTEPLLPTDWPFLPLIRLYHRASDTPSGLSPTDTMGTAMRVLQWVLVLESWRPQALWAVPPAARLARLMCVFLVDSELFRESPVQHLVAALLAQLCQPQVLPNLNLDCRLPGLTSFPDLYANFLDHFEAVSFGDHLFGALVLLPLQRRFSVTLRLALFGEHVGALRALSLPLTQLPVSLECYTVPPEDNLALLQLYFRTLVTGALRPRWCPVLYAVAVAHVNSFIFSQDPQSSDEVKAARRSMLQKTWLLADEGLRQHLLHYKLPNSTLPEGFELYSQLPPLRQHYLQRLTSTVLQNGVSET

SEQ ID NO: 3944 - protein, 737 aa, Homo sapiens
MVVFNGLLKIKICEAVSLKPTAWSLRHAVGPRPQTFLLDPYIALNVDDSRIGQTATKQKTNSPAWHDEFVTDVCNGRKIELAVFHDAPIGYDDFVANCTIQFEELLQNGSRHFEDWIDLEPEGRVYVIIDLSGSSGEAPKDNEERVFRERMRPRKRQGAVRRRVHQVNGHKFMATYLRQPTYCSHCRDFIWGVIGKQGYQCQVCTCVVHKRCHELIITKCAGLKKQETPDQVGSQRFSVNMPHKFGIHNYKVPTFCDHCGSLLWGLLRQGLQCKVCKMNVHRRCETNVAPNCGVDARGIAKVLADLGVTPDKITNSGQRRKKLIAGAESPQPASGSSPSEEDRSKSAPTSPCDQEIKELENNIRKALSFDNRGEEHRAASSPDGQLMSPGENGEVRQGQAKRLGLDEFNFIKVLGKGSFGKVMLAELKGKDEVYAVKVLKKDVILQDDDVDCTMTEKRILALARKHPYLTQLYCCFQTKDRLFFVMEYVNGGDLMFQIQRSRKFDEPRSRFYAAEVTSALMFLHQHGVIYRDLKLDNILLDAEGHCKLADFGMCKEGILNGVTTTTFCGTPDYIAPEILQELEYGPSVDWWALGVLMYEMMAGQPPFEADNEDDLFESILHDDVLYPVWLSKEAVSILKAFMTKNPHKRLGCVASQNGEDAIKQHPFFKEIDWVLLEQKKIKPPFKPRIKTKRDVNNFDQDFTREEPVLTLVDEAIVKQINQEEFKGFSYFGEDLMP

SEQ ID NO: 3945 - protein, 477 aa, Homo sapiens
MLPPGSNGTAYPGQFALYQQLAQGNAVGGSAGAPPLGPSQVVTACLLTLLIIWTLLGNVLVCAAIVRSRHLRANMTNVFIVSLAVSDLFVALLVMPWKAVAEVAGYWPFGAFCDVWVAFDIMCSTASILNLCVISVDRYWAISRPFRYKRKMTQRMALVMVGLAWTLSILISFIPVQLNWHRDQAASWGGLDLPNNLANWTPWEEDFWEPDVNAENCDSSLNRTYAISSSLISFYIPVAIMIVTYTRIYRIAQVQIRRISSLERAAEHAQSCRSSAACAPDTSLRASIKKETKVLKTLSVIMGVFVCCWLPFFILNCMVPFCSGHPEGPPAGFPCVSETTFDVFVWFGWANSSLNPVIYAFNADFQKVFAQLLGCSHFCSRTPVETVNISNELISYNQDIVFHKEIAAAYIHMMPNAVTPGNREVDNDEEEGPFDRMFQIYQTSPDGDPVAESVWELDCEGEISLDKITPFTPNGFH

SEQ ID NO: 3946 - protein, 1212 aa, Homo sapiens
MVLLLILSVLLLKEDVRGSAQSSERRVVAHMPGDIIIGALFSVHHQPTVDKVHERKCGAVREQYGIQRVEAMLHTLERINSDPTLLPNITLGCEIRDSCWHSAVALEQSIEFIRDSLISSEEEEGLVRCVDGSSSSFRSKKPIVGVIGPGSSSVAIQVQNLLQLFNIPQIAYSATSMDLSDKTLFKYFMRVVPSDAQQARAMVDIVKRYNWTYVSAVHTEGNYGESGMEAFKDMSAKEGICIAHSYKIYSNAGEQSFDKLLKKLTSHLPKARVVACFCEGMTVRGLLMAMRRLGLAGEFLLLGSDGWADRYDVTDGYQREAVGGITIKLQSPDVKWFDDYYLKLRPETNHRNPWFQEFWQHRFQCRLEGFPQENSKYNKTCNSSLTLKTHHVQDSKMGFVINAIYSMAYGLHNMQMSLCPGYAGLCDAMKPIDGRKLLESLMKTNFTGVSGDTILFDENGDSPGRYEIMNFKEMGKDYFDYINVGSWDNGELKMDDDEVWSKKSNIIRSVCSEPCEKGQIKVIRKGEVSCCWTCTPCKENEYVFDEYTCKACQLGSWPTDDLTGCDLIPVQYLRWGDPEPIAAVVFACLGLLATLFVTVVFIIYRDTPVVKSSSRELCYIILAGICLGYLCTFCLIAKPKQIYCYLQRIGIGLSPAMSYSALVTKTNRIARILAGSKKKICTKKPRFMSACAQLVIAFILICIQLGIIVALFIMEPPDIMHDYPSIREVYLICNTTNLGVVTPLGYNGLLILSCTFYAFKTRNVPANFNEAKYIAFTMYTTCIIWLAFVPIYFGSNYKIITMCFSVSLSATVALGCMFVPKVYIILAKPERNVRSAFTTSTVVRMHVGDGKSSSAASRSSSLVNLWKRRGSSGETLRYKDRRLAQHKSEIECFTPKGSMGNGGRATMSSSNGKSVTWAQNEKSSRGQHLWQRLSIHINKKENPNQTAVIKPFPKSTESRGLGAGAGAGGSAGGVGATGGAGCAGAGPGGPESPDAGPKALYDVAEAEEHFPAPARPRSPSPISTLSHRAGSASRTDDDVPSLHSEPVARSSSSQGSLMEQISSVVTRFTANISELNSMMLSTAAPSPGVGAPLCSSYLIPKEIQLPTTMTTFAEIQPLPAIEVTGGAQPAAGAQAAGDAARESPAAGPEAAAAKPDLEELVALTPPSPFRDSVDSGSTTPNSPVSESALCIPSSPKYDTLIIRDYTQSSSSL

SEQ ID NO: 3947 - protein, 459 aa, Homo sapiens
MTILGTTFGMVFSLLQVVSGESGYAQNGDLEDAELDDYSFSCYSQLEVNGSQHSLTCAFEDPDVNITNLEFEICGALVEVKCLNFRKLQEIYFIETKKFLLIGKSNICVKVGEKSLTCKKIDLTTIVKPEAPFDLSVVYREGANDFVVTFNTSHLQKKYVKVLMHDVAYRQEKDENKWTHVNLSSTKLTLLQRKLQPAAMYEIKVRSIPDHYFKGFWSEWSPSYYFRTPEINNSSGEMDPILLTISILSFFSVALLVILACVLWKKRIKPIVWPSLPDHKKTLEHLCKKPRKNLNVSFNPESFLDCQIHRVDDIQARDEVEGFLQDTFPQQLEESEKQRLGGDVQSPNCPSEDVVITPESFGRDSSLTCLAGNVSACDAPILSSSRSLDCRESGKNGPHVYQDLLLSLGTTNSTLPPPFSLQSGILTLNPVAQGQPILTSLGSNQEEAYVTMSSFYQNQ

SEQ ID NO: 3948 - protein, 360 aa, Homo sapiens
MAKAPSWAGVGALAYKAPEALWPAEAVMDGTMEDSEAVQRATALIEQRLAQEEENEKLRGDARQKLPMDLLVLEDEKHHGAQSAALQKVKGQERVRKTSLDLRREIIDVGGIQNLIELRKKRKQKKRDALAASHEPPPEPEEITGPVDEETFLKAAVEGKMKVIEKFLADGGSADTCDQFRRTALHRASLEGHMEILEKLLDNGATVDFQDRLDCTAMHWACRGGHLEVVKLLQSHGADTNVRDKLLSTPLHVAVRTGQVEIVEHFLSLGLEINARDREGDTALHDAVRLNRYKIIKLLLLHGADMMTKNLAGKTPTDLVQLWQADTRHALEHPEPGAEHNGLEGPNDSGRETPQPVPAQ

SEQ ID NO: 3949 - protein, 489 aa, Homo sapiens
MVAERSPARSPGSWLFPGLWLLVLSGPGGLLRAQEQPSCRRAFDLYFVLDKSGSVANNWIEIYNFVQQLAERFVSPEMRLSFIVFSSQATIILPLTGDRGKISKGLEDLKRVSPVGETYIHEGLKLANEQIQKAGGLKTSSIIIALTDGKLDGLVPSYAEKEAKISRSLGASVYCVGVLDFEQAQLERIADSKEQVFPVKGGFQALKGIINSILAQSCTEILELQPSSVCVGEEFQIVLSGRGFMLGSRNGSVLCTYTVNETYTTSVKPVSVQLNSMLCPAPILNKAGETLDVSVSFNGGKSVISGSLIVTATECSNGIAAIIVILVLLLLLGIGLMWWFWPLCCKVVIKDPPPPPAPAPKEEEEEPLPTKKWPTVDASYYGGRGVGGIKRMEVRWGDKGSTEEGARLEKAKNAVVKIPEETEEPIRPRPPRPKPTHQPPQTKWYTPIKGRLDALWALLRRQYDRVSLMRPQEGDEVCIWECIEKELTA

SEQ ID NO: 3950 - protein, 335 aa, Homo sapiens
MDPKGLLSLTFVLFLSLAFGASYGTGGRMMNCPKILRQLGSKVLLPLTYERINKSMNKSIHIVVTMAKSLENSVENKIVSLDPSEAGPPRYLGDRYKFYLENLTLGIRESRKEDEGWYLMTLEKNVSVQRFCLQLRLYEQVSTPEIKVLNKTQENGTCTLILGCTVEKGDHVAYSWSEKAGTHPLNPANSSHLLSLTLGPQHADNIYICTVSNPISNNSQTFSPWPGCRTDPSETKPWAVYAGLLGGVIMILIMVVILQLRRRGKTNHYQTTVEKKSLTIYAQVQKPGPLQKKLDSFPAQDPCTTIYVAATEPVPESVQETNSITVYASVTLPES

SEQ ID NO: 3951 - protein, 240 aa, Homo sapiens [sequence omitted]

SEQ ID NO: 3952 - protein, 321 aa, Homo sapiens
MFSLMASCCGWFKRWREPVRLANKQDKEGALGEADVIECLSLEKLVNEHKCLCQIEPCSAISGYGKKIDKSIKKGLYWLLHVIARDFDALNERIQKETTEQRALEEQEKQERAERVRKLREERKQNEQEQAELDGTSGLAELDPEPTNPFQPIASVIIENEGKLEREKKNQKMEKDSDGCHLKHKMEHEQIETQGQVNHNGQKNNEFGLVENYKEALTQQLKNEDETDRPSLESANGKKKTKKLRMKRNHRVEPLNIDDCAPESPTPPPPPPPVGWGTPKVTRLPKLEPLGETHHNDFYRKPLPPLAVPQRPNSDAHDVIS

SEQ ID NO: 3953 - protein, 380 aa, Homo sapiens
MMFSGFNADYEASSSRCSSASPAGDSLSYYHSPADSFSSMGSPVNAQDFCTDLAVSSANFIPTVTAISTSPDLQWLVQPALVSSVAPSQTRAPHPFGVPAPSAGAYSRAGVVKTMTGGRAQSIGRRGKVEQLSPEEEEKRRIRRERNKMAAAKCRNRRRELTDTLQAETDQLEDEKSALQTEIANLLKEKEKLEFILAAHRPACKIPDDLGFPEEMSVASLDLTGGLPEVATPESEEAFTLPLLNDPEPKPSVEPVKSISSMELKTEPFDDFLFPASSRPSGSETARSVPDMDLSGSFYAADWEPLHSGSLGMGPMATELEPLCTPVVTCTPSCTAYTSSFVFTYPEADSFPSCAAAHRKGSSSNEPSSDSLSSPTLLAL

SEQ ID NO: 3954 - protein, 2743 aa, Homo sapiens
MSDKMSSFLHIGDICSLYAEGSTNGFISTLGLVDDRCVVQPETGDLNNPPKKFRDCLFKLCPMNRYSAQKQFWKAAKPGANSTTDAVLLNKLHHAADLEKKQNETENRKLLGTVIQYGNVIQLLHLKSNKYLTVNKRLPALLEKNAMRVTLDEAGNEGSWFYIQPFYKLRSIGDSVVIGDKVVLNPVNAGQPLHASSHQLVDNPGCNEVNSVNCNTSWKIVLFMKWSDNKDDILKGGDVVRLFHAEQEKFLTCDEHRKKQHVFLRTTGRQSATSATSSKALWEVEVVQHDPCRGGAGYWNSLFRFKHLATGHYLAAEVDPDQDASRSRLRNAQEKMVYSLVSVPEGNDISSIFELDPTTLRGGDSLVPRNSYVRLRHLCTNTWVHSTNIPIDKEEEKPVMLKIGTSPVKEDKEAFAIVPVSPAEVRDLDFANDASKVLGSIAGKLEKGTITQNERRSVTKLLEDLVYFVTGGTNSGQDVLEVVFSKPNRERQKLMREQNILKQIFKLLQAPFTDCGDGPMLRLEELGDQRHAPFRHICRLCYRVLRHSQQDYRKNQEYIAKQFGFMQKQIGYDVLAEDTITALLHNNRKLLEKHITAAEIDTFVSLVRKNREPRFLDYLSDLCVSMNKSIPVTQELICKAVLNPTNADILIETKLVLSRFEFEGVSSTGENALEAGEDEEEVWLFWRDSNKEIRSKSVRELAQDAKEGQKEDRDVLSYYRYQLNLFARMCLDRQYLAINEISGQLDVDLILRCMSDENLPYDLRASFCRLMLHMHVDRDPQEQVTPVKYARLWSEIPSEIAIDDYDSSGASKDEIKERFAQTMEFVEEYLRDVVCQRFPFSDKEKNKLTFEVVNLARNLIYFGFYNFSDLLRLTKILLAILDCVHVTTIFPISKMAKGEENKGNNDVEKLKSSNVMRSIHGVGELMTQVVLRGGGFLPMTPMAAAPEGNVKQAEPEKEDIMVMDTKLKIIEILQFILNVRLDYRISCLLCIFKREFDESNSQTSETSSGNSSQEGPSNVPGALDFEHIEEQAEGIFGGSEENTPLDLDDHGGRTFLRVLLHLTMHDYPPLVSGALQLLFRHFSQRQEVLQAFKQVQLLVTSQDVDNYKQIKQDLDQLRSIVEKSELWVYKGQGPDETMDGASGENEHKKTEEGNNKPQKHESTSSYNYRVVKEILIRLSKLCVQESASVRKSRKQQQRLLRNMGAHAVVLELLQIPYEKAEDTKMQEIMRLAHEFLQNFCAGNQQNQALLHKHINLFLNPGILEAVTMQHIFMNNFQLCSEINERVVQHFVHCIETHGRNVQYIKFLQTIVKAEGKFIKKCQDMVMAELVNSGEDVLVFYNDRASFQTLIQMMRSERDRMDENSPLMYHIHLVELLAVCTEGKNVYTEIKCNSLLPLDDIVRVVTHEDCIPEVKIAYINFLNHCYVDTEVEMKEIYTSNHMWKLFENFLVDICRACNNTSDRKHADSILEKYVTEIVMSIVTTFFSSPFSDQSTTLQTRQPVFVQLLQGVFRVYHCNWLMPSQKASVESCIRVLSDVAKSRAIAIPVDLDSQVNNLFLKSHSIVQKTAMNWRLSARNAARRDSVLAASRDYRNIIERLQDIVSALEDRLRPLVQAELSVLVDVLHRPELLFPENTDARRKCESGGFICKLIKHTKQLLEENEEKLCIKVLQTLREMMTKDRGYGEKLISIDELDNAELPPAPDSENATEELEPSPPLRQLEDHKRGEALRQVLVNRYYGNVRPSGRRESLTSFGNGPLSAGGPGKPGGGGGGSGSSSMSRGEMSLAEVQCHLDKEGASNLVIDLIMNASSDRVFHESILLAIALLEGGNTTIQHSFFCRLTEDKKSEKFFKVFYDRMKVAQQEIKATVTVNTSDLGNKKKDDEVDRDAPSRKKAKEPTTQITEEVRDQLLEASAATRKAFTTFRREADPDDHYQPGEGTQATADKAKDDLEMSAVITIMQPILRFLQLLCENHNRDLQNFLRCQNNKTNYNLVCETLQFLDCICGSTTGGLGLLGLYINEKNVALINQTLESLTEYCQGPCHENQNCIATHESNGIDIITALILNDINPLGKKRMDLVLELKNNASKLLLAIMESRHDSENAERILYNMRPKELVEVIKKAYMQGEVEFEDGENGEDGAASPRNVGHNIYILAHQLARHNKELQSMLKPGGQVDGDEALEFYAKHTAQIEIVRLDRTMEQIVFPVPSICEFLTKESKLRIYYTTERDEQGSKINDFFLRSEDLFNEMNWQKKLRAQPVLYWCARNMSFWSSISFNLAVLMNLLVAFFYPFKGVRGGTLEPHWSGLLWTAMLISLAIVIALPKPHGIRALIASTILRLIFSVGLQPTLFLLGAFNVCNKIIFLMSFVGNCGTFTRGYRAMVLDVEFLYHLLYLVICAMGLFVHEFFYSLLLFDLVYREETLLNVIKSVTRNGRSIILTAVLALILVYLFSIVGYLFFKDDFILEVDRLPNETAVPETGESLASEFLFSDVCRVESGENCSSPAPREELVPAEETEQDKEHTCETLLMCIVTVLSHGLRSGGGVGDVLRKPSKEEPLFAARVIYDLLFFFMVIIIVLNLIFGVIIDTFADLRSEKQKKEEILKTTCFICGLERDKFDNKTVTFEEHIKEEHNMWHYLCFIVLVKVKDSTEYTGPESYVAEMIKERNLDWFPRMRAMSLVSSDSEGEQNELRNLQEKLESTMKLVTNLSGQLSELKDQMTEQRKQKQRIGLLGHPPHMNVNPQQPA

SEQ ID NO: 3955 - protein, 520 aa, Homo sapiens
MSLSPCRAQRGFSARSACSARSRGRSRGGFSSRGGFSSRSLNSFGGCLEGSRGSTWGSGGRLGVRFGEWSGGPGLSLCPPGGIQEVTINQNLLTPLKIEIDPQFQVVRTQETQEIRTLNNQFASFIDKVRFLEQQNKVLETKWHLLQQQGLSGSQQGLEPVFEACLDQLRKQLEQLQGERGALDAELKACRDQEEEYKSKYEEEAHRRATLENDFVVLKKDVDGVFLSKMELEGKLEALREYLYFLKHLNEEELGQLQTQASDTSVVLSMDNNRYLDFSSIITEVRARYEEIARSSKAEAEALYQTKYQELQVSAQLHGDRMQETKVQISQLHQEIQRLQSQTENLKKQNASLQAAITDAEQRGELALKDAQAKVDELEAALRMAKQNLARLLCEYQELTSTKLSLDVEIATYRRLLEGEECRMSGECTSQVTISSVGGSAVMSGGVGGGLGSTCGLGSGKGSPGSCCTSIVTGGSNIILGSGKDPVLDSCSVSGSSAGSSCHTILKKTVESSLKTSITY

SEQ ID NO: 3956 - protein, 581 aa, Homo sapiens
MPLKHYLLLLVGCQAWGAGLAYHGCPSECTCSRASQVECTGARIVAVPTPLPWNAMSLQILNTHITELNESPFLNISALIALRIEKNELSRITPGAFRNLGSLRYLSLANNKLQVLPIGLFQGLDSLESLLLSSNQLLQIQPAHFSQCSNLKELQLHGNHLEYIPDGAFDHLVGLTKLNLGKNSLTHISPRVFQHLGNLQVLRLYENRLTDIPMGTFDGLVNLQELALQQNQIGLLSPGLFHNNHNLQRLYLSNNHISQLPPSVFMQLPQLNRLTLFGNSLKELSPGIFGPMPNLRELWLYDNHISSLPDNVFSNLRQLQVLILSRNQISFISPGAFNGLTELRELSLHTNALQDLDGNVFRMLANLQNISLQNNRLRQLPGNIFANVNGLMAIQLQNNQLENLPLGIFDHLGKLCELRLYDNPWRCDSDILPLRNWLLLNQPRLGTDTVPVCFSPANVRGQSLIIINVNVAVPSVHVPEVPSYPETPWYPDTPSYPDTTSVSSTTELTSPVEDYTDLTTIQVTDDRSVWGMTQAQSGLAIAAIVIGIVALACSLAACVGCCCCKKRSQAVLMQMKAPNEC

SEQ ID NO: 3957 - protein, 640 aa, Homo sapiens
MGQPSLTWMLMVVVASWFITTAATDTSEARWCSECHSNATCTEDEAVTTCTCQEGFTGDGLTCVDLDECAIPGAHNCSANSSCVNTPGSFSCVCPEGFRLSPGLGCTDVDECAEPGLSHCHALATCVNVVGSYLCVCPAGYRGDGWHCECSPGSCGPGLDCVPEGDALVCADPCQAHRTLDEYWRSTEYGEGYACDTDLRGWYRFVGQGGARMAETCVPVLRCNTAAPMWLNGTHPSSDEGIVSRKACAHWSGHCCLWDASVQVKACAGGYYVYNLTAPPECHLAYCTDPSSVEGTCEECSIDEDCKSNNGRWHCQCKQDFNITDISLLEHRLECGANDMKVSLGKCQLKSLGFDKVFMYLSDSRCSGFNDRDNRDWVSVVTPARDGPCGTVLTRNETHATYSNTLYLADEIIIRDLNIKINFACSYPLDMKVSLKTALQPMVSALNIRVGGTGMFTVRMALFQTPSYTQPYQGSSVTLSTEAFLYVGTMLDGGDLSRFALLMTNCYATPSSNATDPLKYFIIQDRCPHTRDSTIQVVENGESSQGRFSVQMFRFAGNYDLVYLHCEVYLCDTMNEKCKPTCSGTRFRSGSVIDQSRVLNLGPITRKGVQATVSRAFSSLGLLKVWLPLLLSATLTLTFQ

SEQ ID NO: 3958 - protein, 209 aa, Homo sapiens
MEAQAQGLLETEPLQGTDEDAVASADFSSMLSEEEKEELKAELVQLEDEITTLRQVLSAKERHLVEIKQKLGMNLMNELKQNFSKSWHDMQTTTAYKKTHETLSHAGQKATAAFSNVGTAISKKFGDMRSHSIGYSIRHSISMPAMRNSPTFKSFEERVETTVTSLKTKVGGTNPNGGSFEEVLSSTAHASAQSLAGGSRRTKEEELQC

SEQ ID NO: 3959 - protein, 590 aa, Homo sapiens
MEPRAGCRLPVRVEQVVNGALVVTVSCGERSFAGILLDCTKKSGLFGLPPLAPLPQVDESPVNDSHGRAPEEGDAEVMQLGSSSPPPARGVQPPETTRPEPPPPLVPPLPAGSLPPYPPYFEGAPFPHPLWLRDTYKLWVPQPPPRTIKRTRRRLSRNRDPGRLILSTIRLRPRQVLCEKCKSTLSPPEASPGPPAAPRARRRLGSGPDRELRKPEEPENGEPTAAATARRSKRERREEDRAPAEQVPRSPVIKISYSTPQGKGEVVKIPSRVHGSLEPFRPQQAPQDDGSQDPEVLDRESRDRPSCAPSASIPKLKLTRPVPAGADLPPPKIRLKPHRLGDSEHEPVYRAELVGELNGYLRDSSPAPCADGPAGGLADLSSGSSGEDDDFKSCPQGPQGREGLAFLVSCPEGRADCASESACSSDSLDEARSSGSEGTPADTGDLSPGHGASAPSVSREARQTVPPLTVRLHTQSVSECITEDGRTVAVGDIVWGKIHGFPWWPARVLDISLGQKEDGEPSWREAKVSWFGSPTTSFLSISKLSPFSEFFKLRFNRKKKGMYRKAITEAANAARHVAPEIRELLTQFET

SEQ ID NO: 3960 - protein, 723 aa, Homo sapiens
MQNSEGGADSPASVALRPSAAAPPVPASPQRVLVQAASSNPKGAQMQPISLPRVQQVPQQVQPVQHVYPAQVQYVEGGDAVYTNGAIRTAYTYNPEPQMYAPSSTASYFEAPGGAQVTVAASSPPAVPSHSMVGITMDVGGSPIVSSAGAYLIHGGMDSTRHSLAHTSRSSPATLEMAIENLQKSEGITSHKSGLLNSHLQWLLDNYETAEGVSLPRSSLYNHYLRHCQEHKLDPVNAASFGKLIRSVFMGLRTRRLGTRGNSKYHYYGIRLKPDSPLNRLQEDTQYMAMRQQPMHQKPRYRPAQKTDSLGDSGSHSGLHSTPEQTMAVQSQHHQQYIDVSHVFPEFPAPDLGSFLLQDGVTLHDVKALQLVYRRHCEATVDVVMNLQFHYIEKLWLSFWNSKASSSDGPTSLPASDEDPEGAVLPKDKLISLCQCDPILRWMRSCDHILYQALVEILIPDVLRPVPSTLTQAIRNFAKSLEGWLTNAMSDFPQQVIQTKVGVVSAFAQTLRRYTSLNHLAQAARAVLQNTSQINQMLSDLNRVDFANVQEQASWVCQCEESVVQRLEQDFKLTLQQQSSLDQWASWLDSVVTQVLKQHAGSPSFPKAARQFLLKWSFYSSMVIRDLTLRSAASFGSFHLIRLLYDEYMFYLVEHRVAEATGETPIAVMGEFNDLASLSLTLLDKDDMGDEQRGSEAGPDARSLGEPLVKRERSDPNHSLQGI

SEQ ID NO: 3961 - protein, 570 aa, Homo sapiens
MEKYENLGLVGEGSYGMVMKCRNKDTGRIVAIKKFLESDDDKMVKKIAMREIKLLKQLRHENLVNLLEVCKKKKRWYLVFEFVDHTILDDLELFPNGLDYQVVQKYLFQIINGIGFCHSHNIIHRDIKPENILVSQSGVVKLCDFGFARTLAAPGEVYTDYVATRWYRAPELLVGDVKYGKAVDVWAIGCLVTEMFMGEPLFPGDSDIDQLYHIMMCLGNLIPRHQELFNKNPVFAGVRLPEIKEREPLERRYPKLSEVVIDLAKKCLHIDPDKRPFCAELLHHDFFQMDGFAERFSQELQLKVQKDARNVSLSKKSQNRKKEKEKDDSLVEERKTLVVQDTNADPKIKDYKLFKIKGSKIDGEKAEKGNRASNASCLHDSRTSHNKIVPSTSLKDCSNVSVDHTRNPSVAIPPLTHNLSAVAPSINSGMGTETIPIQGYRVDEKTKKCSIPFVKPNRHSPSGIYNINVTTLVSSEKNLFWASKKRREYSRTDVRLPELNYNHLPELRALGGIARNSRLTKKESKILSESRIPSLAAIDLHTPSITLHQVSGPPLSDDSGADLPQMEHQH

SEQ ID NO: 3962 - protein, 129 aa, Homo sapiens
MADPRVRQIKIKTGVVKRLVKEKVMYEKEAKQQEEKIEKMRAEDGENYDIKKQAEILQESRMMIPDCQRRLEAAYLDLQRILVSKDFCVMFKFFFSIQYMESQKFKYLTLRTSWQYFLFTCPLYRYILK

SEQ ID NO: 3963 - protein, 1136 aa, Homo sapiens
MAKMEVKTSLLDNMIGVGDMVLLEPLNEETFINNLKKRFDHSEIYTYIGSVVISVNPYRSLPIYSPEKVEEYRNRNFYELSPHIFALSDEAYRSLRDQDKDQCILITGESGAGKTEASKLVMSYVAAVCGKGAEVNQVKEQLLQSNPVLEAFGNAKTVRNDNSSRFGKYMDIEFDFKGDPLGGVISNYLLEKSRVVKQPRGERNFHVFYQLLSGASEELLNKLKLERDFSRYNYLSLDSAKVNGVDDAANFRTVRNAMQIVGFMDHEAESVLAVVAAVLKLGNIEFKPESRVNGLDESKIKDKNELKEICELTGIDQSVLERAFSFRTVEAKQEKVSTTLNVAQAYYARDALAKNLYSRLFSWLVNRINESIKAQTKVRKKVMGVLDIYGFEIFEDNSFEQFIINYCNEKLQQIFIELTLKEEQEEYIREDIEWTHIDYFNNAIICDLIENNTNGILAMLDEECLRPGTVTDETFLEKLNQVCATHQHFESRMSKCSRFLNDTSLPHSCFRIQHYAGKVLYQVEGFVDKNNDLLYRDLSQAMWKASHALIKSLFPEGNPAKINLKRPPTAGSQFKASVATLMKNLQTKNPNYIRCIKPNDKKAAHIFNEALVCHQIRYLGLLENVRVRRAGYAFRQAYEPCLERYKMLCKQTWPHWKGPARSGVEVLFNELEIPVEEYSFGRSKIFIRNPRTLFKLEDLRKQRLEDLATLIQKIYRGWKCRTHFLLMKKSQIVIAAWYRRYAQQKRYQQTKSSALVIQSYIRGWKARKILRELKHQKRCKEAVTTIAAYWHGTQARRELRRLKEEARNKHAIAVIWAYWLGSKARRELKRLKEEARRKHAVAVIWAYWLGLKVRREYRKFFRANAGKKIYEFTLQRIVQKYFLEMKNKMPSLSPIDKNWPSRPYLFLDSTHKELKRIFHLWRCKKYRDQFTDQQKLIYEEKLEASELFKDKKALYPSSVGQPFQGAYLEINKNPKYKKLKDAIEEKIIIAEVVNKINRANGKSTSRIFLLTNNNLLLADQKSGQIKSEVPLVDVTKVSMSSQNDGFFAVHLKEGSEAASKGDFLFSSDHLIEMATKLYRTTLSQTKQKLNIEISDEFLVQFRQDKVCVKFIQGNQKNGSVPTCKRKNNRLLEVAVP

SEQ ID NO: 3964 - protein, 1044 aa, Homo sapiens
MGVALRKLTQWTAAGHGTGILEITPLNEAILKEIIVFVESFIYKHPQEAKFVFVEPLEWNTSLAPSAFESGYVVSETTVKSEEVDKNGQPLLFLSVPQIKIRSFGQLSRLLLIAKTGKLKEAQACVEANRDPIVKILGSDYNTMKENSIALNILGKITRDDDPESEIKMKIAMLLKQLDLHLLNHSLKHISLEISLSPMTVKKDIELLKRFSGKGNQTVLESIEYTSDYEFSNGCRAPPWRQIRGEICYVLVKPHDGETLCITCSAGGVFLNGGKTDDEGDVNYERKGSIYKNLVTFLREKSPKFSENMSKLGISFSEDQQKEKDQLGKAPKKEEAAALRKDISGSDKRSLEKNQINFWRNQMTKRWEPSLNWKTTVNYKGKGSAKEIQEDKHTGKLEKPRPSVSHGRAQLLRKSAEKIEETVSDSSSESEEDEEPPDHRQEASADLPSEYWQIQKLVKYLKGGNQTATVIALCSMRDFSLAQETCQLAIRDVGGLEVLINLLETDEVKCKIGSLKILKEISHNPQIRQNIVDLGGLPIMVNILDSPHKSLKCLAAETIANVAKFKRARRVVRQHGGITKLVALLDCAHDSTKPAQSSLYEARDVEVARCGALALWSCSKSHTNKEAIRKAGGIPLLARLLKTSHENMLIPVVGTLQECASEENYRAAIKAERIIENLVKNLNSENEQLQEHCAMAIYQCAEDKETRDLVRLHGGLKPLASLLNNTDNKERLAAVTGAIWKCSISKENVTKFREYKAIETLVGLLTDQPEEVLVNVVGALGECCQERENRVIVRKCGGIQPLVNLLVGINQALLVNVTKAVGACAVEPESMMIIDRLDGVRLLWSLLKNPHPDVKASAAWALCPCIKNAKDAGEMVRSFVGGLELIVNLLKSDNKEVLASVCAAITNIAKDQENLAVITDHGVVPLLSKLANTNNNKLRHHLAEAISRCCMWGRNRVAFGEHKAVAPLVRYLKSNDTNVHRATAQALYQLSEDADNCITMHENGAVKLLLDMVGSPDQDLQEAAAGCISNIRRLALATEKARYT

SEQ ID NO: 3965 - protein, 110 aa, Homo sapiens
MKCEETHAPNSNWVYVMLPSKKTVRMPSVTQRLRDPDINPCLSESDASTRCLDENNYDRERCSTYFLRYKNCRRFWNSIVMQRRKNGVKPFMPTAAERDEILRAVGNMPY

SEQ ID NO: 3966 - protein, 613 aa, Homo sapiens
MRAPGALLARMSRLLLLLLLKVSASSALGVAPASRNETCLGESCAPTVIQRRGRDAWGPGNSARDVLRARAPREEQGAAFLAGPSWDLPAAPGRDPAAGRGAEASAAGPPGPPTRPPGPWRWKGARGQEPSETLGRGNPTALQLFLQISEEEEKGPRGAGISGRSQEQSVKTVPGASDLFYWPRRAGKLQGSHHKPLSKTANGLAGHEGWTIALPGRALAQNGSLGEGIHEPGGPRRGNSTNRRVRLKNPFYPLTQESYGAYAVMCLSVVIFGTGIIGNLAVMCIVCHNYYMRSISNSLLANLAFWDFLIIFFCLPLVIFHELTKKWLLEDFSCKIVPYIEVASLGVTTFTLCALCIDRFRAATNVQMYYEMIENCSSTTAKLAVIWVGALLLALPEVVLRQLSKEDLGFSGRAPAERCIIKISPDLPDTIYVLALTYDSARLWWYFGCYFCLPTLFTITCSLVTARKIRKAEKACTRGNKRQIQLESQMNCTVVALTILYGFCIIPENICNIVTAYMATGVSQQTMDLLNIISQFLLFFKSCVTPVLLFCLCKPFSRAFMECCCCCCEECIQKSSTVTSDDNDNEYTTELELSPFSTIRREMSTFASVGTHC

SEQ ID NO: 3967 - protein, 382 aa, Homo sapiens
MSVLRRMMRVSNRSLLAFIFFFSLSSSCLYFIYVAPGIANTYLFMVQARGIMLRENVKTIGHMIRLYTNKNSTLNGTDYPEGNNSSDYLVQTTTYLPENFTYSPYLPCPEKLPYMRGFLNVNVSEVSFDEIHQLFSKDLDIEPGGHWRPKDCKPRWKVAVLIPFRNRHEHLPIFFLHLIPMLQKQRLEFAFYVIEQTGTQPFNRAMLFNVGFKEAMKDSVWDCVIFHDVDHLPENDRNYYGCGEMPRHFAAKLDKYMYILPYKEFFGGVSGLTVEQFRKINGFPNAFWGWGGEDDDLWNRVHYAGYNVTRPEGDLGKYKSIPHHHRGEVQFLGRYKLLRYSKERQYIDGLNNLIYRPKILVDRLYTNISVNLMPELAPIEDY

SEQ ID NO: 3968 - protein, 672 aa, Homo sapiens
MADGSLTGGGLEAAAMAPERMGWAVEQELASLEKGLFQDEDSCSDCSYRDKPGSSLQSFMPEGKTFFPEIFQTNQLLFYERFRAYQDYILADCKASEVQEFTAEFLEKVLEPSGWRAVWHTNVFKVLVEITDVDFAALKAVVRLAEPYLCDSQVSTFTMECMKELLDLKEHRLPLQELWVVFDDSGVFDQTALAIEHVRFFYQNIWRSWDEEEEDEYDYFVRCVEPRLRLHYDILEDRVPSGLIVDYHNLLSQCEESYRKFLNLRSSLSNCNSDSEQENISMVEGLKLYSEMEQLKQKLKLIENPLLRYVFGYQKNSNIQAKGVRSSGQKITHVVSSTMMAGLLRSLLTDRLCQEPGEEEREIQFHSDPLSAINACFEGDTVIVCPGHYVVHGTFSIADSIELEGYGLPDDIVIEKRGKGDTFVDCTGADIKISGIKFVQHDAVEGILIVHRGKTTLENCVLQCETTGVTVRTSAEFLMKNSDLYGAKGAGIEIYPGSQCTLSDNGIHHCKEGILIKDFLDEHYDIPKISMVNNIIHNNEGYGVVLVKPTIFSDLQENAEDGTEENKALKIQTSGEPDVAERVDLEELIECATGKMELCARTDPSEQVEGNCEIVNELIAASTQKGQIKKKRLSELGITQADDNLMSQEMFVGIVGNQFKWNGKGSFGTFLF

SEQ ID NO: 3969 - protein, 99 aa, Homo sapiens
MTSKLAVALLAAFLISAALCEGAVLPRSAKELRCQCIKTYSKPFHPKFIKELRVIESGPHCANTEIIVKLSDGRELCLDPKENWVQRVVEKFLKRAENS

SEQ ID NO: 3970 - protein, 1673 aa, Homo sapiens
MWRAEGKWLPKTSRKSVSQSVFCGTSTYCVLNTVPPIEDDHGNSNSSHVKIFLPKKLLECLPKCSSLPKERHRWNTNEEIAAYLITFEKHEEWLTTSPKTRPQNGSMILYNRKKVKYRKDGYCWKKRKDGKTTREDHMKLKVQGVECLYGCYVHSSIIPTFHRRCYWLLQNPDIVLVHYLNVPAIEDCGKPCGPILCSINTDKKEWAKWTKEELIGQLKPMFHGIKWTCSNGNSSSGFSVEQLVQQILDSHQTKPQPRTHNCLCTGSLGAGGSVHHKCNSAKHRIISPKVEPRTGGYGSHSEVQHNDVSEGKHEHSHSKGSSREKRNGKVAKPVLLHQSSTEVSSTNQVEVPDTTQSSPVSISSGLNSDPDMVDSPVVTGVSGMAVASVMGSLSQSATVFMSEVTNEAVYTMSPTAGPNHHLLSPDASQGLVLAVSSDGHKFAFPTTGSSESLSMLPTNVSEELVLSTTLDGGRKIPETTMNFDPDCFLNNPKQGQTYGGGGLKAEMVSSNIRHSPPGERSFSFTTVLTKEIKTEDTSFEQQMAKEAYSSSAAAVAASSLTLTAGSSLLPSGGGLSPSTTLEQMDFSAIDSNKDYTSSFSQTGHSPHIHQTPSPSFFLQDASKPLPVEQNTHSSLSDSGGTFVMPTVKTEASSQTSSCSGHVETRIESTSSLHLMQFQANFQAMTAEGEVTMETSQAAEGSEVLLKSGELQACSSEHYLQPETNGVIRSAGGVPILPGNVVQGLYPVAQPSLGNASNMELSLDHFDISFSNQFSDLINDFISVEGGSSTIYGHQLVSGDSTALSQSEDGARAPFTQAEMCLPCCSPQQGSLQLSSSEGGASTMAYMHVAEVVSAASAQGTLGMLQQSGRVFMVTDYSPEWSYPEGGVKVLITGPWQEASNNYSCLFDQISVPASLIQPGVLRCYCPAHDTGLVTLQVAFNNQIISNSVVFEYKARALPTLPSSQHDWLSLDDNQFRMSILERLEQMERRMAEMTGSQQHKQASGGGSSGGGSGSGNGGSQAQCASGTGALGSCFESRVVVVCEKMMSRACWAKSKHLIHSKTFRGMTLLHLAAAQGYATLIQTLIKWRTKHADSIDLELEVDPLNVDHFSCTPLMWACALGHLEAAVVLYKWDRRAISIPDSLGRLPLGIARSRGHVKLAECLEHLQRDEQAQLGQNPRIHCPASEEPSTESWMAQWHSEAISSPEIPKGVTVIASTNPELRRPRSEPSNYYSSESHKDYPAPKKHKLNPEYFQTRQEKLLPTALSLEEPNIRKQSPSSKQSVPETLSPSEGVRDFSRELSPPTPETAAFQASGSQPVGKWNSKDLYIGVSTVQVTGNPKGTSVGKEAAPSQVRPREPMSVLMMANREVVNTELGSYRDSAENEECGQPMDDIQVNMMTLAEHIIEATPDRIKQENFVPMESSGLERTDPATISSTMSWLASYLADADCLPSAAQIRSAYNEPLTPSSNTSLSPVGSPVSEIAFEKPNLPSAADWSEFLSASTSEKVENEFAQLTLSDHEQRELYEAARLVQTAFRKYKGRPLREQQEVAAAVIQRCYRKYKQYALYKKMTQAAILIQSKFRSYYEQKKFQQSRRAAVLIQKYYRSYKKCGKRRQARRTAVIVQQKLRSSLLTKKQDQAARKIMRFLRRCRHSPLVDHRLYKRSERIEKGQGT

SEQ ID NO: 3971 - protein, 566 aa, Homo sapiens
MPRGFLVKRTKRTGGLYRVRLAERVFPLLGPQGAPPFLEEAPSASLPGAERATPPTREEPGKGLTAEAAREQSGSPCRAAGVSPGTGGREGAEWRAGGREGPGPSPSPSPSPAKPAGAELRRAFLERCLSSPVSAESFPGGAAAVAAFSCSVAPAAAPTPGEQFLLPLRAPFPEPALQPDPAPLSAALQSLKRAAGGERRGKAPTDCASGPAAAGIKKPKAMRKLSFADEVTTSPVLGLKIKEEEPGAPSRGLGGSRTPLGEFICQLCKEQYADPFALAQHRCSRIVRVEYRCPECDKVFSCPANLASHRRWHKPRPAAANAATVSSADGKPPSSSSSSSRDSGAIASFLAEGKENSRIERTADQHPQARDSSGADQHPDSAPRQGLQVLTHPEPPLPQGPYTEGVLGRRVPVPGSTSGGRGSEIFVCPYCHKKFRRQAYLRKHLSTHEAGSARALAPGFGSERGAPLAFACPLCGAHFPTADIREKHRLWHAVREELLLPALAGAPPETSGPSGPSDGSAQQIFSCKHCPSTFFSSPGLTRHINKCHPSESRQVLLLQMPLRPGC

SEQ ID NO: 3972 - protein, 430 aa, Homo sapiens
MLCSLLLCECLLLVAGYAHDDDWIDPTDMLNYDAASGTMRKSQAKYGISGEKDVSPDLSCADEISECYHKLDSLTYKIDECEKKKREDYESQSNPVFRRYLNKILIEAGKLGLLAFAQHQAEVAKMEPLNNVCAKKMDWTGSIWEWFRSSWTYKDDPCQKYYELLLVNPIWLVPPTKALAVTFTTFVTEPLKHIGKGTGEFIKALMKEIPALLHLPVLIIMALAILSFCYGAGKSVHVLRHIGGPESEPPQALRPRDRRRQEEIDYRPDGGAGDADFHYRGQMGPTEQGPYAKTYEGRREILRERDVDLRFQTGNKSPEVLRAFDVPDAEAREHPTVVPSHKSPVLDTKPKETGGILGEGTPKESSTESSQSAKPVSGQDTSGNTEGSPAAEKAQLKSEAAGSPDQGSTYSPARGVAGPRGQDPVSSPCG

SEQ ID NO: 3973 - protein, 424 aa, Homo sapiens
MPARALLPRRMGHRTLASTPALWASIPCPRSELRLDLVLPSGQSFRWREQSPAHWSGVLADQVWTLTQTEEQLHCTVYRGDKSQASRPTPDELEAVRKYFQLDVTLAQLYHHWGSVDSHFQEVAQKFQGVRLLRQDPIECLFSFICSSNNNIARITGMVERLCQAFGPRLIQLDDVTYHGFPSLQALAGPEVEAHLRKLGLGYRARYVSASARAILEEQGGLAWLQQLRESSYEEAHKALCILPGVGTKVADCICLMALDKPQAVPVDVHMWHIAQRDYSWHPTTSQAKGPSPQTNKELGNFFRSLWGPYAGWAQAGLLGNAFDGHQLLRPLIFCQDHLREGPPIGRGDSQGEELEPQLPSSLSSIPYGFCDHCWTKDVDDPPLVTHPSPGSRDGHMTQAWPVKVVSPLATVIGHVMQASLLAL

SEQ ID NO: 3974 - protein, 159 aa, Homo sapiens
MAERPGPPGGAVSATAYPDTPAEFPPHLQAGAMRRRFWGVFNCLCAGAFGALAAASAKLAFGSEVSMGLCVLGIIVMASTNSLMWTFFSRGLSFSMSSAIASVTVTFSNILSSAFLGYVLYGECQEVLWWGGVFLILCGLTLIHRKLPPTWKPLPHKQQ

SEQ ID NO: 3975 - protein, 292 aa, Homo sapiens
MAKERCLKKSFQDSLEDIKKRMKEKRNKNLAEIGKRRSFIAAPCQIITNTSTLLKNYQDNNKMLVLALENEKSKVKEAQDIILQLRKECYYLTCQLYALKGKLTSQQTVEPAQNQEICSSGMDPNSDDSSRNLFVKDLPQIPLEETELPGQGESFQIEATPPETQQSPHLSLKDITNVSLYPVVKIRRLSLSPKKNKASPAVALPKRRCTASVNYKEPTLASKLRRGDPFTDLCFLNSPIFKQKKDLRRSKKRALEVSPAKEAIFILYYVREFVSRFPDCRKCKLETHICLR

SEQ ID NO: 3976 - protein, 375 aa, Homo sapiens
MSTAGKVIKCKAAVLWEVKKPFSIEDVEVAPPKAYEVRIKMVAVGICHTDDHVVSGNLVTPLPVILGHEAAGIVESVGEGVTTVKPGDKVIPLFTPQCGKCRVCKNPESNYCLKNDLGNPRGTLQDGTRRFTCRGKPIHHFLGTSTFSQYTVVDENAVAKIDAASPLEKVCLIGCGFSTGYGSAVNVAKVTPGSTCAVFGLGGVGLSAVMGCKAAGAARIIAVDINKDKFAKAKELGATECINPQDYKKPIQEVLKEMTDGGVDFSFEVIGRLDTMMASLLCCHEACGTSVIVGVPPASQNLSINPMLLLTGRTWKGAVYGGFKSKEGIPKLVADFMAKKFSLDALITHVLPFEKINEGFDLLHSGKSIRTVLTF

SEQ ID NO: 3977 - protein, 309 aa, Homo sapiens
MERINHTSSVSEFILLGLSSRPEDQKTLFVLFLIVYLVTITGNLLIILAIRFNPHLQTPMYFFLSFLSLTDICFTTSVVPKMLMNFLSEKKTISYAGCLTQMYFLYALGNSDSCLLAVMAFDRYVAVCDPFHYVTTMSHHHCVLLVAFSCSFPHLHSLLHTLLLNRLTFCDSNVIHHFLCDLSPVLKLSCSSIFVNEIVQMTEAPIVLVTRFLCIAFSYIRILTTVLKIPSTSGKRKAFSTCGFYLTVVTLFYGSIFCVYLQPPSTYAVKDHVATIVYTVLSSMLNPFIYSLRNKDLKQGLRKLMSKRS

SEQ ID NO: 3978 - protein, 647 aa, Homo sapiens
MAAPAGGGGSAVSVLAPNGRRHTVKVTPSTVLLQVLEDTCRRQDFNPCEYDLKFQRSVLDLSLQWRFANLPNNAKLEMVPASRSREGPENMVRIALQLDDGSRLQDSFCSGQTLWELLSHFPQIRECLQHPGGATPVCVYTRDEVTGEAALRGTTLQSLGLTGGSATIRFVMKCYDPVGKTPGSLGSSASAGQAAASAPLPLESGELSRGDLSRPEDADTSGPCCEHTQEKQSTRAPAAAPFVPFSGGGQRLGGPPGPTRPLTSSSAKLPKSLSSPGGPSKPKKSKSGQDPQQEQEQERERDPQQEQERERPVDREPVDREPVVCHPDLEERLQAWPAELPDEFFELTVDDVRRRLAQLKSERKRLEEAPLVTKAFREAQIKEKLERYPKVALRVLFPDRYVLQGFFRPSETVGDLRDFVRSHLGNPELSFYLFITPPKTVLDDHTQTLFQPQLGDRVAPFTLGPSLKRCLGPEQRTRLPVVGDGGDVDSGRLLFWGPSRGRASPSTGQPPCHPVCRPSSPPSPRPSSGDPSRVKAGHKHVGTGRANLFPAALVHLGAEEPAGVYLEPGLLEHAISPSAADVLVARYMSRAAGSPSPLPAPDPAPKSEPAAEEGALVPPEPIPGTAQPVKRSLGKVPKWLKLPASKR

SEQ ID NO: 3979 - protein, 1177 aa, Homo sapiens
MAGIFKEFFFSTEDLPEVILTLSLISSIGAFLNRHLEDFPIPVPVILFLLGCSFEVLSFTSSQVQRYANAIQWMSPDLFFRIFTPVVFFTTAFDMDTYMLQKLFWQILLISIPGFLVNYILVLWHLASVNQLLLKPTQWLLFSAILVSSDPMLTAAAIRDLGLSRSLISLINGESLMTSVISLITFTSIMDFDQRLQSKRNHTLAEEIVGGICSYIIASFLFGILSSKLIQFWMSTVFGDDVNHISLIFSILYLIFYICELVGMSGIFTLAIVGLLLNSTSFKAAIEETLLLEFWTFLSRIAFLMVFTFFGLLIPAHTYLYIEFVDIYYSLNIYLTLIVLRFLTLLLISPVLSRVGHEFSWRWIFIMVCSEMKGMPNINMALLLAYSDLYFGSDKEKSQILFHGVLVCLITLVVNRFILPVAVTILGLRDATSTKYKSVCCTFQHFQELTKSAASALKFDKDLANADWNMIEKAITLENPYMLNEEETTEHQKVKCPHCNKEIDEIFNTEAMELANRRLLSAQIASYQRQYRNEILSQSAVQVLVGAAESFGEKKGKCMSLDTIKNYSESQKTVTFARKLLLNWVYNTRKEKEGPSKYFFFRICHTIVFTEEFEHVGYLVILMNIFPFIISWISQLNVIYHSELKHTNYCFLTLYILEALLKIAAMRKDFFSHAWNIFELAITLIGILHVILIEIDTIKYIFNETEVIVFIKVVQFFRILRIFKLIAPKLLQIIDKRMSHQKTFWYGILKGYVQGEADIMTIIDQITSSKQIKQMLLKQVIRNMEHAIKELGYLEYDHPEIAVTVKTKEEINVMLNMATEILKAFGLKGIISKTEGAGINKLIMAKKKEVLDSQSIIRPLTVEEVLYHIPWLDKNKDYINFIQEKAKVVTFDCGNDIFEEGDEPKGIYIIISGMVKLEKSKPGLGIDQMVESKEKDFPIIDTDYMLSGEIIGEINCLTNEPMKYSATCKTVVETCFIPKTHLYDAFEQCSPLIKQKMWLKLGLAITARKIREHLSYEDWNYNMQLKLSNIYVVDIPMSTKTDIYDENLIYVILIHGAVEDCLLRKTYRAPFLIPITCHQIQSIEDFTKVVIIQTPINMKTFRRNIRKFVPKHKSYLTPGLIGSVGTLEEGIQEERNVKEDGAHSAATARSPQPCSLLGTKFNCKESPRINLRKVRKE

SEQ ID NO: 3980 - protein, 310 aa, Homo sapiens
MQQNNSVPEFILLGLTQDPLRQKIVFVIFLIFYMGTVVGNMLIIVTIKSSRTLGSPMYFFLFYLSFADSCFSTSTAPRLIVDALSEKKIITYNECMTQVFALHLFGCMEIFVLILMAVDRYVAICKPLRYPTIMSQQVCIILIVLAWIGSLIHSTAQIILALRLPFCGPYLIDHYCCDLQPLLKLACMDTYMINLLLVSNSGAICSSSFMILIISYIVILHSLRNHSAKGKKKALSACTSHIIVVILFFGPCIFIYTRPPTTFPMDKMVAVFYTIGTPFLNPLIYTLRNAEVKNAMRKLWHGKIISENKG

SEQ ID NO: 3981 - protein, 314 aa, Homo sapiens
MENNTEVTEFILVGLTDDPELQIPLFIVFLFIYLITLVGNLGMIELILLDSCLHTPMYFFLSNLSLVDFGYSSAVTPKVMVGFLTGDKFILYNACATQFFFFVAFITAESFLLASMAYDRYAALCKPLHYTTTMTTNVCACLAIGSYICGFLNASIHTGNTFRLSFCRSNVVEHFFCDAPPLLTLSCSDNYISEMVIFFVVGFNDLFSILVILISYLFIFITIMKMRSPEGRQKAFSTCASHLTAVSIFYGTGIFMYLRPNSSHFMGTDKMASVFYAIVIPMLNPLVYSLRNKEVKSAFKKTVGKAKASIGFIF

SEQ ID NO: 3982 - protein, 765 aa, Homo sapiens
MAADPTELRLGSLPVFTRDDFEGDWRLVASGGFSQVFQARHRRWRTEYAIKCAPCLPPDAASSDVNYLIEEAAKMKKIKFQHIVSIYGVCKQPLGIVMEFMANGSLEKVLSTHSLCWKLRFRIIHETSLAMNFLHSIKPPLLHLDLKPGNILLDSNMHVKISDFGLSKWMEQSTRMQYIERSALRGMLSYIPPEMFLESNKAPGPKYDVYSFAIVIWELLTQKKPYSGFNMMMIIIRVAAGMRPSLQPVSDQWPSEAQQMVDLMKRCWDQDPKKRPCFLDITIETDILLSLLQSRVAVPESKALARKVSCKLSLRQPGEVNEDISQELMDSDSGNYLKRALQLSDRKNLVPRDEELCIYENKVTPLHFLVAQGSVEQVRLLLAHEVDVDCQTASGYTPLLIAAQDQQPDLCALLLAHGADANRVDEDGWAPLHFAAQNGDDGTARLLLDHGACVDAQEREGWTPLHLAAQNNFENVARLLVSRQADPNLHEAEGKTPLHVAAYFGHVSLVKLLTSQGAELDAQQRNLRTPLHLAVERGKVRAIQHLLKSGAVPDALDQSGYGPLHTAAARGKYLICKMLLRYGASLELPTHQGWTPLHLAAYKGHLEIIHLLAESHANMGALGAVNWTPLHLAARHGEEAVVSALLQCGADPNAAEQSGWTPLHLAVQRSTFLSVINLLEHHANVHARNKVGWTPAHLAALKGNTAILKVLVEAGAQLDVQDGVSCTPLQLALRSRKQGIMSFLEGKEPSVATLGGSKPGAEMEI

SEQ ID NO: 3983 - protein, 605 aa, Homo sapiens
MAGLYSLGVSVFSDQGGRKYMEDVTQIVVEPEPTAEEKPSPRRSLSQPLPPRPSPAALPGGEVSGKGPAVAAREARDPLPDAGASPAPSRCCRRRSSVAFFAVCDGHGGREAAQFAREHLWGFIKKQKGFTSSEPAKVCAAIRKGFLACHLAMWKKLAEWPKTMTGLPSTSGTTASVVIIRGMKMYVAHVGDSGVVLGIQDDPKDDFVRAVEVTQDHKPELPKERERIEGLGGSVMNKSGVNRVVWKRPRLTHNGPVRRSTVIDQIPFLAVARALGDLWSYDFFSGEFVVSPEPDTSVHTLDPQKHKYIILGSDGLWNMIPPQDAISMCQDQEEKKYLMGEHGQSCAKMLVNRALGRWRQRMLRADNTSAIVICISPEVDNQGNFTNEDELYLNLTDSPSYNSQETCVMTPSPCSTPPVKSLEEDPWPRVNSKDHIPALVRSNAFSENFLEVSAEIARENVQGVVIPSKDPEPLEENCAKALTLRIHDSLNNSLPIGLVPTNSTNTVMDQKNLKMSTPGQMKAQEIERTPPTNFKRTLEESNSGPLMKKHRRNGLSRSSGAQPASLPTTSQRKNSVKLTMRRRLRGQKKIGNPLLHQHRKTVCVC

SEQ ID NO: 3984 - protein, 311 aa, Homo sapiens
MVWENQTFNSIFILLGIFNHSPTHTFLFSLVLGIFSLALMENISMVLLIYIEKQLHTPMYFLLSQLSLMDLMLICTTLPKMIFSYLSGKKSISLAGCGTQIFFYVSLLGAECFLLAVMAYDRYVAICHPLQYTILMNPKLCVFMTVASWTLGSLDGIIVLAAVLSFSYCSSLEIHHFFCDVAALLPLSCTETSAFERLLVICCVVMLIFPVSVIILSYSHVLRAVIHMGSGESRRKAFTTCSSHLSVVGLYYGAAMFMYMRPASKHTPDQDKMVSAFYTILTPMLNPLIYSLRNKEVFRALQKVLKKRKLI

SEQ ID NO: 3985 - protein, 1165 aa, Homo sapiens
MEQDRTNHVEGNRLSPFLIPSPPICQTEPLATKLQNGSPLPERAHPEVNGDTKWHSFKSYYGIPCMKGSQNSRVSPDFTQESRGYSKCLQNGGIKRTVSEPSLSGLLQIKKLKQDQKANGERRNFGVSQERNPGESSQPNVSDLSDKKESVSSVAQENAVKDFTSFSTHNCSGPENPELQILNEQEGKSANYHDKNIVLLKNKAVLMPNGATVSASSVEHTHGELLEKTLSQYYPDCVSIAVQKTTSHINAINSQATNELSCEITHPSHTSGQINSAQTSNSELPPKPAAVVSEACDADDADNASKLAAMLNTCSFQKPEQLQQQKSVFEICPSPAENNIQGTTKLASGEEFCSGSSSNLQAPGGSSERYLKQNEMNGAYFKQSSVFTKDSFSATTTPPPPSQLLLSPPPPLPQVPQLPSEGKSTLNGGVLEEHHHYPNQSNTTLLREVKIEGKPEAPPSQSPNPSTHVCSPSPMLSERPQNNCVNRNDIQTAGTMTVPLCSEKTRPMSEHLKHNPPIFGSSGELQDNCQQLMRNKEQEILKGRDKEQTRDLVPPTQHYLKPGWIELKAPRFHQAESHLKRNEASLPSILQYQPNLSNQMTSKQYTGNSNMPGGLPRQAYTQKTTQLEHKSQMYQVEMNQGQSQGTVDQHLQFQKPSHQVHFSKTDHLPKAHVQSLCGTRFHFQQRADSQTEKLMSPVLKQHLNQQASETEPFSNSHLLQHKPHKQAAQTQPSQSSHLPQNQQQQQKLQIKNKEEILQTFPHPQSNNDQQREGSFFGQTKVEECFHGENQYSKSSEFETHNVQMGLEEVQNINRRNSPYSQTMKSSACKIQVSCSNNTHLVSENKEQTTHPELFAGNKTQNLHHMQYFPNNVIPKQDLLHRCFQEQEQKSQQASVLQGYKNRNQDMSGQQAAQLAQQRYLIHNHANVFPVPDQGGSHTQTPPQKDTQKHAALRWHLLQKQEQQQTQQPQTESCHSQMHRPIKVEPGCKPHACMHTAPPENKTWKKVTKQENPPASCDNVQQKSIIETMEQHLKQFHAKSLFDHKALTLKSQKQVKVEMSGPVTVLTRQTTAAELDSHTPALEQQTTSSEKTPTKRTAASVLNNFIESPSKLLDTPIKNLLDTPVKTQYDFPSCRCVGKCQKCTETHGVYPELANLSSDMGFSFFF

SEQ ID NO: 3986 - protein, 518 aa, Homo sapiens
MALERLCSVLKVLLITVLVVEGIAVAQKTQDGQNIGIKHIPATQCGIWVRTSNGGHFASPNYPDSYPPNKECIYILEAAPRQRIELTFDEHYYIEPSFECRFDHLEVRDGPFGFSPLIDRYCGVKSPPLIRSTGRFMWIKFSSDEELEGLGFRAKYSFIPDPDFTYLGDCQFELSGADGIVRSSQVEQEEKTKPGQAVDCIWTIKATPKAKIYLRFLDYQMEHSNECKRNFVAVYDGSSSIENLKAKFCSTVANDVMLKTGIGVIRMWADEGSRLSRFRMLFTSFVEPPCTSSTFFCHSNMCINNSLVCNGVQNCAYPWDENHCKEKKKAGVFEQITKTHGTIIGITSGIVLVLLIISILVQVKQPRKKVMACKTAFNKTGFQEVFDPPHYELFSLRDKEISADLADLSEELDNYQKMRRSSTASRCIHDHHCGSQASSVKQSRTNLSSMELPFRNDFAQPQPMKTFNSTFKKSSYTFKQGHECPEQALEDRVMEEIPCEIYVRGREDSAQASISIDF

SEQ ID NO: 3987 - protein, 374 aa, Homo sapiens
MLLLLLLPLLWGRERVEGQKSNRKDYSLTMQSSVTVQEGMCVHVRCSFSYPVDSQTDSDPVHGYWFRAGNDISWKAPVATNNPAWAVQEETRDRFHLLGDPQTKNCTLSIRDARMSDAGRYFFRMEKGNIKWNYKYDQLSVNVTDPPQNLTVTVFQGEGTASTALGNSSSLSVLEGQSLRLVCAVDSNPPARLSWTWRSLTLYPSQPSNPLVLELQVHLGDEGEFTCRAQNSLGSQHVSLNLSLQQEYTGKMRPVSGVLLGAVGGAGATALVFLSFCVIFIVVRSCRKKSARPAADVGDIGMKDANTIRGSASQGNLTESWADDNPRHHGLAAHSSGEEREIQYAPLSFHKGEPQDLSGQEATNNEYSEIKIPK

SEQ ID NO: 3988 - protein, 1029 aa, Homo sapiens
MQTNEGEVSEESSSKVEQEDFVMEGHGKTPPPGEESKQEKEQEREEQLMEDKKRKKEDKKKKEATQKVTEQKTKVPEVTKPSLSQPTAASPIGSSPSPPVNGGNNAKRVAVPNGQPPSAARYMPREVPPRFRCQQDHKVLLKRGQPPPPSCMLLGGGAGPPPCTAPGANPNNAQVTGALLQSESGTAPVWSKSTPPAPDNGTSAWGEPNESSPGWGEMDDTGASTTGWGNTPANAPNAMKPNSKSMQDGWGESDGPVTGARHPSWEEEEDGGVWNTTGSQGSASSHNSASWGQGGKKQMKCSLKGGNNDSWMNPLAKQFSNMGLLSQTEDNPSSKMDLSVGSLSDKKFDVDKRAMNLGDFNDIMRKDRSGFRPPNSKDMGTTDSGPYFEKGGSHGLFGNSTAQSRGLHTPVQPLNSSPSLRAQVPPQFISPQVSASMLKQFPNSGLSPGLFNVGPQLSPQQIAMLSQLPQIPQFQLACQLLLQQQQQQQLLQNQRKISQAVRQQQEQQLARMVSALQQQQQQQQRQPGMKHSPSHPVGPKPHLDNMVPNALNVGLPDLQTKGPIPGYGSGFSSGGMDYGMVGGKEAGTESRFKQWTSMMEGLPSVATQEANMHKNGAIVAPGKTRGGSPYNQFDIIPGDTLGGHTGPAGDSWLPAKSPPTNKIGSKSSNASWPPEFQPGVPWKGIQNIDPESDPYVTPGSVLGGTATSPIVDTDHQLLRDNTTGSNSSLNTSLPSPGAWPYSASDNSFTNVHSTSAKFPDYKSTWSPDPIGHNPTHLSNKMWKNHISSRNTTPLPRPPPGLTNPKPSSPWSSTAPRSVRGWGTQDSRLASASTWSDGGSVRPSYWLVLHNLTPQIDGSTLRTICMQHGPLLTFHLNLTQGTALIRYSTKQEAAKAQTALHMCVLGNTTILAEFATDDEVSRFLAQAQPPTPAATPSAPAAGWQSLETGQNQSDPVGPALNLFGGSTGLGQWSSSAGGSSGADLAGASLWGPPNYSSSLWGVPTVEDPHRMGSPAPLLPGDLLGGGSDSI

SEQ ID NO: 3989 - protein, 670 aa, Homo sapiens
MEEFRRSYSRLCRESGAEPQEAVLQQLHQLPRGRLDLATQSLTVETCRALGKLLPRETLCTELVLSDCMLSEEGATLLLRGLCANTVLRFLDLKGNNLRAAGAEALGKLLQQNKSIQSLTLEWNSLGTWDDAFATFCGGLAANGALQRLDLRNNQISHKGAEELALALKGNTTLQQLDLRWNNVGLLGGRALMNCLPSNRTLWRLDLAGNNIPGDVLRAVEQAMGHSQDRLTTFQENQARTHVLSKEVQHLREEKSKQFLDLMETIDKQREEMAKSSRASAARVGQLQEALNERHSIINALKAKLQMTEAALALSEQKAQDLGELLATAEQEQLSLSQRQAKELKLEQQEAAERESKLLRDLSAANEKNLLLQNQVDELERKFRCQQEQLFQTRQEMTSMSAELKMRAIQAEERLDMEKRRCRQSLEDSESLRIKEVEHMTRHLEESEKAMQERVQRLEAARLSLEEELSRVKAAALSERGQAEEELIKAKSQARLEEQQRLAHLEDKLRLLAQARDEAQGACLQQKQVVAEAQTRVSQLGLQVEGLRRRLEELQQELSLKDQERVAEVSRVRVELQEQNGRLQAELAAQEALREKAAALERQLKVMASDHREALLDRESENASLREKLRLREAEIARIRDEEAQRASFLQNAVLAYVQASPVRTLSPPK

SEQ ID NO: 3990 - protein, 833 aa, Homo sapiens
MSPEKQHREEDEVDSVLLSASKILNSSEGVKESGCSDTEYGCIAESENQIQPQSALKVLQQQLESFQALRMQTLQNVSMVQSEISEILNKSIIEVENPQFSSEKNLVFGTRIEKDLPTENQEENLSMEKSHHFEDSKTLHSVEEKLSGDSVNSLPQSVNVPSQIHSEDTLTLRTSTDNLSSNIIIHPSENSDILKNYNNFYRFLPTAPPNVMSQADTVILDKSKITVPFLKHGFCENLDDICHSIKQMKEELQKSHDGEVALTNELQTLQTDPDVHRNGKYDMSPIHQDKMNFIKEENLDGNLNEDIKSKRISELEALVKKLLPFRETVSKFHVHFCRKCKKLSKSEMHRGKKNEKNNKEIPITGKNITDLKFHSRVPRYTLSFLDQTKHEMKDKERQPFLVKQGSIISENEKTSKVNSVTEQCVAKIQYLQNYLKESVQIQKKVMELESENLNLKSKMKPLIFTTQSLIQKVETYEKQLKNLVEEKSTIQSKLSKTEEYSKECLKEFKKIISKYNVLQGQNKTLEEKNIQLSLEKQQMMEALDQLKSKEHKTQSDMAIVNNENNRMSIEMEAMKTNILLIQDEKEMLEKKTHQLLKEKSSLGNELKESQLEIIQLKEKERLAKTEQETLLQIIETVKDEKLNLETTLQESTAARQIMEREIENIQTYQSTAEENFLQEIKNAKSEASIYKNSLSEIGKECEMLSKMVMETKTDNQILKEELKKHSQENIKFENSISRLTEDKILLENYVRSIENERDTLEFEMRHLQREYLSLSDKICNQHNDPSKTTYISRREKFHFDNYTHEDTSSPQSRPLASDLKGYFKVKDRTLKHH

SEQ ID NO: 3991 - protein, 669 aa, Homo sapiens
MALLLVSLLAFLSLGSGCHHRICHCSNRVFLCQESKVTEIPSDLPRNAIELRFVLTKLRVIQKGAFSGFGDLEKIEISQNDVLEVIEADVFSNLPKLHEIRIEKANNLLYINPEAFQNLPNLQYLLISNTGIKHLPDVHKIHSLQKVLLWLNKNGIQEIHNCAFNGTQLDELNLSDNNNLEELPNDVFHGASGPVILDISRTRIHSLPSYGLENLKKLRARSTYNLKKLPTLEKLVALMEASLTYPSHCCAFANWRRQISELHPICNKSILRQEVDYMTQARGQRSSLAEDNESSYSRGFDMTYTEFDYDLCNEVVDVTCSPKPDAFNPCEDIMGYNILRVLIWFISILAITGNIIVLVILTTSQYKLTVPRFLMCNLAFADLCIGIYLLLIASVDIHTKSQYHNYAIDWQTGAGCDAAGFFTVFASELSVYTLTAITLERWHTITHAMQLDCKVQLRHAASVMVMGWIFAFAAALFPIFGISSYMKVSICLPMDIDSPLSQLYVMSLLVLNVLAFVVICGCYIHIYLTVRNPNIVSSSSDTRIAKRMAMLIFTDFLCMAPISFFAISASLKVPLITVSKAKILLVLFHPINSCANPFLYAIFTKNFRRDFFILLSKCGCYEMQAQIYRTETSSTVHNTHPRNGHCSSAPRVTSGSTYILVPLSHLAQN

SEQ ID NO: 3992 - protein, 1145 aa, Homo sapiens
MTMYLWLKLLAFGFAFLDTEVFVTGQSPTPSPTDAYLNASETTTLSPSGSAVISTTTIATTPSKPTCDEKYANITVDYLYNKETKLFTAKLNVNENVECGNNTCTNNEVHNLTECKNASVSISHNSCTAPDKTLILDVPPGVEKFQLHDCTQVEKADTTICLKWKNIETFTCDTQNITYRFQCGNMIFDNKEIKLENLEPEHEYKCDSEILYNNHKFTNASKIIKTDFGSPGEPQIIFCRSEAAHQGVITWNPPQRSFHNFTLCYIKETEKDCLNLDKNLIKYDLQNLKPYTKYVLSLHAYIIAKVQRNGSAAMCHFTTKSAPPSQVWNMTVSMTSDNSMHVKCRPPRDRNGPHERYHLEVEAGNTLVRNESHKNCDFRVKDLQYSTDYTFKAYFHNGDYPGEPFILHHSTSYNSKALIAFLAFLIIVTSIALLVVLYKIYDLHKKRSCNLDEQQELVERDDEKQLMNVEPIHADILLETYKRKIADEGRLFLAEFQSIPRVFSKFPIKEARKPFNQNKNRYVDILPYDYNRVELSEINGDAGSNYINASYIDGFKEPRKYIAAQGPRDETVDDFWRMIWEQKATVIVMVTRCEEGNRNKCAEYWPSMEEGTRAFGDVVVKINQHKRCPDYIIQKLNIVNKKEKATGREVTHIQFTSWPDHGVPEDPHLLLKLRRRVNAFSNFFSGPIVVHCSAGVGRTGTYIGIDAMLEGLEAENKVDVYGYVVKLRRQRCLMVQVEAQYILIHQALVEYNQFGETEVNLSELHPYLHNMKKRDPPSEPSPLEAEFQRLPSYRSWRTQHIGNQEENKSKNRNSNVIPYDYNRVPLKHELEMSKESEHDSDESSDDDSDSEEPSKYINASFIMSYWKPEVMIAAQGPLKETIGDFWQMIFQRKVKVIVMLTELKHGDQEICAQYWGEGKQTYGDIEVDLKDTDKSSTYTLRVFELRHSKRKDSRTVYQYQYTNWSVEQLPAEPKELISMIQVVKQKLPQKNSSEGNKHHKSTPLLIHCRDGSQQTGIFCALLNLLESAETEEVVDIFQVVKALRKARPGMVSTFEQYQFLYDVIASTYPAQNGQVKKNNHQEDKIEFDNEVDKVKQDANCVNPLGAPEKLPEAKEQAEGSEPTSGTEGPEHSVNGPASPALNQGS

SEQ ID NO: 3993 - protein, 362 aa, Homo sapiens
MQAERGARGGRGRRPGRGRPGGDRHSERPGAAAAVARGGGGGGGGDGGGRRGRGRGRGFRGARGGRGGGGAPRGSRREPGGWGAGASAPVEDDSDAETYGEENDEQGNYSKRKIVSNWDRYQDIEKEVNNESGESQRGTDFSVLLSSAGDSFSQFRFAEEKEWDSEASCPKQNSAFYVDSELLVRALQELPLCLRLNVAAELVQGTVPLEVPQVKPKRTDDGKGLGMQLKGPLGPGGRGPIFELKSVAAGCPVLLGKDNPSPGPSRDSQKPTSPLQSAGDHLEEELDLLLNLDAPIKEGDNILPDQTSQDLKSKEDGEVVQEEEVCAKPSVTEEKNMEPEQPSTSKNVTEEELEDWLDSMIS

SEQ ID NO: 3994 - protein, 673 aa, Homo sapiens
MCSRVPLLLPLLLLLALGPGVQGCPSGCQCSQPQTVFCTARQGTTVPRDVPPDTVGLYVFENGITMLDAGSFAGLPGLQLLDLSQNQIASLPSGVFQPLANLSNLDLTANRLHEITNETFRGLRRLERLYLGKNRIRHIQPGAFDTLDRLLELKLQDNELRALPPLRLPRLLLLDLSHNSLLALEPGILDTANVEALRLAGLGLQQLDEGLFSRLRNLHDLDVSDNQLERVPPVIRGLRGLTRLRLAGNTRIAQLRPEDLAGLAALQELDVSNLSLQALPGDLSGLFPRLRLLAAARNPFNCVCPLSWFGPWVRESHVTLASPEETRCHFPPKNAGRLLLELDYADFGCPATTTTATVPTTRPVVREPTALSSSLAPTWLSPTEPATEAPSPPSTAPPTVGPVPQPQDCPPSTCLNGGTCHLGTRHHLACLCPEGFTGLYCESQMGQGTRPSPTPVTPRPPRSLTLGIEPVSPTSLRVGLQRYLQGSSVQLRSLRLTYRNLSGPDKRLVTLRLPASLAEYTVTQLRPNATYSVCVMPLGPGRVPEGEEACGEAHTPPAVHSNHAPVTQAREGNLPLLIAPALAAVLLAALAAVGAAYCVRRGRAMAAAAQDKGQVGPGAGPLELEGVKVPLEPGPKATEGGGEALPSGSECEVPLMGFPGPGLQSPLHAKPYI

SEQ ID NO: 3995 - protein, 765 aa, Homo sapiens
MTTYLEFIQQNEERDGVRFSWNVWPSSRLEATRMVVPVAALFTPLKERPDLPPIQYEPVLCSRTTCRAVLNPLCQVDYRAKLWACNFCYQRNQFPPSYAGISELNQPAELLPQFSSIEYVVLRGPQMPLIFLYVVDTCMEDEDLQALKESMQMSLSLLPPTALVGLITFGRMVQVHELGCEGISKSYVFRGTKDLSAKQLQEMLGLSKVPLTQATRGPQVQQPPPSNRFLQPVQKIDMNLTDLLGELQRDPWPVPQGKRPLRSSGVALSIAVGLLECTFPNTGARIMMFIGGPATQGPGMVVGDELKTPIRSWHDIDKDNAKYVKKGTKHFEALANRAATTGHVIDIYACALDQTGLLEMKCCPNLTGGYMVMGDSFNTSLFKQTFQRVFTKDMHGQFKMGFGGTLEIKTSREIKISGAIGPCVSLNSKGPCVSENEIGTGGTCQWKICGLSPTTTLAIYFEVVNQHNAPIPQGGRGAIQFVTQYQHSSGQRRIRVTTIARNWADAQTQIQNIAASFDQEAAAILMARLAIYRAETEEGPDVLRWLDRQLIRLCQKFGEYHKDDPSSFRFSETFSLYPQFMFHLRRSSFLQVFNNSPDESSYYRHHFMRQDLTQSLIMIQPILYAYSFSGPPEPVLLDSSSILADRILLMDTFFQILIYHGETIAQWRKSGYQDMPEYENFRHLLQAPVDDAQEILHSRFPMPRYIDTEHGGSQARFLLSKVNPSQTHNNMYAWGQESGAPILTDDVSLQVFMDHLKKLAVSSAA

SEQ ID NO: 3996 - protein, 195 aa, Homo sapiens
MENHKSNNKENITIVDISRKINQLPEAERNLLENGSVYVGLNAALCGLIANSLFRRILNVTKARIAAGLPMAGIPFLTTDLTYRCFVSFPLNTGDLDCETCTITRSGLTGLVIGGLYPVFLAIPVNGGLAARYQSALLPHKGNILSYWIRTSKPVFRKMLFPILLQTMFSAYLGSEQYKLLIKALQLSEPGKEIH

SEQ ID NO: 3997 - protein, 585 aa, Homo sapiens
MVCREQLSKNQVKWVFAGITCVSVVVIAAIVLAITLRRPGCELEACSPDADMLDYLLSLGQISRRDALEVTWYHAANSKKAMTAALNSNITVLEADVNVEGLGTANETGVPIMAHPPTIYSDNTLEQWLDAVLGSSQKGIKLDFKNIKAVGPSLDLLRQLTEEGKVRRPIWINADILKGPNMLISTEVNATQFLALVQEKYPKATLSPGWTTFYMSTSPNRTYTQAMVEKMHELVGGVPQRVTFPVRSSMVRAAWPHFSWLLSQSERYSLTLWQAASDPMSVEDLLYVRDNTAVHQVYYDIFEPLLSQFKQLALNATRKPMYYTGGSLIPLLQLPGDDGLNVEWLVPDVQGSGKTATMTLPDTEGMILLNTGLEGTVAENPVPIVHTPSGNILTLESCLQQLATHPGHWGIHLQIAEPAALRPSLALLARLSSLGLLHWPVWVGAKISHGSFSVPGHVAGRELLTAVAEVFPHVTVAPGWPEEVLGSGYREQLLTDMLELCQGLWQPVSFQMQAMLLGHSTAGAIGRLLASSPRATVTVEHNPAGGDYASVRTALLAARAVDRTRVYYRLPQGYHKDLLAHVGRN

SEQ ID NO: 3998 - protein, 1308 aa, Homo sapiens
MGSVTGAVLKTLLLLSTQNWNRVEAGNSYDCDDPLVSALPQASFSSSSELSSSHGPGFARLNRRDGAGGWSPLVSNKYQWLQIDLGERMEVTAVATQGGYGSSNWVTSYLLMFSDSGWNWKQYRQEDSIWGFSGNANADSVVYYRLQPSIKARFLRFIPLEWNPKGRIGMRIEVFGCAYRSEVVDLDGKSSLLYRFDQKSLSPIKDIISLKFKTMQSDGILLHREGPNGDHITLQLRRARLFLLINSGEAKLPSTSTLVNLTLGSLLDDQHWHSVLIQRLGKQVNFTVDEHRHHFHARGEFNLMNLDYEISFGGIPAPGKSVSFPHRNFHGCLENLYYNGVDIIDLAKQQKPQIIAMGNVSFSCSQPQSMPVTFLSSRSYLALPDFSGEEEVSATFQFRTWNKAGLLLFSELQLISGGILLFLSDGKLKSNLYQPGKLPSDITAGVELNDGQWHSVSLSAKKNHLSVAVDGQMASAAPLLGPEQIYSGGTYYFGGCPDKSFGSKCKSPLGGFQGCMRLISISGKVVDLISVQQGSLGNFSDLQIDSCGISDRCLPNYCEHGGECSQSWSTFHCNCTNTGYRGATCHNSIYEQSCEAYKHRGNTSGFYYIDSDGSGPLEPFLLYCNMTETAWTIIQHNGSDLTRVRNTNPENPYAGFFEYVASMEQLQATINRAEHCEQEFTYYCKKSRLVNKQDGTPLSWWVGRTNETQTYWGGSSPDLQKCTCGLEGNCIDSQYYCNCDADRNEWTNDTGLLAYKEHLPVTKIVITDTGRLHSEAAYKLGPLLCQGDRSFWNSASFDTEASYLHFPTFHGELSADVSFFFKTTASSGVFLENLGIADFIRIELRSPTVVTFSFDVGNGPFEISVQSPTHFNDNQWHHVRVERNMKEASLQVDQLTPKTQPAPADGHVLLQLNSQLFVGGTATRQRGFLGCIRSLQLNGMTLDLEERAQVTPEVQPGCRGHCSSYGKLCRNGGKCRERPIGFFCDCTFSAYTGPFCSNEISAYFGSGSSVIYNFQENYLLSKNSSSHAASFHGDMKLSREMIKFSFRTTRTPSLLLFVSSFYKEYLSVIIAKNGDLQIRYKLNKYQEPDVVNFDFKNMADGQLHHIMINREEGVVFIEIDDNRRRQVHLSSGTEFSAVKSLVLGRILEHSDVDQDTALAGAQGFTGCLSAVQLSHVAPLKAALHPSHPDPVTVTGHVTESSCMAQPGTDATSRERTHSFADHSGTIDDREPLANAIKSDSAVIGGLIAVVIFILLCITAIAVRIYQQKRLYKRSEAKRSENVDSAEAVLKSELNIQNAVNENQKEYFF

SEQ ID NO: 3999 - protein, 510 aa, Homo sapiens
MDGFYDQQVPFMVPGKSRSEECRGRPVIDRKRKFLDTDLAHDSEELFQDLSQLQEAWLAEAQVPDDEQFVPDFQSDNLVLHAPPPTKIKRELHSPSSELSSCSHEQALGANYGEKCLYNYCAYDRKPPSGFKPLTPPTTPLSPTHQNPLFPPPQATLPTSGHAPAAGPVQGVGPAPAPHSLPEPGPQQQTFAVPRPPHQPLQMPKMMPENQYPSEQRFQRQLSEPCHPFPPQPGVPGDNRPSYHRQMSEPIVPAAPPPPQGFKQEYHDPLYEHGVPGMPGPPAHGFQSPMGIKQEPRDYCVDSEVPNCQSSYMRGGYFSSSHEGFSYEKDPRLYFDDTCVVPERLEGKVKQEPTMYREGPPYQRRGSLQLWQFLVTLLDDPANAHFIAWTGRGMEFKLIEPEEVARRWGIQKNRPAMNYDKLSRSLRYYYEKGIMQKVAGERYVYKFVCDPDALFSMAFPDNQRPFLKAESECHLSEEDTLPLTHFEDSPAYLLDMDRCSSLPYAEGFAY

SEQ ID NO: 4000 - protein, 406 aa, Homo sapiens
DGKRKTMLCLACGQSMRTEKGLKQLLPGVPFLCISGTKTQKPFLQGPFKVISVAEVDLSCDKAEKTLSYYQARLLSLRMKTCTQAASHSGMAATHQKAVKIIAYKNGDGYRNGKLIVAGTFPMLLTECTEQLGLARAASKVYTKDGTPIFTLRDLVLWALDESFLQRDSEKQKQDAAPVGKEQIIVESMEENPRMKVKNRLFAKSVTSDSLDGIDKSLLTLILRNPIAIWVSCGEPFLPPNALQKAEKLEKQNWLKKDRILADLDTMRHKMRQLKGRRVAACQPATMVPTKSPVQPVVVEGGWTEQTQQEIKLMELIRHTEAHLSEIQEMESKINFPIATKRIAVKPSNLYKQPNTKRVWIYLNGGRPEDGTYAWGKTISEVSLLYLKTWIFIWSRKVFFYFLITA

SEQ ID NO: 4001 - protein, 176 aa, Homo sapiens
MRKHLSWWWLATVCMLLFSHLSAVQTRGIKHRIKWNRKALPSTAQITEAQVAENRPGAFIKQGRKLDIDFGAEGNRYYEANYWQFPDGIHYNGCSEANVTKEAFVTGCINATQAANQGEFQKPDNKLHQQVLWRLVQELCSLKHCEFWLERGAGLRVTMHQPVLLCLLALIWLTVK

SEQ ID NO: 4002 - protein, 938 aa, Homo sapiens
MLRKVRSWTEIWRWATLLFLFYHLGYVCGQIRYPVPEESQEGTFVGNVAQDFLLDTDSLSARRLQVAGEVNQRHFRVDLDSGALLIKNPIDREALCGLSASCIVPLEFVTEGPLEMYRAEVEIVDVNDHAPRFPRQQLDLEIGEAAPPGQRFPLEKAQDADVGSNSISSYRLSSNEHFALDVKKRSDGSLVPELLLEKPLDREKQSDYRLVLTAVDGGNPPRSGTAELRVSVLDVNDNAPAFQQSSYRISVLESAPAGMVLIQLNASDPDLGPSGNVTFYFSGHTPDRVRNLFSLHPTTGKLTLLGPLDFESENYYEFDVRARDGGSPAMEQHCSLRVDLLDVNDNAPYITVTSELGTLPESAEPGTVVALISVQDPDSGSNGDVSLRIPDHLPFALKSAFRNQFSLVTAGPLDREAKSSYDIMVTASDAGNPPLSTHRTIFLNISDVNDNPPSFFQRSHEVFVPENNRPGDLLCSLAASDPDSGLNALISYSLLEPRNRDVSASSFISLNPQTGAVHATRSFDYEQTQTLQFEVQARDRGNPPLSSTVTVRLFVLDLNDNAPAVLRPRARPGSLCPQALPPSVGAGHLITKVTAVDLDSGYNAWVSYQLLEAPDPSLFAVSRYAGEVRTAVPIPADLPPQKLVIVVKDSGSPPLSTSVTLLVSLEEDTHPVVPDLRESSAPREGESRLTLYLAVSLVAICFVSFGSFVALLSKCLRGAACGVTCFPAGTCACLTRSRRREGLPPSNGILRIQLGSDDPIKFVDVGGHSHGCTPLASAPTRSDSFMMVKSPSAPMAGEPVRPSCPPSDLLYGLEQAPPNTDWRFSQAQRPGTSGSQNGDDTGTWPNNQFDTEMLQAMILASASEAADGSSTLGGGAGTMGLSARYGPQFTLQHVPDYRQNVYIPGSNATLTNAAGKRDGKAPAGGNGNKKKSGKKEKK

SEQ ID NO: 4003 - protein, 677 aa, Homo sapiens
MPGFLVRILPLLLVLLLLGPTRGLRNATQRMFEIDYSRDSFLKDGQPFRYISGSIHYSRVPRFYWKDRLLKMKMAGLNAIQTYVPWNFHEPWPGQYQFSEDHDVEYFLRLAHELGLLVILRPGPYICAEWEMGGLPAWLLEKESILLRSSDPDYLAAVDKWLGVLLPKMKPLLYQNGGPVITVQVENEYGSYFACDFDYLRFLQKRFRHHLGDDVVLFTTDGAHKTFLKCGALQGLYTTVDFGTGSNITDAFLSQRKCEPKGPLINSEFYTGWLDHWGQPHSTIKTEAVASSLYDILARGASVNLYMFIGGTNFAYWNGANSPYAAQPTSYDYDAPLSEAGDLTEKYFALRNIIQKFEKVPEGPIPPSTPKFAYGKVTLEKLKTVGAALDILCPSGPIKSLYPLTFIQVKQHYGFVLYRTTLPQDCSNPAPLSSPLNGVHDRAYVAVDGIPQGVLERNNVITLNITGKAGATLDLLVENMGRVNYGAYINDFKGLVSNLTLSSNILTDWTIFPLDTEDAVCSHLGGWGHRDSGHHDEAWAHNSSNYTLPAFYMGNFSIPSGIPDLPQDTFIQFPGWTKGQVWINGFNLGRYWPARGPQLTLFVPQHILMTSAPNTITVLELEWAPCSSDDPELCAVTFVDRPVIGSSVTYDHPSKPVEKRLMPPPPQKNKDSWLDHV

SEQ ID NO: 4004 - protein, 636 aa, Homo sapiens
MAAGVAAWLPFARAAAIGWMPVANCPMPLAPADKNKRQDELIVLNVSGRRFQTWRTTLERYPDTLLGSTEKEFFFNEDTKEYFFDRDPEVFRCVLNFYRTGKLHYPRYECISAYDDELAFYGILPEIIGDCCYEEYKDRKRENAERLMDDNDSENNQESMPSLSFRQTMWRAFENPHTSTLALVFYYVTGFFIAVSVITNVVETVPCGTVPGSKELPCGERYSVAFFCLDTACVMIFTVEYLLRLFAAPSRYRFIRSVMSIIDVVAIMPYYIGLVMTNNEDVSGAFVTLRVFRVFRIFKFSRHSQGLRILGYTLKSCASELGFLLFSLTMAIIIFATVMFYAEKGSSASKFTSIPASFWYTIVTMTTLGYGDMVPKTIAGKIFGSICSLSGVLVIALPVPVIVSNFSRIYHQNQRADKRRAQKKARLARIRVAKTGSSNAYLHSKRNGLLNEALELTGTPEEEHMGKTTSLIESQHHHLLHCLEKTTNHEFIDEQMFEQNCMESSMQNYPSTRSPSLSSHPGLTTTCCSRRSKKTTHLPNSNLPATRLRSMQELSTIHIQGSEQPSLTTSRSSLNLKADDGLRPNCKTSQITTAIISIPTPPALTPEGESRPPPASPGPNTNIPSIASNVVKVSAL

SEQ ID NO: 4005 - protein, 999 aa, Homo sapiens
MENLESRLKNAPYFRCEKGTDSIPLCRKCETCVLAWKIFSTKEWFCRINDISQRRFLVGILKQLNSLYLLHYFQNILQTTQGKDFIYNRSRINLSKKEGKVVKSSLNQMLDKTVEQKMKEILYWFANSTQWTKANYTLLLLQMCNPKLLLTAANVIRVLFLREENNISGLNQDITDVCFSPEKDHSSKSATSQVYWTAKTQHTSLPLSKAPENEHLLGAASNPEEPWRNSLRCISEMNRLFSGKGDITKPGYDPCNLLVDLDDIRDLSSGFSKYRDFIRYLPIHLSKYILRMLDRHTLNKCASVSQHWAAMAQQVKMDLSAHGFIQNQITFLQGSYTRGIDPNYANKVSIPVPKMVDDGKSMRVKHPKWKLRTKNEYNLWTAYQNEETQQVLIEERNVFCGTYNVRILSDTWDQNRVIHYSGGDLIAVSSNRKIHLLDIIQVKAIPVEFRGHAGSVRALFLCEEENFLLSGSYDLSIRYWDLKSGVCTRIFGGHQGTITCMDLCKNRLVSGGRDCQVKVWDVDTGKCLKTFRHKDPILATRINDTYIVSSCERGLVKVWHIAMAQLVKTLSGHEGAVKCLFFDQWHLLSGSTDGLVMAWSMVGKYERCLMAFKHPKMVVNTESNVLMFQFEHIKWQYAVEKTKQKKNKEKEEEKEENSLMEILSKCNIQVHSPRESVSSKQTVIQELLPGKPPKSRVLLKPAKFSSAVLIEELQSQGKSKSPRRDADDVEKAQKQGQLETPGKLPSHPKKKSWKIPMSPDQFLLTVSALQHAHNSGEFAYPCRPQTEITDVWGPSISYPRKVLNFKGKSIQRAVDRLRLSNPPIDVKRTSIPLEIQKLQPNLKISLHSPRVQSTIPQPMIIRSRFSGSLKGGDQVTSSIERAVCSTGPLTSMQVIKPNRMLAPQVGTATLSLKKERPRIYTALDPFRVNTEFVLLTVKEEKEHQEAKMKEYQARESTGVVDPGKVSKAAWIRKIKGLPIDNFTKQGKTAAPELGQNVFI

SEQ ID NO: 4006 - protein, 230 aa, Homo sapiens
MLKNPYTIKKQPLHQFVQRPLFPLPAAFYHPVRYMFIQTQDTPNPNSLKFIPGKPVLETRTMDFPTPAAAFRSPLARQLFRIEGVKSVFFGPDFITVTKENEELDWNLLKPDIYATIMDFFASGLPLVTEETPSGEAGSEEDDEVVAMIKELLDTRIRPTVQEDGGDVIYKGFEDGIVQLKLQGSCTSCPSSIITLKNGIQNMLQFYIPEVEGVEQVMDDESDEKEANSP

SEQ ID NO: 4007 - protein, 1422 aa, Homo sapiens
MSGIKRTIKETDPDYEDVSVALPNKRHKAIENSARDAAVQKIETIIKEQFALEMKNKEHEIEVIDQRLIEARRMMDKLRACIVANYYASAGLLKVSEGSKTCDTMVFNHPAIKKFLESPSRSSSPANQRAETPSANHSESDSLSQHNDFLSDKDNNSNMDIEERLSNNMEQRPSRNTGRDTSRITGSHKTEQRNADLTDETSRLFVKKTIVVGNVSKYIPPDKREENDQSTHKWMVYVRGSRREPSINHFVKKVWFFLHPSYKPNDLVEVREPPFHLTRRGWGEFPVRVQVHFKDSQNKRIDIIHNLKLDRTYTGLQTLGAETVVDVELHRHSLGEDCIYPQSSESDISDAPPSLPLTIPAPVKASSPIKQSHEPVPDTSVEKGFPASTEAERHTPFYALPSSLERTPTKMTTSQKVTFCSHGNSAFQPIASSCKIVPQSQVPNPESPGKSFQPITMSCKIVSGSPISTPSPSPLPRTPTSTPVHVKQGTAGSVINNPYVIMDKQPGQVIGATTPSTGSPTNKISTASQVSQGTGSPVPKIHGSSFVTSTVKQEDSLFASMPPLCPIGSHPKVQSPKPITGGLGAFTKVIIKQEPGEAPHVPATGAASQSPLPQYVTVKGGHMIAVSPQKQVITPGEGIAQSAKVQPSKVVGVPVGSALPSTVKQAVAISGGQILVAKASSSVSKAVGPKQVVTQGVAKAIVSGGGGTIVAQPVQTLTKAQVTAAGPQKSGSQGSVMATLQLPATNLANLANLPPGTKLYLTTNSKNPSGKGKLLLIPQGAILRATNNANLQSGSAASGGSGAGGGGGGGGGGGSGSGGGGSTGGGGGTAGGGTQSTAGPGGISQHLTYTSYILKQTPQGTFLVGQPSPQTSGKQLTTGSVVQGTLGVSTSSAQGQQTLKVISGQKTTLFTQAAHGGQASLMKISDSTLKTVPATSQLSKPGTTMLRVAGGVITTATSPAVALSANGPAQQSEGMAPVSSSTVSSVTKTSGQQQVCVSQATVGTCKAATPTVVSATSLVPTPNPISGKATVSGLLKIHSSQSSPQQAVLTIPSQLKPLSVNTSGGVQTILMPVNKVVQSFSTSKPPAILPVAAPTPVVPSSAPAAVAKVKTEPETPGPSCLSQEGQTAVKTEESSELGNYVIKIDHLETIQQLLTAVVKKIPLITAKSEDASCFSAKSVEQYYGWNIGKRRAAEWQRAMTMRKVLQEILEKNPRFHHLTPLKTKHIAHWCRCHGYTPPDPESLRNDGDSIEDVLTQIDSEPECPSSFSSADNLCRKLEDLQQFQKREPENEEEVDILSLSEPVKINIKKEQEEKQEEVKFYLPPTPGSEFIGDVTQKIGITLQPVALHRNVYASVVEDMILKATEQLVNDILRQALAVGYQTASHNRIPKEITVSNIHQAICNIPFLDFLTNKHMGILNEDQ

SEQ ID NO: 4008 - protein, 601 aa, Homo sapiens
MAALTPRKRKQDSLKCDSLLHFTENLFPSPNKKHCFYQNSDKNEENLHCSQQEHFVLSALKTTEINRLPSANQGSPFKSALSTVSFYNQNKWYLNPLERKLIKESRSTCLKTNDEDKSFPIVTEKMQGKPVCSKKNNKKPQKSLTAKYQPKYRHIKPVSRNSRNSKQNRVIYKPIVEKENNCHSAENNSNAPRVLSQKIKPQVTLQGGAAFFVRKKSSLRKSSLENEPSLGRTQKSKSEVIEDSDVETVSEKKTFATRQVPKCLVLEEKLKIGLLSASSKNKEKLIKDSSDDRVSSKEHKVDKNEAFSSEDSLGENKTISPKSTVYPIFSASSVNSKRSLGEEQFSVGSVNFMKQTNIQKNTNTRDTSKKTKDQLIIDAGQKHFGATVCKSCGMIYTASNPEDEMQHVQHHHRFLEGIKYVGWKKERVVAEFWDGKIVLVLPHDPSFAIKKVEDVQELVDNELGFQQVVPKCPNKIKTFLFISDEKRVVGCLIAEPIKQAFRVLSEPIGPESPSSTECPRAWQCSDVPEPAVCGISRIWVFRLKRRKRIARRLVDTLRNCFMFGCFLSTDEIAFSDPTPDGKLFATKYCNTPNFLVYNFNS

SEQ ID NO: 4009 - protein, 511 aa, Homo sapiens
MSGGFELQPRDGGPRVALAPGETVIGRGPLLGITDKRVSRRHAILEVAGGQLRIKPIHTNPCFYQSSEKSQLLPLKPNLWCYLNPGDSFSLLVDKYIFRILSIPSEVEMQCTLRNSQVLDEDNILNETPKSPVINLPHETTGASQLEGSTEIAKTQMTPTNSVSFLGENRDCNKQQPILAERKRILPTWMLAEHLSDQNLSVPAISGGNVIQGSGKEEICKDKSQLNTTQQGRRQLISSGSSENTSAEQDTGEECKNTDQEESTISSKEMPQSFSAITLSNTEMNNIKTNAQRNKLPIEELGKVSKHKIATKRTPHKEDEAMSCSENCSSAQGDSLQDESQGSHSESSSNPSNPETLHAKATDSVLQGSEGNKVKRTSCMYGANCYRKNPVHFQHFSHPGDSDYGGVQIVGQDETDDRPECPYGPSCYRKNPQHKIEYRHNTLPVRNVLDEDNDNVGQPNEYDLNDSFLDDEEEDYEPTDEDSDWEPGKEDEEKEDVEELLKEAKRFMKRK

SEQ ID NO: 4010 - protein, 471 aa, Homo sapiens
MSYPQGYLYQAPGSLALYSCPAYGASALAAPRSEELARSASGSAFSPYPGSAAFTAQAATGFGSPLQYSADAAAAAAGFPSYMGAPYDAHTTGMTGAISYHPYGSAAYPYQLNDPAYRKNATRDATATLKAWLNEHRKNPYPTKGEKIMLAIITKMTLTQVSTWFANARRRLKKENKMTWAPRNKSEDEDEDEGDATRSKDESPDKAQEGTETSAEDEGISLHVDSLTDHSCSAESDGEKLPCRAGDPLCESGSECKDKYDDLEDDEDDDEEGERGLAPPKPVTSSPLTGLEAPLLSPPPEAAPRGGRKTPQGSRTSPGAPPPASKPKLWSLAEIATSDLKQPSLGPGCGPPGLPAAAAPASTGAPPGGSPYPASPLLGRPLYYTSPFYGNYTNYGNLNAALQGQGLLRYNSAAAAPGEALHTAPKAASDAGKAGAHPLESHYRSPGGGYEPKKDASEGCTVVGGGVQPYL

SEQ ID NO: 4011 - protein, 540 aa, Homo sapiens
MSRQFTYKSGAAAKGGFSGCSAVLSGGSSSSYRAGGKGLSGGFSSRSLYSLGGARSISFNVASGSGWAGGYGFGRGRASGFAGSMFGSVALGSVCPSLCPPGGIHQVTINKSLLAPLNVELDPEIQKVRAQEREQIKVLNNKFASFIDKVRFLEQQNQVLETKWELLQQLDLNNCKNNLEPILEGYISNLRKQLETLSGDRVRLDSELRSVREVVEDYKKRYEEEINKRTTAENEFVVLKKDVDAAYTSKVELQAKVDALDGEIKFFKCLYEGETAQIQSHISDTSIILSMDNNRNLDLDSIIAEVRAQYEEIARKSKAEAEALYQTKFQELQLAAGRHGDDLKHTKNEISELTRLIQRLRSEIESVKKQCANLETAIADAEQRGDCALKDARAKLDELEGALQQAKEELARMLREYQELLSVKLSLDIEIATYRKLLEGEECRMSGEYTNSVSISVINSSMAGMAGTGAGFGFSNAGTYGYWPSSVSGGYSMLPGGCVTGSGNCSPRGEARTRLGSASEFRDSQGKTLALSSPTKKTMR

SEQ ID NO: 4012 - protein, 994 aa, Homo sapiens
MRRRPPSRGGRGAARARETRRQPRHRSGRRMAEAISCTLNCSCQSFKPGKINHRQCDQCKHGWVAHALSKLRIPPMYPTSQVEIVQSNVVFDISSLMLYGTQAIPVRLKILLDRLFSVLKQDEVLQILHALDWTLQDYIRGYVLQDASGKVLDHWSIMTSEEEVATLQQFLRFGETKSIVELMAIQEKEEQSIIIPPSTANVDIRAFIESCSHRSSSLPTPVDKGNPSSIHPFENLISNMTFMLPFQFFNPLPPALIGSLPEQYMLEQGHDQSQDPKQEVHGPFPDSSFLTSSSTPFQVEKDQCLNCPDAITKKEDSTHLSDSSSYNIVTKFERTQLSPEAKVKPERNSLGTKKGRVFCTACEKTFYDKGTLKIHYNAVHLKIKHKCTIEGCNMVFSSLRSRNRHSANPNPRLHMPMNRNNRDKDLRNSLNLASSENYKCPGFTVTSPDCRPPPSYPGSGEDSKGQPAFPNIGQNGVLFPNLKTVQPVLPFYRSPATPAEVANTPGILPSLPLLSSSIPEQLISNEMPFDALPKKKSRKSSMPIKIEKEAVEIANEKRHNLSSDEDMPLQVVSEDEQEACSPQSHRVSEEQHVQSGGLGKPFPEGERPCHRESVIESSGAISQTPEQATHNSERETEQTPALIMVPREVEDGGHEHYFTPGMEPQVPFSDYMELQQRLLAGGLFSALSNRGMAFPCLEDSKELEHVGQHALARQIEENRFQCDICKKTFKNACSVKIHHKNMHVKEMHTCTVEGCNATFPSRRSRDRHSSNLNLHQKALSQEALESSEDHFRAAYLLKDVAKEAYQDVAFTQQASQTSVIFKGTSRMGSLVYPITQVHSASLESYNSGPLSEGTILDLSTTSSMKSESSSHSSWDSDGVSEEGTVLMEDSDGNCEGSSLVPGEDEYPICVLMEKADQSLASLPSGLPITCHLCQKTYSNKGTFRAHYKTVHLRQLHKCKVPGCNTMFSSVRSRNRHSQNPNLHKSLASSPSHLQ

SEQ ID NO: 4013 - protein, 153 aa, Homo sapiens
MLRLRSGLRHLRATPNTRGSARLLCAEMPKKAGATTKGKSQSKEPERPLPPLGPVAVDPKGCVTIAIHAKPGSKQNAVTDLTAEAVNVAIAAPPSEGEANAELCRYLSKVLELRKSDVVLDKGGKSREKVVKLLASTTPEEILEKLKKEAKKT

SEQ ID NO: 4014 - protein, 963 aa, Homo sapiens
MADLAECNIKVMCRFRPLNESEVNRGDKYIAKFQGEDTVVIASKPYAFDRVFQSSTSQEQVYNDCAKKIVKDVLEGYNGTIFAYGQTSSGKTHTMEGKLHDPEGMGIIPRIVQDIFNYIYSMDENLEFHIKVSYFEIYLDKIRDLLDVSKTNLSVHEDKNRVPYVKGCTERFVCSPDEVMDTIDEGKSNRHVAVTNMNEHSSRSHSIFLINVKQENTQTEQKLSGKLYLVDLAGSEKVSKTGAEGAVLDEAKNINKSLSALGNVISALAEGSTYVPYRDSKMTRILQDSLGGNCRTTIVICCSPSSYNESETKSTLLFGQRAKTIKNTVCVNVELTAEQWKKKYEKEKEKNKILRNTIQWLENELNRWRNGETVPIDEQFDKEKANLEAFTVDKDITLTNDKPATAIGVIGNFTDAERRKCEEEIAKLYKQLDDKDEEINQQSQLVEKLKTQMLDQEELLASTRRDQDNMQAELNRLQAENDASKEEVKEVLQALEELAVNYDQKSQEVEDKTKEYELLSDELNQKSATLASIDAELQKLKEMTNHQKKRAAEMMASLLKDLAEIGIAVGNNDVKQPEGTGMIDEEFTVARLYISKMKSEVKTMVKRCKQLESTQTESNKKMEENEKELAACQLRISQHEAKIKSLTEYLQNVEQKKRQLEESVDALSEELVQLRAQEKVHEMEKEHLNKVQTANEVKQAVEQQIQSHRETHQKQISSLRDEVEAKAKLITDLQDQNQKMMLEQERLRVEHEKLKATDQEKSRKLHELTVMQDRREQARQDLKGLEETVAKELQTLHNLRKLFVQDLATRVKKSAEIDSDDTGGSAAQKQKISFLENNLEQLTKVHKQLVRDNADLRCELPKLEKRLRATAERVKALESALKEAKENASRDRKRYQQEVDRIKEAVRSKNMARRGHSAQIAKPIRPGQHPAASPTHPSAIRGGGAFVQNSQPVAVRGGGGKQV

SEQ ID NO: 4015 - protein, 1284 aa, Homo sapiens
MHVFIVGMSLSSVTLASALQVRGEALSEEEIWSLLFLAAEQLLEDLRNDSSDYVVCPWSALLSAAGSLSFQGRVSHIEAAPFKAPELLQGQSEDEQPDASQPLQLCEPLHSILLTMCEDQPHRRCTLQSVLEACRVHEKEVSVYPAPAGLHIRRLVGLVLGTISEVEKRVVEESSSVQQNRSYLLRKRLRGTSSESPAAQAPECLHPCRVSERSTETQSSPEPHWSTLTHSHCSLLVNRALPGADPQDQQAGRRLSSGSVHSAADSSWPTTPSQRGFLQRRSKFSRPEFILLAGEAPMTLHLPGSVVTKKGKSYLALRDLCVVLLNGQHLEVKCDVESTVGAVFNAVTSFANLEELTYFGLAYMKSKEFFFLDSETRLCKIAPEGWREQPQKTSMNTFTLFLRIKFFVSHYGLLQHSLTRHQFYLQLRKDILEERLYCNEEILLQLGVLALQAEFGNYPKEVESKPYFHVEDYIPASLIERMTALRVQVEVSEMHRLSSALWGEDAELKFLRVTQQLPEYGVLVHQVFSEKRRPEEEMALGICAKGVIVYEVKNNSRIAMLRFQWRETGKISTYQKKFTITSSVTGKKHTFVTDSAKTSKYLLDLCSAQHGFNAQMGSGQPSHVLFDHDKFVQMANLSPAHQARSKPLIWIQRLSCSENELFVSRLQGAAGGLLSTSMDNFNVDGSKEAGAEGIGRSPCTGREQLKSACVIQKPMTWDSLSGPPVQSMHAGSKNNRRKSFIAEPGREIVRVTLKRDPHRGFGFVINEGEYSGQADPGIFISSIIPGGPAEKAKTIKPGGQILALNHISLEGFTFNMAVRMIQNSPDNIELIISQSKGVGGNNPDEEKNSTANSGVSSTDILSFGYQGSLLSHTQDQDRNTEELDMAGVQSLVPRLRHQLSFLPLKGAGSSCPPSPPEISAGEIYFVELVKEDGTLGFSVTGGINTSVPYGGIYVKSIVPGGPAAKEGQILQGDRLLQVDGVILCGLTHKQAVQCLTGPGQVARLVLERRVPRSTQQCPSANDSMGDERTAVSLVTALPGRPSSCVSVTDGPKFEVKLKKNANGLGFSFVQMEKESCSHLKSDLVRIKRLFPGQPAEENGAIAAGDIILAVNGRSTEGLIFQEVLHLLRGAPQEVTLLLCRPPPGALPELEQEWQTPELSADKEFTRATCTDSCTSPILDQEDSWRDSASPDAGEGLGLRPESSQKAIREAQWGQNRERPWASSLTHSPESHPHLCKLHQERDESTLATSLEKDVRQNCYSVCDIMRLGRYSFSSPLTRLSTDIF

SEQ ID NO: 4016 - protein, 529 aa, Homo sapiens
MATTATCTRFTDDYQLFEELGKGAFSVVRRCVKKTSTQEYAAKIINTKKLSARDHQKLEREARICRLLKHPNIVRLHDSISEEGFHYLVFDLVTGGELFEDIVAREYYSEADASHCIHQILESVNHIHQHDIVHRDLKPENLLLASKCKGAAVKLADFGLAIEVQGEQQAWFGFAGTPGYLSPEVLRKDPYGKPVDIWACGVILYILLVGYPPFWDEDQHKLYQQIKAGAYDFPSPEWDTVTPEAKNLINQMLTINPAKRITADQALKHPWVCQRSTVASMMHRQETVECLRKFNARRKLKGAILTTMLVSRNFSAAKSLLNKKSDGGVKKRKSSSSVHLMPQSNNKNSLVSPAQEPAPLQTAMEPQTTVVHNATDGIKGSTESCNTTTEDEDLKVRKQEIIKITEQLIEAINNGDFEAYTKICDPGLTSFEPEALGNLVEGMDFHKFYFENLLSKNSKPIHTTILNPHVHVIGEDAACIAYIRLTQYIDGQGRPRTSQSEETRVWHRRDGKWLNVHYHCSGAPAAPLQ

SEQ ID NO: 4017 - protein, 156 aa, Homo sapiens
MEPAAGSSMEPSADWLATAAARGRVEEVRALLEAGALPNAPNSYGRRPIQVMMMGSARVAELLLLHGAEPNCADPATLTRPVHDAAREGFLDTLVVLHRAGARLDVRDAWGRLPVDLAEELGHRDVARYLRAAAGGTRGSNHARIDAAEGPSDIPD

SEQ ID NO: 4018 - protein, 173 aa, Homo sapiens
MAPVLSKDSADIESILALNPRTQTHATLCSTSAKKLDKKHWKRNPDKNCFNCEKLENNFDDIKHTTLGERGALREAMRCLKCADAPCQKSCPTNLDIKSFITSIANKNYYGAAKMIFSDNPLGLTCGMVCPTSDLCVGGCNLYATEEGPINIGGLQQFATETLILAFSLMNHL

SEQ ID NO: 4019 - protein, 323 aa, Homo sapiens
MGNSASRSDFEWVYTDQPHTQRRKEILAKYPAIKALMRPDPRLKWAVLVLVLVQMLACWLVRGLAWRWLLFWAYAFGGCVNHSLTLAIHDISHNAAFGTGRAARNRWLAVFANLPVGVPYAASFKKYHVDHHRYLGGDGLDVDVPTRLEGWFFCTPARKLLWLVLQPFFYSLRPLCVHPKAVTRMEVLNTLVQLAADLAIFALWGLKPVVYLLASSFLGLGLHPISGHFVAEHYMFLKGHETYSYYGPLNWITFNVGYHVEHHDFPSIPGYNLPLVRKIAPEYYDHLPQHHSWVKVLWDFVFEDSLGPYARVKRVYRLAKDGL

SEQ ID NO: 4020 - protein, 1225 aa, Homo sapiens
MFARKPPGAAPLGAMPVPDQPSSASEKTSSLSPGLNTSNGDGSETETTSAILASVKEQELQFERLTRELEAERQIVASQLERCKLGSETGSMSSMSSAEEQFQWQSQDGQKDIEDELTTGLELVDSCIRSLQESGILDPQDYSTGERPSLLSQSALQLNSKPEGSFQYPASYHSNQTLALGETTPSQLPARGTQARATGQSFSQGTTSRAGHLAGPEPAPPPPPPPREPFAPSLGSAFHLPDAPPAAAAAALYYSSSTLPAPPRGGSPLAAPQGGSPTKLQRGGSAPEGATYAAPRGSSPKQSPSRLAKSYSTSSPINIVVSSAGLSPIRVTSPPTVQSTISSSPIHQLSSTIGTYATLSPTKRLVHASEQYSKHSQELYATATLQRPGSLAAGSRASYSSQHGHLGPELRALQSPEHHIDPIYEDRVYQKPPMRSLSQSQGDPLPPAHTGTYRTSTAPSSPGVDSVPLQRTGSQHGPQNAAAATFQRASYAAGPASNYADPYRQLQYCPSVESPYSKSGPALPPEGTLARSPSIDSIQKDPREFGWRDPELPEVIQMLQHQFPSVQSNAAAYLQHLCFGDNKIKAEIRRQGGIQLLVDLLDHRMTEVHRSACGALRNLVYGKANDDNKIALKNCGGIPALVRLLRKTTDLEIRELVTGVLWNLSSCDALKMPIIQDALAVLTNAVIIPHSGWENSPLQDDRKIQLHSSQVLRNATGCLRNVSSAGEEARRRMRECDGLTDALLYVIQSALGSSEIDSKTVENCVCILRNLSYRLAAETSQGQHMGTDELDGLLCGEANGKDAESSGCWGKKKKKKKSQDQWDGVGPLPDCAEPPKGIQMLWHPSIVKPYLTLLSECSNPDTLEGAAGALQNLAAGSWKWSVYIRAAVRKEKGLPILVELLRIDNDRVVCAVATALRNMALDVRNKELIGKYAMRDLVHRLPGGNNSNNTASKAMSDDTVTAVCCTLHEVITKNMENAKALRDAGGIEKLVGISKSKGDKHSPKVVKAASQVLNSMWQYRDLRSLYKKDGWSQYHFVASSSTIERDRQRPYSSSRTPSISPVRVSPNNRSASAPASPREMISLKERKTDYECTGSNATYHGAKGEHTSRKDAMTAQNTGISTLYRNSYGAPAEDIKHNQVSAQPVPQEPSRKDYETYQPFQNSTRNYDESFFEDQVHHRPPASEYTMHLGLKSTGNYVDFYSAARPYSELNYETSHYPASPDSWV

SEQ ID NO: 4021 - protein, 1798 aa, Homo sapiens
MELTSRERGRGQPLPWELRLGLLLSVLAATLAQAPAPDVPGCSRGSCYPATGDLLVGRADRLTASSTCGLNGPQPYCIVSHLQDEKKCFLCDSRRPFSARDNPHSHRIQNVVTSFAPQRRAAWWQSENGIPAVTIQLDLEAEFHFTHLIMTFKTFRPAAMLVERSADFGRTWHVYRYFSYDCGADFPGVPLAPPRHWDDVVCESRYSEIEPSTEGEVIYRVLDPAIPIPDPYSSRIQNLLKITNLRVNLTRLHTLGDNLLDPRREIREKYYYALYELVVRGNCFCYGHASECAPAPGAPAHAEGMVHGACICKHNTRGLNCEQCQDFYRDLPWRPAEDGHSHACRKCECHGHTHSCHFDMAVYLASGNVSGGVCDGCQHNTAGRHCELCRPFFYRDPTKDLRDPAVCRSCDCDPMGSQDGGRCDSHDDPALGLVSGQCRCKEHVVGTRCQQCRDGFFGLSISDRLGCRRCQCNARGTVPGSTPCDPNSGSCYCKRLVTGRGCDRCLPGHWGLSHDLLGCRPCDCDVGGALDPQCDEGTGQCHCRQHMVGRRCEQVQPGYFRPFLDHLIWEAEDTRGQVLDVVERLVTPGETPSWTGSGFVRLQEGQTLEFLVASVPKAMDYDLLLRLEPQVPEQWAELELIVQRPGPVPAHSLCGHLVPKDDRIQGTLQPHARYLIFPNPVCLEPGISYKLHLKLVRTGGSAQPETPYSGPGLLIDSLVLLPRVLVLEMFSGGDAAALERQATFERYQCHEEGLVPSKTSPSEACAPLLISLSTLIYNGALPCQCNPQGSLSSECNPHGGQCLCKPGVVGRRCDLCAPGYYGFGPTGCQACQCSHEGALSSLCEKTSGQCLCRTGAFGLRCDRCQRGQWGFPSCRPCVCNGHADECNTHTGACLGCRDHTGGEHCERCIAGFHGDPRLPYGGQCRPCPCPEGPGSQRHFATSCHQDEYSQQIVCHCRAGYTGLRCEACAPGHFGDPSRPGGRCQLCECSGNIDPMDPDACDPHTGQCLRCLHHTEGPHCAHCKPGFHGQAARQSCHRCTCNLLGTNPQQCPSPDQCHCDPSSGQCPCLPNVQGPSCDRCAPNFWNLTSGHGCQPCACHPSRARGPTCNEFTGQCHCRAGFGGRTCSECQELHWGDPGLQCHACDCDSRGIDTPQCHRFTGHCSCRPGVSGVRCDQCARGFSGIFPACHPCHACFGDWDRVVQDLAARTQRLEQRAQELQQTGVLGAFESSFWHMQEKLGIVQGIVGARNTSAASTAQLVEATEELRREIGEATEHLTQLEADLTDVQDENFNANHALSGLERDRLALNLTLRQLDQHLDLLKHSNFLGAYDSIRHAHSQSAEAERRANTSALAVPSPVSNSASARHRTEALMDAQKEDFNSKHMANQRALGKLSAHTHTLSLTDINELVCGAPGDAPCATSPCGGAGCRDEDGQPRCGGLSCNGAAATADLALGRARHTQAELQRALAEGGSILSRVAETRRQASEAQQRAQAALDKANASRGQVEQANQELQELIQSVKDFLNQEGADPDSIEMVATRVLELSIPASAEQIQHLAGAIAERVRSLADVDAILARTVGDVRRAEQLLQDARRARSWAEDEKQKAETVQAALEEAQRAQGIAQGAIRGAVADTRDTEQTLYQVQERMAGAERALSSAGERARQLDALLEALKLKRAGNSLAASTAEETAGSAQGRAQEAEQLLRGPLGDQYQTVKALAERKAQGVLAAQARAEQLRDEARDLLQAAQDKLQRLQELEGTYEENERALESKAAQLDGLEARMRSVLQAINLQVQIYNTCQ

SEQ ID NO: 4022 - protein, 2920 aa, Homo sapiens
MRGRRGRPPKQPAAPAAERCAPAPPPPPPPPTSGPIGGLRSRHRGSSRGRWAAAQAEVAPKTRLSSPRGGSSSRRKPPPPPPAPPSTSAPGRGGRGGGGGRTGGGGGGGHLARTTAARRAVNKVVYDDHESEEEEEEEDMVSEEEEEEDGDAEETQDSEDDEEDEMEEDDDDSDYPEEMEDDDDDASYCTESSFRSHSTYSSTPGRRKPRVHRPRSPILEEKDIPPLEFPKSSEDLMVPNEHIMNVIAIYEVLRNFGTVLRLSPFRFEDFCAALVSQEQCTLMAEMHVVLLKAVLREEDTSNTTFGPADLKDSVNSTLYFIDGMTWPEVLRVYCESDKEYHHVLPYQEAEDYPYGPVENKIKVLQFLVDQFLTTNIAREELMSEGVIQYDDHCRVCHKLGDLLCCETCSAVYHLECVKPPLEEVPEDEWQCEVCVAHKVPGVTDCVAEIQKNKPYIRHEPIGYDRSRRKYWFLNRRLIIEEDTENENEKKIWYYSTKVQLAELIDCLDKDYWEAELCKILEEMREEIHRHMDITEDLTNKARGSNKSFLAAANEEILESIRAKKGDIDNVKSPEETEKDKNETENDSKDAEKNREEFEDQSLEKDSDDKTPDDDPEQGKSEVGDFKSEKSNGELSESPGAGKGASGSTRIITRLRNPDSKLSQLKSQQVAAAAHEANKLFKEGKEVLVVNSQGEISRLSTKKEVIMKGNINNYFKLGQEGKYRVYHNQYSTNSFALNKHQHREDHDKRRHLAHKFCLTPAGEFKWNGSVHGSKVLTISTLRLTITQLENNIPSSFLHPNWASHRANWIKAVQMCSKPREFALALAILECAVKPVVMLPIWRESLGHTRLHRMTSIEREEKEKVKKKEKKQEEEETMQQATWVKYTFPVKHQVWKQKGEEYRVTGYGGWSWISKTHVYRFVPKLPGNTNVNYRKSLEGTKNNMDENMDESDKRKCSRSPKKIKIEPDSEKDEVKGSDAAKGADQNEMDISKITEKKDQDVKELLDSDSDKPCKEEPMEVDDDMKTESHVNCQESSQVDVVNVSEGFHLRTSYKKKTKSSKLDGLLERRIKQFTLEEKQRLEKIKLEGGIKGIGKTSTNSSKNLSESPVITKAKEGCQSDSMRQEQSPNANNDQPEDLIQGCSESDSSVLRMSDPSHTTNKLYPKDRVLDDVSIRSPETKCPKQNSIENDIEEKVSDLASRGQEPSKSKTKGNDFFIDDSKLASADDIGTLICKNKKPLIQEESDTIVSSSKSALHSSVPKSTNDRDATPLSRAMDFEGKLGCDSESNSTLENSSDTVSIQDSSEEDMIVQNSNESISEQFRTREQDVEVLEPLKCELVSGESTGNCEDRLPVKGTEANGKKPSQQKKLEERPVNKCSDQIKLKNTTDKKNNENRESEKKGQRTSTFQINGKDNKPKIYLKGECLKEISESRVVSGNVEPKVNNINKIIPENDIKSLTVKESAIRPFINGDVIMEDFNERNSSETKSHLLSSSDAEGNYRDSLETLPSTKESDSTQTTTPSASCPESNSVNQVEDMEIETSEVKKVTSSPITSEEESNLSNDFIDENGLPINKNENVNGESKRKTVITEVTTMTSTVATESKTVIKVEKGDKQTVVSSTENCAKSTVTTTTTTVTKLSTPSTGGSVDIISVKEQSKTVVTTTVTDSLTTTGGTLVTSMTVSKEYSTRDKVKLMKFSRPKKTRSGTALPSYRKFVTKSSKKSIFVLPNDDLKKLARKGGIREVPYFNYNAKPALDIWPYPSPRPTFGITWRYRLQTVKSLAGVSLMLRLLWASLRWDDMAAKAPPGGGTTRTETSETEITTTEIIKRRDVGPYGIRSEYCIRKIICPIGVPETPKETPTPQRKGLRSSALRPKRPETPKQTGPVIIETWVAEEELELWEIRAFAERVEKEKAQAVEQQAKKRLEQQKPTVIATSTTSPTSSTTSTISPAQKVMVAPISGSVTTGTKMVLTTKVGSPATVTFQQNKNFHQTFATWVKQGQSNSGVVQVQQKVLGIIPSSTGTSQQTFTSFQPRTATVTIRPNTSGSGGTTSNSQVITGPQIRPGMTVIRTPLQQSTLGKAIIRTPVMVQPGAPQQVMTQIIRGQPVSTAVSAPNTVSSTPGQKSLTSATSTSNIQSSASQPPRPQQGQVKLTMAQLTQLTQGHGGNQGLTVVIQGQGQTTGQLQLIPQGVTVLPGPGQQLMQAAMPNGTVQRFLFTPLATTATTASTTTTTVSTTAAGTGEQRQSKLSPQMQVHQDKTLPPAQSSSVGPAEAQPQTAQPSAQPQPQTQPQSPAQPEVQTQPEVQTQTTVSSHVPSEAQPTHAQSSKPQVAAQSQPQSNVQGQSPVRVQSPSQTRIRPSTPSQLSPGQQSQVQTTTSQPIPIQPHTSLQIPSQGQPQSQPQVQSSTQTLSSGQTLNQVTVSSPSRPQLQIQQPQPQVIAVPQLQQQVQVLSQIQSQVVAQIQAQQSGVPQQIKLQLPIQIQQSSAVQTHQIQNVVTVQAASVQEQLQRVQQLRDQQQKKKQQQIEIKREHTLQASNQSEIIQKQVVMKHNAVIEHLKQKKSMTPAEREENQRMIVCNQVMKYILDKIDKEEKQAAKKRKREESVEQKRSKQNATKLSALLFKHKEQLRAEILKKRALLDKDLQIEVQEELKRDLKIKKEKDLMQLAQATAVAAPCPPVTPAPPAPPAPPPSPPPPPAVQHTGLLSTPTLPAASQKRKREEEKDSSSKSKKKKMISTTSKETKKDTKLYCICKTPYDESKFYIGCDRCQNWYHGRCVGILQSEAELIDEYVCPQCQSTEDAMTVLTPLTEKDYEGLKRVLRSLQAHKMAWPFLEPVDPNDAPDYYGVIKEPMDLATMEERVQRRYYEKLTEFVADMTKIFDNCRYYNPSDSPFYQCAEVLESFFVQKLKGFKASRSHNNKLQSTAS

SEQ ID NO: 4023 - protein, 686 aa, Homo sapiens
MGPRSRERRAGAVQNTNDSSALSKRSLAARGYVQDPFAALLVPGAARRAPLIHRGYYVRARAVRHCVRAFLEQIGAPQAALRAQILSLGAGFDSLYFRLKTAGRLARAAVWEVDFPDVARRKAERIGETPELCALTGPFERGEPASALCFESADYCILGLDLRQLQRVEEALGAAGLDAASPTLLLAEAVLTYLEPESAAALIAWAAQRFPNALFVVYEQMRPQDAFGQFMLQHFRQLNSPLHGLERFPDVEAQRRRFLQAGWTACGAVDMNEFYHCFLPAEERRRVENIEPFDEFEEWHLKCAHYFILAASRGDTLSHTLVFPSSEAFPRVNPASPSGVFPASVVSSEGQVPNLKRYGHASVFLSPDVILSAGGFGEQEGRHCRVSQFHLLSRDCDSEWKGSQIGSCGTGVQWDGRLYHTMTRLSESRVLVLGGRLSPVSPALGVLQLHFFKSEDNNTEDLKVTITKAGRKDDSTLCCWRHSTTEVSCQNQEYLFVYGGRSVVEPVLSDWHFLHVGTMAWVRIPVEGEVPEARHSHSACTWQGGALIAGGLGASEEPLNSVLFLRPISCGFLWESVDIQPPITPRYSHTAHVLNGKLLLVGGIWIHSSSFPGVTVINLTTGLSSEYQIDTTYVPWPLMLHNHTSILLPEEQQLLLLGGGGNCFSFGTYFNPHTVTLDLSSLSAGQ

SEQ ID NO: 4024 - protein, 818 aa, Homo sapiens
MAGTRRKSLQNRQVGSLLIFLCISVGDATTIRYSVAEEMESGSFVANVAKDLGLEVGKLAARGARLVSEGNKMHFRLHRKTGDLFVKEKLDRESLCGKADPCVLHFEVVLVEPLQSFRAEVRVFDINDNAPVFLNKEPLLKIPESTPLGSRFPLQSAQDLDVGLNGLQNYTLSANGYFHLHTRFCSHGPKYAELVLNKPLDREEQPEVNLTITAVDGGSPPKSGTAHIHVVVLDVNDHVPQFSRLVYRAQVSENSPNGSLVATVTAVDLDEGTNKAITYSLAQNPEAILKTFQIDPQNGEVRLRGPLDFEAIETYDIDIQATDGGGLSAHSKVLVEVVDVNDNPPEVMVSSVSSPLPEDSPPQTVVALFTIRDRDIRVGGKVTCFLREDLPFVIKPTFGNSYSLVTDRSLDREEVSGYNITIVAMDTGPPSLSAETMIEVLISDVNDNPPIFREDSYILTVRENNSPAVFIGKVHAEDLDLGENAQITYSLLPPKNGDLSVFAYISINSGNGKLYALRTMDYEAIQDFQFVVKATDGGFLSLSSQVTVRVVVLDDNDNRPMILYPLQNGTLPCNDLVPRSAEAGYLVTKVVAVDGDSGQNSWLSYHLLKATDLGLFSVQRQNGEIHTLRQISERDPMMQKLIILVQDHGQPALSTTVSLNILLVDGFSEPYLQFQDPTKHSRKVNPSTKYLVISLVILSFLFLLSVIVIFIIHVYQKIKYREKFTIQEHFYDDCNFSNNLVQGQGNGSLSRPCPYEMCSATGTGNSEFRFLKRFMPNFPFPHATGEIKMEAGSSLPPNSDRNKSQRLEGHDQVSDDYM

SEQ ID NO: 4025 - protein, 1116 aa, Homo sapiens
MERAISPGLLVRALLLLLLLLGLAARTVAAGRARGLPAPTAEAAFGLGAAAAPTSATRVPAAGAVAAAEVTVEDAEALPAAAGEQEPRGPEPDDETELRPRGRSLVIISTLDGRIAALDPENHGKKQWDLDVGSGSLVSSSLSKPEVFGNKMIIPSLDGALFQWDQDRESMETVPFTVESLLESSYKFGDDVVLVGGKSLTTYGLSAYSGKVRYICSALGCRQWDSDEMEQEEDILLLQRTQKTVRAVGPRSGNEKWNFSVGHFELRYIPDMETRAGFIESTFKPNENTEESKIISDVEEQEAAIMDIVIKVSVADWKVMAFSKKGGHLEWEYQFCTPIASAWLLKDGKVIPISLFDDTSYTSNDDVLEDEEDIVEAARGATENSVYLGMYRGQLYLQSSVRISEKFPSSPKALESVTNENAIIPLPTIKWKPLIHSPSRTPVLVGSDEFDKCLSNDKFSHEEYSNGALSILQYPYDNGYYLPYYKRERNKRSTQITVRFLDNPHYNKNIRKKDPVLLLHWWKEIVATILFCIIATTFIVRRLFHPHPHRQRKESETQCQTENKYDSVSGEANDSSWNDIKNSGYISRYLTDFEPIQCLGRGGFGVVFEAKNKVDDCNYAIKRIRLPNRELAREKVMREVKALAKLEHPGIVRYFNAWLEAPPEKWQEKMDEIWLKDESTDWPLSSPSPMDAPSVKIRRMDPFATKEHIEIIAPSPQRSRSFSVGISCDQTSSSESQFSPLEFSGMDHEDISESVDAAYNLQDSCLTDCDVEDGTMDGNDEGHSFELCPSEASPYVRSRERTSSSIVFEDSGCDNASSKEEPKTNRLHIGNHCANKLTAFKPTSSKSSSEATLSISPPRPTTLSLDLTKNTTEKLQPSSPKVYLYIQMQLCRKENLKDWMNGRCTIEERERSVCLHIFLQIAEAVEFLHSKGLMHRDLKPSNIFFTMDDVVKVGDFGLVTAMDQDEEEQTVLTPMPAYARHTGQVGTKLYMSPEQIHGNSYSHKVDIFSLGLILFELLYPFSTQMERVRTLTDVRNLKFPPLFTQKYPCEYVMVQDMLSPSPMERPEAINIIENAVFEDLDFPGKTVLRQRSRSLSSSGTKHSRQSNNSHSPLPSN

SEQ ID NO: 4026 - protein, 529 aa, Homo sapiens
MSRQLNIKSSGDKGNFSVHSAVVPRKAVGSLASYCAAGRGAGAGFGSRSLYSLGGNRRISFNVAGGGVRAGGYGFRPGSGYGGGRASGFAGSMFGSVALGPACLSVCPPGGIHQVTVNKSLLAPLNVELDPEIQKVRAQEREQIKVLNDKFASFIDKVRFLEQQNQVLETKWELLQQLDLNNCKKNLEPILEGYISNLRKQLETLSGDRVRLDSELRSMRDLVEDYKKRYEVEINRRTTAENEFVVLKKDADAAYAVKVELQAKVDSLDKEIKFLKCLYDAEIAQIQTHASETSVILSMDNNRDLDLDSIIAEVRMHYEEIALKSKAEAEALYQTKIQELQLAASRHGDDLKHTRSEMVELNRLIQRIRCEIGNVKKQRASLETAIADAEQRGDNALKDAQAKLDELEGALHQAKEELARMLREYQELMSLKLALDMEIATYRKLLEGEECRMSGENPSSVSISVISSSSYSYHHPSSAGVDLGASAVAGSSGSTQSGQTKTTEARGGDLKDTQGKSTPASIPARKATR

SEQ ID NO: 4027 - protein, 273 aa, Homo sapiens
MLRYPYFCRMYKECLSCWLESGIPNLGVWPNRIHTTAEKYREYEAREQTDQTQAQELHRSQDRDFETMAKLHIPVMVDEVVHCLSPQKGQIFLDMTFGSGGHTKAILQKESDIVLYALDRDPTAYALAEHLSELYPKQIRAMLGQFSQAEALLMKAGVQPGTFDGVLMDLGCSSMQLDTPERGFSLRKDGPLDMRMDGGRYPDMPTAADVVNALDQQALASILRTYGEEKHAKKIASAIVQARSIYPITRTQQLASIVAEYSETYFPVAQTLY

SEQ ID NO: 4028 - protein, 555 aa, Homo sapiens
MQSCESSGDSADDPLSRGLRRRGQPRVVVIGAGLAGLAAAKALLEQGFTDVTVLEASSHIGGRVQSVKLGHATFELGATWIHGSHGNPIYHLAEANGLLEETTDGERSVGRISLYSKNGVACYLTNHGRRIPKDVVEEFSDLYNEVYNLTQEFFRHDKPVNAESQNSVGVFTREEVRNRIRNDPDDPEATKRLKLAMIQQYLKVESCESSSHSMDEVSLSAFGEWTEIPGAHHIIPSGFMRVVELLAEGIPAHVIQLGKPVRCIHWDQASARPRGPEIEPRGEGDHNHDTGEGGQGGEEPRGGRWDEDEQWSVVVECEDCELIPADHVIVTVSLGVLKRQYTSFFRPGLPTEKVAAIHRLGIGTTDKIFLEFEEPFWGPECNSLQFVWEDEAESHTLTYPPELWYRKICGFDVLYPPERYGHVLSGWICGEEALVMEKCDDEAVAEICTEMLRQFTGNPNIPKPRRILRSAWGSNPYFRGSYSYTQVGSSGADVEKLAKPLPYTESSKTAPMQVLFSGEATHRKYYSTTHGALLSGQREAARLIEMYRDLFQQGT

SEQ ID NO: 4029 - protein, 342 aa, Homo sapiens
MQAVDNLTSAPGNTSLCTRDYKITQVLFPLLYTVLFFVGLITNGLAMRIFFQIRSKSNFIIFLKNTVISDLLMILTFPFKILSDAKLGTGPLRTFVCQVTSVIFYFTMYISISFLGLITIDRYQKTTRPFKTSNPKNLLGAKILSVVIWAFMFLLSLPNMILTNRQPRDKNVKKCSFLKSEFGLVWHEIVNYICQVIFWINFLIVIVCYTLITKELYRSYVRTRGVGKVPRKKVNVKVFIIIAVFFICFVPFHFARIPYTLSQTRDVFDCTAENTLFYVKESTLWLTSLNACLDPFIYFFLCKSFRNSLISMLKCPNSATSLSQDNRKKEQDGGDPNEETPM

SEQ ID NO: 4030 - protein, 447 aa, Homo sapiens
MELSQMSELMGLSVLLGLLALMATAAVARGWLRAGEERSGRPACQKANGFPPDKSSGSKKQKQYQRIRKEKPQQHNFTHRLLAAALKSHSGNISCMDFSSNGKYLATCADDRTIRIWSTKDFLQREHRSMRANVELDHATLVRFSPDCRAFIVWLANGDTLRVFKMTKREDGGYTFTATPEDFPKKHKAPVIDIGIANTGKFIMTASSDTTVLIWSLKGQVLSTINTNQMNNTHAAVSPCGRFVASCGFTPDVKVWEVCFGKKGEFQEVVRAFELKGHSAAVHSFAFSNDSRRMASVSKDGTWKLWDTDVEYKKKQDPYLLKTGRFEEAAGAAPCRLALSPNAQVLALASGSSIHLYNTRRGEKEECFERVHGECIANLSFDITGRFLASCGDRAVRLFHNTPGHRAMVEEMQGHLKRASNESTRQRLQQQLTQAQETLKSLGALKK

SEQ ID NO: 4031 - protein, 449 aa, Homo sapiens
MWTALVLIWIFSLSLSESHAASNDPRNFVPNKMWKGLVKRNASVETVDNKTSEDVTMAAASPVTLTKGTSAAHLNSMEVTTEDTSRTDVSEPATSGGAADGVTSIAPTAVASSTTAASITTAASSMTVASSAPTTAASSTTVASIAPTTAASSMTAASSTPMTLALPAPTSTSTGRTPSTTATGHPSLSTALAQVPKSSALPRTATLATLATRAQTVATTANTSSPMSTRPSPSKHMPSDTAASPVPPMRPQAQGPISQVSVDQPVVNTTNKSTPMPSNTTPEPAPTPTVVTTTKAQAREPTASPVPVPHTSPIPEMEAMSPTTQPSPMPYTQRAAGPGTSQAPEQVETEATPGTDSTGPTPRSSGGTKMPATDSCQPSTQGQYMVVTTEPLTQAVVDKTLLLVVLLLGVTLFITVLVLFALQAYESYKKKDYTQVDYLINGMYADSEM

SEQ ID NO: 4032 - protein, 584 aa, Homo sapiens
MASVQASRRQWCYLCDLPKMPWAMVWDFSEAVCRGCVNFEGADRIELLIDAARQLKRSHVLPEGRSPGPPALKHPATKDLAAAAAQGPQLPPPQAQPQPSGTGGGVSGQDRYDRATSSGRLPLPSPALEYTLGSRLANGLGREEAVAEGARRALLGSMPGLMPPGLLAAAVSGLGSRGLTLAPGLSPARPLFGSDFEKEKQQRNADCLAELNEAMRGRAEEWHGRPKAVREQLLALSACAPFNVRFKKDHGLVGRVFAFDATARPPGYEFELKLFTEYPCGSGNVYAGVLAVARQMFHDALREPGKALASSGFKYLEYERRHGSGEWRQLGELLTDGVRSFREPAPAEALPQQYPEPAPAALCGPPPRAPSRNLAPTPRRRKASPEPEGEAAGKMTTEEQQQRHWVAPGGPYSAETPGVPSPIAALKNVAEALGHSPKDPGGGGGPVRAGGASPAASSTAQPPTQHRLVARNGEAEVSPTAGAEAVSGGGSGTGATPGAPLCCTLCRERLEDTHFVQCPSVPGHKFCFPCSREFIKAQGPAGEVYCPSGDKCPLVGSSVPWAFMQGEIATILAGDIKVKKERDP

SEQ ID NO: 4033 - protein, 1161 aa, Homo sapiens
MDEETRHSLECIQANQIFPRKQLIREDENLQVPFLELHGESTEFVGRAEDAIIALSNYRLHIKFKESLVNVPLQLIESVECRDIFQLHLTCKDCKVIRCQFSTFEQCQEWLKRLNNAIRPPAKIEDLFSFAYHAWCMEVYASEKEQHGDLCRPGEHVTSRFKNEVERMGFDMNNAWRISNINEKYKLCGSYPQELIVPAWITDKELESVSSFRSWKRIPAVIYRHQSNGAVIARCGQPEVSWWGWRNADDEHLVQSVAKACASDSRSSGSKLSTRNTSRDFPNGGDLSDVEFDSSLSNASGAESLAIQPQKLLILDARSYAAAVANRAKGGGCECPEYYPNCEVVFMGMANIHSIRRSFQSLRLLCTQMPDPGNWLSALESTKWLHHLSVLLKSALLVVHAVDQDQRPVLVHCSDGWDRTPQIVALAKLLLDPYYRTIEGFQVLVEMEWLDFGHKFADRCGHGENSDDLNERCPVFLQWLDCVHQLQRQFPCSFEFNEAFLVKLVQHTYSCLFGTFLCNNAKERGEKHTQERTCSVWSLLRAGNKAFKNLLYSSQSEAVLYPVCHVRNLMLWSAVYLPCPSPTTPVDDSCAPYPAPGTSPDDPPLSRLPKTRSYDNLTTACDNTVPLASRRCSDPSLNEKWQEHRRSLELSSLAGPGEDPLSADSLGKPTRVPGGAELSVAAGVAEGQMENILQEATKEESGVEEPAHRAGIEIQEGKEDPLLEKESRRKTPEASAIGLHQDPELGDAALRSHLDMSWPLFSQGISEQQSGLSVLLSSLQVPPRGEDSLEVPVEQFRIEEIAEGREEAVLPIPVDAKVGYGTSQSCSLLPSQVPFETRGPNVDSSTDMLVEDKVKSVSGPQGHHRSCLVNSGKDRLPQTMEPSPSETSLVERPQVGSVVHRTSLGSTLSLTRSPCALPLAECKEGLVCNGAPETENRASEQPPGLSTLQMYPTPNGHCANGEAGRSKDSLSRQLSAMSCSSAHLHSRNLHHKWLHSHSGRPSATSSPDQPSRSHLDDDGMSVYTDTIQQRLRQIESGHQQEVETLKKQVQELKSRLESQYLTSSLHFNGDFGDEVMTRWLPDHLAAHCYACDSAFWLASRKHHCRNCGNVFCSSCCNQKVPVPSQQLFEPSRVCKSCYSSLHPTSSSIDLELDKPIAATSN

SEQ ID NO: 4034 - protein, 1335 aa, Homo sapiens
MESEMLQSPLLGLGEEDEADLTDWNLPLAFMKKRHCEKIEGSKSLAQSWRMKDRMKTVSVALVLCLNVGVDPPDVVKTTPCARLECWIDPLSMGPQKALETIGANLQKQYENWQPRARYKQSLDPTVDEVKKLCTSLRRNAKEERVLFHYNGHGVPRPTVNGEVWVFNKNYTQYIPLSIYDLQTWMGSPSIFVYDCSNAGLIVKSFKQFALQREQELEVAAINPNHPLAQMPLPPSMKNCIQLAACEATELLPMIPDLPADLFTSCLTTPIKIALRWFCMQKCVSLVPGVTLDLIEKIPGRLNDRRTPLGELNWIFTAITDTIAWNVLPRDLFQKLFRQDLLVASLFRNFLLAERIMRSYNCTPVSSPRLPPTYMHAMWQAWDLAVDICLSQLPTIIEEGTAFRHSPFFAEQLTAFQVWLTMGVENRNPPEQLPIVLQVLLSQVHRLRALDLLGRFLDLGPWAVSLALSVGIFPYVLKLLQSSARELRPLLVFIWAKILAVDSSCQADLVKDNGHKYFLSVLADPYMPAEHRTMTAFILAVIVNSYHTGQEACLQGNLIAICLEQLNDPHPLLRQWVAICLGRIWQNFDSARWCGVRDSAHEKLYSLLSDPIPEVRCAAVFALGTFVGNSAERTDHSTTIDHNVAMMLAQLVSDGSPMVRKELVVALSHLVVQYESNFCTVALQFIEEEKNYALPSPATTEGGSLTPVRDSPCTPRLRSVSSYGNIRAVATARSLNKSLQNLSLTEESGGAVAFSPGNLSTSSSASSTLGSPENEEHILSFETIDKMRRASSYSSLNSLIGVSFNSVYTQIWRVLLHLAADPYPEVSDVAMKVLNSIAYKATVNARPQRVLDTSSLTQSAPASPTNKGVHIHQAGGSPPASSTSSSSLTNDVAKQPVSRDLPSGRPGTTGPAGAQYTPHSHQFPRTRKMFDKGPEQTADDADDAAGHKSFISATVQTGFCDWSARYFAQPVMKIPEEHDLESQIRKEREWRFLRNSRVRRQAQQVIQKGITRLDDQIFLNRNPGVPSVVKFHPFTPCIAVADKDSICFWDWEKGEKLDYFHNGNPRYTRVTAMEYLNGQDCSLLLTATDDGAIRVWKNFADLEKNPEMVTAWQGLSDMLPTTRGAGMVVDWEQETGLLMSSGDVRIVRIWDTDREMKVQDIPTGADSCVTSLSCDSHRSLIVAGLGDGSIRVYDRRMALSECRVMTYREHTAWVVKASLQKRPDGHIVSVSVNGDVRIFDPRMPESVNVLQIVKGLTALDIHPQADLIACGSVNQFTAIYNSSGELINNIKYYDGFMGQRVGAISCLAFHPHWPHLAVGSNDYYISVYSVEKRVR

SEQ ID NO: 4035 - protein, 719 aa, Homo sapiens
MALKDYALEKEKVKKFLQEFYQDDELGKKQFKYGNQLVRLAHREQVALYVDLDDVAEDDPELVDSICENARRYAKLFADAVQELLPQYKEREVVNKDVLDVYIEHRLMMEQRSRDPGMVRSPQNQYPAELMRRFELYFQGPSSNKPRVIREVRADSVGKLVTVRGIVTRVSEVKPKMVVATYTCDQCGAETYQPIQSPTFMPLIMCPSQECQTNRSGGRLYLQTRGSRFIKFQEMKMQEHSDQVPVGNIPRSITVLVEGENTRIAQPGDHVSVTGIFLPILRTGFRQVVQGLLSETYLEAHRIVKMNKSEDDESGAGELTREELRQIAEEDFYEKLAASIAPEIYGHEDVKKALLLLLVGGVDQSPRGMKIRGNINICLMGDPGVAKSQLLSYIDRLAPRSQYTTGRGSSGVGLTAAVLRDSVSGELTLEGGALVLADQGVCCIDEFDKMAEADRTAIHEVMEQQTISIAKAGILTTLNARCSILAAANPAYGRYNPRRSLEQNIQLPAALLSRFDLLWLIQDRPDRDNDLRLAQHITYVHQHSRQPPSQFEPLDMKLMRRYIAMCREKQPMVPESLADYITAAYVEMRREAWASKDATYTSARTLLAILRLSTALARLRMVDVVEKEDVNEAIRLMEMSKDSLLGDKGQTARTQRPADVIFATVRELVSGGRSVRFSEAEQRCVSRGFTPAQFQAALDEYEELNVWQVNASRTRITFV

SEQ ID NO: 4036 - protein, 627 aa, Homo sapiens
MEGLAGYVYKAASEGKVLTLAALLLNRSESDIRYLLGYVSQQGGQRSTPLIIAARNGHAKVVRLLLEHYRVQTQQTGTVRFDGYVIDGATALWCAAGAGHFEVVKLLVSHGANVNHTTVTNSTPLRAACFDGRLDIVKYLVENNANISIANKYDNTCLMIAAYKGHTDVVRYLLEQRADPNAKAHCGATALHFAAEAGHIDIVKELIKWRAAIVVNGHGMTPLKVAAESCKADVVELLLSHADCDRRSRIEALELLGASFANDRENYDIIKTYHYLYLAMLERFQDGDNILEKEVLPPIHAYGNRTECRNPQELESIRQDRDALHMEGLIVRERILGADNIDVSHPIIYRGAVYADNMEFEQCIKLWLHALHLRQKGNRNTHKDLLRFAQVFSQMIHLNETVKAPDIECVLRCSVLEIEQSMNRVKNISDADVHNAMDNYECNLYTFLYLVCISTKTQCSEEDQCKINKQIYNLIHLDPRTREGFTLLHLAVNSNTPVDDFHTNDVCSFPNALVTKLLLDCGAEVNAVDNEGNSALHIIVQYNRPISDFLTLHSIIISLVEAGAHTDMTNKQNKTPLDKSTTGVSEILLKTQMKMSLKCLAARAVRANDINYQDQIPRTLEEFVGFH

SEQ ID NO: 4037 - protein, 860 aa, Homo sapiens
MAPPSTREPRVLSATSATKSDGEMVLPGFPDADSFVKFALGSVVAVTKASGGLPQFGDEYDFYRSFPGFQAFCETQGDRLLQCMSRVMQYHGCRSNIKDRSKVTELEDKFDLLVDANDVILERVGILLDEASGVNKNQQPVLPAGLQVPKTVVSSWNRKAAEYGKKAKSETFRLLHAKNIIRPQLKFREKIDNSNTPFLPKIFIKPNAQKPLPQALSKERRERPQDRPEDLDVPPALADFIHQQRTQQVEQDMFAHPYQYELNHFTPADAVLQKPQPQLYRPIEETPCHFISSLDELVELNEKLLNCQEFAVDLEHHSYRSFLGLTCLMQISTRTEDFIIDTLELRSDMYILNESLTDPAIVKVFHGADSDIEWLQKDFGLYVVNMFDTHQAARLLNLGRHSLDHLLKLYCNVDSNKQYQLADWRIRPLPEEMLSYARDDTHYLLYIYDKMRLEMWERGNGQPVQLQVVWQRSRDICLKKFIKPIFTDESYLELYRKQKKHLNTQQLTAFQLLFAWRDKTARREDESYGYVLPNHMMLKIAEELPKEPQGIIACCNPVPPLVRQQINEMHLLIQQAREMPLLKSEVAAGVKKSGPLPSAERLENVLFGPHDCSHAPPDGYPIIPTSGSVPVQKQASLFPDEKEDNLLGTTCLIATAVITLFNEPSAEDSKKGPLTVAQKKAQNIMESFENPFRMISNRWKLAQVQVQKDSKEAVKKKAAEQTAAREQAKEACKAAAEQAISVRQQVVLENAAKKRERATSDPRTTEQKQEKKRLKISKKPKDPEPPEKEFTPYDYSQSDFKAFAGNSKSKVSSQFDPNKQTPSGKKCIAAKKIKQSVGNKSMSFPTGKSDRGFRYNWPQR

SEQ ID NO: 4038 - protein, 310 aa, Homo sapiens
MAAAVAAAPGALGSLHAGGARLVAACSAWLCPGLRLPGSLAGRRAGPAIWAQGWVPAAGGPAPKRGYSSEMKTEDELRVRHLEEENRGIVVLGINRAYGKNSLSKNLIKMLSKAVDALKSDKKVRTIIIRSEVPGIFCAANLPVPTIAAIDGLALGGGLELALACDIRVAASSAKMGLVETKLAIIPGGGGTQRLPRAIGMSLAKELIFSARVLDGKEAKAVGLISHVLEQNQEGDAAYRKALDLAREFLPQGPVAMRVAKLAINQGMEVDLVTGLAIEEACYAQTIPTKDRLEGLLAFKEKRPPRYKGE

SEQ ID NO: 4039 - protein, 206 aa, Homo sapiens
MAEDADMRNELEEMQRRADQLADESLESTRRMLQLVEESKDAGIRTLVMLDEQGEQLDRVEEGMNHINQDMKEAEKNLKDLGKCCGLFICPCNKLKSSDAYKKAWGNNQDGVVASQPARVVDEREQMAISGGFIRRVTNDARENEMDENLEQVSGIIGNLRHMALDMGNEIDTQNRQIDRIMEKADSNKTRIDEANQRATKMLGSG

SEQ ID NO: 4040 - protein, 890 aa, Homo sapiens
MEGGGKPNSSSNSRDDGNSVFPAKASATGAGPAAAEKRLGTPPGGGGAGAKEHGNSVCFKVDGGGGGGGGGGGGEEPAGGFEDAEGPRRQYGFMQRQFTSMLQPGVNKFSLRMFGSQKAVEKEQERVKTAGFWIIHPYSDFRFYWDLIMLIMMVGNLVIIPVGITFFTEQTTTPWIIFNVASDTVFLLDLIMNFRTGTVNEDSSEIILDPKVIKMNYLKSWFVVDFISSIPVDYIFLIVEKGMDSEVYKTARALRIVRFTKILSLLRLLRLSRLIRYIHQWEEIFHMTYDLASAVVRIFNLIGMMLLLCHWDGCLQFLVPLLQDFPPDCWVSLNEMVNDSWGKQYSYALFKAMSHMLCIGYGAQAPVSMSDLWITMLSMIVGATCYAMFVGHATALIQSLDSSRRQYQEKYKQVEQYMSFHKLPADMRQKIHDYYEHRYQGKIFDEENILNELNDPLREEIVNFNCRKLVATMPLFANADPNFVTAMLSKLRFEVFQPGDYIIREGAVGKKMYFIQHGVAGVITKSSKEMKLTDGSYFGEICLLTKGRRTASVRADTYCRLYSLSVDNFNEVLEEYPMMRRAFETVAIDRLDRIGKKNSILLQKFQKDLNTGVFNNQENEILKQIVKHDREMVQAIAPINYPQMTTLNSTSSTTTPTSRMRTQSPPVYTATSLSHSNLHSPSPSTQTPQPSAILSPCSYTTAVCSPPVQSPLAARTFHYASPTASQLSLMQQQPQQQVQQSQPPQTQPQQPSPQPQTPGSSTPKNEVHKSTQALHNTNLTREVRPLSASQPSLPHEVSTLISRPHPTVGESLASIPQPVTAVPGTGLQAGGRSTVPQRVTLFRQMSSGAIPPNRGVPPAPPPPAAALPRESSSVLNTDPDAEKPRFASNL

SEQ ID NO: 4041 - protein, 995 aa, Homo sapiens
MEDEAVLDRGASFLKHVCDEEEVEGHHTIYIGVHVPKSYRRRRRHKRKTGHKEKKEKERISENYSDKSDIENADESSSSILKPLISPAAERIRFILGEEDDSPAPPQLFTELDELLAVDGQEMEWKETARWIKFEEKVEQGGERWSKPHVATLSLHSLFELRTCMEKGSIMLDREASSLPQLVEMIVDHQIETGLLKPELKDKVTYTLLRKHRHQTKKSNLRSLADIGKTVSSASRMFTNPDNGSPAMTHRNLTSSSLNDISDKPEKDQLKNKFMKKLPRDAEASNVLVGEVDFLDTPFIAFVRLQQAVMLGALTEVPVPTRFLFILLGPKGKAKSYHEIGRAIATLMSDEVFHDIAYKAKDRHDLIAGIDEFLDEVIVLPPGEWDPAIRIEPPKSLPSSDKRKNMYSGGENVQMNGDTPHDGGHGGGGHGDCEELQRTGRFCGGLIKDIKRKAPFFASDFYDALNIQALSAILFIYLATVTNAITFGGLLGDATDNMQGVLESFLGTAVSGAIFCLFAGQPLTILSSTGPVLVFERLLFNFSKDNNFDYLEFRLWIGLWSAFLCLILVATDASFLVQYFTRFTEEGFSSLISFIFIYDAFKKMIKLADYYPINSNFKVGYNTLFSCTCVPPDPANISISNDTTLAPEYLPTMSSTDMYHNTTFDWAFLSKKECSKYGGNLVGNNCNFVPDITLMSFILFLGTYTSSMALKKFKTSPYFPTTARKLISDFAIILSILIFCVIDALVGVDTPKLIVPSEFKPTSPNRGWFVPPFGENPWWVCLAAAIPALLVTILIFMDQQITAVIVNRKEHKLKFIPMPVLYGVFLYMGVASLNGVQFMDRLKLLLMPLKHQPDFIYLRHVPLRRVHLFTFLQVLCLALLWILKSTVAAIIFPVMILALVAVRKGMDYLFSQHDLSFLDDVIPEKDKKKKEDEKKKKKKKGSLDSDNDDSDCPYSEKVPSIKIPMDIMEQQPFLSDSKPSDRERSPTFLERHTSC

SEQ ID NO: 4042 - protein, 713 aa, Homo sapiens
MDLLTRENVALKVESAQQPKQVLKMEVAVLKKLQGKDHVCRFIGCGRNEKFNYVVMQLQGRNLADLRRSQPRGTFTLSTTLRLGKQILESIEAIHSVGFLHRDIKPSNFAMGRLPSTYRKCYMLDFGLARQYTNTTGDVRPPRNVAGFRGTVRYASVNAHKNREMGRHDDLWSLFYMLVEFAVGQLPWRKIKDKEQVGMIKEKYEHRMLLKHMPSEFHLFLDHIASLDYFTKPDYQLIMSVFENSMKERGIAENEAFDWEKAGTDALLSTSTSTPPQQNTRQTAAMFGVVNVTPVPGDLLRENTEDVLQGEHLSDQENAPPILPGRPSEGLGPSPHLVPHPGGPEAEVWEETDVNRNKLRINIGKSPCVEEEQSRGMGVPSSPVRAPPDSPTTPVRSLRYRRVNSPESERLSTADGRVELPERRSRMDLPGSPSRQACSSQPAQMLSVDTGHADRQASGRMDVSASVEQEALSNAFRSVPLAEEEDFDSKEWVIIDKETELKDFPPGAEPSTSGTTDEEPEELRPLPEEGEERRRLGAEPTVRPRGRSMQALAEEDLQHLPPQPLPPQLSQGDGRSETSQPPTPGSPSHSPLHSGPRPRRRESDPTGPQRQLEEDRLSGHSLPRYSPLRRLASSVFSSSTLETEHYPHPGGGGSSGSSGSLIQRSRSAESSPVRAPHRRHAPLAAGNHRLMPSVLRISRSQLQQVWARFTHKT

SEQ ID NO: 4043 - protein, 495 aa, Homo sapiens
MQWSPTPGASACLGWASSLACSTAPTLLGRAGRGPLMAAKWFKEFPLNLKTVSERAKPGGGGGKLRKNSEAGGAGPGPGKGRKNSAAELGSGRAGVGPKDSRLSRDSLQGLIQAAAGKGRKNSRATEEEPHRGATKSSGCSTYINRLIKVDTQEKNGKSNYPSSSSSSSSSSSSASSSPSSLGPELDKGKIIKQQETVIILEDYADPYDAKRTKGQRDAERVGENDGYMEPYDAQQMITEIRRRGSKDPLVKALQLLDSPCEPADGGLKSETLAKRRSSKDLLGKPPQLYDTPYEPAEGGPRAEGKARPPDSRLPENDERPAAEYEQPWEWKKEQIVRALSVQFEGAERPSFREETVRQHHRQKSWTQKILKPALSDHSEGEKVDPGLPLEKQPWYHGAISRAEAESRLQPCKEAGYLVRNSESGNSRYSIALKTSQGCVHIIVAQTKDNKYTLNQTSAVFDSIPEVVHYYSNEKLPFKGAEHMTLLYPVHSKLH

SEQ ID NO: 4044 - protein, 868 aa, Homo sapiens
MATFISVQLKKTSEVDLAKPLVKFIQQTYPSGGEEQAQYCRAAEELSKLRRAAVGRPLDKHEGALETLLRYYDQICSIEPKFPFSENQICLTFTWKDAFDKGSLFGGSVKLALASLGYEKSCVLFNCAALASQIAAEQNLDNDEGLKIAAKHYQFASGAFLHIKETVLSALSREPTVDISPDTVGTLSLIMLAQAQEVFFLKATRDKMKDAIIAKLANQAADYFGDAFKQCQYKDTLPKEVFPVLAAKHCIMQANAEYHQSILAKQQKKFGEEIARLQHAAELIKTVASRYDEYVNVKDFSDKINRALAAAKKDNDFIYHDRVPDLKDLDPIGKATLVKSTPVNVPISQKFTDLFEKMVPVSVQQSLAAYNQRKADLVNRSIAQMREATTLANGVLASLNLPAAIEDVSGDTVPQSILTKSRSVIEQGGIQTVDQLIKELPELLQRNREILDESLRLLDEEEATDNDLRAKFKERWQRTPSNELYKPLRAEGTNFRTVLDKAVQADGQVKECYQSHRDTIVLLCKPEPELNAAIPSANPAKTMQGSEVVNVLKSLLSNLDEVKKEREGLENDLKSVNFDMTSKFLTALAQDGVINEEALSVTELDRVYGGLTTKVQESLKKQEGLLKNIQVSHQEFSKMKQSNNEANLREEVLKNLATAYDNFVELVANLKEGTKFYNELTEILVRFQNKCSDIVFARKTERDELLKDLQQSIAREPSAPSIPTPAYQSSPAGGHAPTPPTPAPRTMPPTKPQPPARPPPPVLPANRAPSATAPSPVGAGTAAPAPSQTPGSAPPPQAQGPPYPTYPGYPGYCQMPMPMGYNPYAYGQYNMPYPPVYHQSPGQAPYPGPQQPSYPFPQPPQQSYYPQQ

SEQ ID NO: 4045 - protein, 1068 aa, Homo sapiens
MVSSDRPVSLEDEVSHSMKEMIGGCCVCSDERGWAENPLVYCDGHGCSVAVHQACYGIVQVPTGPWFCRKCESQERAARVRCELCPHKDGALKRTDNGGWAHVVCALYIPEVQFANVSTMEPIVLQSVPHDRYNKTCYICDEQGRESKAATGACMTCNKHGCRQAFHVTCAQFAGLLCEEEGNGADNVQYCGYCKYHFSKLKKSKRGSNRSYDQSLSDSSSHSQDKHHEKEKKKYKEKDKHKQKHKKQPEPSPALVPSLTVTTEKTYTSTSNNSISGSLKRLEDTTARFTNANFQEVSAHTSSGKDVSETRGSEGKGKKSSAHSSGQRGRKPGGGRNPGTTVSAASPFPQGSFSGTPGSVKSSSGSSVQSPQDFLSFTDSDLRNDSYSHSQQSSATKDVHKGESGSQEGGVNSFSTLIGLPSTSAVTSQPKSFENSPGDLGNSSLPTAGYKRAQTSGIEEETVKEKKRKGNKQSKHGPGRPKGNKNQENVSHLSVSSASPTSSVASAAGSITSSSLQKSPTLLRNGSLQSLSVGSSPVGSEISMQYRHDGACPTTTFSELLNAIHNGIYNSNDVAVSFPNVVSGSGSSTPVSSSHLPQQSSGHLQQVGALSPSAVSSAAPAVATTQANTLSGSSLSQAPSHMYGNRSNSSMAALIAQSENNQTDQDLGDNSRNLVGRGSSPRGSLSPRSPVSSLQIRYDQPGNSSLENLPPVAASIEQLLERQWSEGQQFLLEQGTPSDILGMLKSLHQLQVENRRLEEQIKNLTAKKERLQLLNAQLSVPFPTITANPSPSHQIHTFSAQTAPTTDSLNSSKSPHIGNSFLPDNSLPVLNQDLTSSGQSTSSSSALSTPPPAGQSPAQQGSGVSGVQQVNGVTVGALASGMQPVTSTIPAVSAVGGIIGALPGNQLAINGIVGALNGVMQTPVTMSQNPTPLTHTTVPPNATHPMPATLTNSASGLGLLSDQQRQILIHQQQFQQLLNSQQLTPEQHQAFLYQLMQHHHQQHHQPELQQLQIPGPTQIPINNLLAGTQAPPLHTATTNPFLTIHGDNASQKVARLSDKTGPVAQEKS

SEQ ID NO: 4046 - protein, 960 aa, Homo sapiens
MLVVEAKFDGEQLATDPVDHTDQPEFATELAWEIDRKALHQHRLQRTPIKLQCFALDPVTSAKETIGYIVLDLRTAQETKQAPKWYQLLSNKYTKFKSEIQISIALETDTKPPVDSFKAKGAPPRDGKVPAILAGLDPRDIVAVLNEEGGYHQIGPAEYCTDSFIMSVTIAFATQLEQLIPCTMKLPERQPEFFFYYSLLGNDVTNEPFNDLINPNFEPERASVRIRSSVEILRVYLALQSKLQIHLCCGDQSLGSTEIPLTGLLKKGSTEINQHPVTVEGAFTLDPPNRAKQKLAPIPVELAPTVGVSVALQREGIDSQSLIELKTQNEHEPEHSKKKVLTPIKEKTLTGPKSPTVSPVPSHNQSPPTKDDATESEVESLQYDKDTKPNPKASSSVPASLAQLVTTSNASEVASGQKIAVPATSHHFCFSIDLRSIHALEIGFPINCILRYSYPFFGSAAPIMTNPPVEVRKNMEVFLPQSYCAFDFATMPHQLQDTFLRIPLLVELWHKDKMSKDLLLGIARIQLSNILSSEKTRFLGSNGEQCWRQTYSESVPVIAAQGSNNRIADLSYTVTLEDYGLVKMREIFISDSSQGVSAVQQKPSSLPPAPCPSEIQTEPRETLEYKAALELEMWKEMQEDIFENQLKQKELAHMQALAEEWKKRDRERESLVKKKVAEYTILEGKLQKTLIDLEKREQQLASVESELQREKKELQSERQRNLQELQDSIRRAKEDCIHQVELERLKIKQLEEDKHRLQQQLNDAENKYKILEKEFQQFKDQQNNKPEIRLQSEINLLTLEKVELERKLESATKSKLHYKQQWGRALKELARLKQREQESQMARLKKQQEELEQMRLRYLAAEEKDTVKTERQELLDIRNELNRLRQQEQKQYQDSTEIASGKKDGPHGSVLEEGLDDYLTRLIEERDTLMRTGVYNHEDRIISELDRQIREILAKSNASN

SEQ ID NO: 4047 - protein, 432 aa, Homo sapiens
MASPVAAQAGKLLRALALRPRFLAAGSQAVQLTSRRWLNLQEYQSKKLMSDNGVRVQRFFVADTANEALEAAKRLNAKEIVLKAQILAGGRGKGVFNSGLKGGVHLTKDPNVVGQLAKQMIGYNLATKQTPKEGVKVNKVMVAEALDISRETYLAILMDRSCNGPVLVGSPQGGVDIEEVAASNPELIFKEQIDIFEGIKDSQAQRMAENLGFVGPLKSQAADQITKLYNLFLKIDATQVEVNPFGETPEGQVVCFDAKINFDDNAEFRQKDIFAMDDKSENEPIENEAAKYDLKYIGLDGNIACFVNGAGLAMATCDIIFLNGGKPANFLDLGGGVKEAQVYQAFKLLTADPKVEAILVNIFGGIVNCAIIANGITKACRELELKVPLVVRLEGTNVQEAQKILNNSGLPITSAIDLEDAAKKAVASVAKK

SEQ ID NO: 4048 - protein, 547 aa, Homo sapiens
MAFQDLLDQVGGLGRFQILQMVFLIMFNVIVYHQTQLENFAAFILDHRCWVHILDNDTIPDNDPGTLSQDALLRISIPFDSNLRPEKCRRFVHPQWKLIHLNGTFPNTSEPDTEPCVDGWVYDQSSFPSTIVTKWDLVCESQPLNSVAKFLFMAGMMVGGNLYGHLSDRFGRKFVLRWSYLQLAIVGTCAAFAPTILVYCSLRFLAGAATFSIIVNTVLLIVEWITHQFCAMALTLTLCAASIGHITLGSLAFVIRDQCILQLVMSAPCFVFFLFSRWLAESARWLIINNKPEEGLKELRKAAHRNGMKNAEDILTMEVLKSTMKQELEAAQKKHSLCELLRIPNICKRICFLSFVRFASTIPFWGLTLHLQHLGNNVFLLQTLFGAVTLLANCVAPWALNHMSRRLSQMLLMFLLATCLLAIIFVPQEMQTLRVVLATLGVGAASLGITCSTAQENELIPSIIRGRATGITGNFANIGGALASLMMILSIYSRPLPWIIYGVFAILSGLVVLLLPETRNQPLLDSIQDVENEGVNSLAAPQRSSVL

SEQ ID NO: 4049 - protein, 916 aa, Homo sapiens
METSQETSLFLVKILEELDSKQNTVSYQDLCKSLCARFDLSQLAKLRSVLFYTACLDPNFPATLFKDKMKCTVNNQQSKKIMVAADIVTIFNLIQMNGGAAKEKLPTGRQKVRKKEASFESCRSDTEICNAAECEPLNCELSERSFSRGYPIRQSSKCRKMDCKDCPQFVPASEPNFLLGVSKEVKNRAASLDRLQALAPYSVTSPQPCEMQRTYFPMNIENESISDQDSLPINQSIKETFISNEEPFVVQSCVQKRNIFKEDFHNLMAVSPSLVGPISKAENEHREPQSRKEPHKPPFFNHSFEMPYNSQYLNPVYSPVPDKRRAKHESLDDLQASTYFGPTPVMGTQEARRCLGKPNKQTPWPAKSWSLNTEEVPDFERSFFNRNPSEEKLHYPNASSQTPNFPAPERRPTYLVPKDQQPILPIAYAAKQNGLKSKEISSPVDLEKHEPVKKFKDKSINCTSGQLSSDTSSVGTQTEHVLEPKKCRDLCTSGQGKYSDRHTMKHSDDDSEIVSDDISDIFRFLDDMSISGSTGVIQSSCYNSTGSLSQLHKSDCDSSPEHNLTKIANGVPNSKGDKGNRPENTHHSEEELKTSVCKLVLRIGEIERKLESLSGVRDEISQVLGKLNKLDQKMQQPEKVSVQIDLNSLTSEGPSDDSASPRMFHAHSGSHGPKLENNPDWCCSDASGSNSESLRVKALKKSLFTRPSSRSLTEENSATESKIASISNSPRDWRTITYTNRVGLNEEEIKDTGPGDNKDWHRKSKEADRQYDIPPQHRLPKQPKDGFLVEQVFSPHPYPASLKAHMKSNPLYTDMRLTELAEVKRGQPSWTIEEYARNAGDKGKLTALDLQTQESLNPNNLEYWMEDIYTPGYDSLLKRKEAEFRRAKVCKIAALIAAAACTVILVIVVPICTMKS

SEQ ID NO: 4050 - protein, 439 aa, Homo sapiens
MRGEQGAAGARVLQFTNCRILRGGKLLREDLWVRGGRILDPEKLFFEERRVADERRDCGGRILAPGFIDVQINGGFGVDFSQATEDVGSGVALVARRILSHGVTSFCPTLVTSPPEVYHKVVPQIPVKSGGPHGAGVLGLHLEGPFISREKRGAHPEAHLRSFEADAFQDLLATYGPLDNVRIVTLAPELGRSHEVIRALTARGICVSLGHSVADLRAAEDAVWSGATFITHLFNAMLPFHHRDPGIVGLLTSDRLPAGRCIFYGMIADGTHTNPAALRIAHRAHPQGLVLVTDAIPALGLGNGRHTLGQQEVEVDGLTAYVAGERPDPLGPRSQPACQVAHDPPRACPLCSQGTKTLSGSIAPMDVCVRHFLQATGCSMESALEAASLHPAQLLGLEKSKGTLDFGADADFVVLDDSLHVQATYISGELVWQADAARQ

SEQ ID NO: 4051 - protein, 677 aa, Homo sapiens
MAAHHRQNTAGRRKVQVSYVIRDEVEKYNRNGVNALQLDPALNRLFTAGRDSIIRIWSVNQHKQDPYIASMEHHTDWVNDIVLCCNGKTLISASSDTTVKVWNAHKGFCMSTLRTHKDYVKALAYAKDKELVASAGLDRQIFLWDVNTLTALTASNNTVTTSSLSGNKDSIYSLAMNQLGTIIVSGSTEKVLRVWDPRTCAKLMKLKGHTDNVKALLLNRDGTQCLSGSSDGTIRLWSLGQQRCIATYRVHDEGVWALQVNDAFTHVYSGGRDRKIYCTDLRNPDIRVLICEEKAPVLKMELDRSADPPPAIWVATTKSTVNKWTLKGIHNFRASGDYDNDCTNPITPLCTQPDQVIKGGASIIQCHILNDKRHILTKDTNNNVAYWDVLKACKVEDLGKVDFEDEIKKRFKMVYVPNWFSVDLKTGMLTITLDESDCFAAWVSAKDAGFSSPDGSDPKLNLGGLLLQALLEYWPRTHVNPMDEEENEVNHVNGEQENRVQKGNGYFQVPPHTPVIFGEAGGRTLFRLLCRDSGGETESMLLNETVPQWVIDITVDKNMPKFNKIPFYLQPHASSGAKTLKKDRLSASDMLQVRKVMEHVYEKIINLDNESQTTSSSNNEKPGEQEKEEDIAVLAEEKIELLCQDQVLDPNMDLRTVKHFIWKSGGDLTLHYRQKST

SEQ ID NO: 4052 - protein, 452 aa, Homo sapiens
MVQGGFPEKIRQRYADLPGELHIIELEKDKNGLGLSLAGNKDRSRMSIFVVGINPEGPAAADGRMRIGDELLEINNQILYGRSHQNASAIIKTAPSKVKLVFIRNEDAVNQMAVTPFPVPSSSPSSIEDQSGTEPISSEEDGSVEVGIKQLPESESFKLAVSQMKQQKYPTKVSFSSQEIPLAPASSYHSTDADFTGYGGFQAPLSVDPATCPIVPGQEMIIEISKGRSGLGLSIVGGKDTPLFWRLGSPRAWSQHLVRAFMLHHPVTEVEGQNAIVIHEVYEEGAAARDGRLWAGDQILEVNGVDLRNSSHEEAITALRQTPQKVRLVVYRDEAHYRDEENLEIFPVDLQKKAGRGLGLSIVGKRNGSGVFISDIVKGGAADLDGRLIQGDQILSVNGEDMRNASQETVATILKCAQGLVQLEIGRLRAGSWTSARTTSQNSQVVDGFSSD

SEQ ID NO: 4053 - protein, 1479 aa, Homo sapiens
MGPGRPAPAPWPRHLLRCVLLLGCLHLGRPGAPGDAALPEPNVFLIFSHGLQGCLEAQGGQVRVTPACNTSLPAQRWKWVSRNRLFNLGTMQCLGTGWPGTNTTASLGMYECDREALNLRWHCRTLGDQLSLLLGARTSNISKPGTLERGDQTRSGQWRIYGSEEDLCALPYHEVYTIQGNSHGKPCTIPFKYDNQWFHGCTSTGREDGHLWCATTQDYGKDERWGFCPIKSNDCETFWDKDQLTDSCYQFNFQSTLSWREAWASCEQQGADLLSITEIHEQTYINGLLTGYSSTLWIGLNDLDTSGGWQWSDNSPLKYLNWESDQPDNPSEENCGVIRTESSGGWQNRDCSIALPYVCKKKPNATAEPTPPDRWANVKVECEPSWQPFQGHCYRLQAEKRSWQESKKACLRGGGDLVSIHSMAELEFITKQIKQEVEELWIGLNDLKLQMNFEWSDGSLVSFTHWHPFEPNNFRDSLEDCVTIWGPEGRWNDSPCNQSLPSICKKAGQLSQGAAEEDHGCRKGWTWHSPSCYWLGEDQVTYSEARRLCTDHGSQLVTITNRFEQAFVSSLIYNWEGEYFWTALQDLNSTGSFFWLSGDEVMYTHWNRDQPGYSRGGCVALATGSAMGLWEVKNCTSFRARYICRQSLGTPVTPELPGPDPTPSLTGSCPQGWASDTKLRYCYKVFSSERLQDKKSWVQAQGACQELGAQLLSLASYEEEHFVANMLNKIFGESEPEIHEQHWFWIGLNRRDPRGGQSWRWSDGVGFSYHNFDRSRHDDDDIRGCAVLDLASLQWVAMQCDTQLDWICKIPRGTDVREPDDSPQGRREWLRFQEAEYKFFEHHSTWAQAQRICTWFQAELTSVHSQAELDFLSHNLQKFSRAQEQHWWIGLHTSESDGRFRWTDGSIINFISWAPGKPRPVGKDKKCVYMTASREDWGDQRCLTALPYICKRSNVTKETQPPDLPTTALGGCPSDWIQFLNKCFQVQGQEPQSRVKWSEAQFSCEQQEAQLVTITNPLEQAFITASLPNVTFDLWIGLHASQRDFQWVEQEPLMYANWAPGEPSGPSPAPSGNKPTSCAVVLHSPSAHFTGRWDDRSCTEETHGFICQKGTDPSLSPSPAALPPAPGTELSYLNGTFRLLQKPLRWHDALLLCESRNASLAYVPDPYTQAFLTQAARGLRTPLWIGLAGEEGSRRYSWVSEEPLNYVGWQDGEPQQPGGCTYVDVDGAWRTTSCDTKLQGAVCGVSSGPPPPRRISYHGSCPQGLADSAWIPFREHCYSFHMELLLGHKEARQRCQRAGGAVLSILDEMENVFVWEHLQSYEGQSRGAWLGMNFNPKGGTLVWQDNTAVNYSNWGPPGLGPSMLSHNSCYWIQSNSGLWRPGACTNITMGVVCKLPRAEQSSFSPSALPENPAALVVVLMAVLLLLALLTAALILYRRRQSIERGAFEGARYSRSSSSPTEATEKNILVSDMEMNEQQE

SEQ ID NO: 4054 - protein, 327 aa, Homo sapiens
MIFPSHDSQAFTSVDMEVGNCTILTEFILLGFSADSQWQPILFGVFLMLYLITLSGNMTLVILIRTDSHLHTPMYFFIGNLSFLDFWYTSVYTPKILASCVSEDKRISLAGCGAQLFFSCVVAYTECYLLAAMAYDRHAAICNPLLYSGTMSTALCTGLVAGSYIGGFLNAIAHTANTFRLHFCGKNIIDHFFCDAPPLVKMSCTNTRVYEKVLLGVVGFTVLSSILAILISYVNILLAILRIHSASGRHKAFSTCASHLISVMLFYGSLLFMYSRPSSTYSLERDKVAALFYTVINPLLNPLIYSLRNKDIKEAFRKATQTIQPQT

SEQ ID NO: 4055 - protein, 423 aa, Homo sapiens
MMYRPDVVRARKRVCWEPWVIGLVIFISLIVLAVCIGLTVHYVRYNQKKTYNYYSTLSFTTDKLYAEFGREASNNFTEMSQRLESMVKNAFYKSPLREEFVKSQVIKFSQQKHGVLAHMLLICRFHSTEDPETVDKIVQLVLHEKLQDAVGPPKVDPHSVKIKKINKTETDSYLNHCCGTRRSKTLGQSLRIVGGTEVEEGEWPWQASLQWDGSHRCGATLINATWLVSAAHCFTTYKNPARWTASFGVTIKPSKMKRGLRRIIVHEKYKHPSHDYDISLAELSSPVPYTNAVHRVCLPDASYEFQPGDVMFVTGFGALKNDGYSQNHLRQAQVTLIDATTCNEPQAYNDAITPRMLCAGSLEGKTDACQGDSGGPLVSSDARDIWYLAGIVSWGDECAKPNKPGVYTRVTALRDWITSKTGI

SEQ ID NO: 4056 - protein, 503 aa, Homo sapiens
MEYMAESTDRSPGHILCCECGVPISPNPANICVACLRSKVDISQGIPKQVSISFCKQCQRYFQPPGTWIQCALESRELLALCLKKIKAPLSKVRLVDAGFVWTEPHSKRLKVKLTIQKEVMNGAILQQVFVVDYVVQSQMCGDCHRVEAKDFWKAVIQVRQKTLHKKTFYYLEQLILKYGMHQNTLRIKEIHDGLDFYYSSKQHAQKMVEFLQCTVPCRYKASQRLISQDIHSNTYNYKSTFSVEIVPICKDNVVCLSPKLAQSLGNMNQICVCIRVTSAIHLIDPNTLQVADIDGSTFWSHPFNSLCHPKQLEEFIVMECSIVQDIKRAAGAGMISKKHTLGEVWVQKTSEMNTDKQYFCRTHLGHLLNPGDLVLGFDLANCNLNDEHVNKMNSDRVPDVVLIKKSYDRTKRQRRRNWKLKELARERENMDTDDERQYQDFLEDLEEDEAIRKNVNIYRDSAIPVESDTDDEGAPRISLAEMLEDLHISQDATGEEGASMLT

SEQ ID NO: 4057 - protein, 335 aa, Homo sapiens
MLGSKPRVHLYILPCASQQVSTMGDRGTSNHSEMTDFILAGFRVRPELHILLFLLFLFVYAMILLGNVGMMTIIMTDPRLNTPMYFFLGNLSFIDLFYSSVIEPKAMINFWSENKSISFAGCVAQLFLFALLIVTEGFLLAAMAYDRFIAICNPLLYSVQMSTRLCTQLVAGSYFCGCISSVIQTSMTFTLSFCASRAVDHFYCDSRPLQRLSCSDLFIHRMISFSLSCIIILPTIIVIIVSYMYIVSTVLKIHSTEGHKKAFSTCSSHLGVVSVLYGAVFFMYLTPDRFPELSKVASLCYSLVTPMLNPLIYSLRNKDVQEALKKFLEKKNIIL

SEQ ID NO: 4058 - protein, 1791 aa, Homo sapiens
MDDRCYPVIFPDERNFRPFTSDSLAAIEKRIAIQKEKKKSKDQTGEVPQPRPQLDLKASRKLPKLYGDIPRELIGKPLEDLDPFYRNHKTFMVLNRKRTIYRFSAKHALFIFGPFNSIRSLAIRVSVHSLFSMFIIGTVIINCVFMATGPAKNSNSNNTDIAECVFTGIYIFEALIKILARGFILDEFSFLRDPWNWLDSIVIGIAIVSYIPGITIKLLPLRTFRVFRALKAISVVSRLKVIVGALLRSVKKLVNVIILTFFCLSIFALVGQQLFMGSLNLKCISRDCKNISNPEAYDHCFEKKENSPEFKMCGIWMGNSACSIQYECKHTKINPDYNYTNFDNFGWSFLAMFRLMTQDSWEKLYQQTLRTTGLYSVFFFIVVIFLGSFYLINLTLAVVTMAYEEQNKNVAAEIEAKEKMFQEAQQLLKEEKEALVAMGIDRSSLTSLETSYFTPKKRKLFGNKKRKSFFLRESGKDQPPGSDSDEDCQKKPQLLEQTKRLSQNLSLDHFDEHGDPLQRQRALSAVSILTITMKEQEKSQEPCLPCGENLASKYLVWNCCPQWLCVKKVLRTVMTDPFTELAITICIIINTVFLAMEHHKMEASFEKMLNIGNLVFTSIFIAEMCLKIIALDPYHYFRRGWNIFDSIVALLSFADVMNCVLQKRSWPFLRSFRVLRVFKLAKSWPTLNTLIKIIGNSVGALGSLTVVLVIVIFIFSVVGMQLFGRSFNSQKSPKLCNPTGPTVSCLRHWHMGDFWHSFLVVFRILCGEWIENMWECMQEANASSSLCVIVFILITVIGKLVVLNLFIALLLNSFSNEERNGNLEGEARKTKVQLALDRFRRAFCFVRHTLEHFCHKWCRKQNLPQQKEVAGGCAAQSKDIIPLVMEMKRGSETQEELGILTSVPKTLGVRHDWTWLAPLAEEEDDVEFSGEDNAQRITQPEPEQQAYELHQENKKPTSQRVQSVEIDMFSEDEPHLTIQDPRKKSDVTSILSECSTIDLQDGFGWLPEMVPKKQPERCLPKGFGCCFPCCSVDKRKPPWVIWWNLRKTCYQIVKHSWFESFIIFVILLSSGALIFEDVHLENQPKIQELLNCTDIIFTHIFILEMVLKWVAFGFGKYFTSAWCCLDFIIVIVSVTTLINLMELKSFRTLRALRPLRALSQFEGMKVVVNALIGAIPAILNVLLVCLIFWLVFCILGVYFFSGKFGKCINGTDSVINYTIITNKSQCESGNFSWINQKVNFDNVGNAYLALLQVATFKGWMDIIYAAVDSTEKEQQPEFESNSLGYIYFVVFIIFGSFFTLNLFIGVIIDNFNQQQKKLGGQDIFMTEEQKKYYNAMKKLGSKKPQKPIPRPLNKCQGLVFDIVTSQIFDIIIISLIILNMISMMAESYNQPKAMKSILDHLNWVFVVIFTLECLIKIFALRQYYFTNGWNLFDCVVVLLSIVSTMISTLENQEHIPFPPTLFRIVRLARIGRILRLVRAARGIRTLLFALMMSLPSLFNIGLLLFLIMFIYAILGMNWFSKVNPESGIDDIFNFKTFASSMLCLFQISTSAGWDSLLSPMLRSKESCNSSSENCHLPGIATSYFVSYIIISFLIVVNMYIAVILENFNTATEESEDPLGEDDFDIFYEVWEKFDPEATQFIKYSALSDFADALPEPLRVAKPNKYQFLVMDLPMVSEDRLHCMDILFAFTARVLGGSDGLDSMKAMMEEKFMEANPLKKLYEPIVTTTKRKEEERGAAIIQKAFRKYMMKVTKGDQGDQNDLENGPHSPLQTLCNGDLSSFGVAKGKVHCD

SEQ ID NO: 4059 - protein, 677 aa, Homo sapiens
MDFPGHFEQIFQQLNYQRLHGQLCDCVIVVGNRHFKAHRSVLAACSTHFRALFSVAEGDQTMNMIQLDSEVVTAEAFAALIDMMYTSTLMLGESNVMDVLLAASHLHLNSVVKACKHYLTTRTLPMSPPSERVQEQSARMQRSFMLQQLGLSIVSSALNSSQNGEEQPAPMSSSMRSNLDQRTPFPMRRLHKRKQSAEERARQRLRPSIDESAISDVTPENGPSGVHSREEFFSPDSLKIVDNPKADGMTDNQEDSAIMFDQSFGTQEDAQVPSQSDNSAGNMAQLSMASRATQVETSFDQEAAPEKSSFQCENPEVGLGEKEHMRVVVKSEPLSSPEPQDEVSDVTSQAEGSESVEVEGVVVSAEKIDLSPESSDRSFSDPQSSTDRVGDIHILEVTNNLEHKSTFSISNFLNKSRGNNFTANQNNDDNIPNTTSDCRLESEAPYLLSPEAGPAGGPSSAPGSHVENPFSEPADSHFVRPMQEVMGLPCVQTSGYQGGEQFGMDFSRSGLGLHSSFSRVMIGSPRGGASNFPYYRRIAPKMPVVTSVRSSQIPENSTSSQLMMNGATSSFENGHPSQPGPPQLTRASADVLSKCKKALSEHNVLVVEGARKYACKICCKTFLTLTDCKKHIRVHTGEKPYACLKCGKRFSQSSHLYKHSKTTCLRWQSSNLPSTLL

SEQ ID NO: 4060 - protein, 309 aa, Homo sapiens
MSFNLQSSKKLFIFLGKSLFSLLEAMIFALLPKPRKNVAGEIVLITGAGSGLGRLLALQFARLGSVLVLWDINKEGNEETCKMAREAGATRVHAYTCDCSQKEGVYRVADQVKKEVGDVSILINNAGIVTGKKFLDCPDELMEKSFDVNFKAHLWTYKAFLPAMIANDHGHLVCISSSAGLSGVNGLADYCASKFAAFGFAESVFVETFVQKQKGIKTTIVCPFFIKTGMFEGCTTGCPSLLPILEPKYAVEKIVEAILQEKMYLYMPKLLYFMMFLKSFLPLKTGLLIADYLGILHAMDGFVDQKKKL

SEQ ID NO: 4061 - protein, 536 aa, Homo sapiens
MMKGEFYVIEYAACDATYNEIVTFERLRPVNQNKTVKKNTFFKCTVDVPEDLREACANENAHKDFKKAVGACRIFYHPETTQLMILSASEATVKRVNILSDMHLRSIRTKLMLMSRNEEATKHLECTKQLAAAFHEEFVVREDLMGLAIGTHGSNIQQARKVPGVTAIELDEDTGTFRIYGESADAVKKARGFLEFVEDFIQVPRNLVGKVIGKNGKVIQEIVDKSGVVRVRIEGDNENKLPREDGMVPFVFVGTKESIGNVQVLLEYHIAYLKEVEQLRMERLQIDEQLRQIGSRSYSGRGRGRRGPNYTSGYGTNSELSNPSETESERKDELSDWSLAGEDDRDSRHQRDSRRRPGGRGRSVSGGRGRGGPRGGKSSISSVLKDPDSNPYSLLDNTESDQTADTDASESHHSTNRRRRSRRRRTDEDAVLMDGMTESDTASVNENGLVTVADYISRAESQSRQRNLPRETLAKNKKEMAKDVIEEHGPSEKAINGPTSASGDDISKLQRTPGEEKINTLKEENTQEAAVLNGVS

SEQ ID NO: 4062 - protein, 857 aa, Homo sapiens
MNYQQQLANSAAIRAEIQRFESVHPNIYSIYELLERVEEPVLQNQIREHVIAIEDAFVNSQEWTLSRSVPELKVGIVGNLASGKSALVHRYLTGTYVQEESPEGGRFKKEIVVDGQSYLLLIRDEGGPPEAQFAMWVDAVIFVFSLEDEISFQTVYHYYSRMANYRNTSEIPLVLVGTQDAISSANPRVIDDARARKLSNDLKRCTYYETCATYGLNVERVFQDVAQKIVATRKKQQLSIGPCKSLPNSPSHSSVCSAQVSAVHISQTSNGGGSLSDYSSSVPSTPSTSQKELRIDVPPTANTPTPVRKQSKRRSNLFTSRKGSDPDKEKKGLESRADSIGSGRAIPIKQGMLLKRSGKSLNKEWKKKYVTLCDNGVLTYHPSLHDYMQNVHGKEIDLLRTTVKVPGKRPPRATSACAPISSPKTNGLSKDMSSLHISPNSGNVTSASGSQMASGISLVSFNSRPDGMHQRSYSVSSADQWSEATVIANSAISSDTGLGDSVCSSPSISSTTSPKLDPPPSPHANRKKHRRKKSTSNFKADGLSGTAEEQEENFEFIIVSLTGQTWHFEATTYEERDAWVQAIESQILASLQSCESSKNKSRLTSQSEAMALQSIRNMRGNSHCVDCETQNPNWASLNLGALMCIECSGIHRNLGTHLSRVRSLDLDDWPVELIKVMSSIGNELANSVWEESSQGRTKPSVDSTREEKERWIRAKYEQKLFLAPLPCTELSLGQHLLRATADEDLRTAILLLAHGSRDEVNETCGEGDGRTALHLACRKGNVVLAQLLIWYGVDVTARDAHGNTALAYARQASSQECIDVLLQYGCPDERFVLMATPNLSRRNNNRNNSSGRVPTII

SEQ ID NO: 4063 - protein, 964 aa, Homo sapiens
MQKIKSLMTRQGLKSPQESLSDLGAIESLRVPGKEEFRELREQPSDPQAEQELINSIEQVYFSVDSFDIVKYELEKLPPVLNLQELEAYRDKLKQQQAAVSKKVADLILEKQPAYVKELERVTSLQTGLQLAAVICTNGRRHLNIAKEGFTQASLGLLANQRKRQLLIGLLKSLRTIKTLQRTDVRLSEMLEEEDYPGAIQLCLECQKAASTFKHYSCISELNSKLQDTLEQIEEQLDVALSKICKNFDINHYTKVQQAYRLLGKTQTAMDQLHMHFTQAIHNTVFQVVLGYVELCAGNTDTKFQKLQYKDLCTHVTPDSYIPCLADLCKALWEVMLSYYRTMEWHEKHDNEDTASASEGSNMIGTEETNFDRGYIKKKLEHGLTRIWQDVQLKVKTYLLGTDLSIFKYDDFIFVLDIISRLMQVGEEFCGSKSEVLQESIRKQSVNYFKNYHRTRLDELRMFLENETWELCPVKSNFSILQLHEFKFMEQSRSPSVSPSKQPVSTSSKTVTLFEQYCSGGNPFEIQANHKDEETEDVLASNGYESDEQEKSAYQEYDSDSDVPEELKRDYVDEQTGDGPVKSVSRETLKSRKKSDYSLNKVNAPILTNTTLNVIRLVGKYMQMMNILKPIAFDVIHFMSQLFDYYLYAIYTFFGRNDSLESTGLGLSSSRLRTTLNRIQESLIDLEVSADPTATLTAAEERKEKVPSPHLSHLVVLTSGDTLYGLAERVVATESLVFLAEQFEFLQPHLDAVMPAVKKPFLQQFYSQTVSTASELRKPIYWIVAGKALDYEQMLLLMANVKWDVKEIMSQHNIYVDALLKEFEQFNRRLNEVSKRVRIPLPVSNILWEHCIRLANRTIVEGYANVKKCSNEGRALMQLDFQQFLMKLEKLTDIRPIPDKEFVETYIKAYYLTENDMERWIKEHREYSTKQLTNLVNVCLGSHINKKARQKLLAAIDDIDRPKR

SEQ ID NO: 4064 - protein, 432 aa, Homo sapiens
MSELKDCPLQFHDFKSVDHLKVCPRYTAVLARSEDDGIGIEELDTLQLELETLLSSASRRLRVLEAETQILTDWQDKKGDRRFLKLGRDHELGAPPKHGKPKKQKLEGKAGHGPGPGPGRPKSKNLQPKIQEYEFTDDPIDVPRIPKNDAPNRFWASVEPYCADITSEEVRTLEELLKPPEDEAEHYKIPPLGKHYSQRWAQEDLLEEQKDGARAAAVADKKKGLMGPLTELDTKDVDALLKKSEAQHEQPEDGCPFGALTQRLLQALVEENIISPMEDSPIPDMSGKESGADGASTSPRNQNKPFSVPHTKSLESRIKEELIAQGLLESEDRPAEDSEDEVLAELRKRQAELKALSAHNRTKKHDLLRLAKEEVSRQELRQRVRMADNEVMDAFRKIMAARQKKRTPTKKEKDQAWKTLKERESILKLLDG

SEQ ID NO: 4065 - protein, 526 aa, Homo sapiens
MLMLLVRGTHYENLRSKVVLPTPLGGRSTETFVSEFPGPDTGIRWRRSDEALRVNVGGVRRQLSARALARFPGTRLGRLQAAASEEQARRLCDDYDEAAREFYFDRHPGFFLSLLHFYRTGHLHVLDELCVFAFGQEADYWGLGENALAACCRARYLERRLTQPHAWDEDSDTPSSVDPCPDEISDVQRELARYGAARCGRLRRRLWLTMENPGYSLPSKLFSCVSISVVLASIAAMCIHSLPEYQAREAAAAVAAVAAGRSPEGVRDDPVLRRLEYFCIAWFSFEVSSRLLLAPSTRNFFCHPLNLIDIVSVLPFYLTLLAGVALGDQGGKEFGHLGKVVQVFRLMRIFRVLKLARHSTGLRSLGATLKHSYREVGILLLYLAVGVSVFSGVAYTAEKEEDVGFNTIPACWWWGTVSMTTVGYGDVVPVTVAGKLAASGCILGGILVVALPITIIFNKFSHFYRRQKALEAAVRNSNHQEFEDLLSSIDGVSEASLETSRETSQEGQSADLESQAPSEPPHPQMY

SEQ ID NO: 4066 - protein, 307 aa, Homo sapiens
MSKRKLIPKLSIQSPVLHTNLNVQSTHPPLKKEDLHRISKDSLESDSESLTQEIMCHSEFDDRIRGNGMEPDSLDEEESPRWGSLHEMEEEASGKAAQMAREQNHHTWDQGANNRQQPIEDKYSDLRYDPNWKSKKEEGQLLSVEALPESTDSSLENLPLAPLYPSQETSMELSGGKGEQKESPQSAASLLGSEFLSPNYEHGARRSKPFSELSDSDLEEKSSSLSPYVKSSSSHNEVFLPGSRGPRRRKSKQHFVEKNKLTLGLPTPKTDSYLQLHNKKRGESHPEQVILRVNSLPRDGFKTFWSQ

SEQ ID NO: 4067 - protein, 681 aa, Homo sapiens
MGSPVHRVSLGDTWSRQMHPDIESERYMQSFDVERLTNILDGGAQNTALRRKVESIIHSYPEFSCKDNYFMTQNERYKAAMRRAFHIRLIARRLGWLEDGRELGYAYRALSGDVALNIHRVFVRALRSLGSEEQIAKWDPLCKNIQIIATYAQTELGHGTYLQGLETEATYDAATQEFVIHSPTLTATKWWPGDLGRSATHALVQAQLICSGARRGMHAFIVPIRSLQDHTPLPGIIIGDIGPKMDFDQTDNGFLQLNHVRVPRENMLSRFAQVLPDGTYVKLGTAQSNYLPMVVVRVELLSGEILPILQKACVIAMRYSVIRRQSRLRPSDPEAKVLDYQTQQQKLFPQLAISYAFHFLAVSLLEFFQHSYTAILNQDFSFLPELHALSTGMKAMMSEFCTQGAEMCRRACGGHGYSKLSGLPSLVTKLSASCTYEGENTVLYLQVARFLVKSYLQTQMSPGSTPQRSLSPSVAYLTAPDLARCPAQRAADFLCPELYTTAWAHVAVRLIKDSVQHLQTLTQSGADQHEAWNQTTVIHLQAAKVHCYYVTVKGFTEALEKLENEPAIQQVLKRLCDLHAIHGILTNSGDFLHDAFLSGAQVDMARTAYLDLLRLIRKDAILLTDAFDFTDQCLNSALGCYDGNVYERLFQWAQKSPTNTQENPAYEEYIRPLLQSWRSKL

SEQ ID NO: 4068 - protein, 747 aa, Homo sapiens
MASKVTDAIVWYQKKIGAYDQQIWEKSVEQREIKGLRNKPKKTAHVKPDLIDVDLVRGSAFAKAKPESPWTSLTRKGIVRVVFFPFFFRWWLQVTSKVIFFWLLVLYLLQVAAIVLFCSTSSPHSIPLTEVIGPIWLMLLLGTVHCQIVSTRTPKPPLSTGGKRRRKLRKAAHLEVHREGDGSSTTDNTQEGAVQNHGTSTSHSVGTVFRDLWHAAFFLSGSKKAKNSIDKSTETDNGYVSLDGKKTVKSGEDGIQNHEPQCETIRPEETAWNTGTLRNGPSKDTQRTITNVSDEVSSEEGPETGYSLRRHVDRTSEGVLRNRKSHHYKKHYPNEDAPKSGTSCSSRCSSSRQDSESARPESETEDVLWEDLLHCAECHSSCTSETDVENHQINPCVKKEYRDDPFHQSHLPWLHSSHPGLEKISAIVWEGNDCKKADMSVLEISGMIMNRVNSHIPGIGYQIFGNAVSLILGLTPFVFRLSQATDLEQLTAHSASELYVIAFGSNEDVIVLSMVIISFVVRVSLVWIFFFLLCVAERTYKQRLLFAKLFGHLTSARRARKSEVPHFRLKKVQNIKMWLSLRSYLKRRGPQRSVDVIVSSAFLLTISVVFICCAQLLHVHEIFLDCHYNWELVIWCISLTLFLLRFVTLGSETSKKYSNTSILLTEQINLYLKMEKKPNKKEELTLVNNVLKLATKLLKELDSPFRLYGLTMNPLLYNITQVVILSAVSGVISDLLGFNLKLWKIKS

SEQ ID NO: 4069 - protein, 268 aa, Homo sapiens
MSGKHYKGPEVSCCIKYFIFGFNVIFWFLGITFLGIGLWAWNEKGVLSNISSITDLGGFDPVWLFLVVGGVMFILGFAGCIGALRENTFLLKFFSVFLGIIFFLELTAGVLAFVFKDWIKDQLYFFINNNIRAYRDDIDLQNLIDFTQEYWQCCGAFGADDWNLNIYFNCTDSNASRERCGVPFSCCTKDPAEDVINTQCGYDARQKPEVDQQIVIYTKGCVPQFEKWLQDNLTIVAGIFIGIALLQIFGICLAQNLVSDIEAVRASW

SEQ ID NO: 4070 - protein, 219 aa, Homo sapiens
MSETAPAAPAAPAPAEKTPVKKKARKSAGAAKRKASGPPVSELITKAVAASKERSGVSLAALKKALAAAGYDVEKNNSRIKLGLKSLVSKGTLVQTKGTGASGSFKLNKKAASGEAKPKAKKAGAAKAKKPAGAAKKPKKATGAATPKKSAKKTPKKAKKPAAAAGAKKAKSPKKAKAAKPKKAPKSPAKAKAVKPKAAKPKTAKPKAAKPKKAAAKKK

SEQ ID NO: 4071 - protein, 312 aa, Homo sapiens
MDGVNDSSLQGFVLMGISDHPQLEMIFFIAILFSYLLTLLGNSTIILLSRLEARLHTPMYFFLSNLSSLDLAFATSSVPQMLINLWGPGKTISYGGCITQLYVFLWLGATECILLVVMAFDRYVAVCRPLRYTAIMNPQLCWLLAVIACLGGLGNSVIQSTFTLQLPLCGHRRVEGFLCEVPAMIKLACGDTSLNQAVLNGVCTFFTAVPLSIIVISYCLIAQAVLKIRSAEGRRKAFNTCLSHLLVVFLFYGSASYGYLLPAKNSKQDQGKFISLFYSLVTPMVNPLIYTLRNMEVKGALRRLLGKGREVG

SEQ ID NO: 4072 - protein, 1512 aa, Homo sapiens
MSVNISTAGKGVDPNTVDTYDSGDDWEIGVGNLIIDLDADLEKDRQKFEMNNSTTTTSSSNSKDCGGPASSGAGATAALADGLKFASVQASAPQGNSHKETSKSKVKRSKTSKDANKSLPSAALYGIPEISSTGKRQEVQGRPGEATGMNSALGQSVSSGGSGNPNSNSTSTSTSAATAGAGSCGKSKEEKPGKSQSSRGAKRDKDAGKSRKDKHDLLQGHQNGSGSQAPSGGHLYGFGAKSNGGGASPFHCGGTGSGSVAAAGEVSKSAPDSGLMGNSMLVKKEEEEEESHRRIKKLKTEKVDPLFTVPAPPPPISSSLTPQILPSYFSPSSSNIAAPVEQLLVRTRSVGVNTCEVGVVTEPECLGPCEPGTSVNLEGIVWHETEEGVLVVNVTWRNKTYVGTLLDCTKHDWAPPRFCESPTSDLEMRGGRGRGKRARSAAAAPGSEASFTESRGLQNKNRGGANGKGRRGSLNASGRRTPPNCAAEDIKASPSSTNKRKNKPPMELDLNSSSEDNKPGKRVRTNSRSTPTTPQGKPETTFLDQGCSSPVLIDCPHPNCNKKYKHINGLRYHQAHAHLDPENKLEFEPDSEDKISDCEEGLSNVALECSEPSTSVSAYDQLKAPASPGAGNPPGTPKGKRELMSNGPGSIIGAKAGKNSGKKKGLNNELNNLPVISNMTAALDSCSAADGSLAAEMPKLEAEGLIDKKNLGDKEKGKKATNCKTDKNLSKLKSARPIAPAPAPTPPQLIAIPTATFTTTTTGTIPGLPSLTTTVVQATPKSPPLKPIQPKPTIMGEPITVNPALVSLKDKKKKEKRKLKDKEGKETGSPKMDAKLGKLEDSKGASKDLPGHFLKDHLNKNEGLANGLSESQESRMASIKAEADKVYTFTDNAPSPSIGSASRLECSTLVNGQAPMAPLHVLTQNGAESSAAKTSSPAYSDISDAADDGGSDSRSEGMRSKASSPSDIISSKDSVVKGHSSTTAQSSQLKESHSPYYHSYDPYYSPSYMHPGQVGAPAAGNSGSTQGMKIKKESEEDAEKKDKAEQLDSKKVDHNSASLQPQHQSVITQRHPALAQSLYYGQYAYGLYMDQKSLMATSPAYRQQYEKYYEDQRLAEQKMAQTGRGDCERKSELPLKELGKEETKQKNMPSATISKAPSTPEPNKNHSKLGPSVPNKTEETGKSQLLSNHQQQLQADSFKAKQMENHQLIKEAVEMKSVMDSMKQTGVDPTSRFKQDPDSRTWHHYVYQPKYLDQQKSEELDREKKLKEDSPRKTPNKESGVPSLPVSLTSIKEEPKEAKHPDSQSMEESKLKNDDRKTPVNWKDSRGTRVAVSSPMSQHQSYIQYLHAYPYPQMYDPSHPAYRAVSPVLMHSYPGAYLSPGFHYPVYGKMSGREETEKVNTSPSVNTKTTTESKALDLLQQHANQYRSKSPAPVEKATAEREREAERERDRHSPFGQRHLHTHHHTHVGMGYPLIPGQYDPFQGLTSAALVASQQVAAQASASGMFPGQRRE

SEQ ID NO: 4073 - protein, 458 aa, Homo sapiens
MASTITGSQDCIVNHRGEVDGEPELDISPCQQWGEASSPISRNRDSVMTLQSGCFENIESETYLPLKVSSQIDTQDSSVKFCKNEPQDHQESRRLFVMEESTERKVIKGESCSENLQVKLVSDGQELASPLLNGEATCQNGQLKESLDPIDCNCKDIHGWKSQVVSCSQQRAHTEEKPCDHNNCGKILNTSPDGHPYEKIHTAEKQYECSQCGKNFSQSSELLLHQRDHTEEKPYKCEQCGKGFTRSSSLLIHQAVHTDEKPYKCDKCGKGFTRSSSLLIHHAVHTGEKPYKCDKCGKGFSQSSKLHIHQRVHTGEKPYECEECGMSFSQRSNLHIHQRVHTGERPYKCGECGKGFSQSSNLHIHRCIHTGEKPYQCYECGKGFSQSSDLRIHLRVHTGEKPYHCGKCGKGFSQSSKLLIHQRVHTGEKPYECSKCGKGFSQSSNLHIHQRVHKKDPR

SEQ ID NO: 4074 - protein, 464 aa, Homo sapiens
MMARRDPKPGAKRLVRAQTLQKQRRAPVGPRAPPPDEEDPRLKCKNCEAFGHTARSTRCPMKCWKAALVPPNFGEKEGKENLKPWKPQVEANPGPLNKDKGEKEERPRPQDPQRKALLHIFSRKPPEKPLPNQKGSTESSDYLRVASGPMPVHTTSKRPRVDPVLSDRSATEMSDRGSVLASLSPLRKASLSSSSSLGPKERQTGAAADIPQTAVRHQGPEPLLVVKPTHSSPAGGCREVPQAASKTHGLLQAVSPQAQDKRPAVTSQPCPPAATHSLGLGSNLSFGPGAKRSAPAPIQACLNFPKKPRLGPFQIPESAIQGGELGAPENLQPPPAATELGPRTSPQTGTRTPAQVLSGDRQPPHSRPCLPTAQACTMSHHPAASHDGAQPLRVLFRRLENGRWSSSLLTAPSFHSPEKPGAFLAQSPHVSEKSEGPCVRVPPSVLYEDLQVPSSSEDSDSDLE

SEQ ID NO: 4075 - protein, 1702 aa, Homo sapiens
MHQRRPAEVEIKAGEGAGPWGQGAAVKTGSELSPVDGPVPGQMDSGPVYHGDSRQLSASGVPVNGAREPAGPSLLGTGGPWRVDQKPDWEAAPGPAHTARLEDAHDLVAFSAVAEAVSSYGALSTRLYETFNREMSREAGNNSRGPRPGPEGCSAGSEDLDTLQTALALARHGMKPPNCNCDGPECPDYLEWLEGKIKSVVMEGGEERPRLPGPLPPGEAGLPAPSTRPLLSSEVPQISPQEGLPLSQSALSIAKEKNISLQTAIAIEALTQLSSALPQPSHSTPQASCPLPEALSPPAPFRSPQSYLRAPSWPVVPPEEHSSFAPDSSAFPPATPRTEFPEAWGTDTPPATPRSSWPMPRPSPDPMAELEQLLGSASDYIQSVFKRPEALPTKPKVKVEAPSSSPAPAPSPVLQREAPTPSSEPDTHQKAQTALQQHLHHKRSLFLEQVHDTSFPAPSEPSAPGWWPPPSSPVPRLPDRPPKEKKKKLPTPAGGPVGTEKAAPGIKPSVRKPIQIKKSRPREAQPLFPPVRQIVLEGLRSPASQEVQAHPPAPLPASQGSAVPLPPEPSLALFAPSPSRDSLLPPTQEMRSPSPMTALQPGSTGPLPPADDKLEELIRQFEAEFGDSFGLPGPPSVPIQDPENQQTCLPAPESPFATRSPKQIKIESSGAVTVLSTTCFHSEEGGQEATPTKAENPLTPTLSGFLESPLKYLDTPTKSLLDTPAKRAQAEFPTCDCVEQIVEKDEGPYYTHLGSGPTVASIRELMEERYGEKGKAIRIEKVIYTGKEGKSSRGCPIAKWVIRRHTLEEKLLCLVRHRAGHHCQNAVIVILILAWEGIPRSLGDTLYQELTDTLRKYGNPTSRRCGLNDDRTCACQGKDPNTCGASFSFGCSWSMYFNGCKYARSKTPRKFRLAGDNPKEEEVLRKSFQDLATEVAPLYKRLAPQAYQNQVTNEEIAIDCRLGLKEGRPFAGVTACMDFCAHAHKDQHNLYNGCTVVCTLTKEDNRCVGKIPEDEQLHVLPLYKMANTDEFGSEENQNAKVGSGAIQVLTAFPREVRRLPEPAKSCRQRQLEARKAAAEKKKIQKEKLSTPEKIKQEALELAGITSDPGLSLKGGLSQQGLKPSLKVEPQNHFSSFKYSGNAVVESYSVLGNCRPSDPYSMNSVYSYHSYYAQPSLTSVNGFHSKYALPSFSYYGFPSSNPVFPSQFLGPGAWGHSGSSGSFEKKPDLHALHNSLSPAYGGAEFAELPSQAVPTDAHHPTPHHQQPAYPGPKEYLLPKAPLLHSVSRDPSPFAQSSNCYNRSIKQEPVDPLTQAEPVPRDAGKMGKTPLSEVSQNGGPSHLWGQYSGGPSMSPKRTNGVGGSWGVFSSGESPAIVPDKLSSFGASCLAPSHFTDGQWGLFPGEGQQAASHSGGRLRGKPWSPCKFGNSTSALAGPSLTEKPWALGAGDFNSALKGSPGFQDKLWNPMKGEEGRIPAAGASQLDRAWQSFGLPLGSSEKLFGALKSEEKLWDPFSLEEGPAEEPPSKGAVKEEKGGGGAEEEEEELWSDSEHNFLDENIGGVAVAPAHGSILIECARRELHATTPLKKPNRCHPTRISLVFYQHKNLNQPNHGLALWEAKMKQLAERARARQEEAARLGLGQQEAKLYGKKRKWGGTVVAEPQQKEKKGVVPTRQALAVPTDSAVTVSSYAYTKVTGPYSRWI

SEQ ID NO: 4076 - protein, 522 aa, Homo sapiens
MNSFFGTPAASWCLLESDVSSAPDKEAGRERRALSVQQRGGPAWSGSLEWSRQSAGDRRRLGLSRQTAKSSWSRSRDRTCCCRRAWWILVPAADRARRERFIMNEKWDTNSSENWHPIWNVNDTKHHLYSDINITYVNYYLHQPQVAAIFIISYFLIFFLCMMGNTVVCFIVMRNKHMHTVTNLFILNLAISDLLVGIFCMPITLLDNIIAGWPFGNTMCKISGLVQGISVAASVFTLVAIAVDRFQCVVYPFKPKLTIKTAFVIIMIIWVLAITIMSPSAVMLHVQEEKYYRVRLNSQNKTSPVYWCREDWPNQEMRKIYTTVLFANIYLAPLSLIVIMYGRIGISLFRAAVPHTGRKNQEQWHVVSRKKQKIIKMLLIVALLFILSWLPLWTLMMLSDYADLSPNELQIINIYIYPFAHWLAFGNSSVNPIIYGFFNENFRRGFQEAFQLQLCQKRAKPMEAYALKAKSHVLINTSNQLVQESTFQNPHGETLLYRKSAEKPQQELVMEELKETTNSSEI

SEQ ID NO: 4077 - protein, 1079 aa, Homo sapiens
MVCSAAPLLLLATTLPLLGSPVAQASQPVSETGVRPREGLQRRQWGPLIGRDKAWNERIDRPFPACPIPLSSSFGRWPKGQTMWAQTSTLTLTEEELGQSQAGGESGSGQLLDQENGAGESALVSVYVHLDFPDKTWPPELSRTLTLPAASASSSPRPLLTGLRLTTECNVNHKGNFYCACLSGYQWNTSICLHYPPCQSLHNHQPCGCLVFSHPEPGYCQLLPPGSPVTCLPAVPGILNLNSQLQMPGDTLSLTLHLSQEATNLSWFLRHPGSPSPILLQPGTQVSVTSSHGQAALSVSNMSHHWAGEYMSCFEAQGFKWNLYEVVRVPLKATDVARLPYQLSISCATSPGFQLSCCIPSTNLAYTAAWSPGEGSKASSFNESGSQCFVLAVQRCPMADTTYACDLQSLGLAPLRVPISITIIQDGDITCPEDASVLTWNVTKAGHVAQAPCPESKRGIVRRLCGADGVWGPVHSSCTDARLLALFTRTKLLQAGQGSPAEEVPQILAQLPGQAAEASSPSDLLTLLSTMKYVAKVVAEARIQLDRRALKNLLIATDKVLDMDTRSLWTLAQARKPWAGSTLLLAVETLACSLCPQDHPFAFSLPNVLLQSQLFGPTFPADYSISFPTRPPLQAQIPRHSLAPLVRNGTEISITSLVLRKLDHLLPSNYGQGLGDSLYATPGLVLVISIMAGDRAFSQGEVIMDFGNTDGSPHCVFWDHSLFQGRGGWSKEGCQAQVASASPTAQCLCQHLTAFSVLMSPHTVPEEPALALLTQVGLGASILALLVCLGVYWLVWRVVVRNKISYFRHAALLNMVFCLLAADTCFLGAPFLSPGPRSPLCLAAAFLCHFLYLATFFWMLAQALVLAHQLLFVFHQLAKHRVLPLMVLLGYLCPLGLAGVTLGLYLPQGQYLREGECWLDGKGGALYTFVGPVLAIIGVNGLVLAMAMLKLLRPSLSEGPPAEKRQALLGVIKALLILTPIFGLTWGLGLATLLEEVSTVPHYIFTILNTLQGVFILLFGCLMDRKIQEALRKRFCRAQAPSSTISLVSCCLQILSCASKSMSEGIPWPSSEDMGTARS

SEQ ID NO: 4078 - protein, 403 aa, Homo sapiens
MEPVGCCGECRGSSVDPRSTFVLSNLAEVVERVLTFLPAKALLRVACVCRLWRECVRRVLRTHRSVTWISAGLAEAGHLEGHCLVRVVAEELENVRILPHTVLYMADSETFISLEECRGHKRARKRTSMETALALEKLFPKQCQVLGIVTPGIVVTPMGSGSNRPQEIEIGESGFALLFPQIEGIKIQPFHFIKDPKNLTLERHQLTEVGLLDNPELRVVLVFGYNCCKVGASNYLQQVVSTFSDMNIILAGGQVDNLSSLTSEKNPLDIDASGVVGLSFSGHRIQSATVLLNEDVSDEKTAEAAMQRLKAANIPEHNTIGFMFACVGRGFQYYRAKGNVEADAFRKFFPSVPLFGFFGNGEIGCDRIVTGNFILRKCNEVKDDDLFHSYTTIMALIHLGSSK

SEQ ID NO: 4079 - protein, 205 aa, Homo sapiens
MPSKKKKYNARFPPARIKKIMQTDEEIGKVAAAVPVIISRALELFLESLLKKACQVTQSRNAKTMTTSHLKQCIELEQQFDFLKDLVASVPDMQGDGEDNHMDGDKGARRGRKPGSGGRKNGGMGTKSKDKKLSGTDSEQEDESEDTDTDGEEETSQPPPQASHPSAHFQSPPTPFLPFASTLPLPPAPPGPSAPDEEDEEDYDS

SEQ ID NO: 4080 - protein, 361 aa, Homo sapiens
MGGAVSAGEDNDELIDNLKEAQYIRTELVEQAFRAIDRADYYLEEFKENAYKDLAWKHGNIHLSAPCIYSEVMEALDLQPGLSFLNLGSGTGYLSSMVGLILGPFGVNHGVELHSDVIEYAKQKLDFFIRTSDSFDKFDFCEPSFVTGNCLEISPDCSQYDRVYCGAGVQKEHEEYMKNLLKVGGILVMPLEEKLTKITRTGPSAWETKKILAVSFAPLIQPCHSESGKSRLVQLPPVAVRSLQDLARIAIRGTIKKIIHQETVSKNGNGLKNTPRFKRRRVRRRRMETIVFLDKEVFASRISNPSDDNSCEDLEEERREEEEKTPPETKPDPPVNFLRQKVLSLPLPDPLKYYLLYYREK

SEQ ID NO: 4081 - protein, 1013 aa, Homo sapiens
MPPPAEVTDPSHAPAVLRQLNEQRLRGLFCDVTLIAGDTKFPAHRSVLAASSPFFREALLTSAPLPLPPATGGAAPNPATTTAASSSSSSSSSSSSSSSSASSSSSSSSSSPPPASPPASSPPRVLELPGVPAAAFSDVLNFIYSARLALPGGGGDGAAVAEIGALGRRLGISRLQGLGEGGDAWVPPTPAPMATSQPEEDSFGPGPRPAGEWEGDRAEAQAPDLQCSLPRRPLPCPQCGKSFIHPKRLQTHEAQCRRGASTRGSTGLGAGGAGPGGPAGVDASALPPPVGFRGGPEHVVKVVGGHVLYVCAACERSYVTLSSLKRHSNVHSWRRKYPCRYCEKVFALAEYRTKHEVWHTGERRYQCIFCWETFVTYYNLKTHQRAFHGISPGLLASEKTPNGGYKPKLNTLKLYRLLPMRAAKRPYKTYSQGAPEAPLSPTLNTPAPVAMPASPPPGPPPAPEPGPPPSVITFAHPAPSVIVHGGSSSGGGGSGTASTGGSQAASVITYTAPPRPPKKREYPPPPPEPAATPTSPATAVSPATAAGPAMATTTEEAKGRNPRAGRTLTYTAKPVGGIGGGGGPPTGAGRGPSQLQAPPPLCQITVRIGEEAIVKRRISETDLRPGELSGEEMEESEEDEEEEDEEEEEEDEEESKAGGEDQLWRPYYSYKPKRKAGAAGGASVGGSGLPRGRRPPRWRQKLERRSWEETPAAESPAGRARTERRHRCGDCAQTFTTLRKLRKHQEAHGGGSHSSRAGRRPSTRFTCPHCAKVCKTAAALSRHGQRHAAERPGGTPTPVIAYSKGSAGTRPGDVKEEAPQEMQVSSSSGEAGGGSTAAEEASETASLQDPIISGGEEPPVVASGGSYVYPPVQEFPLALIGGGREPGGGRGKSGSEGPVGAGEGDRMEGIGAAKVTFYPEPYPLVYGPQLLAAYPYNFSNLAALPVALNMVLPDEKGAGALPFLPGVFGYAVNPQAAPPAPPTPPPPTLPPPIPPKGEGERAGVERTQKGDVG

SEQ ID NO: 4082 - protein, 334 aa, Homo sapiens
MPKRRDILAIVLIVLPWTLLITVWHQSTLAPLLAVHKDEGSDPRRETPPGADPREYCTSDRDIVEVVRTEYVYTRPPPWSDTLPTIHVVTPTYSRPVQKAELTRMANTLLHVPNLHWLVVEDAPRRTPLTARLLRDTGLNYTHLHVETPRNYKLRGDARDPRIPRGTMQRNLALRWLRETFPRNSSQPGVVYFADDDNTYSLELFEEMRSTRRVSVWPVAFVGGLRYEAPRVNGAGKVVGWKTVFDPHRPFAIDMAGFAVNLRLILQRSQAYFKLRGVKGGYQESSLLRELVTLNDLEPKAANCTKILVWHTRTEKPVLVNEGKKGFTDPSVEI

SEQ ID NO: 4083 - protein, 442 aa, Homo sapiens
MALPSRILLWKLVLLQSSAVLLHSGSSVPAAAGSSVVSESAVSWEAGARAVLRCQSPRMVWTQDRLHDRQRVLHWDLRGPGGGPARRLLDLYSAGEQRVYEARDRGRLELSASAFDDGNFSLLIRAVEETDAGLYTCNLHHHYCHLYESLAVRLEVTDGPPATPAYWDGEKEVLAVARGAPALLTCVNRGHVWTDRHVEEAQQVVHWDRQPPGVPHDRADRLLDLYASGERRAYGPLFLRDRVAVGADAFERGDFSLRIEPLEVADEGTYSCHLHHHYCGLHERRVFHLTVAEPHAEPPPRGSPGNGSSHSGAPGPDPTLARGHNVINVIVPESRAHFFQQLGYVLATLLLFILLLVTVLLAARRRRGGYEYSDQKSGKSKGKDVNLAEFAVAAGDQMLYRSEDIQLDYKNNILKERAELAHSPLPAKYIDLDKGFRKENCK

SEQ ID NO: 4084 - protein, 530 aa, Homo sapiens
MSRSPQRALPPGALPRLLQAAPAAAPRALLPQWPRRPGRRWPASPLGMKVFRRKALVLCAGYALLLVLTMLNLLDYKWHKEPLQQCNPDGPLGAAAGAAGGSWGRPGPPPAGPPRAHARLDLRTPYRPPAAAVGAAPAAAAGMAGVAAPPGNGTRGTGGVGDKRQLVYVFTTWRSGSSFFGELFNQNPEVFFLYEPVWHVWQKLYPGDAVSLQGAARDMLSALYRCDLSVFQLYSPAGSGGRNLTTLGIFGAATNKVVCSSPLCPAYRKEVVGLVDDRVCKKCPPQRLARFEEECRKYRTLVIKGVRVFDVAVLAPLLRDPALDLKVIHLVRDPRAVASSRIRSRHGLIRESLQVVRSRDPRAHRMPFLEAAGHKLGAKKEGVGGPADYHALGAMEVICNSMAKTLQTALQPPDWLQGHYLVVRYEDLVGDPVKTLRRVYDFVGLLVSPEMEQFALNMTSGSGSSSKPFVVSARNATQAANAWRTALTFQQIKQVEEFCYQPMAVLGYERVNSPEEVKDLSKTLLRKPRL

SEQ ID NO: 4085 - protein, 414 aa, Homo sapiens
MSEKTRQNKLAEAKKKFTDYRQWNIAGVGTRATDTKKKKINNGTNPETTTSEGCHSPEDTQQNRAQLKEEKKASHQHQEALRREIEAQDHTIRILTCQKTELETALYYSQDAARKFEDGNLGTPSSFNLALSQAFRGSPLGCVSTSLIPGESKDLAGRLHHSWHFAGELQRALSAVSTWHKKADRYIEELTKERDALSLELYRNTITNEELKKKNAELQEKLRLAESEKSEIQLNVKELKRKLERAKFLLPQVQTNTLQEEMWRQEEELREQEKKIRKQEEKMWRQEERLREQEGKMREQEEKMRRQEEMREKEERIRDQKEKMQERLPEHEERCSEPCLPPSKVLCNMSHTGSVEPAGGEAGEGSPQDNPTAQEIMQLFCGMKNAQQCPGLGSTSCIPFFYRGDKRKMKIINI

SEQ ID NO: 4086 - protein, 1684 aa, Homo sapiens
MEDLVQDGVASPATPGTGKSKLETLPKEDLIKFAKKQMMLIQKAKSRCTELEKEIEELRSKPVTEGTGDIIKALTERLDALLLEKAETEQQCLSLKKENIKMKQEVEDSVTKMGDAHKELEQSHINYVKEIENLKNELMAVRSKYSEDKANLQKQLEEAMNTQLELSEQLKFQNNSEDNVKKLQEEIEKIRPGFEEQILYLQKQLDATTDEKKETVTQLQNIIEANSQHYQKNINSLQEELLQLKAIHQEEVKELMCQIEASAKEHEAEINKLNELKENLVKQCEASEKNIQKKYECELENLRKATSNANQDNQICSILLQENTFVEQVVNEKVKHLEDTLKELESQHSILKDEVTYMNNLKLKLEMDAQHIKDEFFHEREDLEFKINELLLAKEEQGCVIEKLKSELAGLNKQFCYTVEQHNREVQSLKEQHQKEISELNETFLSDSEKEKLTLMFEIQGLKEQCENLQQEKQEAILNYESLREIMEILQTELGESAGKISQEFESMKQQQASDVHELQQKLRTAFTEKDALLETVNRLQGENEKLLSQQELVPELENTIKNLQEKNGVYLLSLSQRDTMLKELEGKINSLTEEKDDFINKLKNSHEEMDNFHKKCEREERLILELGKKVEQTIQYNSELEQKVNELTGGLEETLKEKDQNDQKLEKLMVQMKVLSEDKEVLSAEVKSLYEENNKLSSEKKQLSRDLEVFLSQKEDVILKEHITQLEKKLQLMVEEQDNLNKLLENEQVQKLFVKTQLYGFLKEMGSEVSEDSEEKDVVNVLQAVGESLAKINEEKCNLAFQRDEKVLELEKEIKCLQEESVVQCEELKSLLRDYEQEKVLLRKELEEIQSEKEALQSDLLEMKNANEKTRLENQNLLIQVEEVSQTCSKSEIHNEKEKCFIKEHENLKPLLEQKELRDRRAELILLKDSLAKSPSVKNDPLSSVKELEEKIENLEKECKEKEEKINKIKLVAVKAKKELDSSRKETQTVKEELESLRSEKDQLSASMRDLIQGAESYKNLLLEYEKQSEQLDVEKERANNFEHRIEDLTRQLRNSTLQCETINSDNEDLLARIETLQSNAKLLEVQILEVQRAKAMVDKELEAEKLQKEQKIKEHATTVNELEELQVQLQKQKKQLQKTMQELELVKKDAQQTTLMNMEIADYERLMKELNQKLTNKNNKIEDLEQEIKIQKQKQETLQEEITSLQSSVQQYEEKNTKIKQLLVKTKKELADSKQAETDHLILQASLKGELEASQQQVEVYKIQLAEITSEKHKIHEHLKTSAEQHQRTLSAYQQRVTALQEECRAAKAEQATVTSEFESYKVRVHNVLKQQKNKSMSQAETEGAKQEREHLEMLIDQLKIKLQDSQNNLQINVSELQTLQSEHDTLLERHNKMLQETVSKEAELREKLCSIQSENMMMKSEHTQTVSQLTSQNEVLRNSFRDQVRHLQEEHRKTVETLQQQLSKMEAQLFQLKNEPTTRSPVSSQQSLKNLRERRNTDLPLLDMHTVTREEGEGMETTDTESVSSASTYTQSLEQLLNSPETKLEPPLWHAEFTKEELVQKLSSTTKSADHLNGLLRETEATNAILMEQIKLLKSEIRRLERNQEREKSAANLEYLKNVLLQFIFLKPGSERERLLPVINTMLQLSPEEKGKLAAVAQGEEENASRSSGWASYLHSWSGLR

SEQ ID NO: 4087 - protein, 858 aa, Homo sapiens
MVNFTVDQIRAIMDKKANIRNMSVIAHVDHGKSTLTDSLVCKAGIIASARAGETRFTDTRKDEQERCITIKSTAISLFYELSENDLNFIKQSKDGAGFLINLIDSPGHVDFSSEVTAALRVTDGALVVVDCVSGVCVQTETVLRQAIAERIKPVLMMNKMDRALLELQLEPEELYQTFQRIVENVNVIISTYGEGESGPMGNIMIDPVLGTVGFGSGLHGWAFTLKQFAEMYVAKFAAKGEGQLGPAERAKKVEDMMKKLWGDRYFDPANGKFSKSATSPEGKKLPRTFCQLILDPIFKVFDAIMNFKKEETAKLIEKLDIKLDSEDKDKEGKPLLKAVMRRWLPAGDALLQMITIHLPSPVTAQKYRCELLYEGPPDDEAAMGIKSCDPKGPLMMYISKMVPTSDKGRFYAFGRVFSGLVSTGLKVRIMGPNYTPGKKEDLYLKPIQRTILMMGRYVEPIEDVPCGNIVGLVGVDQFLVKTGTITTFEHAHNMRVMKFSVSPVVRVAVEAKNPADLPKLVEGLKRLAKSDPMVQCIIEESGEHIIAGAGELHLEICLKDLEEDHACIPIKKSDPVVSYRETVSEESNVLCLSKSPNKHNRLYMKARPFPDGLAEDIDKGEVSARQELKQRARYLAEKYEWDVAEARKIWCFGPDGTGPNILTDITKGVQYLNEIKDSVVAGFQWATKEGALCEENMRGVRFDVHDVTLHADAIHRGGGQIIPTARRCLYASVLTAQPRLMEPIYLVEIQCPEQVVGGIYGVLNRKRGHVFEESQVAGTPMFVVKAYLPVNESFGFTADLRSNTGGQAFPQCVFDHWQILPGDPFDNSSRPSQVVAETRKRKGLKEGIPALDNFLDKL

SEQ ID NO: 4088 - protein, 5537 aa, Homo sapiens
MSSGNASYRCSMSSSADFSDEDDFSQKSGSASPAPGDTLPWNLPKHERSKRKIQGGSVLDPAERAVLRIADERDKVQKKTFTKWINQHLMKVRKHVNDLYEDLRDGHNLISLLEVLSGDTLPREKGRMRFHRLQNVQIALDYLKRRQVKLVNIRNDDITDGNPKLTLGLIWTIILHFQISDIHVTGESEDMSAKERLLLWTQQATEGYAGIRCENFTTCWRDGKLFNAIIHKYRPDLIDMNTVAVQSNLANLEHAFYVAEKIGVIRLLDPEDVDVSSPDEKSVITYVSSLYDAFPKVPEGGEGIGANDVEVKWIEYQNMVNYLIQWIRHHVTTMSERTFPNNPVELKALYNQYLQFKETEIPPKETEKSKIKRLYKLLEIWIEFGRIKLLQGYHPNDIEKEWGKLIIAMLEREKALRPEVERLEMLQQIANRVQRDSVICEDKLILAGNALQSDSKRLESGVQFQNEAEIAGYILECENLLRQHVIDVQILIDGKYYQADQLVQRVAKLRDEIMALRNECSSVYSKGRILTTEQTKLMISGITQSLNSGFAQTLHPSLTSGLTQSLTPSLTSSSMTSGLSSGMTSRLTPSVTPAYTPGFPSGLVPNFSSGVEPNSLQTLKLMQIRKPLLKSSLLDQNLTEEEINMKFVQDLLNWVDEMQVQLDRTEWGSDLPSVESHLENHKNVHRAIEEFESSLKEAKISEIQMTAPLKLTYAEKLHRLESQYAKLLNTSRNQERHLDTLHNFVSRATNELIWLNEKEEEEVAYDWSERNTNIARKKDYHAELMRELDQKEENIKSVQEIAEQLLLENHPARLTIEAYRAAMQTQWSWILQLCQCVEQHIKENTAYFEFFNDAKEATDYLRNLKDAIQRKYSCDRSSSIHKLEDLVQESMEEKEELLQYKSTIANLMGKAKTIIQLKPRNSDCPLKTSIPIKAICDYRQIEITIYKDDECVLANNSHRAKWKVISPTGNEAMVPSVCFTVPPPNKEAVDLANRIEQQYQNVLTLWHESHINMKSVVSWHYLINEIDRIRASNVASIKTMLPGEHQQVLSNLQSRFEDFLEDSQESQVFSGSDITQLEKEVNVCKQYYQELLKSAEREEQEESVYNLYISEVRNIRLRLENCEDRLIRQIRTPLERDDLHESVFRITEQEKLKKELERLKDDLGTITNKCEEFFSQAAASSSVPTLRSELNVVLQNMNQVYSMSSTYIDKLKTVNLVLKNTQAAEALVKLYETKLCEEEAVIADKNNIENLISTLKQWRSEVDEKRQVFHALEDELQKAKAISDEMFKTYKERDLDFDWHKEKADQLVERWQNVHVQIDNRLRDLEGIGKSLKYYRDTYHPLDDWIQQVETTQRKIQENQPENSKTLATQLNQQKMLVSEIEMKQSKMDECQKYAEQYSATVKDYELQTMTYRAMVDSQQKSPVKRRRMQSSADLIIQEFMDLRTRYTALVTLMTQYIKFAGDSLKRLEEEEKSLEEEKKEHVEKAKELQKWVSNISKTLKDAEKAGKPPFSKQKISSEEISTKKEQLSEALQTIQLFLAKHGDKMTDEERNELEKQVKTLQESYNLLFSESLKQLQESQTSGDVKVEEKIVAERQQEYKEKLQGICDLLTQTENRLIGHQEAFMIGDGTVELKKYQSKQEELQKDMQGSAQALAEVVKNTENFLKENGEKLSQEDKALIEQKLNEAKIKCEQLNLKAEQSKKELDKVVTTAIKEETEKVAAVKQLEESKTKIENLLDWLSNVDKDSERAGTKHKQVIEQNGTHFQEGDGKSAIGEEDEVNGNLLETDVDGQVGTTQENLNQQYQKVKAQHEKIISQHQAVIIATQSAQVLLEKQGQYLSPEEKEKLQKNMKELKVHYETALAESEKKMKLTHSLQEELEKFDADYTEFEHWLQQSEQELENLEAGADDINGLMTKLKRQKSFSEDVISHKGDLRYITISGNRVLEAAKSCSKRDGGKVDTSATHREVQRKLDHATDRFRSLYSKCNVLGNNLKDLVDKYQHYEDASCGLLAGLQACEATASKHLSEPIAVDPKNLQRQLEETKALQGQISSQQVAVEKLKKTAEVLLDARGSLLPAKNDIQKTLDDIVGRYEDLSKSVNERNEKLQITLTRSLSVQDGLDEMLDWMGNVESSLKEQGQVPLNSTALQDIISKNIMLEQDIAGRQSSINAMNEKVKKFMETTDPSTASSLQAKMKDLSARFSEASHKHKETLAKMEELKTKVELFENLSEKLQTFLETKTQALTEVDVPGKDVTELSQYMQESTSEFLEHKKHLEVLHSLLKEISSHGLPSDKALVLEKTNNLSKKFKEMEDTIKEKKEAVTSCQEQLDAFQVLVKSLKSWIKETTKKVPIVQPSFGAEDLGKSLEDTKKLQEKWSLKTPEIQKVNNSGISLCNLISAVTTPAKAIAAVKSGGAVLNGEGTATNTEEFWANKGLTSIKKDMTDISHGYEDLGLLLKDKIAELNTKLSKLQKAQEESSAMMQWLQKMNKTATKWQQTPAPTDTEAVKTQVEQNKSFEAELKQNVNKVQELKDKLTELLEENPDTPEAPRWKQMLTEIDSKWQELNQLTIDRQQKLEESSNNLTQFQTVEAQLKQWLVEKELMVSVLGPLSIDPNMLNTQRQQVQILLQEFATRKPQYEQLTAAGQGILSRPGEDPSLRGIVKEQLAAVTQKWDSLTGQLSDRCDWIDQAIVKSTQYQSLLRSLSDKLSDLDNKLSSSLAVSTHPDAMNQQLETAQKMKQEIQQEKKQIKVAQALCEDLSALVKEEYLKAELSRQLEGILKSFKDVEQKAENHVQHLQSACASSHQFQQMSRDFQAWLDTKKEEQNKSHPISAKLDVLESLIKDHKDFSKTLTAQSHMYEKTIAEGENLLLKTQGSEKAALQLQLNTIKTNWDTFNKQVKERENKLKESLEKALKYKEQVETLWPWIDKCQNNLEEIKFCLDPAEGENSIAKLKSLQKEMDQHFGMVELLNNTANSLLSVCEIDKEVVTDENKSLIQKVDMVTEQLHSKKFCLENMTQKFKEFQEVSKESKRQLQCAKEQLDIHDSLGSQAYSNKYLTMLQTQQKSLQALKHQVDLAKRLAQDLVVEASDSKGTSDVLLQVETIAQEHSTLSQQVDEKCSFLETKLQGIGHFQNTIREMFSQFAEFDDELDSMAPVGRDAETLQKQKETIKAFLKKLEALMASNDNANKTCKMMLATEETSPDLVGIKRDLEALSKQCNKLLDRAQAREEQVEGTIKRLEEFYSKLKEFSILLQKAEEHEESQGPVGMETETINQQLNMFKVFQKEEIEPLQGKQQDVNWLGQGLIQSAAKSTSTQGLEHDLDDVNARWKTLNKKVAQRAAQLQEALLHCGRFQDALESLLSWMVDTEELVANQKPPSAEFKVVKAQIQEQKLLQRLLDDRKSTVEVIKREGEKIATTAEPADKVKILKQLSLLDSRWEALLNKAETRNRQLEGISVVAQQFHETLEPLNEWLTTIEKRLVNCEPIGTQASKLEEQIAQHKALEDDIINHNKHLHQAVSIGQSLKVLSSREDKDMVQSKLDFSQVWYIEIQEKSHSRSELLQQALCNAKIFGEDEVELMNWLNEVHDKLSKLSVQDYSTEGLWKQQSELRVLQEDILLRKQNVDQALLNGLELLKQTTGDEVLIIQDKLEAIKARYKDITKLSTDVAKTLEQALQLARRLHSTHEELCTWLDKVEVELLSYETQVLKGEEASQAQMRPKELKKEAKNNKALLDSLNEVSSALLELVPWRAREGLEKMVAEDNERYRLVSDTITQKVEEIDAAILRSQQFDQAADAELSWITETEKKLMSLGDIRLEQDQTSAQLQVQKTFTMEILRHKDIIDDLVKSGHKIMTACSEEEKQSMKKKLDKVLKNYDTICQINSERYLQLERAQSLVNQFWETYEELWPWLTETQSIISQLPAPALEYETLRQQQEEHRQLRELIAEHKPHIDKMNKTGPQLLELSPGEGFSIQEKYVAADTLYSQIKEDVKKRAVALDEAISQSTQFHDKIDQILESLERIVERLRQPPSISAEVEKIKEQISENKNVSVDMEKLQPLYETLKQRGEEMIARSGGTDKDISAKAVQDKLDQMVFIWENIHTLVEEREAKLLDVMELAEKFWCDHMSLIVTIKDTQDFIRDLEDPGIDPSVVKQQQEAAETIREEIDGLQEELDIVINLGSELIAACGEPDKPIVKKSIDELNSAWDSLNKAWKDRIDKLEEAMQAAVQYQDGLQAVFDWVDIAGGKLASMSPIGTDLETVKQQIEELKQFKSEAYQQQIEMERLNHQAELLLKKVTEESDKHTVQDPLMELKLIWDSLEERIINRQHKLEGALLALGQFQHALDELLAWLTHTEGLLSEQKPVGGDPKAIEIELAKHHVLQNDVLAHQSTVEAVNKAGNDLIESSAGEEASNLQNKLEVLNQRWQNVLEKTEQRKQQLDGALRQAKGFHGEIEDLQQWLTDTERHLLASKPLGGLPETAKEQLNVHMEVCAAFEAKEETYKSLMQKGQQMLARCPKSAETNIDQDINNLKEKWESVETKLNERKTKLEEALNLAMEFHNSLQDFINWLTQAEQTLNVASRPSLILDTVLFQIDEHKVFANEVNSHREQIIELDKTGTHLKYFSQKQDVVLIKNLLISVQSRWEKVVQRLVERGRSLDDARKRAKQFHEAWSKLMEWLEESEKSLDSELEIANDPDKIKTQLAQHKEFQKSLGAKHSVYDTTNRTGRSLKEKTSLADDNLKLDDMLSELRDKWDTICGKSVERQNKLEEALLFSGQFTDALQALIDWLYRVEPQLAEDQPVHGDIDLVMNLIDNHKAFQKELGKRTSSVQALKRSARELIEGSRDDSSWVKVQMQELSTRWETVCALSISKQTRLEAALRQAEEFHSVVHALLEWLAEAEQTLRFHGVLPDDEDALRTLIDQHKEFMKKLEEKRAELNKATTMGDTVLAICHPDSITTIKHWITIIRARFEEVLAWAKQHQQRLASALAGLIAKQELLEALLAWLQWAETTLTDKDKEVIPQEIEEVKALIAEHQTFMEEMTRKQPDVDKVTKTYKRRAADPSSLQSHIPVLDKGRAGRKRFPASSLYPSGSQTQIETKNPRVNLLVSKWQQVWLLALERRRKLNDALDRLEELREFANFDFDIWRKKYMRWMNHKKSRVMDFFRRIDKDQDGKITRQEFIDGILSSKFPTSRLEMSAVADIFDRDGDGYIDYYEFVAALHPNKDAYKPITDADKIEDEVTRQVAKCKCAKRFQVEQIGDNKYRFFLGNQFGDSQQLRLVRILRSTVMVRVGGGWMALDEFLVKNDPCRAKGRTNMELREKFILADGASQGMAAFRPRGRRSRPSSRGASPNRSTSVSSQAAQAASPQVPATTTPKILHPLTRNYGKPWLTNSKMSTPCKAAECSDFPVPSAEGTPIQGSKLRLPGYLSGKGFHSGEDSGLITTAAARVRTQFADSKKTPSRPGSRAGSKAGSRASSRRGSDASDFDISEIQSVCSDVETVPQTHRPTPRAGSRPSTAKPSKIPTPQRKSPASKLDKSSKR

SEQ ID NO: 4089 - protein, 633 aa, Homo sapiens
AALGSSSGSASPAVAELCQNTPETFLEASKLLLTYADNILRNPNDEKYRSIRIGNTAFSTRLLPVRGAVECLFEMGFEEGETHLIFPKKASVEQLQKIRDLIAIERSSRLDGSNKSHKVKSSQQPAASTQLPTTPSSNPSGLNQHTRNRQGQSSDPPSASTVAADSAILEVLQSNIQHVLVYENPALQEKALACIPVQELKRKSQEKLSRARKLDKGINISDEDFLLLELLHWFKEEFFHWVNNVLCSKCGGQTRSRDRSLLPSDDELKWGAKEVEDHYCDACQFSNRFPRYNNPEKLLETRCGRCGEWANCFTLCCRAVGFEARYVWDYTELQRTLSLKLTTLKEIGKTFLRISKRQKLIQVVDVTWRYSCKHEEVIARRTKVKEALLRDTINGLNKQRQLFLSENRRKELLQRIIVELVEFISPKTPKPGELGGRISGSVAWRVARGEMGLQRKETLFIPCENEKISKQLHLCYNIVKDRYVRVSNNNQTISGWENGVWKMESIFRKVETDWHMVYLARKEGSSFAYISWKFECGSVGLKVDSISIRTSSQTFQTGTVEWKLRSDTAQVELTGDNSLHSYADFSGATEVILEAELSRGDGDVAWQHTQLFRQSLNDHEENCLEIIIKFSDL

SEQ ID NO: 4090 - protein, 382 aa, Homo sapiens
MGSGEPNPAGKKKKYLKAALYVGDLDPDVTEDMLYKKFRPAGPLRFTRICRDPVTRSPLGYGYVNFRFPADAEWALNTMNFDLINGKPFRLMWSQPDDRLRKSGVGNIFIKNLDKSIDNRALFYLFSAFGNILSCKVVCDDNGSKGYAYVHFDSLAAANRAIWHMNGVRLNNRQVYVGRFKFPEERAAEVRTRDRATFTNVFVKNIGDDIDDEKLKELFCEYGPTESVKVIRDASGKSKGFGFVRYETHEAAQKAVLDLHGKSIDGKVLYVGRAQKKIERLAELRRRFERLRLKEKSRPPGVPIYIKNLDETINDEKLKEEFSSFGSISRAKVMMEVGQGKGFGVVCFSSFEEATKAVDEMNGRIVGSKPLHVTLGQARRRC

SEQ ID NO: 4091 - protein, 2481 aa, Homo sapiens
MPPNINWKEIMKVDPDDLPRQEELADNLLISLSKVEVNELKSEKQENVIHLFRITQSLMKMKAQEVELALEEVEKAGEEQAKFENQLKTKVMKLENELEMAQQSAGGRDTRFLRNEICQLEKQLEQKDRELEDMEKELEKEKKVNEQLALRNEEAENENSKLRRENKRLKKKNEQLCQDIIDYQKQIDSQKETLLSRRGEDSDYRSQLSKKNYELIQYLDEIQTLTEANEKIEVQNQEMRKNLEESVQEMEKMTDEYNRMKAIVHQTDNVIDQLKKENDHYQLQVQELTDLLKSKNEEDDPIMVAVNAKVEEWKLILSSKDDEIIEYQQMLHNLREKLKNAQLDADKSNVMALQQGIQERDSQIKMLTEQVEQYTKEMEKNTCIIEDLKNELQRNKGASTLSQQTHMKIQSTLDILKEKTKEAERTAELAEADAREKDKELVEALKRLKDYESGVYGLEDAVVEIKNCKNQIKIRDREIEILTKEINKLELKISDFLDENEALRERVGLEPKTMIDLTEFRNSKHLKQQQYRAENQILLKEASIESLEEERLDLKKKIRQMAQERGKRSATSGLTTEDLNLTENISQGDRISERKLDLLSLKNMSEAQSKNEFLSRELIEKERDLERSRTVIAKFQNKLKELVEENKQLEEGMKEILQAIKEMQKDPDVKGGETSLIIPSLERLVNAIESKNAEGIFDASLHLKAQVDQLTGRNEELRQELRESRKEAINYSQQLAKANLKIDHLEKETSLLRQSEGSNVVFKGIDLPDGIAPSSASIINSQNEYLIHLLQELENKEKKLKNLEDSLEDYNRKFAVIRHQQSLLYKEYLSEKETWKTESKTIKEEKRKLEDQVQQDAIKVKEYNNLLNALQMDSDEMKKILAENSRKITVLQVNEKSLIRQYTTLVELERQLRKENEKQKNELLSMEAEVCEKIGCLQRFKEMAIFKIAALQKVVDNSVSLSELELANKQYNELTAKYRDILQKDNMLVQRTSNLEHLECENISLKEQVESINKELEITKEKLHTIEQAWEQETKLGNESSMDKAKKSITNSDIVSISKKITMLEMKELNERQRAEHCQKMYEHLRTSLKQMEERNFELETKFAELTKINLDAQKVEQMLRDELADSVSKAVSDADRQRILELEKNEMELKVEVSKLREISDIARRQVEILNAQQQSRDKEVESLRMQLLDYQAQSDEKSLIAKLHQHNVSLQLSEATALGKLESITSKLQKMEAYNLRLEQKLDEKEQALYYARLEGRNRAKHLRQTIQSLRRQFSGALPLAQQEKFSKTMIQLQNDKLKIMQEMKNSQQEHRNMENKTLEMELKLKGLEELISTLKDTKGAQKVINWHMKIEELRLQELKLNRELVKDKEEIKYLNNIISEYERTISSLEEEIVQQNKFHEERQMAWDQREVDLERQLDIFDRQQNEILNAAQKFEEATGSIPDPSLPLPNQLEIALRKIKENIRIILETRATCKSLEEKLKEKESALRLAEQNILSRDKVINELRLRLPATAEREKLIAELGRKEMEPKSHHTLKIAHQTIANMQARLNQKEEVLKKYQRLLEKAREEQREIVKKHEEDLHILHHRLELQADSSLNKFKQTAWDLMKQSPTPVPTNKHFIRLAEMEQTVAEQDDSLSSLLVKLKKVSQDLERQREITELKVKEFENIKLQLQENHEDEVKKVKAEVEDLKYLLDQSQKESQCLKSELQAQKEANSRAPTTTMRNLVERLKSQLALKEKQQKALSRALLELRAEMTAAAEERIISATSQKEAHLNVQQIVDRHTRELKTQVEDLNENLLKLKEALKTSKNRENSLTDNLNDLNNELQKKQKAYNKILREKEEIDQENDELKRQIKRLTSGLQGKPLTDNKQSLIEELQRKVKKLENQLEGKVEEVDLKPMKEKNAKEELIRWEEGKKWQAKIEGIRNKLKEKEGEVFTLTKQLNTLKDLFAKADKEKLTLQRKLKTTGMTVDQVLGIRALESEKELEELKKRNLDLENDILYMRAHQALPRDSVVEDLHLQNRYLQEKLHALEKQFSKDTYSKPSISGIESDDHCQREQELQKENLKLSSENIELKFQLEQANKDLPRLKNQVRDLKEMCEFLKKEKAEVQRKLGHVRGSGRSGKTIPELEKTIGLMKKVVEKVQRENEQLKKASGILTSEKMANIEQENEKLKAELEKLKAHLGHQLSMHYESKTKGTEKIIAENERLRKELKKETDAAEKLRIAKNNLEILNEKMTVQLEETGKRLQFAESRGPQLEGADSKSWKSIVVTRMYETKLKELETDIAKKNQSITDLKQLVKEATEREQKVNKYNEDLEQQIKILKHVPEGAETEQGLKRELQVLRLANHQLDKEKAELIHQIEANKDQSGAESTIPDADQLKEKIKDLETQLKMSDLEKQHLKEEIKKLKKELENFDPSFFEEIEDLKYNYKEEVKKNILLEEKVKKLSEQLGVELTSPVAASEEFEDEEESPVNFPIY

SEQ ID NO: 4092 - protein, 420 aa, Homo sapiens
MAELGKKYCVYCLAEVSPLRFRCTECQDIELCPECFSAGAEIGHHRRYHGYQLVDGGRFTLWGPEAEGGWTSREEQLLLDAIEQFGFGNWEDMAAHVGASRTPQEVMEHYVSMYIHGNLGKACIPDTIPNRVTDHTCPSGGPLSPSLTTPLPPLDISVAEQQQLGYMPLRDDYEIEYDQDAETLISGLSVNYDDDDVEIELKRAHVDMYVRKLKERQRRKNIARDYNLVPAFLGKDKKEKEKALKRKITKEEKELRLKLRPLYQFMSCKEFDDLFENMHKEKMLRAKIRELQRYRRNGITKMEESAEYEAARHKREKRKENKNLAGSKRGKEDGKDSEFAAIENLPGFELLSDREKVLCSSLNLSPARYVTVKTIIIKDHLQKRQGIPSKSRLPSYLDKVLKKRILNFLTESGWISRDAS

SEQ ID NO: 4093 - protein, 753 aa, Homo sapiens
MERRAWSLQCTAFVLFCAWCALNSAKAKRQFVNEWAAEIPGGPEAASAIAEELGYDLLGQIGSLENHYLFKHKNHPRRSRRSAFHITKRLSDDDRVIWAEQQYEKERSKRSALRDSALNLFNDPMWNQQWYLQDTRMTAALPKLDLHVIPVWQKGITGKGVVITVLDDGLEWNHTDIYANYDPEASYDFNDNDHDPFPRYDPTNENKHGTRCAGEIAMQANNHKCGVGVAYNSKVGGIRMLDGIVTDAIEASSIGFNPGHVDIYSASWGPNDDGKTVEGPGRLAQKAFEYGVKQGRQGKGSIFVWASGNGGRQGDNCDCDGYTDSIYTISISSASQQGLSPWYAEKCSSTLATSYSSGDYTDQRITSADLHNDCTETHTGTSASAPLAAGIFALALEANPNLTWRDMQHLVVWTSEYDPLANNPGWKKNGAGLMVNSRFGFGLLNAKALVDLADPRTWRSVPEKKECVVKDNDFEPRALKANGEVIIEIPTRACEGQENAIKSLEHVQFEATIEYSRRGDLHVTLTSAAGTSTVLLAERERDTSPNGFKNWDFMSVHTWGENPIGTWTLRITDMSGRIQNEGRIVNWKLILHGTSSQPEHMKQPRVYTSYNTVQNDRRGVEKMVDPGEEQPTQENPKENTLVSKSPSSSSVGGRRDELEEGAPSQAMLRLLQSAFSKNSPPKQSPKKSPSAKLNIPYENFYEALEKLNKPSQLKDSEDSLYNDYVDVFYNTKPYKHRDDRLLQALVDILNEEN

SEQ ID NO: 4094 - protein, 498 aa, Homo sapiens
MLQCRPAQEFSFGPRALKDALVSTDAALQQLYVSAFSPAERLFLAEAYNPQRTLFCTLLIRTGFDWLLSRPEAPEDFQTFHASLQHRKPRLARKHIYLQPIDLSEEPVGSSLLHQLCSCTEAFFLGLRVKCLPSVAAASIRCSSRPSRDSDRLQLHTDGILSFLKNNKPGDALCVLGLTLSDLYPHEAWSFTFSKFLPGHEVGVCSFARFSGEFPKSGPSAPDLALVEAAADGPEAPLQDRGWALCFSALGMVQCCKVTCHELCHLLGLGNCRWLRCLMQGALSLDEALRRPLDLCPICLRKLQHVLGFRLIERYQRLYTWTQAVVGTWPSQEAGEPSVWEDTPPASADSGMCCESDSEPGTSVSEPLTPDAGSHTFASGPEEGLSYLAASEAPLPPGGPAEAIKEHERWLAMCIQALQREVAEEDLVQVDRAVDALDRWEMFTGQLPATRQDPPSSRDSVGLRKVLGDKFSSLRRKLSARKLARAESAPRPWDGEES

SEQ ID NO: 4095 - protein, 472 aa, Homo sapiens
MGCDRNCGLIAGAVIGAVLAVFGGILMPVGDLLIQKTIKKQVVLEEGTIAFKNWVKTGTEVYRQFWIFDVQNPQEVMMNSSNIQVKQRGPYTYRVRFLAKENVTQDAEDNTVSFLQPNGAIFEPSLSVGTEADNFTVLNLAVAAASHIYQNQFVQMILNSLINKSKSSMFQVRTLRELLWGYRDPFLSLVPYPVTTTVGLFYPYNNTADGVYKVFNGKDNISKVAIIDTYKGKRNLSYWESHCDMINGTDAASFPPFVEKSQVLQFFSSDICRSIYAVFESDVNLKGIPVYRFVLPSKAFASPVENPDNYCFCTEKIISKNCTSYGVLDISKCKEGRPVYISLPHFLYASPDVSEPIDGLNPNEEEHRTYLDIEPITGFTLQFAKRLQVNLLVKPSEKIQVLKNLKRNYIVPILWLNETGTIGDEKANMFRSQVTGKINLLGLIEMILLSVGVVMFVAFMISYCACRSKTIK

SEQ ID NO: 4096 - protein, 659 aa, Homo sapiens
MAAVILESIFLKRSQQKKKTSPLNFKKRLFLLTVHKLSYYEYDFERGRRGSKKGSIDVEKITCVETVVPEKNPPPERQIPRRGEESSEMEQISIIERFPYPFQVVYDEGPLYVFSPTEELRKRWIHQLKNVIRYNSDLVQKYHPCFWIDGQYLCCSQTAKNAMGCQILENRNGSLKPGSSHRKTKKPLPPTPEEDQILKKPLPPEPAAAPVSTSELKKVVALYDYMPMNANDLQLRKGDEYFILEESNLPWWRARDKNGQEGYIPSNYVTEAEDSIEMYEWYSKHMTRSQAEQLLKQEGKEGGFIVRDSSKAGKYTVSVFAKSTGDPQGVIRHYVVCSTPQSQYYLAEKHLFSTIPELINYHQHNSAGLISRLKYPVSQQNKNAPSTAGLGYGSWEIDPKDLTFLKELGTGQFGVVKYGKWRGQYDVAIKMIKEGSMSEDEFIEEAKVMMNLSHEKLVQLYGVCTKQRPIFIITEYMANGCLLNYLREMRHRFQTQQLLEMCKDVCEAMEYLESKQFLHRDLAARNCLVNDQGVVKVSDFGLSRYVLDDEYTSSVGSKFPVRWSPPEVLMYSKFSSKSDIWAFGVLMWEIYSLGKMPYERFTNSETAEHIAQGLRLYRPHLASEKVYTIMYSCWHEKADERPTFKILLSNILDVMDEES

SEQ ID NO: 4097 - protein, 943 aa, Homo sapiens
MGLTKQYLRYVASAVFGVIGSQKGNIVFVTLRGEKGRYVAVPACEHVFIWDLRKGEKILILQGLKQEVTCLCPSPDGLHLAVGYEDGSIRIFSLLSGEGNVTFNGHKAAITTLKYDQLGGRLASGSKDTDIIVWDVINESGLYRLKGHKDAITQALFLREKNLLVTSGKDTMVKWWDLDTQHCFKTMVGHRTEVWGLVLLSEEKRLITGASDSELRVWDIAYLQEIEDPEEPDPKKIKGSSPGIQDTLEAEDGAFETDEAPEDRILSCRKAGSIMREGRDRVVNLAVDKTGRILACHGTDSVLELFCILSKKEIQKKMDKKMKKARKKAKLHSSKGEEEDPEVNVEMSLQDEIQRVTNIKTSAKIKSFDLIHSPHGELKAVFLLQNNLVELYSLNPSLPTPQPVRTSRITIGGHRSDVRTLSFSSDNIAVLSAAADSIKIWNRSTLQCIRTMTCEYALCSFFVPGDRQVVIGTKTGKLQLYDLASGNLLETIDAHDGALWSMSLSPDQRGFVTGGADKSVKFWDFELVKDENSTQKRLSVKQTRTLQLDEDVLCVSYSPNQKLLAVSLLDCTVKIFYVDTLKFFLSLYGHKLPVICMDISHDGALIATGSADRNVKIWGLDFGDCHKSLFAHDDSVMYLQFVPKSHLFFTAGKDHKIKQWDADKFEHIQTLEGHHQEIWCLAVSPSGDYVVSSSHDKSLRLWERTREPLILEEEREMEREAEYEESVAKEDQPAVPGETQGDSYFTGKKTIETVKAAERIMEAIELYREETAKMKEHKAICKAAGKEVPLPSNPILMAYGSISPSAYVLEIFKGIKSSELEESLLVLPFSYVPDILKLFNEFIQLGSDVELICRCLFFLLRIHFGQITSNQMLVPVIEKLRETTISKVSQVRDVIGFNMAGLDYLKRECEAKSEVMFFADATSHLEEKKRKRKKREKLILTLT

SEQ ID NO: 4098 - protein, 582 aa, Homo sapiens
MSPAPRPPRCLLLPLLTLGTALASLGSAQSSSFSPEAWLQQYGYLPPGDLRTHTQRSPQSLSAAIAAMQKFYGLQVTGKADADTMKAMRRPRCGVPDKFGAEIKANVRRKRYAIQGLKWQHNEITFCIQNYTPKVGEYATYEAIRKAFRVWESATPLRFREVPYAYIREGHEKQADIMIFFAEGFHGDSTPFDGEGGFLAHAYFPGPNIGGDTHFDSAEPWTVRNEDLNGNDIFLVAVHELGHALGLEHSSDPSAIMAPFYQWMDTENFVLPDDDRRGIQQLYGGESGFPTKMPPQPRTTSRPSVPDKPKNPTYGPNICDGNFDTVAMLRGEMFVFKERWFWRVRNNQVMDGYPMPIGQFWRGLPASINTAYERKDGKFVFFKGDKHWVFDEASLEPGYPKHIKELGRGLPTDKIDAALFWMPNGKTYFFRGNKYYRFNEELRAVDSEYPKNIKVWEGIPESPRGSFMGSDEVFTYFYKGNKYWKFNNQKLKVEPGYPKSALRDWMGCPSGGRPDEGTEEETEVIIIEVDEEGGGAVSAAAVVLPVLLLLLVLAVGLAVFFFRRHGTPRRLLYCQRSLLDKV

SEQ ID NO: 4099 - protein, 1079 aa, Homo sapiens
MEWLLEDLLGAKGDMGLLWGQLTHALACRHCGSSCFQSPGNLVTLFLFVVWQIQRWWQLGRLRQLHPWCSGNMVQGKELPLLHRVAFLDHLCKQKSEVEEEGEEEEEGEDEASLDPLKPCSPTKEAPTGEQATPAPPQPSCGSEGLLKAIGIPEQTVMQPVSPSRSFPIFQILTSFPVRHKIASGNRQQQRKSQLFWGLPSLHSESLEAIFLSSGGPSPLKWSVCSSVFFNKLAFLPRSNLLLPQYHSSAQFSTHGAHTMEDLEGMAPDPQLLPPPSSPSVSSLLLHLRPFPVDHKGVLSGAEAPTQSPGTSPLEVLPGYETHLETTGHKKMPQAFEPPMPPPCQSPASLSEPRKVSPEGGLAISKDFWGTVGYREKPQASESSMPVPCPPLDSLPELQRESSLEDPSRYKPQWECRENSGNLWAFESPVLDLNPELSGTSPECVPPASETPWKGMQSRENIWVPADPVSPPSLPSVPLLESLVMGPQGVLSESKALWETMGQKENLWASDSPDPVHSTPPTTLMEPHRINPGECLATSEATWKDTEHSRNSSASRSPSLALSPPPALAPELLRVRSMGVLSDSEARCGDIQKTKNSWASKHPACNLPQDLHGASPLGVLSDSQSIVGEMEQKENCVPVFPGRGSSPSSNSVSKSHVSEPIADQSNYKPDGEAVEQRKNHWATELPAPSSLSTPLPEPHIDLELVWRNVQQREVPQGPSPLAVDPLHPVPQPPTLAEAVKIERTHPGLPKGVTCPGVKAEAPLSQRWTVPELLTHPGIHAWQWSRELKLRLKKLRQSPASRAPGPSQSFCSSPILSSTIPDFWGLPSCPPQQIYPPNPCPHSSSCHPQEVQRTVPQPVQSSHCHHFQSSSQLQPQESGRAEQGSQRGEKMKGKMVSQVPSQGPCVHMEAGVDYLSPGPGEPSNSKVLVSGKRKDKASASSSAKKREHPRKPKAGDHRRGTARLGLSTVTGKNHPAQARSLVEAPVSTFPQRSQHRGQSSQHTALPQLLLPKASGPQDQPEAGRRASDILTPRHCKHCPWAHMEKYLSFPTLKASLTRGLQKVLAKCLDNHRPLPTKSSQ

SEQ ID NO: 4100 - protein, 283 aa, Homo sapiens
MKCYFTDHRGEQSPTDGTTLSLTSPESTEESVEVFWPGTIQREGSSPRPGPAIPREEGLYFAARDRGMRDWSSSPSSESSEYQSYSQYQSCCSCMCDEDNAAPQSVCAFYTHVQTVRGVAVAWETEAGFEPVTRKPRIHEAQFIKRQRWNGSSFEMASNTDMRWDLEACKSNCSPEPEDIDLLECCLQELREPPDWLVTTNYGVRCVACCRVLPSLDALLEHAQHGIREGFSCQIFFEEMLERRRAQGQAHDQQLEEEQSPSDNSECSRPQGEVLSAQQQEKQ

SEQ ID NO: 4101 - protein, 613 aa, Homo sapiens
MAQSRVLLLLLLLPPQLHLGPVLAVRAPGFGRSGGHSLSPEENEFAEEEPVLVLSPEEPGPGPAAVSCPRDCACSQEGVVDCGGIDLREFPGDLPEHTNHLSLQNNQLEKIYPEELSRLHRLETLNLQNNRLTSRGLPEKAFEHLTNLNYLYLANNKLTLAPRFLPNALISVDFAANYLTKIYGLTFGQKPNLRSVYLHNNKLADAGLPDNMFNGSSNVEVLILSSNFLRHVPKHLPPALYKLHLKNNKLEKIPPGAFSELSSLRELYLQNNYLTDEGLDNETFWKLSSLEYLDLSSNNLSRVPAGLPRSLVLLHLEKNAIRSVDANVLTPIRSLEYLLLHSNQLREQGIHPLAFQGLKRLHTVHLYNNALERVPSGLPRRVRTLMILHNQITGIGREDFATTYFLEELNLSYNRITSPQVHRDAFRKLRLLRSLDLSGNRLHTLPPGLPRNVHVLKVKRNELAALARGALVGMAQLRELYLTSNRLRSRALGPRAWVDLAHLQLLDIAGNQLTEIPEGLPESLEYLYLQNNKISAVPANAFDSTPNLKGIFLRFNKLAVGSVVDSAFRRLKHLQVLDIEGNLEFGDISKDRGRLGKEKEEEEEEEEEEEETR

SEQ ID NO: 4102 - protein, 285 aa, Homo sapiens
MMAVDIEYRYNCMAPSLRQERFAFKISPKPSKPLRPCIQLSSKNEASGMVAPAVQEKKVKKRVSFADNQGLALTMVKVFSEFDDPLDMPFNITELLDNIVSLTTAESESFVLDFSQPSADYLDFRNRLQADHVCLENCVLKDKAIAGTVKVQNLAFEKTVKIRMTFDTWKSYTDFPCQYVKDTYAGSDRDTFSFDISLPEKIQSYERMEFAVYYECNGQTYWDSNRGKNYRIIRAELKSTQGMTKPHSGPDLGISFDQFGSPRCSYGLFPEWPSYLGYEKLGPYY

SEQ ID NO: 4103 - protein, 1060 aa, Homo sapiens
MELWAPQRLPQTRGKATAPSKDPDRGFRRDGHHRPVPHSWHNGERFHQWQDNRGSPQPQQEPRADHQQQPHYASRPGDWHQPVSGVDYYEGGYRNQLYSRPGYENSYQSYQSPTMREEYAYGSYYYHGHPQWLQEERVPRQRSPYIWHEDYREQKYLDEHHYENQHSPFGTNSETHFQSNSRNPCKDSPASNSGQEWPGELFPGSLLAEAQKNKPSLASESNLLQQRESGLSSSSYELSQYIRDAPERDDPPASAAWSPVQADVSSAGPKAPMKFYIPHVPVSFGPGGQLVHVGPSSPTDGQAALVELHSMEVILNDSEEQEEMRSFSGPLIREDVHKVDIMTFCQQKAAQSCKSETLGSRDSALLWQLLVLLCRQNGSMVGSDIAELLMQDCKKLEKYKRQPPVANLINLTDEDWPVLSSGTPNLLTGEIPPSVETPAQIVEKFTRLLYYGRKKEALEWAMKNHLWGHALFLSSKMDPQTYSWVMSGFTSTLALNDPLQTLFQLMSGRIPQAATCCGEKQWGDWRPHLAVILSNQAGDPELYQRAIVAIGDTLAGKGLVEAAHFCYLMAHVPFGHYTVKTDHLVLLGSSHSQEFLKFATTEAIQRTEIFEYCQMLGRPKSFIPSFQVYKLLYASRLADYGLVSQALHYCEAIGAAVLSQGESSHPVLLVELIKLAEKLKLSDPLVLERRSGDRDLEPDWLAQLRRQLEQKVAGDIGDPHPTRSDISGAGGTTTENTFYQDFSGCQGYSEAPGYRSALWLTPEQTCLLQPSPQQPFPLQPGSYPAGGGAGQTGTPRPFYSVPETHLPGTGSSVAVTEATGGTVWEEMLQTHLGPGENTVSQETSQPPDGQEVISKPQTPLAARPRSISESSASSAKEDEKESSDEADKNSPRNTAQRGKLGDGKEHTKSSGFGWFSWFRSKPTKNASPAGDEDSSDSPDSEETPRASSPHQAGLGLSLTPSPESPPLPDVSAFSRGRGGGEGRGSASSGGAAAGAGVGGLSGPESVSFELCSNPGVLLPPPALKGAVPLYNPSQVPQLPTATSLNRPNRLAQRRYPTQPC

SEQ ID NO: 4104 - protein, 338 aa, Homo sapiens
MINSTSTQPPDESCSQNLLITQQIIPVLYCMVFIAGILLNGVSGWIFFYVPSSKSFIIYLKNIVIADFVMSLTFPFKILGDSGLGPWQLNVFVCRVSAVLFYVNMYVSIVFFGLISFDRYYKIVKPLWTSFIQSVSYSKLLSVIVWMLMLLLAVPNIILTNQSVREVTQIKCIELKSELGRKWHKASNYIFVAIFWIVFLLLIVFYTAITKKIFKSHLKSSRNSTSVKKKSSRNIFSIVFVFFVCFVPYHIARIPYTKSQTEAHYSCQSKEILRYMKEFTLLLSAANVCLDPIIYFFLCQPFREILCKKLHIPLKAQNDLDISRIKRGNTTLESTDTL

SEQ ID NO: 4105 - protein, 847 aa, Homo sapiens
MAGCRGSLCCCCRWCCCCGERETRTPEELTILGETQEEEDEILPRKDYEKGRRYEAVKWMVVFAIGVCTGLVGLFVDFFVRLFTQLKFGVVQTSVEECSQKGCLALSLLELLGFNLTFVFLASLLVLIEPVAAGSGIPEVKCYLNGVKVPGIVRLRTLLCKVLGVLFSVAGGLFVEKEGPMIHSGSVVGAGLPQFQSISLRKIQFNFPYFRSDRDKRDFVSAGAAAGVAAAFGAPIGGTLFSLEEGSSFWNQGLTWKVLFCSMSATFTLNFFRSGIQFGSWGSFQLPGLLNFGEFKCSDSDKKCHLWTAMDLGFFVVMGVIGGLLGATFNCLNKRLAKYRMRNVHPKPKLVRVLESLLVSLVTTVVVFVASMVLGECRQMSSSSQIGNDSFQLQVTEDVNSSIKTFFCPNDTYNDMATLFFNPQESAILQLFHQDGTFSPVTLALFFVLYFLLACWTYGISVPSGLFVPSLLCGAAFGRLVANVLKSYIGLGHIYSGTFALIGAAAFLGGVVRMTISLTVILIESTNEITYGLPIMVTLMVAKWTGDFFNKGIYDIHVGLRGVPLLEWETEVEMDKLRASDIMEPNLTYVYPHTRIQSLVSILRTTVHHAFPVVTENRGNEKEFMKGNQLISNNIKFKKSSILTRAGEQRKRSQSMKSYPSSELRNMCDEHIASEEPAEKEDLLQQMLERRYTPYPNLYPDQSPSEDWTMEERFRPLTFHGLILRSQLVTLLVRGVCYSESQSSASQPRLSYAEMAEDYPRYPDIHDLDLTLLNPRMIVDVTPYMNPSPFTVSPNTHVSQVFNLFRTMGLRHLPVVNAVGEIVGIITRHNLTYEFLQARLRQHYQTI

SEQ ID NO: 4106 - protein, 339 aa, Homo sapiens
MAEASSDPGAEEREELLGPTAQWSVEDEEEAVHEQCQHERDRQLQAQDEEGGGHVPERPKQEMLLSLKPSEAPELDEDEGFGDWSQRPEQRQQHEGAQGALDSGEPPQCRSPEGEQEDRPGLHAYEKEDSDEVHLEELSLSKEGPGPEDTVQDNLGAAGAEEEQEEHQKCQQPRTPSPLVLEGTIEQSSPPLSPTTKLIDRTESLNRSIEKSNSVKKSQPDLPISKIDQWLEQYTQAIETAGRTPKLARQASIELPSMAVASTKSRWETGEVQAQSAAKTPSCKDIVAGDMSKKSLWEQKGGSKTSSTIKSTPSGKRYKFVATGHGKYEKVLVEGGPAP

SEQ ID NO: 4107 - protein, 444 aa, Homo sapiens
MLQRIGLIFLHNIVVVSNCFYFQAFLDEFTNWSRINPNKARIPMAGDTQGVVGTVSKPCFTAYEMKIGAITFQVATGDIATEQVDVIVNSTARTFNRKSGVSRAILEGAGQAVESECAVLAAQPHRDFIITPGGCLKCKIIIHVPGGKDVRKTVTSVLEECEQRKYTSVSLPAIGTGNAGKNPITVADNIIDAIVDFSSQHSTPSLKTVKVVIFQPELLNIFYDSMKKRDLSASLNFQSTFSMTTCNLPEHWTDMNHQLFCMVQLEPGQSEYNTIKDKFTRTCSSYAIEKIERIQNAFLWQSYQVKKRQMDIKNDHKNNERLLFHGTDADSVPYVNQHGFNRSCAGKNAVSYGKGTYFAVDASYSAKDTYSKPDSNGRKHMYVVRVLTGVFTKGRAGLVTPPPKNPHNPTDLFDSVTNNTRSPKLFVVFFDNQAYPEYLITFTA

SEQ ID NO: 4108 - protein, 499 aa, Homo sapiens
MAQFAFESDLHSLLQLDAPIPNAPPARWQRKAKEAAGPAPSPMRAANRSHSAGRTPGRTPGKSSSKVQTTPSKPGGDRYIPHRSAAQMEVASFLLSKENQPENSQTPTKKEHQKAWALNLNGFDVEEAKILRLSGKPQNAPEGYQNRLKVLYSQKATPGSSRKTCRYIPSLPDRILDAPEIRNDYYLNLVDWSSGNVLAVALDNSVYLWSASSGDILQLLQMEQPGEYISSVAWIKEGNYLAVGTSSAEVQLWDVQQQKRLRNMTSHSARVGSLSWNSYILSSGSRSGHIHHHDVRVAEHHVATLSGHSQEVCGLRWAPDGRHLASGGNDNLVNVWPSAPGEGGWVPLQTFTQHQGAVKAVAWCPWQSNVLATGGGTSDRHIRIWNVCSGACLSAVDAHSQVCSILWSPHYKELISGHGFAQNQLVIWKYPTMAKVAELKGHTSRVLSLTMSPDGATVASAAADETLRLWRCFELDPARRREREKASAAKSSLIHQGIR

SEQ ID NO: 4109 - protein, 319 aa, Homo sapiens
MTNSSFFCPVYKDLEPFTYFFYLVFLVGIIGSCFATWAFIQKNTNHRCVSIYLINLLTADFLLTLALPVKIVVDLGVAPWKLKIFHCQVTACLIYINMYLSIIFLAFVSIDRCLQLTHSCKIYRIQEPGFAKMISTVVWLMVLLIMVPNMMIPIKDIKEKSNVGCMEFKKEFGRNWHLLTNFICVAIFLNFSAIILISNCLVIRQLYRNKDNENYPNVKKALINILLVTTGYIICFVPYHIVRIPYTLSQTEVITDCSTRISLFKAKEATLLLAVSNLCFDPILYYHLSKAFRSKVTETFASPKETKAQKEKLRCENNA

SEQ ID NO: 4110 - protein, 696 aa, Homo sapiens
MATPGSEPQPFVPALSVATLHPLHHPHHHHHHHQHHGGTGAPGGAGGGGGGSGGFNLPLNRGLERALEEAANSGGLNLSARKLKEFPRTAAPGHDLSDTVQADLSKNRLVEVPMELCHFVSLEILNLYHNCIRVIPEAIVNLQMLTYLNLSRNQLSALPACLCGLPLKVLIASNNKLGSLPEEIGQLKQLMELDVSCNEITALPQQIGQLKSLRELNVRRNYLKVLPQELVDLSLVKFDFSCNKVLVIPICFREMKQLQVLLLENNPLQSPPAQICTKGKVHIFKYLSIQACQIKTADSLYLHTMERPHLHQHVEDGKKDSDSGVGSDNGDKRLSATEPSDEDTVSLNVPMSNIMEEEQIIKEDSCHRLSPVKGEFHQEFQPEPSLLGDSTNSGEERDQFTDRADGLHSEFMNYKARAEDCEELLRIEEDVHWQTEGIISSSKDQDMDIAMIEQLREAVDLLQDPNGLSTDITERSVLNLYPMGSAEALELQDSALNGQIQLETSPVCEVQSDLTLQSNGSQYSPNEIRENSPAVSPTTNSTAPFGLKPRSVFLRPQRNLESIDPQFTIRRKMEQMREEKELVEQLRESIEMRLKVSLHEDLGAALMDGVVLCHLVNHIRPRSVASIHVPSPAVPKLSMAKCRRNVENFLEACRKLGVPEEKLCLPHHILEEKGLVKVGITIQALLDITVTKALFT

SEQ ID NO: 4111 - protein, 188 aa, Homo sapiens [sequence omitted]

SEQ ID NO: 4112 - protein, 860 aa, Homo sapiens
MCDLRRPAAGGMMDLAYVCEWEKWSKSTHCPSVPLACAWSCRNLIAFTMDLRSDDQDLTRMIHILDTEHPWDLHSIPSEHHEAITCLEWDQSGSRLLSADADGQIKCWSMADHLANSWESSVGSLVEGDPIVALSWLHNGVKLALHVEKSGASSFGEKFSRVKFSPSLTLFGGKPMEGWIAVTVSGLVTVSLLKPSGQVLTSTESLCRLRGRVALADIAFTGGGNIVVATADGSSASPVQFYKVCVSVVSEKCRIDTEILPSLFMRCTTDLNRKDKFPAITHLKFLARDMSEQVLLCASSQTSSIVECWSLRKEGLPVNNIFQQISPVVGDKQPTILKWRILSATNDLDRVSAVALPKLPISLTNTDLKVASDTQFYPGLGLALAFHDGSVHIVHRLSLQTMAVFYSSAAPRPVDEPAMKRPRTAGPAVHLKAMQLSWTSLALVGIDSHGKLSVLRLSPSMGHPLEVGLALRHLLFLLEYCMVTGYDWWDILLHVQPSMVQSLVEKLHEEYTRQTAALQQVLSTRILAMKASLCKLSPCTVTRVCDYHTKLFLIAISSTLKSLLRPHFLNTPDKSPGDRLTEICTKITDVDIDKVMINLKTEEFVLDMNTLQALQQLLQWVGDFVLYLLASLPNQGSLLRPGHSFLRDGTSLGMLRELMVVIRIWGLLKPSCLPVYTATSDTQDSMSLLFRLLTKLWICFPSTGPCSVWVLLGWQPLPGRDEGPASEPDEALVDECCLLPSQLLIPSLDWLPASDGLVSRLQPKQPLRLQFGRAPTLPGSAATLQLDGLARAPGQPKIDHLRRLHLGACPTEECKACTRCGCVTMLKSPNRTTAVKQWEQRWIKNCLCGGLWWRVPLSYP

SEQ ID NO: 4113 - protein, 2947 aa, Homo sapiens [sequence omitted]

SEQ ID NO: 4114 - protein, 132 aa, Homo sapiens
MISITEWQKIGVGITGFGIFFILFGTLLYFDSVLLAFGNLLFLTGLSLIIGLRKTFWFFFQRHKLKGTSFLLGGVVIVLLRWPLLGMFLETYGFFSLFKGFFPVAFGFLGNVCNIPFLGALFRRLQGTSSMV

SEQ ID NO: 4115 - protein, 622 aa, Homo sapiens
MAHVRGLQLPGCLALAALCSLVHSQHVFLAPQQARSLLQRVRRANTFLEEVRKGNLERECVEETCSYEEAFEALESSTATDVFWAKYTACETARTPRDKLAACLEGNCAEGLGTNYRGHVNITRSGIECQLWRSRYPHKPEINSTTHPGADLQENFCRNPDSSTTGPWCYTTDPTVRRQECSIPVCGQDQVTVAMTPRSEGSSVNLSPPLEQCVPDRGQQYQGRLAVTTHGLPCLAWASAQAKALSKHQDFNSAVQLVENFCRNPDGDEEGVWCYVAGKPGDFGYCDLNYCEEAVEEETGDGLDEDSDRAIEGRTATSEYQTFFNPRTFGSGEADCGLRPLFEKKSLEDKTERELLESYIDGRIVEGSDAEIGMSPWQVMLFRKSPQELLCGASLISDRWVLTAAHCLLYPPWDKNFTENDLLVRIGKHSRTRYERNIEKISMLEKIYIHPRYNWRENLDRDIALMKLKKPVAFSDYIHPVCLPDRETAASLLQAGYKGRVTGWGNLKETWTANVGKGQPSVLQVVNLPIVERPVCKDSTRIRITDNMFCAGYKPDEGKRGDACEGDSGGPFVMKSPFNNRWYQMGIVSWGEGCDRDGKYGFYTHVFRLKKWIQKVIDQFGE

SEQ ID NO: 4116 - protein, 689 aa, Homo sapiens
MIEMAAEKEPFLVPAPPPPLKDESGGGGGPTVPPHQEAASGELRGGTERGPGRCAPSAGSPAAAVGRESPGAAATSSSGPQAQQHRGGGPQAQSHGEARLSDPPGRAAPPDVGEERRGGGGTELGPPAPPRPRNGYQPHRPPGGGGGKRRNSCNVGGGGGGFKHPAFKRRRRVNSDCDSVLPSNFLLGGNIFDPLNLNSLLDEEVSRTLNAETPKSSPLPAKGRDPVEILIPKDITDPLSLNTCTDEGHVVLASPLKTGRKRHRHRGQHHQQQQAAGGSESHPVPPTAPLTPLLHGEGASQQPRHRGQNRDAPQPYELNTAINCRDEVVSPLPSALQGPSGSLSAPPAASVISAPPSSSSRHRKRRRTSSKSEAGARGGGQGSKEKGRGSWGGRHHHHHPLPAAGFKKQQRKFQYGNYCKYYGYRNPSCEDGRLRVLKPEWFRGRDVLDLGCNVGHLTLSIACKWGPSRMVGLDIDSRLIHSARQNIRHYLSEELRLPPQTLEGDPGAEGEEGTTTVRKRSCFPASLTASRGPIAAPQVPLDGADTSVFPNNVVFVTGNYVLDRDDLVEAQTPEYDVVLCLSLTKWVHLNWGDEGLKRMFRRIYRHLRPGGILVLEPQPWSSYGKRKTLTETIYKNYYRIQLKPEQFSSYLTSPDVGFSSYELVATPHNTSKGFQRPVYLFHKARSPSH

SEQ ID NO: 4117 - protein, 389 aa, Homo sapiens
MSEIRFTNLTWDQVITLDQVLDEVIPIHGKGNFPTMEVKPKDIIHVVKDQLIGQGIIVKDARLNGSVASYILASHNGISYKDLDVIFGVELPGNEEFQVVKDAVLDCLLDFLPKDVKKEKLSPDIMKDAYVQKLVKVCNGHDCWSLISLSNNTGKNLELKFVSSLRRQFEFSVDSFQIVLDPMLDFYSDKNAKLTKESYPVVVAESMYGDFQEAMTHLQHKLICTRKPEEIRGGGLLKYCSLLVHGFKPACMSEIKNLERYMCSRFFIDFPHIEEQQKKIESYLHNHFIGEGMTKYDYLMTLHGVVNESTVCLMSYERRQILHLITMMALKVLGELNILPNTQKVTCFYQPAPYFAAEARYPIYVIPEPPPVSFQPYHPLHFRGSNGMS

SEQ ID NO: 4118 - protein, 576 aa, Homo sapiens
MDDLKYGVYPLKEASGCPGAERNLLVYSYFEKETLTFRDVAIEFSLEEWECLNPAQQNLYMNVMLENYKNLVFLGVAVSKQDPVTCLEQEKEPWNMKRHEMVDEPPAMCSYFTKDLWPEQDIKDSFQQVILRRYGKCEHENLQLRKGSASVDEYKVHKEGYNELNQCLTTTQSKIFPCDKYVKVFHKFLNANRHKTRHTGKKPFKCKKCGKSFCMLLHLSQHKRIHIRENSYQCEECGKAFKWFSTLTRHKRIHTGEKPFKCEECGKAFKQSSTLTTHKIIHTGEKPYRCEECGKAFNRSSHLTTHKIIHTGEKPYKCEECGKAFNQSSTLSTHKFIHAGEKPYKCEECDKAFNRFSYLTKHKIIHTGEKSYKCEECGKGFNWSSTLTKHKRIHTGEKPYKCEVCGKAFNESSNLTTHKMIHTGEKPYKCEECGKAFNRSPQLTAHKIIHTGEKPYKCEECGKAFSQSSILTTHKRIHTGEKPYKCEECGKAFNRSSNLTKHKIIHTGEKSYKCEECGKAFNQSSTLTKHRKIHTRQKPYNCEECDNTFNQSSNLIKQNNSYWRETLQMSRMWESL

SEQ ID NO: 4119 - protein, 431 aa, Homo sapiens
MPPILQRLQQATKMMSRRKILLLVLGCSTVSLLIHQGAQLSWYPKLFPLSCPPLRNSPPRPKHMTVAFLKTHKTAGTTVQNILFRFAERHNLTVALPHPSCEHQFCYPRNFSAHFVHPATRPPHVLASHLRFDRAELERLMPPSTVYVTILREPAAMFESLFSYYNQYCPAFRRVPNASLEAFLRAPEAYYRAGEHFAMFAHNTLAYDLGGDNERSPRDDAAYLAGLIRQVEEVFSLVMIAEYFDESLVLLRRLLAWDLDDVLYAKLNARAASSRLAAIPAALARAARTWNALDAGLYDHFNATFWRHVARAGRACVEREARELREARQRLLRRCFGDEPLLRPAAQIRTKQLQPWQPSRKVDIMGYDLPGGGAGPATEACLKLAMPEVQYSNYLLRKQKRRGGARARPEPVLDNPPPRPIRVLPRGPQGP

SEQ ID NO: 4120 - protein, 727 aa, Homo sapiens
MAFQKAVKGTILVGGGALATVLGLSQFAHYRRKQMNLAYVKAADCISEPVNREPPSREAQLLTLQNTSEFDILVIGGGATGSGCALDAVTRGLKTALVERDDFSSGTSSRSTKLIHGGVRYLQKAIMKLDIEQYRMVKEALHERANLLEIAPHLSAPLPIMLPVYKWWQLPYYWVGIKLYDLVAGSNCLKSSYVLSKSRALEHFPMLQKDKLVGAIVYYDGQHNDARMNLAIALTAARYGAATANYMEVVSLLKKTDPQTGKVRVSGARCKDVLTGQEFDVRAKCVINATGPFTDSVRKMDDKDAAAICQPSAGVHIVMPGYYSPESMGLLDPATSDGRVIFFLPWQKMTIAGTTDTPTDVTHHPIPSEEDINFILNEVRNYLSCDVEVRRGDVLAAWSGIRPLVTDPKSADTQSISRNHVVDISESGLITIAGGKWTTYRSMAEDTINAAVKTHNLKAGPSRTVGLFLQGGKDWSPTLYIRLVQDYGLESEVAQHLAATYGDKAFEVAKMASVTGKRWPIVGVRLVSEFPYIEAEVKYGIKEYACTAVDMISRRTRLAFLNVQAAEEALPRIVELMGRELNWDDYKKQEQLETARKFLYYEMGYKSRSEQLTDRSEISLLPSDIDRYKKRFHKFDADQKGFITIVDVQRVLESINVQMDENTLHEILNEVDLNKNGQVELNEFLQLMSAIQKGRVSGSRLAILMKTAEENLDRRVPIPVDRSCGGL

SEQ ID NO: 4121 - protein, 485 aa, Homo sapiens
MCQVGEDYGEPAPEEPPPAPRPSREQKCVKCKEAQPVVVIRAGDAFCRDCFKAFYVHKFRAMLGKNRLIFPGEKVLLAWSGGPSSSSMVWQVLEGLSQDSAKRLRFVAGVIFVDEGAACGQSLEERSKTLAEVKPILQATGFPWHVVALEEVFSLPPSVLWCSAQELVGSEGAYKAAVDSFLQQQHVLGAGGGPGPTQGEEQPPQPPLDPQNLARPPAPAQTEALSQLFCSVRTLTAKEELLQTLRTHLILHMARAHGYSKVMTGDSCTRLAIKLMTNLALGRGAFLAWDTGFSDERHGDVVVVRPMRDHTLKEVAFYNRLFSVPSVFTPAVDTKAPEKASIHRLMEAFILRLQTQFPSTVSTVYRTSEKLVKGPRDGPAAGDSGPRCLLCMCALDVDAADSATAFGAQTSSRLSQMQSPIPLTETRTPPGPCCSPGVGWAQRCGQGACRREDPQACIEEQLCYSCRVNMKDLGLGLAGDPGLSD

SEQ ID NO: 4122 - protein, 527 aa, Homo sapiens
MSLQMVTVSNNIALIQPGFSLMNFDGQVFFFGQKGWPKRSCPTGVFHLDVKHNHVKLKPTIFSKDSCYLPPLRYPATCTFKGSLESEKHQYIIHGGKTPNNEVSDKIYVMSIVCKNNKKVTFRCTEKDLVGDVPEARYGHSINVVYSRGKSMGVLFGGRSYMPSTHRTTEKWNSVADCLPCVFLVDFEFGCATSYILPELQDGLSFHVSIAKNDTIYILGGHSLANNIRPANLYRIRVDLPLGSPAVNCTVLPGGISVSSAILTQTNNDEFVIVGGYQLENQKRMICNIISLEDNKIEIREMETPDWTPDIKHSKIWFGSNMGNGTVFLGIPGDNKQVVSEGFYFYMLKCAEDDTNEEQTTFTNSQTSTEDPGDSTPFEDSEEFCFSAEANSFDGDDEFDTYNEDDEEDESETGYWITCCPTCDVDINTWVPFYSTELNKPAMIYCSHGDGHWVHAQCMDLAERTLIHLSAGSNKYYCNEHVEIARALHTPQRVLPLKKPPMKSLRKKGSGKILTPAKKSFLRRLFD

SEQ ID NO: 4123 - protein, 307 aa, Homo sapiens
MSQERPTFYRQELNKTIWEVPERYQNLSPVGSGAYGSVCAAFDTKTGLRVAVKKLSRPFQSIIHAKRTYRELRLLKHMKHENVIGLLDVFTPARSLEEFNDVYLVTHLMGADLNNIVKCQKLTDDHVQFLIYQILRGLKYIHSADIIHRDLKPSNLAVNEDCELKILDFGLARHTDDEMTGYVATRWYRAPEIMLNWMHYNQTVDIWSVGCIMAELLTGRTLFPGTDHIDQLKLILRLVGTPGAELLKKISSESLSTCWRRCLYWTQIRELQRPKPLHMPTLLSTTILMMNQWPILMISPLKAGTSL

SEQ ID NO: 4124 - protein, 911 aa, Homo sapiens
MKSQKEGCCSRGDLSIQTGPGGEWAPRRLVSNVLIFSCTNIVGVCTHYPAEVSQRQAFQETRECIQARLHSQRENQQQERLLLSVLPRHVAMEMKADINAKQEDMMFHKIYIQKHDNVSILFADIEGFTSLASQCTAQELVMTLNELFARFDKLAAENHCLRIKILGDCYYCVSGLPEARADHAHCCVEMGMDMIEAISLVREVTGVNVNMRVGIHSGRVHCGVLGLRKWQFDVWSNDVTLANHMEAGGKAGRIHITKATLNYLNGDYEVEPGCGGERNAYLKEHSIETFLILRCTQKRKEEKAMIAKMNRQRTNSIGHNPPHWGAERPFYNHLGGNQVSKEMKRMGFEDPKDKNAQESANPEDEVDEFLGRAIDARSIDRLRSEHVRKFLLTFREPDLEKKYSKQVDDRFGAYVACASLVFLFICFVQITIVPHSIFMLSFYLTCSLLLTLVVFVSVIYSCVKLFPSPLQTLSRKIVRSKMNSTLVGVFTITLVFLAAFVNMFTCNSRDLLGCLAQEHNISASQVNACHVAESAVNYSLGDEQGFCGSPWPNCNFPEYFTYSVLLSLLACSVFLQISCIGKLVLMLAIELIYVLIVEVPGVTLFDNADLLVTANAIDFFNNGTSQCPEHATKVALKVVTPIIISVFVLALYLHAQQVESTARLDFLWKLQATEEKEEMEELQAYNRRLLHNILPKDVAAHFLARERRNDELYYQSCECVAVMFASIANFSEFYVELEANNEGVECLRLLNEIIADFDEIISEDRFRQLEKIKTIGSTYMAASGLNDSTYDKVGKTHIKALADFAMKLMDQMKYINEHSFNNFQMKIGLNIGPVVAGVIGARKPQYDIWGNTVNVASRMDSTGVPDRIQVTTDMYQVLAANTYQLECRGVVKVKGKGEMMTYFLNGGPPLS

SEQ ID NO: 4125 - protein, 317 aa, Homo sapiens
MLRNGSIVTEFILVGFQQSSTSTRALLFALFLALYSLTMAMNGLIIFITSWTDPKLNSPMYFFLGHLSLLDVCFITTTIPQMLIHLVVRDHIVSFVCCMTQMYFVFCVGVAECILLAFMAYDRYVAICYPLNYVPIISQKVCVRLVGTAWFFGLINGIFLEYISFREPFRRDNHIESFFCEAPIVIGLSCGDPQFSLWAIFADAIVVILSPMVLTVTSYVHILATILSKASSSGRGKTFSTCASHLTVVIFLYTSAMFSYMNPHSTHGPDKDKPFSLLYTIITPMCNPIIYSFRNKEIKEAMVRALGRTRLAQPQSV

SEQ ID NO: 4126 - protein, 675 aa, Homo sapiens
MEGRPPPEGRPPPRPRTGRAPRGRRRAVFAAVLHWSHITHLFENDRHFSHLSTLEREMAFRTEMGLYYSYFKTIVEAPSFLNGVWMIMNDKLTEYPLVINTLKRFNLYPEVILASWYRIYTKIMDLIGIQTKICWTVTRGEGLSPIESCEGLGDPACFYVAVIFILNGLMMALFFIYGTYLSGSRLGGLVTVLCFFFNHGECTRVMWTPPLRESFSYPFLVLQMLLVTHILRATKLYRGSLIALCISNVFFMLPWQFAQFVLLTQIASLFAVYVVGYIDICKLRKIIYIHMISLALCFVLMFGNSMLLTSYYASSLVIIWGILAMKPHFLKINVSELSLWVIQGCFWLFGTVILKYLTSKIFGIADDAHIGNLLTSKFFSYKDFDTLLYTCAAEFDFMEKETPLRYTKTLLLPVVLVVFVAIVRKIISDMWGVLAKQQTHVRKHQFDHGELVYHALQLLAYTALGILIMRLKLFLTPHMCVMASLICSRQLFGWLFCKVHPGAIVFAILAAMSIQGSANLQTQWNIVGEFSNLPQEELIEWIKYSTKPDAVFAGAMPTMASVKLSALRPIVNHPHYEDAGLRARTKIVYSMYSRKAAEEVKRELIKLKVNYYILEESWCVRRSKPGCSMPEIWDVEDPANAGKTPLCNLLVKDSKPHFTTVFQNSVYKVLEVVKE

SEQ ID NO: 4127 - protein, 314 aa, Homo sapiens
MAERNYTVVTEFFLTAFTEHLQWRVPLFLIFLSFYLATMLGNTGMILLIRGDRRLHTPMYFFLSHLSLVDICYSSAIIPQMLAVLWEHGTTISQARCAAQFFLFTFFASIDCYLLAIMAYDRYTAVCQPLLYVTIITEKARWGLVTGAYVAGFFSAFVRTVTAFTLSFCGNNEINFIFCDLPPLLKLSCGDSYTQEVVIIVFALFVMPACILVILVSYLFIIVAILQIHSAGGRAKTFSTCASHLTAVALFFGTLIFMYLRDNTGQSSEGDRVVSVLYTVVTPMLNPLIYSLRNKEVKEATRKALSKSKPARRP

SEQ ID NO: 4128 - protein, 462 aa, Homo sapiens
MATDDKTSPTLDSANDLPRSPTSPSHLTHFKPLTPDQDEPPFKSAYSSFVNLFRFNKERAEGGQGEQQPLSGSWTSPQLPSRTQSVRSPTPYKKQLNEELQRRSSALDNSLQHPQENTGDLRACTYCRKIALSYAHSTDSNSIGEDLNALSDSACSVSVLDPSEPRTPVGSRKASRNIFLEDDLAWQSLIHPDSSNTPLSTRLVSVQEDAGKSPARNRSASITNLSLDRSGSPMVPSYETSVSPQANRTYVRTETTEDERKILLDSVQLKDLWKKICHHSSGMEFQDHRYWLRTHPNCIVGKELVNWLIRNGHIATRAQAIAIGQAMVDGRWLDCVSHHDQLFRDEYALYRPLQSTEFSETPSPDSDSVNSVEGHSEPSWFKDIKFDDSDTEQIAEEGDDNLANSASPSKRTSVSSFQSTVDSDSAASISLNVELDNVNFHIKKPSKYPHVPPHPADQKGRR

SEQ ID NO: 4129 - protein, 352 aa, Homo sapiens
MTSSLLLAFLLLAPTTVATPRAGGQCPACGGPTLELESQRELLLDLAKRSILDKLHLTQRPTLNRPVSRAALRTALQHLHGVPQGALLEDNREQECEIISFAETGLSTINQTRLDFHFSSDRTAGDREVQQASLMFFVQLPSNTTWTLKVRVLVLGPHNTNLTLATQYLLEVDASGWHQLPLGPEAQAACSQGHLTLELVLEGQVAQSSVILGGAAHRPFVAARVRVGGKHQIHRRGIDCQGGSRMCCRQEFFVDFREIGWHDWIIQPEGYAMNFCIGQCPLHIAGMPGIAASFHTAVLNLLKANTAAGTTGGGSCCVPTARRPLSLLYYDRDSNIVKTDIPDMVVEACGCS

SEQ ID NO: 4130 - protein, 247 aa, Homo sapiens
MNPLLILTFVAAALAAPFDDDDKIVGGYNCEENSVPYQVSLNSGYHFCGGSLINEQWVVSAGHCYKSRIQVRLGEHNIEVLEGNEQFINAAKIIRHPQYDRKTLNNDIMLIKLSSRAVINARVSTISLPTAPPATGTKCLISGWGNTASSGADYPDELQCLDAPVLSQAKCEASYPGKITSNMFCVGFLEGGKDSCQGDSGGPVVCNGQLQGVVSWGDGCAQKNKPGVYTKVYNYVKWIKNTIAANS

SEQ ID NO: 4131 - protein, 473 aa, Homo sapiens [sequence omitted]

SEQ ID NO: 4132 - protein, 629 aa, Homo sapiens
MTAEGPSPPARWHRRLPGLWAAALLLLGLPRLSVRADGKFFVLESQNGSQGLQLEAARLSCKSRGAHLASADELRRVVQDCSFAVCTTGWLADGTLGTTVCSKGSGEQQIMRAVDVRIESNPVPGGTYSALCIKDEEKPCGDPPSFPHTILQGRTGLEMGDELLYVCAPGHIMGHRETAFTLLCNSCGEWYGLVQACGKDEAEAHIDYEDNFPDDRSVSFRELMEDSRTEADEDRGQGDSSEEAPKQDRLVSISVGRENIARDKVFVPTTGLPGAGSSVPADSPGSRLLQKHLFWFPAEAFHKPGLEKEVDDDTKKQFSAGDNHSGVKLVPGEPETKVIYGNTDGPSGPFVGKNDSKAGDPVVSSSDESWLDGYPVTEGAWRKTEAEEEEDGDRGDGSVGLDENVLVTPDQPILVEVKKPKSSTLTPSEGMTHSSVLPSQMLDVEALALRPVNASETEGIGDGDLTKYQSTLPWRFITEESPMATLSYELTSSTLEILTVNTVKQTPNHIPSTIMATTQPPVETTVPEIQDSFPYLLSEDFFGQEGPGPGASEELHPTLESCVGDGCPGLSRGPVIATIVTVLCLLLLLAGVGMVWGYRKCQHKSSVYKLNVGQRQARHYHQQIEMEKV

SEQ ID NO: 4133 - protein, 419 aa, Homo sapiens
MLAAAFADSNSSSMNVSFAHLHFAGGYLPSDSQDWRTIIPALLVAVCLVGFVGNLCVIGILLHNAWKGKPSMIHSLILNLSLADLSLLLFSAPIRATAYSKSVWDLGWFVCKSSDWFIHTCMAAKSLTIVVVAKVCFMYASDPAKQVSIHNYTIWSVLVAIWTVASLLPLPEWFFSTIRHHEGVEMCLVDVPAVAEEFMSMFGKLYPLLAFGLPLFFASFYFWRAYDQCKKRGTKTQNLRNQIRSKQVTVMLLSIAIISALLWLPEWVAWLWVWHLKAAGPAPPQGFIALSQVLMFSISSANPLIFLVMSEEFREGLKGVWKWMITKKPPTVSESQETPAGNSEGLPDKVPSPESPASIPEKEKPSSPSSGKGKTEKAEIPILPDVEQFWHERDTVPSVQDNDPIPWEHEDQETGEGVK

SEQ ID NO: 4134 - protein, 507 aa, Homo sapiens
MAGRGSLVSWRAFHGCDSAEELPRVSPRFLRAWHPPPVSARMPTRRWAPGTQCITKCEHTRPKPGELAFRKGDVVTILEACENKSWYRVKHHTSGQEGLLAAGALREREALSADPKLSLMPWFHGKISGQEAVQQLQPPEDGLFLVRESARHPGDYVLCVSFGRDVIHYRVLHRDGHLTIDEAVFFCNLMDMVEHYSKDKGAICTKLVRPKRKHGTKSAEEELARAGWLLNLQHLTLGAQIGEGEFGAVLQGEYLGQKVAVKNIKCDVTAQAFLDETAVMTKMQHENLVRLLGVILHQGLYIVMEHVSKGNLVNFLRTRGRALVNTAQLLQFSLHVAEGMEYLESKKLVHRDLAARNILVSEDLVAKVSDFGLAKAERKGLDSSRLPVKWTAPEALKHGKFTSKSDVWSFGVLLWEVFSYGRAPYPKMSLKEVSEAVEKGYRMEPPEGCPGPVHVLMSSCWEAEPARRPPFRKLAEKLARELRSAGAPASVSGQDADGSTSPRSQEP

SEQ ID NO: 4135 - protein, 846 aa, Homo sapiens
MLFTVSCSKMSSIVDRDDSSIFDGLVEEDDKDKAKRVSRNKSEKKRRDQFNVLIKELGSMLPGNARKMDKSTVLQKSIDFLRKHKEITAQSDASEIRQDWKPTFLSNEEFTQLMLEALDGFFLAIMTDGSIIYVSESVTSLLEHLPSDLVDQSIFNFIPEGEHSEVYKILSTHLLESDSLTPEYLKSKNQLEFCCHMLRGTIDPKEPSTYEYVKFIGNFKSLNSVSSSAHNGFEGTIQRTHRPSYEDRVCFVATVRLATPQFIKEMCTVEEPNEEFTSRHSLEWKFLFLDHRAPPIIGYLPFEVLGTSGYDYYHVDDLENLAKCHEHLMQYGKGKSCYYRFLTKGQQWIWLQTHYYITYHQWNSRPEFIVCTHTVVSYAEVRAERRRELGIEESLPETAADKSQDSGSDNRINTVSLKEALERFDHSPTPSASSRSSRKSSHTAVSDPSSTPTKIPTDTSTPPRQHLPAHEKMVQRRSSFSSQSINSQSVGSSLTQPVMSQATNLPIPQGMSQFQFSAQLGAMQHLKDQLEQRTRMIEANIHRQQEELRKIQEQLQMVHGQGLQMFLQQSNPGLNFGSVQLSSGNSSNIQQLAPINMQGQVVPTNQIQSGMNTGHIGTTQHMIQQQTLQSTSTQSQQNVLSGHSQQTSLPSQTQSTLTAPLYNTMVISQPAAGSMVQIPSSMPQNSTQSAAVTTFTQDRQIRFSQGQQLVTKLVTAPVACGAVMVPSTMLMGQVVTAYPTFATQQQQSQTLSVTQQQQQQSSQEQQLTSVQQPSQAQLTQPPQQFLQTSRLLHGNPSTQLILSAAFPLQQSTFPQSHHQQHQSQQQQQLSRHRTDSLPDPSKVQPQ

SEQ ID NO: 4136 - protein, 1066 aa, Homo sapiens
MEGLLHYINPAHAISLLSALNEERLKGQLCDVLLIVGDQKFRAHKNVLAASSEYFQSLFTNKENESQTVFQLDFCEPDAFDNVLNYIYSSSLFVEKSSLAAVQELGYSLGISFLTNIVSKTPQAPFPTCPNRKKVFVEDDENSSQKRSVIVCQSRNEAQGKTVSQNQPDVSHTSRPSPSIAVKANTNKPHVPKPIEPLHNLSLTEKSWPKDSSVVYAKSLEHSGSLDDPNRISLVKRNAVLPSKPLQDREAMDDKPGVSGQLPKGKALELALKRPRPPVLSVCSSSETPYLLKETNKGNGQGEDRNLLYYSKLGLVIPSSGSGSGNQSIDRSGPLVKSLLRRSLSMDSQVPVYSPSIDLKSSQGSSSVSSDAPGNVLCALSQKSSLKDCSEKTALDDRPQVLQPHRLRSFSASQSTDREGASPVTEVRIKTEPSSPLSDPSDIIRVTVGDAATTAAASSSSVTRDLSLKTEDDQKDMSRLPAKRRFQADRRLPFKKLKVNEHGSPVSEDNFEEGSSPTLLDADFPDSDLNKDEFGELEGTRPNKKFKCKHCLKIFRSTAGLHRHVNMYHNPEKPYACDICHKRFHTNFKVWTHCQTQHGIVKNPSPASSSHAVLDEKFQRKLIDIVREREIKKALIIKLRRGKPGFQGQSSSQAQQVIKRNLRSRAKGAYICTYCGKAYRFLSQFKQHIKMHPGEKPLGVNKVAKPKEHAPLASPVENKEVYQCRLCNAKLSSLLEQGSHERLCRNAAVCPYCSLRFFSPELKQEHESKCEYKKLTCLECMRTFKSSFSIWRHQVEVHNQNNMAPTENFSLPVLDHNGDVTGSSRPQSQPEPNKVNHIVTTKDDNVFSDSSEQVNFDSEDSSCLPEDLSLSKQLKIQVKEEPVEEAEEEAPEASTAPKEAGPSKEASLWPCEKCGKMFTVHKQLERHQELLCSVKPFICHVCNKAFRTNFRLWSHFQSHMSQASEESAHKESEVCPVPTNSPSPPPLPPPPPLPKIQPLEPDSPTGLSENPTPATEKLFVPQESDTLFYHAPPLSAITFKRQFMCKLCHRTFKTAFSLWSHEQTHN

SEQ ID NO: 4137 - protein, 647 aa, Homo sapiens
MEFSIKQSPLSVQSVVKCIKMKQAPEILGSANGKTPSCEVNRECSVFLSKAQLSSSLQEGVMQKFNGHDALPFIPADKLKDLTSRVFNGEPGAHDAKLRFESQEMKGIGTPPNTTPIKNGSPEIKLKITKTYMNGKPLFESSICGDSAADVSQSEENGQKPENKARRNRKRSIKYDSLLEQGLVEAALVSKISSPSDKKIPAKKESCPNTGRDKDHLLKYNVGDLVWSKVSGYPWWPCMVSADPLLHSYTKLKGQKKSARQYHVQFFGDAPERAWIFEKSLVAFEGEGQFEKLCQESAKQAPTKAEKIKLLKPISGKLRAQWEMGIVQAEEAASMSVEERKAKFTFLYVGDQLHLNPQVAKEAGIAAESLGEMAESSGVSEEAAENPKSVREECIPMKRRRRAKLCSSAETLESHPDIGKSTPQKTAEADPRRGVGSPPGRKKTTVSMPRSRKGDAASQFLVFCQKHRDEVVAEHPDASGEEIEELLRSQWSLLSEKQRARYNTKFALVAPVQAEEDSGNVNGKKRNHTKRIQDPTEDAEAEDTPRKRLRTDKHSLRKRDTITDKTARTSSYKAMEAASSLKSQAATKNLSDACKPLKKRNRASTAASSALGFSKSSSPSASLTENELLWEPTPVKLDLNPAALYCT

SEQ ID NO: 4138 - protein, 620 aa, Homo sapiens
MSPSPTALFCLGLCLGRVPAQSGPLPKPSLQALPSSLVPLEKPVTLRCQGPPGVDLYRLEKLSSSRYQDQAVLFIPAMKRSLAGRYRCSYQNGSLWSLPSDQLELVATGVFAKPSLSAQPGPAVSSGGDVTLQCQTRYGFDQFALYKEGDPAPYKNPERWYRASFPIITVTAAHSGTYRCYSFSSRDPYLWSAPSDPLELVVTGTSVTPSRLPTEPPSPVAEFSEATAELTVSFTNEVFTTETSRSITASPKESDSPAGESCPPVLHQGQPGPDMPRGCDPNNPGGVSGRGLAQPEEAPAAQGQGCAEAASAPPAPPADPEIKRGSGWRPTGCSQPRVMFMTAEPQARSYPREGSWHGRRLKDWRVWSVEAGGQRLQLWKRGHAASSWCSIREPFGQCLSVCLPLCLRAPSIWDGRNLWRPHPPPCTLWMTWYPGWTTYWPLSSTSLIWAPDGSLRFPALRVDSVPSSVQNPPVLPFGPLCSCLVFPRNSHPHSISHCGLTNLLSSLRTGLAGSLGMSFIFLSVKLARCPLPFTLENKISLCNMVKPHLYQQNKKTQKLARCGGASLYSQQLRGLRWENGLSLGGRGCSELRSHHCTLARVTKPDFVSKNTGMNMSITLI

SEQ ID NO: 4139 - protein, 360 aa, Homo sapiens
MGFELDRFDGDVDPDLKCALCHKVLEDPLTTPCGHVFCAGCVLPWVVQEGSCPARCRGRLSAKELNHVLPLKRLILKLDIKCAYATRGCGRVVKLQQLPEHLERCDFAPARCRHAGCGQVLLRRDVEAHMRDACDARPVGRCQEGCGLPLTHGEQRAGGHCCARALRAHNGALQARLGALHKALKKEALRAGKREKSLVAQLAAAQLELQMTALRYQKKFTEYSARLDSLSRCVAAPPGGKGEETKSLTLVLHRDSGSLGFNIIGGRPSVDNHDGSSSEGIFVSKIVDSGPAAKEGGLQIHDRIIEMRKLELRTVKLPKAHSQDSNAGFIPQLLSLHTPPLSCEKGGGHLACGGAYLNCI

SEQ ID NO: 4140 - protein, 945 aa, Homo sapiens
MAPNLKGRPRKKKPCPQRRDSFSGVKDSNNNSDGKAVAKVKCEARSALTKPKNNHNCKKVSNEEKPKVAIGEECRADEQAFLVALYKYMKERKTPIERIPYLGFKQINLWTMFQAAQKLGGYETITARRQWKHIYDELGGNPGSTSAATCTRRHYERLILPYERFIKGEEDKPLPPIKPRKQENSSQENENKTKVSGTKRIKHEIPKSKKEKENAPKPQDAAEVSSEQEKEQETLISQKSIPEPLPAADMKKKIEGYQEFSAKPLASRVDPEKDNETDQGSNSEKVAEEAGEKGPTPPLPSAPLAPEKDSALVPGASKQPLTSPSALVDSKQESKLCCFTESPESEPQEASFPSFPTTQPPLANQNETEDDKLPAMADYIANCTVKVDQLGSDDIHNALKQTPKVLVVQSFDMFKDKDLTGPMNENHGLNYTPLLYSRGNPGIMSPLAKKKLLSQVSGASLSSSYPYGSPPPLISKKKLIARDDLCSSLSQTHHGQSTDHMAVSRPSVIQHVQSFRSKPSEERKTINDIFKHEKLSRSDPHRCSFSKHHLNPLADSYVLKQEIQEGKDKLLEKRALPHSHMPSFLADFYSSPHLHSLYRHTEHHLHNEQTSKYPSRDMYRESENSSFPSHRHQEKLHVNYLTSLHLQDKKSAAAEAPTDDQPTDLSLPKNPHKPTGKVLGLAHSTTGPQESKGISQFQVLGSQSRDCHPKACRVSPMTMSGPKKYPESLSRSGKPHHVRLENFRKMEGMVHPILHRKMSPQNIGAARPIKRSLEDLDLVIAGKKARAVSPLDPSKEVSGKEKASEQESEGSKAAHGGHSGGGSEGHKLPLSSPIFPGLYSGSLCNSGLNSRLPAGYSHSLQYLKNQTVLSPLMQPLAFHSLVMQRGIFTSPTNSQQLYRHLAAATPVGSSYGDLLHNSIYPLAAINPQAAFPSSQLSSVHPSTKL

SEQ ID NO: 4141 - protein, 1413 aa, Homo sapiens
MRHGVAWALLVAAALGLGARGVRGAVALADFYPFGAERGDAVTPKQDDGGSGLRPLSVPFPFFGAEHSGLYVNNNGIISFLKEVSQFTPVAFPIAKDRCVVAAFWADVDNRRAGDVYYREATDPAMLRRATEDVRHYFPELLDFNATWVFVATWYRVTFFGGSSSSPVNTFQTVLITDGKLSFTIFNYESIVWTTGTHASSGGNATGLGGIAAQAGFNAGDGQRYFSIPGSRTADMAEVETTTNVGVPGRWAFRIDDAQVRVGGCGHTTSVCLALRPCLNGGKCIDDCVTGNPSYTCSCLSGFTGRRCHLDVNECASQPCQNGGTCTHGINSFRCQCPAGFGGPTCETAQSPCDTKECQHGGQCQVENGSAVCVCQAGYTGAACEMDVDDCSPDPCLNGGSCVDLVGNYTCLCAEPFKGLRCETGDHPVPDACLSAPCHNGGTCVDADQGYVCECPEGFMGLDCRERVPDDCECRNGGRCLGANTTLCQCPLGFFGLLCEFEITAMPCNMNTQCPDGGYCMEHGGSYLCVCHTDHNASHSLPSPCDSDPCFNGGSCDAHDDSYTCECPRGFHGKHCEKARPHLCSSGPCRNGGTCKEAGGEYHCSCPYRFTGRHCEIGKPDSCASGPCHNGGTCFHYIGKYKCDCPPGFSGRHCEIAPSPCFRSPCVNGGTCEDRDTDFFCHCQAGYMGRRCQAEVDCGPPEEVKHATLRFNGTRLGAVALYACDRGYSLSAPSRIRVCQPHGVWSEPPQCLEIDECRSQPCLHGGSCQDRVAGYLCLCSTGYEGAHCELERDECRAHPCRNGGSCRNLPGAYVCRCPAGFVGVHCETEVDACDSSPCQHGGRCESGGGAYLCVCPESFFGYHCETVSDPCFSSPCGGRGYCLASNGSHSCTCKVGYTGEDCAKELFPPTALKMERVEESGVSISWNPPNGPAARQMLDGYAVTYVSSDGSYRRTDFVDRTRSSHQLQALAAGRAYNISVFSVKRNSNNKNDISRPAVLLARTRPRPVEGFEVTNVTASTISVQWALHRIRHATVSGVRVSIRHPEALRDQATDVDRSVDRFTFRALLPGKRYTIQLTTLSGLRGEEHPTESLATAPTHVWTRPLPPANLTAARVTATSAHVVWDAPTPGSLLEAYVINVTTSQSTKSRYVPNGKLASYTVRDLLPGRRYQLSVIAVQSTELGPQHSEPAHLYIITSPRDGADRRWHQGGHHPRVLKNRPPPARLPELRLLNDHSAPETPTQPPRFSELVDGRGRVSARFGGSPSKAATVRSQPTASAQLENMEEAPKRVSLALQLPEHGSKDIGNVPGNCSENPCQNGGTCVPGADAHSCDCGPGFKGRRCELACIKVSRPCTRLFSETKAFPVWEGGVCHHVYKRVYRVHQDICFKESCESTSLKKTPNRKQSKSQTLEKS

SEQ ID NO: 4142 - protein, 811 aa, Homo sapiens
MRLIRNIYIFCSIVMTAEGDAPELPEERELMTNCSNMSLRKVPADLTPATTTLDLSYNLLFQLQSSDFHSVSKLRVLILCHNRIQQLDLKTFEFNKELRYLDLSNNRLKSVTWYLLAGLRYLDLSFNDFDTMPICEEAGNMSHLEILGLSGAKIQKSDFQKIAHLHLNTVFLGFRTLPHYEEGSLPILNTTKLHIVLPMDTNFWVLLRDGIKTSKILEMTNIDGKSQFVSYEMQRNLSLENAKTSVLLLNKVDLLWDDLFLILQFVWHTSVEHFQIRNVTFGGKAYLDHNSFDYSNTVMRTIKLEHVHFRVFYIQQDKIYLLLTKMDIENLTISNAQMPHMLFPNYPTKFQYLNFANNILTDELFKRTIQLPHLKTLILNGNKLETLSLVSCFANNTPLEHLDLSQNLLQHKNDENCSWPETVVNMNLSYNKLSDSVFRCLPKSIQILDLNNNQIQTVPKETIHLMALRELNIAFNFLTDLPGCSHFSRLSVLNIEMNFILSPSLDFVQSCQEVKTLNAGRNPFRCTCELKNFIQLETYSEVMMVGWSDSYTCEYPLNLRGTRLKDVHLHELSCNTALLIVTIVVIMLVLGLAVAFCCLHFDLPWYLRMLGQCTQTWHRVRKTTQEQLKRNVRFHAFISYSEHDSLWVKNELIPNLEKEDGSILICLYESYFDPGKSISENIVSFIEKSYKSIFVLSPNFVQNEWCHYEFYFAHHNLFHENSDHIILILLEPIPFYCIPTRYHKLKALLEKKAYLEWPKDRRKCGLFWANLRAAINVNVLATREMYELQTFTELNEESRGSTISLMRTDCL

SEQ ID NO: 4143 - protein, 956 aa, Homo sapiens
MSSGLWSQEKVTSPYWEERIFYLLLQECSVTDKQTQKLLKVPKGSIGQYIQDRSVGHSRIPSAKGKKNQIGLKILEQPHAVLFVDEKDVVEINEKFTELLLAITNCEERFSLFKNRNRLSKGLQIDVGCPVKVQLRSGEEKFPGVVRFRGPLLAERTVSGIFFGVELLEEGRGQGFTDGVYQGKQLFQCDEDCGVFVALDKLELIEDDDTALESDYAGPGDTMQVELPPLEINSRVSLKVGETIESGTVIFCDVLPGKESLGYFVGVDMDNPIGNWDGRFDGVQLCSFACVESTILLHINDIIPALSESVTQERRPPKLAFMSRGVGDKGSSSHNKPKATGSTSDPGNRNRSELFYTLNGSSVDSQPQSKSKNTWYIDEVAEDPAKSLTEISTDFDRSSPPLQPPPVNSLTTENRFHSLPFSLTKMPNTNGSIGHSPLSLSAQSVMEELNTAPVQESPPLAMPPGNSHGLEVGSLAEVKENPPFYGVIRWIGQPPGLNEVLAGLELEDECAGCTDGTFRGTRYFTCALKKALFVKLKSCRPDSRFASLQPVSNQIERCNSLAFGGYLSEVVEENTPPKMEKEGLEIMIGKKKGIQGHYNSCYLDSTLFCLFAFSSVLDTVLLRPKEKNDVEYYSETQELLRTEIVNPLRIYGYVCATKIMKLRKILEKVEAASGFTSEEKDPEEFLNILFHHILRVEPLLKIRSAGQKVQDCYFYQIFMEKNEKVGVPTIQQLLEWSFINSNLKFAEAPSCLIIQMPRFGKDFKLFKKIFPSLELNITDLLEDTPRQCRICGGLAMYECRECYDDPDISAGKIKQFCKTCNTQVHLHPKRLNHKYNPVSLPKDLPDWDWRHGCIPCQNMELFAVLCIETSHYVAFVKYGKDDSAWLFFDSMADRDGGQNGFNIPQVTPCPEVGEYLKMSLEDLHSLDSRRIQGCARRLLCDAYMCMYQSPTMSLYK

SEQ ID NO: 4144 - protein, 810 aa, Homo sapiens
MEHKEVVLLLLLFLKSGQGEPLDDYVNTQGASLFSVTKKQLGAGSIEECAAKCEEDEEFTCRAFQYHSKEQQCVIMAENRKSSIIIRMRDVVLFEKKVYLSECKTGNGKNYRGTMSKTKNGITCQKWSSTSPHRPRFSPATHPSEGLEENYCRNPDNDPQGPWCYTTDPEKRYDYCDILECEEECMHCSGENYDGKISKTMSGLECQAWDSQSPHAHGYIPSKFPNKNLKKNYCRNPDRELRPWCFTTDPNKRWELCDIPRCTTPPPSSGPTYQCLKGTGENYRGNVAVTVSGHTCQHWSAQTPHTHNRTPENFPCKNLDENYCRNPDGKRAPWCHTTNSQVRWEYCKIPSCDSSPVSTEQLAPTAPPELTPVVQDCYHGDGQSYRGTSSTTTTGKKCQSWSSMTPHRHQKTPENYPNAGLTMNYCRNPDADKGPWCFTTDPSVRWEYCNLKKCSGTEASVVAPPPVVLLPDVETPSEEDCMFGNGKGYRGKRATTVTGTPCQDWAAQEPHRHSIFTPETNPRAGLEKNYCRNPDGDVGGPWCYTTNPRKLYDYCDVPQCAAPSFDCGKPQVEPKKCPGRVVGGCVAHPHSWPWQVSLRTRFGMHFCGGTLISPEWVLTAAHCLEKSPRPSSYKVILGAHQEVNLEPHVQEIEVSRLFLEPTRKDIALLKLSSPAVITDKVIPACLPSPNYVVADRTECFITGWGETQGTFGAGLLKEAQLPVIENKVCNRYEFLNGRVQSTELCAGHLAGGTDSCQGDSGGPLVCFEKDKYILQGVTSWGLGCARPNKPGVYVRVSRFVTWIEGVMRNN

SEQ ID NO: 4145 - protein, 1009 aa, Homo sapiens
MSWMFKRDPVWKYLQTVQYGVHGNFPRLSYPTFFPRFEFQDVIPPDDFLTSDEEVDSVLFGSLRGHVVGLRYYTGVVNNNEMVALQRDPNNPYDKNAIKVNNVNGNQVGHLKKELAGALAYIMDNKLAQIEGVVPFGANNAFTMPLHMTFWGKEENRKAVSDQLKKHGFKLGPAPKTLGFNLESGWGSGRAGPSYSMPVHAAVQMTTEQLKTEFDKLFEDLKEDDKTHEMEPAEAIETPLLPHQKQALAWMVSRENSKELPPFWEQRNDLYYNTITNFSEKDRPENVHGGILADDMGLGKTLTAIAVILTNFHDGRPLPIERVKKNLLKKEYNVNDDSMKLGGNNTSEKADGLSKDASRCSEQPSISDIKEKSKFRMSELSSSRPKRRKTAVQYIESSDSEEIETSELPQKMKGKLKNVQSETKGRAKAGSSKVIEDVAFACALTSSVPTTKKKMLKKGACAVEGSKKTDVEERPRTTLIICPLSVLSNWIDQFGQHIKSDVHLNFYVYYGPDRIREPALLSKQDIVLTTYNILTHDYGTKGDSPLHSIRWLRVILDEGHAIRNPNAQQTKAVLDLESERRWVLTGTPIQNSLKDLWSLLSFLKLKPFIDREWWHRTIQRPVTMGDEGGLRRLQSLIKNITLRRTKTSKIKGKPVLELPERKVFIQHITLSDEERKIYQSVKNEGRATIGRYFNEGTVLAHYADVLGLLLRLRQICCHTYLLTNAVSSNGPSGNDTPEELRKKLIRKMKLILSSGSDEECAICLDSLTVPVITHCAHVFCKPCICQVIQNEQPHAKCPLCRNDIHEDNLLECPPEELARDSEKKSDMEWTSSSKINALMHALTDLRKKNPNIKSLVVSQFTTFLSLIEIPLKASGFVFTRLDGSMAQKKRVESIQCFQNTEAGSPTIMLLSLKAGGVGLNLSAASRVFLMDPAWNPAAEDQCFDRCHRLGQKQEVIITKFIVKDSVEENMLKIQNKKRELAAGAFGTKKPNADEMKQAKINEIRTLIDL

SEQ ID NO: 4146 - protein, 778 aa, Homo sapiens
MLDSCKLKSACNLPFICNKKIINTAGTSNAEVPLADPGMYQLDITLRRGQSLAARDRGGTSDPYVKFKIGGKEVFRSKIIHKNLNPVWEEKACILVDHLREPLYIKVFDYDFGLQDDFMGSAFLDLTQLELNRPTDVTLTLKDPHYPDHDLGIILLSVILTPKEGESRDVTMLMRKSWKRSSKELSENEVVGSYFSVKSLFWRTCGRPALPVLGFCRAELQNPYCKNVQFQTQSLRLSDLHRKSHLWRGIVSITLIEGRDLKAMDSNGLSDPYVKFRLGHQKYKSKIMPKTLNPQWREQFDFHLYEERGGVIDITAWDKDAGKRDDFIGRCQVDLSALSREQTHKLELQLEEGEGHLVLLVTLTASATVSISDLSVNSLEDQKEREEILKRYSPLRIFHNLKDVGFLQVKVIRAEGLMAADVTGKSDPFCVVELNNDRLLTHTVYKNLNPEWNKVFTFNIKDIHSVLEVTVYDEDRDRSADFLGKVAIPLLSIQNGEQKAYVLKNKQLTGPTKGVIYLEIDVIFNAVKASLRTLIPKEQKYIEEENRLSKQLLLRNFIRMKRCVMVLVNAAYYVNSCFDWDSPPRSLAAFVLFLFVVWNFELYMIPLVLLLLLTWNYFLIISGKDNRQRDTVVEDMLEDEEEEDDKDDKDSEKKGFINKIYAIQEVCVSVQNILDEVASFGERIKNTFNWTVPFLSWLAIVALCVFTAILYCIPLRYIVLVWGINKFTKKLRSPYAIDNNELLDFLSRVPSDVQVVQYQELKPDPSHSPYKRKKNNLG

SEQ ID NO: 4147 - protein, 428 aa, Homo sapiens
MGTLSAPPCTQRIKWKGLLLTASLLNFWNLPTTAQVTIEAEPTKVSEGKDVLLLVHNLPQNLTGYIWYKGQMRDLYHYITSYVVDGEIIIYGPAYSGRETAYSNASLLIQNVTREDAGSYTLHIIKGDDGTRGVTGRFTFTLHLETPKPSISSSNLNPRETMEAVSLTCDPETPDASYLWWMNGQSLPMTHSLKLSETNRTLFLLGVTKYTAGPYECEIRNPVSASRSDPVTLNLLPKLPKPYITINNLNPRENKDVLNFTCEPKSENYTYIWWLNGQSLPVSPRVKRPIENRILILPSVTRNETGPYQCEIRDRYGGIRSDPVTLNVLYGPDLPRIYPSFTYYRSGEVLYLSCSADSNPPAQYSWTINEKFQLPGQKLFIRHITTKHSGLYVCSVRNSATGKESSKSMTVEVSAYSSSINYTSGNRN

SEQ ID NO: 4148 - protein, 502 aa, Homo sapiens
MRGLCEFYWQEFGIKGFSVAQKPFGATYVWSSIINTLQTQVEVKKRRHRLKRHNDCFVGSEAVDVIFSHLIQNKYFGDVDIPRAKVVRVCQALMDYKVFEAVPTKVFGKDKKPTFEDSSCSLYRFTTIPNQDSQLGKENKLYSPARYADALFKSSDIRSASLEDLWENLSLKPANSPHVNISATLSPQVINEVWQEETIGRLLQLVDLPLLDSLLKQQEAVPKIPQPKRQSTMVNSSNYLDRGILKAYSDSQEDEWLSAAIDCLEYLPDQMVVEISRSFPEQPDRTDLVKELLFDAIGRYYSSREPLLNHLSDVHNGIAELLVNGKTEIALEATQLLLKLLDFQNREEFRRLLYFMAVAANPSEFKLQKESDNRMVVKRIFSKAIVDNKNLSKGKTDLLVLFLMDHQKDVFKIPGTLHKIVSVKLMAIQNGRDPNRDAGYIYCQRIDQRDYSNNTEKTTKDELLNLLKTLDEDSKLSAKEKKKLLGQFYKCHPDIFIEHFGD

SEQ ID NO: 4149 - protein, 610 aa, Homo sapiens
MGLKAAQKTLFPLRSIDDVVRLFAAELGREEPDLVLLSLVLGFVEHFLAVNRVIPTNVPELTFQPSPAPDPPGGLTYFPVADLSIIAALYARFTAQIRGAVDLSLYPREGGVSSRELVKKVSDVIWNSLSRSYFKDRAHIQSLFSFITGTKLDSSGVAFAVVGACQALGLRDVHLALSEDHAWVVFGPNGEQTAEVTWHGKGNEDRRGQTVNAGVAERSWLYLKGSYMRCDRKMEVAFMVCAINPSIDLHTDSLELLQLQQKLLWLLYDLGHLERYPMALGNLADLEELEPTPGRPDPLTLYHKGIASAKTYYRDEHIYPYMYLAGYHCRNRNVREALQAWADTATVIQDYNYCREDEEIYKEFFEVANDVIPNLLKEAASLLEAGEERPGEQSQGTQSQGSALQDPECFAHLLRFYDGICKWEEGSPTPVLHVGWATFLVQSLGRFEGQVRQKVRIVSREAEAAEAEEPWGEEAREGRRRGPRRESKPEEPPPPKKPALDKGLGTGQGAVSGPPRKPPGTVAGTARGPEGGSTAQVPAPTASPPPEGPVLTFQSEKMKGMKELLVATKINSSAIKLQLTAQSQVQMKKQKVSTPSDYTLSFLKRQRKGL

SEQ ID NO: 4150 - protein, 222 aa, Homo sapiens
MALHIHEACILLLVIPGLVTSAAISHEDYPADEGDQISSNDNLIFDDYRGKGCVDDSGFVYKLGERFFPGHSNCPCVCALDGPVCDQPECPKIHPKCTKVEHNGCCPECKEVKNFCEYHGKNYKILEEFKPSPCEWCRCEPSNEVHCVVADCAVPECVNPVYEPEQCCPVCKNGPNCFAGTTIIPAGIEVKVDECNICHCHNGDWWKPAQCSKRECQGKQTV

SEQ ID NO: 4151 - protein, 349 aa, Homo sapiens
MKENVASATVFTLLLFLNTCLLNGQLPPGKPEIFKCRSPNKETFTCWWRPGTDGGLPTNYSLTYHREGETLMHECPDYITGGPNSCHFGKQYTSMWRTYIMMVNATNQMGSSFSDELYVDVTYIVQPDPPLELAVEVKQPEDRKPYLWIKWSPPTLIDLKTGWFTLLYEIRLKPEKAAEWEIHFAGQQTEFKILSLHPGQKYLVQVRCKPDHGYWSAWSPATFIQIPSDFTMNDTTVWISVAVLSAVICLIIVWAVALKGYSMVTCIFPPVPGPKIKGFDAHLLEKGKSEELLSALGCQDFPPTSDYEDLLVEYLEVDDSEDQHLMSVHSKEHPSQEREQRQAQEARDS

SEQ ID NO: 4152 - protein, 1222 aa, Homo sapiens
MSQPPPPPPPLPPPPPPPEAPQTPSSLASAAASGGLLKRRDRRILSGSCPDPKCQARLFFPASGSVSIECTECGQRHEQQQLLGVEEVTDPDVVLHNLLRNALLGVTGAPKKNTELVKVMGLSNYHCKLLSPILARYGMDKQTGRAKLLRDMNQGELFDCALLGDRAFLIEPEHVNTVGYGKDRSGSLLYLHDTLEDIKRANKSQECLIPVHVDGDGHCLVHAVSRALVGRELFWHALRENLKQHFQQHLARYQALFHDFIDAAEWEDIINECDPLFVPPEGVPLGLRNIHIFGLANVLHRPIILLDSLSGMRSSGDYSATFLPGLIPAEKCTGKDGHLNKPICIAWSSSGRNHYIPLVGIKGAALPKLPMNLLPKAWGVPQDLIKKYIKLEEDGGCVIGGDRSLQDKYLLRLVAAMEEVFMDKHGIHPSLVADVHQYFYRRTGVIGVQPEEVTAAAKKAVMDNRLHKCLLCGALSELHVPPEWLAPGGKLYNLAKSTHGQLRTDKNYSFPLNNLVCSYDSVKDVLVPDYGMSNLTACNWCHGTSVRKVRGDGSIVYLDGDRTNSRSTGGKCGCGFKHFWDGKEYDNLPEAFPITLEWGGRVVRETVYWFQYESDSSLNSNVYDVAMKLVTKHFPGEFGSEILVQKVVHTILHQTAKKNPDDYTPVNIDGAHAQRVGDVQGQESESQLPTKIILTGQKTKTLHKEELNMSKTERTIQQNITEQASVMQKRKTEKLKQEQKGQPRTVSPSTIRDGPSSAPATPTKAPYSPTTSKEKKIRITTNDGRQSMVTLKSSTTFFELQESIAREFNIPPYLQCIRYGFPPKELMPPQAGMEKEPVPLQHGDRITIEILKSKAEGGQSAAAHSAHTVKQEDIAVTGKLSSKELQEQAEKEMYSLCLLATLMGEDVWSYAKGLPHMFQQGGVFYSIMKKTMGMADGKHCTFPHLPGKTFVYNASEDRLELCVDAAGHFPIGPDVEDLVKEAVSQVRAEATTRSRESSPSHGLLKLGSGGVVKKKSEQLHNVTAFQGKGHSLGTASGNPHLDPRARETSVVRKHNTGTDFSNSSTKTEPSVFTASSSNSELIRIAPGVVTMRDGRQLDPDLVEAQRKKLQEMVSSIQASMDRHLRDQSTEQSPSDLPQRKTEVVSSSAKSGSLQTGLPESFPLTGGTENLNTETTDGCVADALGAAFATRSKAQRGNSVEELEEMDSQDAEMTNTTEPMDHS

SEQ ID NO: 4153 - protein, 780 aa, Homo sapiens
MDQNSVPEKAQNEADTNNADRFFRSHSSPPHHRPGHSRALHHYELHHHGVPHQRGESHHPPEFQDFHDQALSSHVHQSHHHSEARNHGRAHGPTGFGLAPSQGAVPSHRSYGEDYHDELQRDGRRHHDGSQYGGFHQQSDSHYHRGSHHGRPQYLGENLSHYSSGVPHHGEASHHGGSYLPHGPNPYSESFHHSEASHLSGLQHDESQHHQVPHRGWPHHHQVHHHGRSRHHEAHQHGKSPHHGETISPHSSVGSYQRGISDYHSEYHQGDHHPSEYHHGDHPHHTQHHYHQTHRHRDYHQHQDHHGAYHSSYLHGDYVQSTSQLSIPHTSRSLIHDAPGPAASRTGVFPYHVAHPRGSAHSMTRSSSTIRSRVTQMSKKVHTQDISTKHSEDWGKEEGQFQKRKTGRLQRTRKKGHSTNLFQWLWEKLTFLIQGFREMIRNLTQSLAFETFIFFVVCLNTVMLVAQTFAEVEIRGEWYFMALDSIFFCIYVVEALLKIIALGLSYFFDFWNNLDFFIMAMAVLDFLLMQTHSFAIYHQSLFRILKVFKSLRALRAIRVLRRLSFLTSVQEVTGTLGQSLPSIAAILILMFTCLFLFSAVLRALFRKSDPKRFQNIFTTIFTLFTLLTLDDWSLIYMDSRAQGAWYIIPILVIYIIIQYFIFLNLVITVLVDSFQTALFKGLEKAKQERAARIQEKLLEDSLTELRAAEPKEVASEGTMLKRLIEKKFGTMTEKQQELLFHYLQLVASVEQEQQKFRSQAAVIDEIVDTTFEAGEEDFRN

SEQ ID NO: 4154 - protein, 789 aa, Homo sapiens
MRKVESRGEGGREELGSNSPPQRNWKGIAIALLVILVVCSLITMSVILLTPDELTNSSETRLSLEDLFRKDFVLHDPEARWINDTDVVYKSENGHVIKLNIETNATTLLLENTTFVTFKASRHSVSPDLKYVLLAYDVKQIFHYSYTASYVIYNIHTREVWELNPPEVEDSVLQYAAWGVQGQQLIYIFENNIYYQPDIKSSSLRLTSSGKEEIIFNGIADWLYEEELLHSHIAHWWSPDGERLAFLMINDSLVPTMVIPRFTGALYPKGKQYPYPKAGQVNPTIKLYVVNLYGPTHTLELMPPDSFKSREYYITMVKWVSNTKTVVRWLNRAQNISILTVCETTTGACSKKYEMTSDTWLSQQNEEPVFSRDGSKFFMTVPVKQGGRGEFHHVAMFLIQSKSEQITVRHLTSGNWEVIKILAYDETTQKIYFLSTESSPRGRQLYSASTEGLLNRQCISCNFMKEQCTYFDASFSPMNQHFLLFCEGPRVPVVSLHSTDNPAKYFILESNSMLKEAILKKKIGKPEIKILHIDDYELPLQLSLPKDFMDRNQYALLLIMDEEPGGQLVTDKFHIDWDSVLIDMDNVIVARFDGRGSGFQGLKILQEIHRRLGSVEVKDQITAVKFLLKLPYIDSKRLSIFGKGYGGYIASMILKSDEKLFKCGSVVAPITDLKLYASAFSERYLGMPSKEESTYQAASVLHNVHGLKEENILIIHGTADTKVHFQHSAELIKHLIKAGVNYTMQVYPDEGHNVSEKSKYHLYSTILKFFSDCLKEEISVLPQEPEEDE

SEQ ID NO: 4155 - protein, 1106 aa, Homo sapiens
MKLKEVDRTAMQAWSPAQNHPIYLATGTSAQQLDATFSTNASLEIFELDLSDPSLDMKSCATFSSSHRYHKLIWGPYKMDSKGDVSGVLIAGGENGNIILYDPSKIIAGDKEVVIAQNDKHTGPVRALDVNIFQTNLVASGANESEIYIWDLNNFATPMTPGAKTQPPEDISCIAWNRQVQHILASASPSGRATVWDLRKNEPIIKVSDHSNRMHCSGLAWHPDVATQMVLASEDDRLPVIQMWDLRFASSPLRVLENHARGILAIAWSMADPELLLSCGKDAKILCSNPNTGEVLYELPTNTQWCFDIQWCPRNPAVLSAASFDGRISVYSIMGGSTDGLRQKQVDKLSSSFGNLDPFGTGQPLPPLQIPQQTAQHSIVLPLKKPPKWIRRPVGASFSFGGKLVTFENVRMPSHQGAEQQQQQHHVFISQVVTEKEFLSRSDQLQQAVQSQGFINYCQKKIDASQTEFEKNVWSFLKVNFEDDSRGKYLELLGYRKEDLGKKIALALNKVDGANVALKDSDQVAQSDGEESPAAEEQLLGEHIKEEKEESEFLPSSGGTFNISVSGDIDGLITQALLTGNFESAVDLCLHDNRMADAIILAIAGGQELLARTQKKYFAKSQSKITRLITAVVMKNWKEIVESCDLKNWREALAAVLTYAKPDEFSALCDLLGTRLENEGDSLLQTQACLCYICAGNVEKLVACWTKAQDGSHPLSLQDLIEKVVILRKAVQLTQAMDTSTVGVLLAAKMSQYANLLAAQGSIAAALAFLPDNTNQPNIMQLRDRLCRAQGEPVAGHESPKIPYEKQQLPKGRPGPVAGHHQMPRVQTQQYYPHGENPPPPGFIMHGNVNPNAAGQLPTSPGHMHTQVPPYPQPQRPQNGWNDPPALNRVPKKKKMPENFMPPVPITSPIMNPLGDPQSQMLQQQPSAPVPLSSQSSFPQPHLPGGQPFHGVQQPLGQTGMPPSFSKPNIEGAPGAPIGNTFQHVQSLPTKKITKKPIPDEHLILKTTFEDLIQRCLSSATDPQTKRKLDDASKRLEFLYDKLREQTLSPTITSGLHNIARSIETRNYSEGLTMHTHIVSTSNFSETSAFMPVLKVVLTQANKLGV

SEQ ID NO: 4156 - protein, 911 aa, Homo sapiens
MDSRPRAGCCEWLRCCGGGEARPRTVWLGHPEKRDQRYPRNVINNQKYNFFTFLPGVLFNQFKYFFNLYFLLLACSQFVPEMRLGALYTYWVPLGFVLAVTVIREAVEEIRCYVRDKEVNSQVYSRLTARGTVVGVVLYTGRELRSVMNTSNPRSKIGLFDLEVNCLTKILFGALVVVSLVMVALQHFAGRWYLQIIRFLLLFSNIIPISLRVNLDMGKIVYSWVIRRDSKIPGTVVRSSTIPEQLGRISYLLTDKTGTLTQNEMIFKRLHLGTVAYGLDSMDEVQSHIFSIYTQQSQDPPAQKGPTLTTKVRRTMSSRVHEAVKAIALCHNVTPVYESNGVTDQAEAEKQYEDSCRVYQASSPDEVALVQWTESVGLTLVGRDQSSMQLRTPGDQILNFTILQIFPFTYESKRMGIIVRDESTGEITFYMKGADVVMAGIVQYNDWLEEECGNMAREGLRVLVVAKKSLAEEQYQDFEARYVQAKLSVHDRSLKVATVIESLEMEMELLCLTGVEDQLQADVRPTLETLRNAGIKVWMLTGDKLETATCTAKNAHLVTRNQDIHVFRLVTNRGEAHLELNAFRRKHDCALVISGDSLEVCLKYYEYEFMELACQCPAVVCCRCAPTQKAQIVRLLQERTGKLTCAVGDGGNDVSMIQESDCGVGVEGKEGKQASLAADFSITQFKHLGRLLMVHGRNSYKRSAALSQFVIHRSLCISTMQAVFSSVFYFASVPLYQGFLIIGYSTIYTMFPVFSLVLDKDVKSEVAMLYPELYKDLLKGRPLSYKTFLIWVLISIYQGSTIMYGALLLFESEFVHIVAISFTSLILTELLMVALTIQTWHWLMTVAELLSLACYIASLVFLHEFIDVYFIATLSFLWKVSVITLVSCLPLYVLKYLRRRFSPPSYSKLTS

SEQ ID NO: 4157 - protein, 177 aa, Homo sapiens
MNWFGSNFFRCPEDLSLLNIYSPLLSHMSSEDEHFISNLRGHVPASAVVKQPVRGASGRTTITAIVQTGGGWSTGLFSVCRDRRICFCGLFCPMCLECDIARHYGECLCWPLLPGSTFALRIGTRERHKIQGTLCEDWLAVHCCWAFSICQVARELKMRTSQVYEICAVPMTKDTLV

SEQ ID NO: 4158 - protein, 1062 aa, Homo sapiens
MESQEFIVLYTHQKMKKSKVWQDGILKITHLGNKAILYDDKGACLESLFLKCLEVKPGDDLESDRYLITVEEVKVAGAIGIVKQNVNKEAPELNSRTFISSGRSLGCQPSGLKRKFTGFQGPRQVPKKMVIMESGESAASHEAKKTGPTIFSPFCSMPPLFPTVGKKDVNNILADPENIVTYKNRERNAMDFSSVFSPSFQINPEVLCEENYFCSPVNSGNKLSDSLLTNEPVKRDSLASHYSGVSQNIRSKAQILALLKSESSSSCEELNSEMTEHFPQKQPQGSLKIATKPKYLIQQEECAEMKSTENLYYQHQSENTMRNKSRWAMYLSSQSSPIHSSTVDGNDTERKPKAQEDDVNSNLKDLSLQKIIQFVETYAEERKKYNVDQSVGNNDPSWNQEVKLEIPSFNESSSLQVTCSSAENDGILSESDIQEDNKIPFNQNDKGCIKGSVLIKENAQEVNTCGTLEKEYEQSESSLPELKHLQIESSNNSRISDDITDMISESKMDNESLNSIHESLSNVTQPFLEVTFNLNNFETSDTEEESQESNKISQDSESWVKDILVNDGNSCFQKRSENTNCEEIEGEHLPFLTSVSDKPTVTFPVKETLPSQFCDKTYVGFDMGICKTENTGKEIEEYSDTLSNFESFKWTDAVYGDNKEDANKPIQEVRINYDFALPPNKSKGINMNLHIPHIQNQIAENSNLFSEDAQPQPFILGSDLDKNDEHVLPSTSSSDNSVQLLNTNQNHYECIALDKSNTHISNSLFYPLGKKHLISKDTEAHISEPEDLGKIRSPPPDHVEVETAREGKQYWNPRNSSELSGLVNTISILKSLCEHSTALDSLEILKKKNTVFQQGTQQTYEPDSPPEVRKPFITVVSPKSPHLHKDSQQILKEDEVELSEPLQSVQFSSSGSKEETAFQAVIPKQIERKTCDPKPVEFQGHQVKGSATSGVMVRGHSSQLGCSQFPDSTEYENFMTETPELPSTCMQIDFLQVTSPEENISTLSPVSTFSLNSRDEDFMVEFSETSLKARTLPDDLHFLNLEGSRYHIALISVYSFKMKFFI

SEQ ID NO: 4159 - protein, 415 aa, Homo sapiens
MQMSYAIRCAFYQLLLAALMLVAMLQLLYLSLLSGLHGQEEQDQYFEFFPPSPRSVDQVKAQLRTALASGGVLDASGDYRVYRGLLKTTMDPNDVILATHASVDNLLHLSGLLERWEGPLSVSVFAATKEEAQLATVLAYALSSHCPDMRARVAMHLVCPSRYEAAVPDPREPGEFALLRSCQEVFDKLARVAQPGINYALGTNVSYPNNLLRNLAREGANYALVIDVDMVPSEGLWRGLREMLDQSNQWGGTALVVPAFEIRRARRMPMNKNELVQLYQVGEVRPFYYGLCTPCQAPTNYSRWVNLPEESLLRPAYVVPWQDPWEPFYVAGGKVPTFDERFRQYGFNRISQACELHVAGFDFEVLNEGFLVHKGFKEALKFHPQKEAENQHNKILYRQFKQELKAKYPNSPRRC

SEQ ID NO: 4160 - protein, 778 aa, Homo sapiens
MSPCFSFIGCKLCSIVTRGCETVEMTLRRNGLGQLGFHVNFEGIVADVEPFGFAWKAGLRQGSRLVEICKVAVATLTHEQMIDLLRTSVTVKVVIIQPHDDGSPRRGCSELCRIPMVEYKLDSEGTPCEYKTPFRRNTTWHRVPTPALQPLSRASPIPGTPDRLPCQQLLQQAQAAIPRSTSFDRKLPDGTRSSPSNQSSSSDPGPGGSGPWRPQVGYDGCQSPLLLEHQGSGPLECDGAREREDTMEASRHPETKWHGPPSKVLGSYKERALQKDGSCKDSPNKLSHIGDKSCSSHSSSNTLSSNTSSNSDDKHFGSGDLMDPELLGLTYIKGASTDSGIDTAPCMPATILGPVHLAGSRSLIHSRAEQWADAADVSGPDDEPAKLYSVHGYASTISAGSAAEGSMGDLSEISSHSSGSHHSGSPSAHCSKSSGSLDSSKVYIVSHSSGQQVPGSMSKPYHRQGAVNKYVIGWKKSEGSPPPEEPEVTECPGMYSEMDVMSTATQHQTVVGDAVAETQHVLSKEDFLKLMLPDSPLVEEGRRKFSFYGNLSPRRSLYRTLSDESICSNRRGSSFGSSRSSVLDQALPNDILFSTTPPYHSTLPPRAHPAPSMGSLRNEFWFSDGSLSDKSKCADPGLMPLPDTATGLDWTHLVDAARAFEDQRVASFCTLTDMQHGQDLEGAQELPLCVDPGSGKEFMDTTGERSPSPLTGKVNQLELILRQLQTDLRKEKQDKAVLQAEVQHLRQDNMRLQEESQTATAQLRKFTEWFFTTIDKKS

SEQ ID NO: 4161 - protein, 465 aa, Homo sapiens
MVGKAWPLTHSQGTGPWAPEGHRREAADPWWQRQQAQEGRMQLGCAWVAARRGGGRKLASWSLLSPQRQTDRQTDSWQEAAWGPQLLQQTSWLSEPPLGPAPHLSMVQAHGGRSRAQPLTLSLGAAMTQPPPEKTPAKKHVRLQERRGSNVALMLDVRSLGAVEPICSVNTPREVTLHFLRTAGHPLTRWALQRQPPSPKQLEEEFLKIPSNFVSPEDLDIPGHASKDRYKTILPNPQSRVCLGRAQSQEDGDYINANYIRGYDGKEKVYIATQGPMPNTVSDFWEMVWQEEVSLIVMLTQLREGKEKCVHYWPTEEETYGPFQIRIQDMKECPEYTVRQLTIQYQEERRSVKHILFSAWPDHQTPESAGPLLRLVAEVEESPETAAHPGPIVVHCSAGIGRTGCFIATRIGCQQLKARGEVDILGIVCQLRLDRGGMIQTAEQYQFLHHTLALYAGQLPEEPSP

SEQ ID NO: 4162 - protein, 418 aa, Homo sapiens
MLASQGVLLHPYGVPMIVPAAPYLPGLIQGNQEAAAAPDTMAQPYASAQFAPPQNGIPAEYTAPHPHPAPEYTGQTTVPEHTLNLYPPAQTHSEQSPADTSAQTVSGTATQTDDAAPTDGQPQTQPSENTENKSQPKRLHVSNIPFRFRDPDLRQMFGQFGKILDVEIIFNERGSKGFGFVTFENSADADRAREKLHGTVVEGRKIEVNNATARVMTNKKTVNPYTNGWKLNPVVGAVYSPEFYAGTVLLCQANQEGSSMYSAPSSLVYTSAMPGFPYPAATAAAAYRGAHLRGRGRTVYNTFRAAAPPPPIPAYGGVVYQEPVYGNKLLQGGYAAYRYAQPTPATAAAYSDSYGRVYAADPYHHALAPAPTYGVGAMNAFAPLTDAKTRSHADDVGLVLSSLQASIYRGGYNRFAPY

SEQ ID NO: 4163 - protein, 609 aa, Homo sapiens
MWRLPGARAALRVIRTAVEKLSRAEAGSQTAAGAMERAVVRCVPSEPKLSLSFALADGSHKNMQRDQSEPLGRVLSRIATNALKGHAKAAAAKKSRKSRPNASGGAACSGPGPEPAVFCEPVVKLYYREEAVAEDVLNVDAWQDGAVLQIGDVKYKVERNPPAFTELQLPRYIMAGFPVCPKLSLEFGDPASSLFRWYKEAKPGAAEPEVGVPSSLSPSSPSSSWTETDVEERVYTPSNADIGLRLKLHCTPGDGQRFGHSRELESVCVVEAGPGTCTFDHRHLYTKKVTEDALIRTVSYNILADTYAQTEFSRTVLYPYCAPYALELDYRQNLIQKELTGYNADVICLQEVDRAVFSDSLVPALEAFGLEGVFRIKQHEGLATFYRKSKFSLLSQHDISFYEALESDPLHKELLEKLVLYPSAQEKVLQRSSVLQVSVLQSTKDSSKRICVANTHLYWHPKGGYIRLIQMAVALAHIRHVSCDLYPGIPVIFCGDFNSTPSTGMYHFVINGSIPEDHEDWASNGEEERCNMSLTHFFKLKSACGEPAYTNYVGGFHGCLDYIFIDLNALEVEQVIPLPSHEEVTTHQALPSVSHPSDHIALVCDLKWK

SEQ ID NO: 4164 - protein, 626 aa, Homo sapiens
MNVEVVKVMPQDLVTFKDVAIDFSQEEWQWMNPAQKRLYRSMMLENYQSLVSLGLCISKPYVISLLEQGREPWEMTSEMTRSPFSDWESIYVTQELPLKQFMYDDACMEGITSYGLECSTFEENWKWEDLFEKQMGSHEMFSKKEIITHKETITKETEFKYTKFGKCIHLENIEESIYNHTSDKKSFSKNSMVIKHKKVYVGKKLFKCNECDKTFTHSSSLTVHFRIHTGEKPYACEECGKAFKQRQHLAQHHRTHTGEKLFECKECRKAFKQSEHLIQHQRIHTGEKPYKCKECRKAFRQPAHLAQHQRIHTGEKPYECKECGKAFSDGSSFARHQRCHTGKRPYECIECGKAFRYNTSFIRHWRSYHTGEKPFNCIDCGKAFSVHIGLILHRRIHTGEKPYKCGVCGKTFSSGSSRTVHQRIHTGEKPYECDICGKDFSHHASLTQHQRVHSGEKPYECKECGKAFRQNVHLVSHLRIHTGEKPYECKECGKAFRISSQLATHQRIHTGEKPYECIECGNAFKQRSHLAQHQKTHTGEKPYECNECGKAFSQTSNLTQHQRIHTGEKPYKCTECGKAFSDSSSCAQHQRLHTGQRPYQCFECGKAFRRKLSLICHQRSHTGEEP

SEQ ID NO: 4165 - protein, 364 aa, Homo sapiens
MVKLFIGNLPREATEQEIRSLFEQYGKVLECDIIKNYGFVHIEDKTAAEDAIRNLHHYKLHGVNINVEASKNKSKTSTKLHVGNISPTCTNKELRAKFEEYGPVIECDIVKDYAFVHMERAEDAVEAIRGLDNTEFQGKRMHVQLSTSRLRTAPGMGDQSGCYRCGKEGHWSKECPIDRSGRVADLTEQYNEQYGAVRTPYTMSYGDSLYYNNAYGALDAYYKRCRAARSYEAVAAAAASVYNYAEQTLSQLPQVQNTAMASHLTSTSLDPYDRHLLPTSGAAATAAAAAAAAAAVTAASTSYYGRDRSPLRRATAPVPTVGEGYGYGHESELSQASAAARNSLYDMARYEREQYADRARYSAF

SEQ ID NO: 4166 - protein, 404 aa, Homo sapiens
MSRRSSRLQAKQQPQPSQTESPQEAQIIQAKKRKTTQDVKKRREEVTKKHQYEIRNCWPPVLSGGISPCIIIETPHKEIGTSDFSRFTNYRFKNLFINPSPLPDLSWGCSKEVWLNMLKKESRYVHDKHFEVLHSDLEPQMRSILLDWLLEVCEVYTLHRETFYLAQDFFDRFMLTQKDINKNMLQLIGITSLFIASKLEEIYAPKLQEFAYVTDGACSEEDILRMELIILKALKWELCPVTIISWLNLFLQVDALKDAPKVLLPQYSQETFIQIAQLLDLCILAIDSLEFQYRILTAAALCHFTSIEVVKKASGLEWDSISECVDWMVPFVNVVKSTSPVKLKTFKKIPMEDRHNIQTHTNYLAMLEEVNYINTFRKGGQLSPVCNGGIMTPPKSTEKPPGKH

SEQ ID NO: 4167 - protein, 882 aa, Homo sapiens
MLLGASWLCASKAAAAAAQSEGDEDRPGERRRRRAAATAAGAGEDMDESSLLDLLECSVCLERLDTTAKVLPCQHTFCRRCLESIVCSRHELRCPECRILVGCGVDELPANILLVRLLDGIRQRPRAGTSPGGSPPARPIPGQSAAPTLAGGGGGAAGSTPGSPVFLSAAAGSTAGSLRELATSRTAPAAKNPCLLPYGKALYSYEGKEPGDLKFNKGDIIVLRRKVDEQWYHGELHGTQGFLPASYIQCIQPLPHAPPQGKALYDFEMKDKDQDKDCLTFTKDEILTVLRRVDENWAEGMLGDKIGIFPLLYVELNDSAKQLIEMDKPCPAAASSCNASLPSDSGAVASVAPSPTLSSSGAVSAFQRRVDGKKNTKKRHSFTALSVTHRSSQAASHRHSMEISAPVLISSSDPRAAARIGDLAHLSCAAPTQDVSSSAGSTPTAVPRAASVSGEQGTPPKVQLPLNVYLALYAYKPQKSDELELHKGEMYRVLEKCQDGWFKGASLRTGVSGVFPGNYVTPVSRVPAGGAGPPRNNVVGGSPLAKGITTTMHPGSGSLSSLATATRPALPITTPQAHAQHPTASPPTGSCLRHSAQPTASQARSTISTAAHSAAQAQDRPTATVSPLRTQNSPSRLPATSLRPHSVVSPQHSHQPPVQMCPRPAIPLTSAASAITPPNVSAANLNGEAGGGPIGVLSTSSPTNTGCKLDEKKSEKKEKKSGLLKLLAGASTKKKSRSPPSVSPTHDPQVAVDALLQGAVGPEVSSLSIHGRAGSCPIESEMQGAMGMEPLHRKAGSLDLNFTSPSRQAPLSMAAIRPEPKLLPRERYRVVVSYPPQSEAEIELKEGDIVFVHKKREDGWYKGTLQRNGRTGLFPGSFVESF

SEQ ID NO: 4168 - protein, 448 aa, Homo sapiens
MSPLECSECFGDQLLHRTYTWQLTLHSRPNYTRKRDTRSESLEIPISVVLPQRGTAEPFPRLHNLYSTPRCAQQAALPRLSRRMASQHSYPLNRFSSVPLDPMERPMSQADLELDYNPPRVQLSDEMFVFQDGRWVNENCRLQSPYFSPSASFHHKLHHKRLAKECMLQEENKSLREENKALREENRMLSKENKILQVFWEEHKASLGREESRAPSPLLHKDSASLEVVKKDHVALQVPRGKEDSTLQLLREENRALQQLLEQKQAYWAQAEDTAAPAEESKPAPSPHEEPCSPGLLQDQGSGLSSRFEEPKGPPARQEDSKELRALRKMVSNMSGPSGEEEAKVGPGLPDGCQPLQLLREMRQALQALLKENRLLQEENRTLQVLRAEHRGFQEENKALWENNKLKLQQKLVIDTVTEVTARMEMLIEELYAFMPARSQDPKKPSRV

SEQ ID NO: 4169 - protein, 335 aa, Homo sapiens
MIIVAHVLLILLGATEILQADLLPDEKISLLPPVNFTIKVTGLAQVLLQWKPNPDQEQRNVNLEYQVKINAPKEDDYETRITESKCVTILHKGFSASVRTILQNDHSLLASSWASAELHAPPGSPGTSIVNLTCTTNTTEDNYSRLRSYQVSLHCTWLVGTDAPEDTQYFLYYRYGSWTEECQEYSKDTLGRNIACWFPRTFILSKGRDWLAVLVNGSSKHSAIRPFDQLFALHAIDQINPPLNVTAEIEGTRLSIQWEKPVSAFPIHCFDYEVKIHNTRNGYLQIEKLMTNAFISIIDDLSKYDVQVRAAVSSMCREAGLWSEWSQPIYVGFSR

SEQ ID NO: 4170 - protein, 1083 aa, Homo sapiens
MFSFEGDFKTRPKVSLGGASRKEEKASLLHRTQEERRKREEERRRLKNAIIIQSFIRGYRDRKQQYSIQRSAFDRCATLSQSGGAFPIANGPNLTLLVRQLLFFYKQNEDSKRLIWLYQNLIKHSSLFVKQLDGSERLTCLFQIKRLMSLCCRLLQNCNDDSLNVALPMRMLEVFSSENTYLPVLQDASYVVSVIEQILHYMIHNGYYRSLYLLINSKLPSSIEYSDLSRVPIAKILLENVLKPLHFTYNSCPEGARQQVFTAFTEEFLAAPFTDQIFHFIIPALADAQTVFPYEPFLNALLLIESRCSRKSGGAPWLFYFVLTVGENYLGALSEEGLLVYLRVLQTFLSQLPVSPASASCHDSASDSEEESEEADKPSSPEDGRLSVSYITEECLKKLDTKQQTNTLLNLVWRDSASEEVFTTMASVCHTLMVQHRMMVPKVRLLYSLAFNARFLRHLWFLISSMSTRMITGSMVPLLQVISRGSPMSFEDSSRIIPLFYLFSSLFSHSLISIHDNEFFGDPIEVVGQRQSSMMPFTLEELIMLSRCLRDACLGIIKLAYPETKPEVREEYITAFQSIGVTTSSEMQQCIQMEQKRWIQLFKVITNLVKMLKSRDTRRNFCPPNHWLSEQEDIKADKVTQLYVPASRHVWRFRRMGRIGPLQSTLDVGLESPPLSVSEERQLAVLTELPFVVPFEERVKIFQRLIYADKQEVQGDGPFLDGINVTIRRNYIYEDAYDKLSPENEPDLKKRIRVHLLNAHGLDEAGIDGGGIFREFLNELLKSGFNPNQGFFKTTNEGLLYPNPAAQMLVGDSFARHYYFLGRMLGKALYENMLVELPFAGFFLSKLLGTSADVDIHHLASLDPEVYKNLLFLKSYEDDVEELGLNFTVVNNDLGEAQVVELKFGGKDIPVTSANRIAYIHLVADYRLNRQIRQHCLAFRQGLANVVSLEWLRMFDQQEIQVLISGAQVPISLEDLKSFTNYSGGYSADHPVIKVFWRVVEGFTDEEKRKLLKFVTSCSRPPLLGFKELYPAFCIHNGGSDLERLPTASTCMNLLKLPEFYDETLLRSKLLYAIECAAGFELS

SEQ ID NO: 4171 - protein, 178 aa, Homo sapiens
MSFVGENSGVKMGSEDWEKDEPQCCLEDPAGSPLEPGPSLPTMNFVHTKIFFALASSLSSASAEKGSPILLGVSKGEFCLYCDKDKGQSHPSLQLKKEKLMKLAAQKESARRPFIFYRAQVGSWNMLESAAHPGWFICTSCNCNEPVGVTDKFENRKHIEFSFQPVCKAEMSPSEVSD

SEQ ID NO: 4172 - protein, 1746 aa, Homo sapiens
MSACNTFTEHVWKPGECKNCFKPKSLHQLPPDPEKAPITHGNVKTNANHSNNHRIRNTGNFRPPVAKKPTIAVKPTMIVADGQSICGELSIQEHCENKPVIIGWNRNRAALSQKPLNNNNEDDEGISHVPKPYGNNDSAKKMSDNNNGLTEVLKEIAGLDTAPQIRGNETNSRETFLGRINDCYKRSLERKLPPSCMIGGIKETQGKHVILSGSTEVISNEGGRFCYPEFSSGEESEEDVLFSNMEEEHESWDESDEELLAMEIRMRGQPRFANFRANTLSPVRFFVDKKWNTIPLRNKSLQRICAVDYDDSYDEILNGYEENSVVSYGQGSIQSMVSSDSTSPDSSLTEESRSETASSLSQKICNGGLSPGNPGDSKDMKEIEPNYESPSSNNQDKDSSQASKSSIKVPETHKAVLALRLEEKDGKIAVQTEKEESKASTDVAGQAVTINLVPTEEQAKPYRVVNLEQPLCKPYTVVDVSAAMASEHLEGPVNSPKTKSSSSTPNSPVTSSSLTPGQISAHFQKSSAIRYQEVWTSSTSPRQKIPKVELITSGTGPNVPPRKNCHKSAPTSPTATNISSKTIPVKSPNLSEIKFNSYNNAGMPPFPIIIHDEPTYARSSKNAIKVPIVINPNAYDNLAIYKSFLGTSGELSVKEKTTSVISHTYEEIETESKVPDNTTSKTTDCLQTKGFSNSTEHKRGSVAQKVQEFNNCLNRGQSSPQRSYSSSHSSPAKIQRATQEPVAKIEGTQESQMVGSSSTREKASTVLSQIVASIQPPQSPPETPQSGPKACSVEELYAIPPDADVAKSTPKSTPVRPKSLFTSQPSGEAEAPQTTDSPTTKVQKDPSIKPVTPSPSKLVTSPQSEPPAPFPPPRSTSSPYHAGNLLQRHFTNWTKPTSPTRSTEAESVLHSEGSRRAADAKPKRWISFKSFFRRRKTDEEDDKEKEREKGKLVGLDGTVIHMLPPPPVQRHHWFTEAKGESSEKPAIVFMYRCDPAQGQLSVDQSKARTDQAAVMEKGRAENALLQDSEKKRSHSSPSQIPKKILSHMTHEVTEDFSPRDPRTVVGKQDGRGCTSVTTALSLPELEREDGKEDISDPMDPNPCSATYSNLGQSRAAMIPPKQPRQPKGAVDDAIAFGGKTDQEAPNASQPTPPPLPKKMIIRANTEPISKDLQKSMESSLCVMANPTYDIDPNWDASSAGSSISYELKGLDIESYDSLERPLRKERPVPSAANSISSLTTLSIKDRFSNSMESLSSRRGPSCRQGRGIQKPQRQALYRGLENREEVVGKIRSLHTDALKKLAVKCEDLFMAGQKDQLRFGVDSWSDFRLTSDKPCCEAGDAVYYTASYAKDPLNNYAVKICKSKAKESQQYYHSLAVRQSLAVHFNIQQDCGHFLAEVPNRLLPWEDPDDPEKDEDDMEETEEDAKGETDGKNPKPCSEAASSQKENQGVMSKKQRSHVVVITREVPCLTVADFVRDSLAQHGKSPDLYERQVCLLLLQLCSGLEHLKPYHVTHCDLRLENLLLVHYQPGGTAQGFGPAEPSPTSSYPTRLIVSNFSQAKQKSHLVDPEILRDQSRLAPEIITATQYKKCDEFQTGILIYEMLHLPNPFDENPELKEREYTRADLPRIPFRSPYSRGLQQLASCLLNPNPSERILISDAKGILQCLLWGPREDLFQTFTACPSLVQRNTLLQNWLDIKRTLLMIKFAEKSLDREGGISLEDWLCAQYLAFATTDSLSCIVKILQHR

SEQ ID NO: 4173 - protein, 1495 aa, Homo sapiens
MQCLEMTTKRKIIGRLVPCRCFRGEEEIISVLDYSHCSLQQVPKEVFNFERTLEELYLDANQIEELPKQLFNCQALRKLSIPDNDLSNLPTTIASLVNLKELDISKNGVQEFPENIKCCKCLTIIEASVNPISKLPDGFTQLLNLTQLYLNDAFLEFLPANFGRLVKLRILELRENHLKTLPKSMHKLAQLERLDLGNNEFGELPEVLDQIQNLRELWMDNNALQVLPGSIGKLKMLVYLDMSKNRIETVDMDISGCEALEDLLLSSNMLQQLPDSIGLLKKLTTLKVDDNQLTMLPNTIGNLSLLEEFDCSCNELESLPSTIGYLHSLRTLAVDENFLPELPREIGSCKNVTVMSLRSNKLEFLPEEIGQMQKLRVLNLSDNRLKNLPFSFTKLKELAALWLSDNQSKALIPLQTEAHPETKQRVLTNYMFPQQPRGDEDFQSDSDSFNPTLWEEQRQQRMTVAFEFEDKKEDDENAGKVKDLSCQAPWERGQRGITLQPARLSGDCCTPWARCDQQIQDMPVPQNDPQLAWGCISGLQQERSMCTPLPVAAQSTTLPSLSGRQVEINLKRYPTPYPEDLKNMVKSVQNLVGKPSHGVRVENSNPTANTEQTVKEKYEHKWPVAPKEITVEDSFVHPANEMRIGELHPSLAETPLYPPKLVLLGKDKKESTDESEVDKTHCLNNSVSSGTYSDYSPSQASSGSSNTRVKVGSLQTTAKDAVHNSLWGNRIAPSFPQPLDSKPLLSQREAVPPGNIPQRPDRLPMSDTFTDNWTDGSHYDNTGFVAEETTAENANSNPLLSSKSRSTSSHGRRPLIRQDRIVGVPLELEQSTHRHTPETEVPPSNPWQNWTRTPSPFEDRTAFPSKLETTPTTSPLPERKEHIKESTEIPSPFSPGVPWEYHDSNPNRSLSNVFSQIHCRPESSKGVISISKSTERLSPLMKDIKSNKFKKSQSIDEIDIGTYKVYNIPLENYASGSDHLGSHERPDKMLGPEHGMSSMSRSQSVPMLDDEMLTYGSSKGPQQQKASMTKKVYQFDQSFNPQGSVEVKAEKRIPPPFQHNPEYVQQASKNIAKDLISPRAYRGYPPMEQMFSFSQPSVNEDAVVNAQFASQGARAGFLRRADSLVSATEMAMFRRVNEPHELPPTDRYGRPPYRGGLDRQSSVTVTESQFLKRNGRYEDEHPSYQEVKAQAGSFPVKNLTQRRPLSARSYSTESYGASQTRPVSARPTMAALLEKIPSDYNLGNYGDKPSDNSDLKTRPTPVKGEESCGKMPADWRQQLLRHIEARRLDRTPSQQSNILDNGQEDVSPSGQWNPYPLGRRDVPPDTITKKAGSHIQTLMGSQSLQHRSREQQPYEGNINKVTIQQFQSPLPIQIPSSQATRGPQPGRCLIQTKGQRSMDGYPEQFCVRIEKNPGLGFSISGGISGQGNPFKPSDKGIFVTRVQPDGPASNLLQPGDKILQANGHSFVHMEHEKAVLLLKSFQNTVDLVIQRELTV

SEQ ID NO: 4174 - protein, 640 aa, Homo sapiens
MESVVRRCPFLSRVPQAFLQKAGKSLLFYAQNCPKMMEVGAKPAPRALSTAAVHYQQIKETPPASEKDKTAKAKVQQTPDGSQQSPDGTQLPSGHPLPATSQGTASKCPFLAAQMNQRGSSVFCKASLELQEDVQEMNAVRKEVAETSAGPSVVSVKTDGGDPSGLLKNFQDIMQKQRPERVSHLLQDNLPKSVSTFQYDRFFEKKIDEKKNDHTYRVFKTVNRRAHIFPMADDYSDSLITKKQVSVWCSNDYLGMSRHPRVCGAVMDTLKQHGAGAGGTRNISGTSKFHVDLERELADLHGKDAALLFSSCFVANDSTLFTLAKMMPGCEIYSDSGNHASMIQGIRNSRVPKYIFRHNDVSHLRELLQRSDPSVPKIVAFETVHSMDGAVCPLEELCDVAHEFGAITFVDEVHAVGLYGARGGGIGDRDGVMPKMDIISGTLGKAFGCVGGYIASTSSLIDTVRSYAAGFIFTTSLPPMLLAGALESVRILKSAEGRVLRRQHQRNVKLMRQMLMDAGLPVVHCPSHIIPVRVADAAKNTEVCDELMSRHNIYVQAINYPTVPRGEELLRIAPTPHHTPQMMNYFLENLLVTWKQVGLELKPHSSAECNFCRRPLHFEVMSEREKSYFSGLSKLVSAQA

SEQ ID NO: 4175 - protein, 1035 aa, Homo sapiens
MAPRLQLEKAAWRWAETVRPEEVSQEHIETAYRIWLEPCIRGVCRRNCKGNPNCLVGIGEHIWLGEIDENSFHNIDDPNCERRKKNSFVGLTNLGATCYVNTFLQVWFLNLELRQALYLCPSTCSDYMLGDGIQEEKDYEPQTICEHLQYLFALLQNSNRRYIDPSGFVKALGLDTGQQQDAQEFSKLFMSLLEDTLSKQKNPDVRNIVQQQFCGEYAYVTVCNQCGRESKLLSKFYELELNIQGHKQLTDCISEFLKEEKLEGDNRYFCENCQSKQNATRKIRLLSLPCTLNLQLMRFVFDRQTGHKKKLNTYIGFSEILDMEPYVEHKGGSYVYELSAVLIHRGVSAYSGHYIAHVKDPQSGEWYKFNDEDIEKMEGKKLQLGIEEDLAEPSKSQTRKPKCGKGTHCSRNAYMLVYRLQTQEKPNTTVQVPAFLQELVDRDNSKFEEWCIEMAEMRKQSVDKGKAKHEEVKELYQRLPAGAEPYEFVSLEWLQKWLDESTPTKPIDNHACLCSHDKLHPDKISIMKRISEYAADIFYSRYGGGPRLTVKALCKECVVERCRILRLKNQLNEDYKTVNNLLKAAVKGSDGFWVGKSSLRSWRQLALEQLDEQDGDAEQSNGKMNGSTLNKDESKEERKEEEELNFNEDILCPHGELCISENERRLVSKEAWSKLQQYFPKAPEFPSYKECCSQCKILEREGEENEALHKMIANEQKTSLPNLFQDKNRPCLSNWPEDTDVLYIVSQFFVEEWRKFVRKPTRCSPVSSVGNSALLCPHGGLMFTFASMTKEDSKLIALIWPSEWQMIQKLFVVDHVIKITRIEVGDVNPSETQYISEPKLCPECREGLLCQQQRDLREYTQATIYVHKVVDNKKVMKDSAPELNVSSSETEEDKEEAKPDGEKDPDFNQSNGGTKRQKISHQNYIAYQKQVIRRSMRHRKVRGEKALLVSANQTLKELKIQIMHAFSVAPFDQNLSIDGKILSDDCATLGTLGVIPESVILLKADEPIADYAAMDDVMQVCMPEEGFKGTGLLGH

SEQ ID NO: 4176 - protein, 1138 aa, Homo sapiens
MAPTLFQKLFSKRTGLGAPGRDARDPDCGFSWPLPEFDPSQIRLIVYQDCERRGRNVLFDSSVKRRNEDISVSKLGSDAQVKVFGKCCQLKPGGDSSSSLDSSVTSSSDIKDQCLKYQGSRCSSDANMLGEMMFGSVAMSYKGSTLKIHQIRSPPQLMLSKVFTARTGSSICGSLNTLQDSLEFINQDNNTLKADNNTVINGLLGNIVHSNPMDMPGRELNEDRDSGIARSASLSSLLITPFPSPNSSLTRSCASSYQRRWRRSQTTSLENGVFPRWSIEESFNLSDESCGPNPGIVRKKKIAIGVIFSLSKDEDENNKFNEFFFSHFPLFESHMNKLKSAIEQAMKMSRRSADASQRSLAYNRIVDALNEFRTTICNLYTMPRIGEPVWLTMMSGTPEKNHLCYRFMKEFTFLMENASKNQFLPALITAVLTNHLAWVPTVMPNGQPPIKIFLEKHSSQSVDMLAKTHPYNPLWAQLGDLYGAIGSPVRLARTVVVGKRQDMVQRLLYFLTYFIRCSELQETHLLENGEDEAIVMPGTVITTTLEKGEIEESEYVLVTMHRNKSSLLFKESEEIRTPNCNCKYCSHPLLGQNVENISQQEREDIQNSSKELLGISDECQMISPSDCQEENAVDVKQYRDKLRTCFDAKLETVVCTGSVPVDKCALSESGLESTEETWQSEKLLDSDSHTGKAMRSTGMVVEKKPPDKIVPASFSCEAAQTKVTFLIGDSMSPDSDTELRSQAVVDQITRHHTKPLKEERGAIDQHQETKQTTKDQSGESDTQNMVSEEPCELPCWNHSDPESMSLFDEYFNDDSIETRTIDDVPFKTSTDSKDHCCMLEFSKILCTKNNKQNNEFCKCIETVPQDSCKTCFPQQDQRDTLSILVPHGDKESSDKKIAVGTEWDIPRNESSDSALGDSESEDTGHDMTRQVSSYYGGEQEDWAEEDEIPFPGSKLIEVSAVQPNIANFGRSLLGGYCSSYVPDFVLQGIGSDERFRQCLMSDLSHAVQHPVLDEPIAEAVCIIADMDKWTVQVASSQRRVTDNKLGKEVLVSSLVSNLLHSTLQLYKHNLSPNFCVMHLEDRLQELYFKSKMLSEYLRGQMRVHVKELGVVLGIESSDLPLLAAVASTHSPYVAQILL

SEQ ID NO: 4177 - protein, 519 aa, Homo sapiens
MDDHVTIRKKHLQRPIFRLRCLVKQLERGDVNVVDLKKNIEYAASVLEAVYIDETRRLLDTEDELSDIQTDSVPSEVRDWLASTFTRKMGMTKKKPEEKPKFRSIVHAVQAGIFVERMYRKTYHMVGLAYPAAVIVTLKDVDKWSFDVFALNEASGEHSLKFMIYELFTRYDLINRFKIPVSCLITFAEALEVGYSKYKNPYHNLIHAADVTQTVHYIMLHTGIMHWLTELEILAMVFAAAIHDYEHTGTTNNFHIQTRSDVAILYNDRSVLENHHVSAAYRLMQEEEMNILINLSKDDWRDLRNLVIEMVLSTDMSGHFQQIKNIRNSLQQPEGIDRAKTMSLILHAADISHPAKSWKLHYRWTMALMEEFFLQGDKEAELGLPFSPLCDRKSTMVAQSQIGFIDFIVEPTFSLLTDSTEKIVIPLIEEASKAETSSYVASSSTTIVGLHIADALRRSNTKGSMSDGSYSPDYSLAAVDLKSFKNNLVDIIQQNKERWKELAAQEARTSSQKCEFIHQ

SEQ ID NO: 4178 - protein, 411 aa, Homo sapiens
MQCSWKAVLLLALASIAIQYTAIRTFTAKSFHTCPGLAEAGLAERLCEESPTFAYNLSRKTHILILATTRSGSSFVGQLFNQHLDVFYLFEPLYHVQNTLIPRFTQGKSPADRRVMLGASRDLLRSLYDCDLYFLENYIKPPPVNHTTDRIFRRGASRVLCSRPVCDPPGPADLVLEEGDCVRKCGLLNLTVAAEACRERSHVAIKTVRVPEVNDLRALVEDPRLNLKVIQLVRDPRGILASRSETFRDTYRLWRLWYGTGRKPYNLDVTQLTTVCEDFSNSVSTGLMRPPWLKGKYMLVRYEDLARNPMKKTEEIYGFLGIPLDSHVARWIQNNTRGDPTLGKHKYGTVRNSAATAEKWRFRLSYDIVAFAQNACQQVLAQLGYKIAASEEELKNPSVSLVEERDFRPFS

SEQ ID NO: 4179 - protein, 555 aa, Homo sapiens
MDVSSEHTKDPGGEGGDGESLAARPSKIKASSGPPTSPEPGELESEPEEEEEEQAASQGGTAADEQAEAPKGLTAAEAAGEEGPGEPGRPAEPQPEPEEPAEVGAEEPAQPEPGAGPEELEAEAGAEELEQAAEGKEVRFQASLPLTRIDEEEAAAAPEAETERVEGEEEDKEETQRDGAESKERDGEGRPAKSQEEGKRLYGRDEFEDLEWSEEVQKLQEQQLRSDLLDQYRSLLVERNRSQRYNLYLQHKIFEALRRKKGLEAAEVADRGAEAEAPEKEQAYLRHLGMLEELKKQQADDLQWYHQELGQLKRQCQEKLTRVEKEWRRFQALKKQVVMQAMGSCRMRGGRQAALREVEQIQALEDKKEKEMSAVRLENIQLKQSLVHFETRMRTQEDLTQGLLLIDFEQLKIENQTFNEKIEERNEELLKLRSKVTNSVQVITHVKEKLHFMDMENACKKTQLAEIEAQAALGRDILTKTKQAREGLRTDNIRLNQKCGLLGKDSLLRDLEEKVDKTELLHRRLESLKRHHASLTLSCRGVRQKIREAKAFLPS

SEQ ID NO: 4180 - protein, 979 aa, Homo sapiens
MSYDYHQNWGRDGGPRSSGGGYGGGPAGGHGGNRGSGGGGGGGGGGRGGRGRHPGHLKGREIGMWYAKKQGQKNKEAERQERAVVHMDERREEQIVQLLNSVQAKNDKESEAQISWFAPEDHGYGTEVSTKNTPCSENKLDIQEKKLINQEKKMFRIRNRSYIDRDSEYLLQENEPDGTLDQKLLEDLQKKKNDLRYIEMQHFREKLPSYGMQKELVNLIDNHQVTVISGETGCGKTTQVTQFILDNYIERGKGSACRIVCTQPRRISAISVAERVAAERAESCGSGNSTGYQIRLQSRLPRKQGSILYCTTGIILQWLQSDPYLSSVSHIVLDEIHERNLQSDVLMTVVKDLLNFRSDLKVILMSATLNAEKFSEYFGNCPMIHIPGFTFPVVEYLLEDVIEKIRYVPEQKEHRSQFKRGFMQGHVNRQEKEEKEAIYKERWPDYVRELRRRYSASTVDVIEMMEDDKVDLNLIVALIRYIVLEEEDGAILVFLPGWDNISTLHDLLMSQVMFKSDKFLIIPLHSLMPTVNQTQVFKRTPPGVRKIVIATNIAETSITIDDVVYVIDGGKIKETHFDTQNNISTMSAEWVSKANAKQRKGRAGRVQPGHCYHLYNGLRASLLDDYQLPEILRTPLEELCLQIKILRLGGIAYFLSRLMDPPSNEAVLLSIRHLMELNALDKQEELTPLGVHLARLPVEPHIGKMILFGALFCCLDPVLTIAASLSFKDPFVIPLGWEEARRRGFRYEKDYCWEYFLSSNTLQMLHNMKGQFAEHLLGAGFVSSRNPKDPESNINSDNEKIIKAVICAGLYPKVAKIRLNLGKKRKMVKVYTKTDGLVAVHPKSVNVEQTDFHYNWLIYHLKMRTSSIYLYDCTEVSPYCLLFFGGDISIQKDNDQETIAVDEWIVFQSPARIAHLVKELRKELDILLQEKIESPHPVDWNDTKSRDCAVLSAIIDLIKTQEKATPRNFPPRFQDGYYS

SEQ ID NO: 4181 - protein, 481 aa, Homo sapiens
MRGLPRKREAWTQPHPLEALYESLRVLEKDTSATSQSVNGSPQAEQPSLESTSKEAFFSRVETFSSLKWAGKPFELSPLVCAKYGWVTVECDMLKCSSCQAFLCASLQPAFDFDRYKQRCAELKKALCTAHEKFCFWPDSPSPDRFGMLPLDEPAILVSEFLDRFQSLCHLDLQLPSLRPEDLKTMCLTEDKISLLLHLLEDELDHRTDERKTTIKLGSDIQVHVTACILSVCGWACSSSLESMQLSLITCSQCMRKVGLWGFQQIESSMTDLDASFGLTSSPIPGLEGRPERLPLVPESPRRMMTRSQDATFSPGSEQAEKSPGPIVSRTRSWDSSSPVDRPEPEAASPTTRTRPVTRSMGTGDTPGLEVPSSPLRKAKRARLCSSSSSDTSSRSFFDPTSQHRDWCPWVNITLGKESRENGGTEPDASAPAEPGWKAVLTILLAHKQSSQPAETDSMSLSEKSRKVFRIFRQWESLCSC

SEQ ID NO: 4182 - protein, 1145 aa, Homo sapiens
MRRRYEDDGISDDEIEGKRTFDLEEKLHTNKYNANFVTFMEGKDFNVEYIQRGGLRDPLIFKNSDGLGIKMPDPDFTVNDVKMCVGSRRMVDVMDVNTQKGIEMTMAQWTRYYETPEEEREKLYNVISLEFSHTRLENMVQRPSTVDFIDWVDNMWPRHLKESQTESTNAILEMQYPKVQKYCLMSVRGCYTDFHVDFGGTSVWYHIHQGGKVFWLIPPTAHNLELYENWLLSGKQGDIFLGDRVSDCQRIELKQGYTFVIPSGWIHAVYTPTDTLVFGGNFLHSFNIPMQLKIYNIEDRTRVPNKFRYPFYYEMCWYVLERYVYCITNRSHLTKEFQKESLSMDLELNGLESGNGDEEAVDREPRRLSSRRSVLTSPVANGVNLDYDGLGKTCRSLPSLKKTLAGDSSSDCSRGSHNGQVWDPQCAPRKDRQVHLTHFELEGLRCLVDKLESLPLHKKCVPTGIEDEDALIADVKILLEELANSDPKLALTGVPIVQWPKRDKLKFPTRPKVRVPTIPITKPHTMKPAPRLTPVRPAAASPIVSGARRRRVRCRKCKACVQGECGVCHYCRDMKKFGGPGRMKQSCVLRQCLAPRLPHSVTCSLCGEVDQNEETQDFEKKLMECCICNEIVHPGCLQMDGEGLLNEELPNCWECPKCYQEDSSEKAQKRKMEESDEEAVQAKVLRPLRSCDEPLTPPPHSPTSMLQLIHDPVSPRGMVTRSSPGAGPSDHHSASRDERFKRRQLLRLQATERTMVREKENNPSGKKELSEVEKAKIRGSYLTVTLQRPTKELHGTSIVPKLQAITASSANLRHSPRVLVQHCPARTPQRGDEEGLGGEEEEEEEEEEEDDSAEEGGAARLNGRGSWAQDGDESWMQREVWMSVFRYLSRRELCECMRVCKTWYKWCCDKRLWTKIDLSRCKAIVPQALSGIIKRQPVSLDLSWTNISKKQLTWLVNRLPGLKDLLLAGCSWSAVSALSTSSCPLLRTLDLRWAVGIKDPQIRDLLTPPADKPGQDNRSKLRNMTDFRLAGLDITDATLRLIIRHMPLLSRLDLSHCSHLTDQSSNLLTAVGSSTRYSLTELNMAGCNKLTDQTLIYLRRIANVTLIDLRGCKQITRKACEHFISDLSINSLYCLSDEKLIQKIS

SEQ ID NO: 4183 - protein, 530 aa, Homo sapiens
MPGPPGSLEMGPLTFRDVAIEFSLEEWQCLDTAQRNLYRKVMFENYRNLVFLGIAVSKPHLITCLEQGKEPWNRKRQEMVAKPPVIYSHFTEDLWPEHSIKDSFQKVILRGYGKCGHENLQLRISCKSVDESKVFKEGYNELNQCLRTTQSKIFQCDKYVKVFHKFSNSNSHKKRNTGKKVFKCKECGKSFCMLSHLTQHIRIHTRENSYKCEECGKVLNWFSELIKHKGIHMGEKPYKCEECGKAFNQSSTLIKHKKIHIEEKPFKCEECGKAFSLFSILSKHKIIHTGDKPYKCDECHKAFNWFATLTNHKRIHTGEKPFKCEECGKDFNQFSNLTKHKKIHTGEKPYKCEECGKAFNQFANLTRHKKIHTGEKSYKCEECGKAFIQSSNLTEHMRIHTGEKPYKCEECGKAFNGCSSLTRHKRIHTRENTYKCEECGKGFTLFSTLTNHKVIHTGEKSYKCDECGNVFNWPATLANHKRIHAREKPYKCEECGKAFNRSSHLTRHKKIHTGEKLYKPEKCDNNFDNT

SEQ ID NO: 4184 - protein, 358 aa, Homo sapiens
MAGCGEIDHSINMLPTNRKANESCSNTAPSLTVPECAICLQTCVHPVSLPCKHVFCYLCVKGASWLGKRCALCRQEIPEDFLDKPTLLSPEELKAASRGNGEYAWYYEGRNGWWQYDERTSRELEDAFSKGKKNTEMLIAGFLYVADLENMVQYRRNEHGRRRKIKRDIIDIPKKGVAGLRLDCDANTVNLARESSADGADSVSAQSGASVQPLVSSVRPLTSVDGQLTSPATPSPDASTSLEDSFAHLQLSGDNTAERSHRGEGEEDHESPSSGRVPAPDTSIEETESDASSDSEDVSAVVAQHSLTQQRLLVSNANQTVPDRSDRSGTDRSVAGGGTVSVSVRSRRPDGQCTVTEV

SEQ ID NO: 4185 - protein, 671 aa, Homo sapiens
MRPKRLGRCCAGSRLGPGDPAALTCAPSPSASPAPEPSAQPQARGTGQRVGSRATSGSQFLSEARTGARPASEAGAKAGARRPSAFSAIQGDVRSMPDNSDAPWTRFVFQGPFGSRATGRGTGKAAGIWKTPAAYVGRRPGVSGPERAAFIRELEEALCPNLPPPVKKITQEDVKVMLYLLEELLPPVWESVTYGMVLQRERDLNTAARIGQSLVKQNSVLMEENSKLEALLGSAKEEILYLRHQVNLRDELLQLYSDSDEEDEDEEEEEEEKEAEEEQEEEEAEEDLQCAHPCDAPKLISQEALLHQHHCPQLEALQEKLRLLEEENHQLREEASQLDTLEDEEQMLILECVEQFSEASQQMAELSEVLVLRLENYERQQQEVARLQAQVLKLQQRCRMYGAETEKLQKQLASEKEIQMQLQEESVWVGSQLQDLREKYMDCGGMLIEMQEEVKTLRQQPPVSTGSATHYPYSVPLETLPGFQETLAEELRTSLRRMISDPVYFMERNYEMPRGDTSSLRYDFRYSEDREQVRGFEAEEGLMLAADIMRGEDFTPAEEFVPQEELGAAKKVPAEEGVMEEAELVSEETEGWEEVELELDEATRMNVVTSALEASGLGPSHLDMNYVLQQLANWQDAHYRRQLRWKMLQKGECPHGALPAASRTSCRSSCR

SEQ ID NO: 4186 - protein, 369 aa, Homo sapiens
MGLRKKSTKNPPVLSQEFILQNHADIVSCVGMFFLLGLVFEGTAEASIVFLTLQHSVAVPAAEEQATGSKSLYYYGVKDLATVFFYMLVAIIIHATIQEYVLDKINKRMQFTKAKQNKFNESGQFSVFYFFSCIWGTFILISENCLSDPTLIWKARPHSMMTFQMKFFYISQLAYWFHAFPELYFQKTKKQDIPRQLVYIGLHLFHITGAYLLYLNHLGLLLLVLHYFVELLSHMCGLFYFSDEKYQKGISLWAIVFILGRLVTLIVSVLTVGFHLAGSQNRNPDALTGNVNVLAAKIAVLSSSCTIQAYVTWNLITLWLQRWVEDSNIQASCMKKKRSRSSKKRTENGVGVETSNRVDCPPKRKEKSS

SEQ ID NO: 4187 - protein, 854 aa, Homo sapiens
MAEAEEQETGSLEESTDESEEEESEEEPKLKYERLSNGVTEILQKDAASCMTVHDKFLALGTHYGKVYLLDVQGNITQKFDVSPVKINQISLDESGEHMGVCSEDGKVQVFGLYSGEEFHETFDCPIKIIAVHPHFVRSSCKQFVTGGKKLLLFERSWMNRWKSAVLHEGEGNIRSVKWRGHLIAWANNMGVKIFDIISKQRITNVPRDDISLRPDMYPCSLCWKDNVTLIIGWGTSVKVCSVKERHASEMRDLPSRYVEIVSQFETEFYISGLAPLCDQLVVLSYVKEISEKTEREYCARPRLDIIQPLSETCEEISSDALTVRGFQENECRDYHLEYSEGESLFYIVSPRDVVVAKERDQDDHIDWLLEKKKYEEALMAAEISQKNIKRHKILDIGLAYINHLVERGDYDIAARKCQKILGKNAALWEYEVYKFKEIGQLKAISPYLPRGDPVLKPLIYEMILHEFLESDYEGFATLIREWPGDLYNNSVIVQAVRDHLKKDSQNKTLLKTLAELYTYDKNYGNALEIYLTLRHKDVFQLIHKHNLFSSIKDKIVLLMDFDSEKAVDMLLDNEDKISIKKVVEELEDRPELQHVYLHKLFKRDHHKGQRYHEKQISLYAEYDRPNLLPFLRDSTHCPLEKALEICQQRNFVEETVYLLSRMGNSRSALKMIMEELHDVDKAIEFAKEQDDGELWEDLILYSIDKPPFITGLLNNIGTHVDPILLIHRIKEGMEIPNLRDSLVKILQDYNLQILLREGCKKILVADSLSLLKKMHRTQMKGVLVDEENICESCLSPILPSDAAKPFSVVVFHCRHMFHKECLPMPSMNSAAQFCNICSAKNRGPGSAILEMKK

SEQ ID NO: 4188 - protein, 953 aa, Homo sapiens
MITSAAGIISLLDEDEPQLKEFALHKLNAVVNDFWAEISESVDKIEVLYEDEGFRSRQFAALVASKVFYHLGAFEESLNYALGAGDLFNVNDNSEYVETIIAKCIDHYTKQCVENADLPEGEKKPIDQRLEGIVNKMFQRCLDDHKYKQAIGIALETRRLDVFEKTILESNDVPGMLAYSLKLCMSLMQNKQFRNKVLRVLVKIYMNLEKPDFINVCQCLIFLDDPQAVSDILEKLVKEDNLLMAYQICFDLYESASQQFLSSVIQNLRTVGTPIASVPGSTNTGTVPGSEKDSDSMETEEKTSSAFVGKTPEASPEPKDQTLKMIKILSGEMAIELHLQFLIRNNNTDLMILKNTKDAVRNSVCHTATVIANSFMHCGTTSDQFLRDNLEWLARATNWAKFTATASLGVIHKGHEKEALQLMATYLPKDTSPGSAYQEGGGLYALGLIHANHGGDIIDYLLNQLKNASNDIVRHGGSLGLGLAAMGTARQDVYDLLKTNLYQDDAVTGEAAGLALGLVMLGSKNAQAIEDMVGYAQETQHEKILRGLAVGIALVMYGRMEEADALIESLCRDKDPILRRSGMYTVAMAYCGSGNNKAIRRLLHVAVSDVNDDVRRAAVESLGFILFRTPEQCPSVVSLLSESYNPHVRYGAAMALGICCAGTGNKEAINLLEPMTNDPVNYVRQGALIASALIMIQQTEITCPKVNQFRQLYSKVINDKHDDVMAKFGAILAQGILDAGGHNVTISLQSRTGHTHMPSVVGVLVFTQFWFWFPLSHFLSLAYTPTCVIGLNKDLKMPKVQYKSNCKPSTFAYPAPLEVPKEKEKEKVSTAVLSITAKAKKKEKEKEKKEEEKMEVDEAEKKEEKEKKKEPEPNFQLLDNPARVMPAQLKVLTMPETCRYQPFKPLSIGGIIILKDTSEDIEELVEPVAAHGPKIEEEEQEPEPPEPFEYIDD

SEQ ID NO: 4189 - protein, 889 aa, Homo sapiens
MSNPFAHLAEPLDPVQPGKKFFNLNKLEDSRYGRLPFSIRVLLEAAIRNCDEFLVKKQDIENILHWNVTQHKNIEVPFKPARVILQDFTGVPAVVDFAAMRDAVKKLGGDPEKINPVCPADLVIDHSIQVDFNRRADSLQKNQDLEFERNRERFEFLKWGSQAFHNMRIIPPGSGIIHQVNLEYLARVVFDQDGYYYPDSLVGTDSHTTMIDGLGILGWGVGGIEAEAVMLGQPISMVLPQVIGYRLMGKPHPLVTSTDIVLTITKHLRQVGVVGKFVEFFGPGVAQLSIADRATIANMCPEYGATAAFFPVDEVSITYLVQTGRDEEKLKYIKKYLQAVGMFRDFNDPSQDPDFTQVVELDLKTVVPCCSGPKRPQDKVAVSDMKKDFESCLGAKQGFKGFQVAPEHHNDHKTFIYDNTEFTLAHGSVVIAAITSCTNTSNPSVMLGAGLLAKKAVDAGLNVMPYIKTSLSPGSGVVTYYLQESGVMPYLSQLGFDVVGYGCMTCIGNSGPLPEPVVEAITQGDLVAVGVLSGNRNFEGRVHPNTRANYLASPPLVIAYAIAGTIRIDFEKEPLGVNAKGQQVFLKDIWPTRDEIQAVERQYVIPGMFKEVYQKIETVNESWNALATPSDKLFFWNSKSTYIKSPPFFENLTLDLQPPKSIVDAYVLLNLGDSVTTDHISPAGNIARNSPAARYLTNRGLTPREFNSYGSRRGNDAVMARGTFANIRLLNRFLNKQAPQTIHLPSGEILDVFDAAERYQQAGLPLIVLAGKEYGAGSSRDWAAKGPFLLGIKAVLAESYERIHRSNLVGMGVIPLEYLPGENADALGLTGQERYTIIIPENLKPQMKVQVKLDTGKTFQAVMRFDTDVELTYFLNGGILNYMIRKMAK

SEQ ID NO: 4190 - protein, 414 aa, Homo sapiens
MVQKKPAELQGFHRSFKGQNPFELAFSLDQPDHGDSDFGLQCSARPDMPASQPIDIPDAKKRGKKKKRGRATDSFSGRFEDVYQLQEDVLGEGAHARVQTCINLITSQEYAVKIIEKQPGHIRSRVFREVEMLYQCQGHRNVLELIEFFEEEDRFYLVFEKMRGGSILSHIHKRRHFNELEASVVVQDVASALDFLHNKGIAHRDLKPENILCEHPNQVSPVKICDFDLGSGIKLNGDCSPISTPELLTPCGSAEYMAPEVVEAFSEEASIYDKRCDLWSLGVILYILLSGYPPFVGRCGSDCGWDRGEACPACQNMLFESIQEGKYEFPDKDWAHISCAAKDLISKLLVRDAKQRLSAAQVLQHPWVQGCAPENTLPTPMVLQRWDSHFLLPPHPCRIHVRPGGLVRTVTVNE

SEQ ID NO: 4191 - protein, 926 aa, Homo sapiens
MAFLIILITCFVIILATSQPCQTPDDFVAATSPGHIIIGGLFAIHEKMLSSEDSPRRPQIQECVGFEISVFLQTLAMIHSIEMINNSTLLPGVKLGYEIYDTCTEVTVAMAATLRFLSKFNCSRETVEFKCDYSSYMPRVKAVIGSGYSEITMAVSRMLNLQLMPQVGYESTAEILSDKIRFPSFLRTVPSDFHQIKAMAHLIQKSGWNWIGIITTDDDYGRLALNTFIIQAEANNVCIAFKEVLPAFLSDNTIEVRINRTLKKIILEAQVNVIVVFLRQFHVFDLFNKAIEMNINKMWIASDNWSTATKITTIPNVKKIGKVVGFAFRRGNISSFHSFLQNLHLLPSDSHKLLHEYAMHLSACAYVKDTDLSQCIFNHSQRTLAYKANKAIERNFVMRNDFLWDYAEPGLIHSIQLAVFALGYAIRDLCQARDCQNPNAFQPWELLGVLKNVTFTDGWNSFHFDAHGDLNTGYDVVLWKEINGHMTVTKMAEYDLQNDVFIIPDQETKNEFRNLKQIQSKCSKECSPGQMKKTTRSQHICCYECQNCPENHYTNQTDMPHCLLCNNKTHWAPVRSTMCFEKEVEYLNWNDSLAILLLILSLLGIIFVLVVGIIFTRNLNTPVVKSSGGLRVCYVILLCHFLNFASTSFFIGEPQDFTCKTRQTMFGVSFTLCISCILTKSLKILLAFSFDPKLQKFLKCLYRPILIIFTCTGIQVVICTLWLIFAAPTVEVNVSLPRVIILECEEGSILAFGTMLGYIAILAFICFIFAFKGKYENYNEAKFITFGMLIYFIAWITFIPIYATTFGKYVPAVEIIVILISNYGILYCTFIPKCYVIICKQEINTKSAFLKMIYSYSSHSVSSIALSPASLDSMSGNVTMTNPSSSGKSATWQKSKDLQAQAFAHICRENATSVSKTLPRKRMSSI

SEQ ID NO: 4192 - protein, 1742 aa, Homo sapiens
MWPAGAGTKLPCPRDSALRRAAFSGNLTALPSHLVPAGRSVRVFISANPEDTGAERQALRENVYPKLREFCRENYGLEFQVIDLYWGVEEDEWDSPELQKTRMKLLENCLKTSAGPCFVGLLGEKYGNIRIPGEVEASEFEMILDAAIEAKLETKLLEEWYCRDENSVPAAYYLRPKSEMLRSNRNAMQPSTNAENEKTWQEISDEIKKIFKAAVKLLHEKGKMKHSQAKRYLFSAIEDEFDFALGKQTPAFLKKCVCYIRKIANIERFVKIPEMGKYMDITGTEPRIIRDPEAQEKLIKLRDEFIPTIVASSNLRVYTSVTHCDMKLGYSQEIENHYIEGLGKQFYEDMIDIIQATIQQNFDTETDTLYDEILQHSSLCKTYASFYEYKCESLNIVHNYILPSKAGHINPLIIYGGPCTGKTLLLAEVAKKAYGWLHEDTGPESDPVVIVRFLGTTDMSSDLRTLLLSVCEQLAVNYRCLVQSYPKKIHDLCDLFINLLNESSLQRPLVIIFDALEQLSENDDARKLWWLPAHLPRFVRIVLSTLPNKHGILQKLRCLIHEEDNYIELIPRDRKMCSQVLKHQLLRVKRKVTSGQQIYVNNALSKCTLPMFVNLTFREVRHWRSHKDVDESSLSVTVHESIEQLFWSLEKKCGQKLVSRALGYITMAKMGLSEMELEDVLALDNSVMSELKENTRPSNPLRVPYLYIARLKEGLSGYLIERHVKNVTLLVWANRHLQLIAQKLYLQDDNDLREMHTILADYFLGVWSGGRRKAFCLEDPYLNGCLDLENRSLLEEEKHFMEQASFDRQAPDQPWVFQCNPLEPDIFFVNHRKMSELLYHLTRCGKTDDLLYGIIMNFSWLYTMIKIGQFDKVLSDIELAYNYSQEKELKFLANTLRSIKNKVTAFPGSLSAELQQRLLPVVSSLPKLRHLLLECDKDGPKYCSIVPLHSSMDVTYSPERLPLSSSHLHVTEILPTCNPSTVLTALENGSISTWDVETRQLLRQITTAQSVILGMKLTSDEKYLVVATTNNTLLIYDNVNSCLLSEVEIKGTKHGSSATYINGFTLSANHALAWLEASKDVTVIDLLYGWPLYQFHCWYEVTCVQCSLDGLYAFCGQYLNTTTIFHLGSGEKLCTVTSEFSGGFVKFLLILDTAQEMVMVDSEGSLSVWNTEDISSPQLTDDFDCRREDSEVVSIELSEDQSAVLICKALSIELLDTGLWKVAEKFRAKHNERFISAVLSKNGDCIIATMENTSAVFFWRRDTGQCMASLQEISGSIVKLVKSSHHNMLLSLSTSGVLSIWDIDIITAMSNIDKTGKPIQSLLLPARGEIIYSLDGSDCVHKWNFSSGFIEAVFKHEGIVEHCVLTSTGDIMVTSDDKSSQYVWHTSSGENLFRINGQRISQLLITHNDQFVVSLCEENASRVWRLATGHRVCNILTTLQNAFITSANTFVVGMTKSKVLAVSLWTGSITKKFCCEDGTTIVNFKLIPDCPDIIVFITSAETVNIWSLTDEVICRRVQLPNNFLKNLEDFEISPNGKLGIIARGDENINVLDLYSGKLRVVHASGIIWRQRLSRDGRYLVYICFRNGEEEDENGAIFSLIVMRLADGKNIGACSLYKTPTFLALSQRHLNIIVGFDDGSIGIYTVVDRVDAALKIKIATSNSRQIFNNATHTSRPKCNSYCFKISVDCLWRESTEVFARDSPITVSDSTESNEATPSKKHNSCYERVCSALEARGHSYAPDN

SEQ ID NO: 4193 - protein, 663 aa, Homo sapiens
MTGAKRKKKSMLWSKMHTPQCEDIIQWCRRRLPILDWAPHYNLKENLLPDTVSGIMLAVQQVTQGLAFAVLSSVHPVFGLYGSLFPAIIYAIFGMGHHVATGTFALTSLISANAVERIVPQNMQNLTTQSNTSVLGLSDFEMQRIHVAAAVSFLGGVIQVAMFVLQLGSATFVVTEPVISAMTTGAATHVVTSQVKYLLGMKMPYISGPLGFFYIYAYVFENIKSVRLEALLLSLLSIVVLVLVKELNEQFKRKIKVVLPVDLVLIIAASFACYCTNMENTYGLEVVGHIPQGIPSPRAPPMNILSAVITEAFGVALVGYVASLALAQGSAKKFKYSIDDNQEFLAHGLSNIVSSFFFCIPSAAAMGRTAGLYSTGAKTQVACLISCIFVLIVIYAIGPLLYWLPMCVLASIIVVGLKGMLIQFRDLKKYWNVDKIDWGIWVSTYVFTICFAANVGLLFGVVCTIAIVIGRFPRAMTVSIKNMKEMEFKVKTEMDSETLQQVKIISINNPLVFLNAKKFYTDLMNMIQKENACNQPLDDISKCEQNTLLNSLSNGNCNEEASQSCPNEKCYLILDCSGFTFFDYSGVSMLVEVYMDCKGRSVDVLLAHCTASLIKAMTYYGNLDSEKPIFFESVSAAISHIHSNKASYKLLFDNLDLPTMPPL

SEQ ID NO: 4194 - protein, 388 aa, Homo sapiens
MKWLLLLGLVALSECIMYKVPLIRKKSLRRTLSERGLLKDFLKKHNLNPARKYFPQWEAPTLVDEQPLENYLDMEYFGTIGIGTPAQDFTVVFDTGSSNLWVPSVYCSSLACTNHNRFNPEDSSTYQSTSETVSITYGTGSMTGILGYDTVQVGGISDTNQIFGLSETEPGSFLYYAPFDGILGLAYPSISSSGATPVFDNIWNQGLVSQDLFSVYLSADDKSGSVVIFGGIDSSYYTGSLNWVPVTVEGYWQITVDSITMNGETIACAEGCQAIVDTGTSLLTGPTSPIANIQSDIGASENSDGDMVVSCSAISSLPDIVFTINGVQYPVPPSAYILQSEGSCISGFQGMNVPTESGELWILGDVFIRQYFTVFDRANNQVGLAPVA

SEQ ID NO: 4195 - protein, 2035 aa, Homo sapiens
MASAVSPANLPAVLLQPRWKRVVGWSGPVPRPRHGHRAVAIKELIVVFGGGNEGIVDELHVYNTATNQWFIPAVRGDIPPGCAAYGFVCDGTRLLVFGGMVEYGKYSNDLYELQASRWEWKRLKAKTPKNGPPPCPRLGHSFSLVGNKCYLFGGLANDSEDPKNNIPRYLNDLYILELRPGSGVVAWDIPITYGVLPPPRESHTAVVYTEKDNKKSKLVIYGGMSGCRLGDLWTLDIDTLTWNKPSLSGVAPLPRSLHSATTIGNKMYVFGGWVPLVMDDVKVATHEKEWKCTNTLACLNLDTMAWETILMDTLEDNIPRARAGHCAVAINTRLYIWSGRDGYRKAWNNQVCCKDLWYLETEKPPPPARVQLVRANTNSLEVSWGAVATADSYLLQLQKYDIPATAATATSPTPNPVPSVPANPPKSPAPAAAAPAVQPLTQVGITLLPQAAPAPPTTTTIQVLPTVPGSSISVPTAARTQGVPAVLKVTGPQATTGTPLVTMRPASQAGKAPVTVTSLPAGVRMVVPTQSAQGTVIGSSPQMSGMAALAAAAAATQKIPPSSAPTVLSVPAGTTIVKTMAVTPGTTTLPATVKVASSPVMVSNPATRMLKTAAAQVGTSVSSATNTSTRPIITVHKSGTVTVAQQAQVVTTVVGGVTKTITLVKSPISVPGGSALISNLGKVMSVVQTKPVQTSAVTGQASTGPVTQIIQTKGPLPAGTILKLVTSADGKPTTIITTTQASGAGTKPTILGISSVSPSTTKPGTTTIIKTIPMSAIITQAGATGVTSSPGIKSPITIITTKVMTSGTGAPAKIITAVPKIATGHGQQGVTQVVLKGAPGQPGTILRTVPMGGVRLVTPVTVSAVKPAVTTLVVKGTTGVTTLGTVTGTVSTSLAGAGGHSTSASLATPITTLGTIATLSSQVINPTAITVSAAQTTLTAAGGLTTPTITMQPVSQPTQVTLITAPSGVEAQPVHDLPVSILASPTTEQPTATVTIADSGQGDVQPGTVTLVCSNPPCETHETGTTNTATTTVVANLGGHPQPTQVQFVCDRQEAAASLVTSTVGQQNGSVVRVCSNPPCETHETGTTNTATTATSNMAGQHGCSNPPCETHETGTTNTATTAMSSVGANHQRDARRACAAGTPAVIRISVATGALEAAQGSKSQCQTRQTSATSTTMTVMATGAPCSAGPLLGPSMAREPGGRSPAFVQLAPLSSKVRLSSPSIKDLPAGRHSHAVSTAAMTRSSVGAGEPRMAPVCESLQGGSPSTTVTVTALEALLCPSATVTQVCSNPPCETHETGTTNTATTSNAGSAQRVCSNPPCETHETGTTHTATTATSNGGTGQPEGGQQPPAGRPCETHQTTSTGTTMSVSVGALLPDATSSHRTVESGLEVAAAPSVTPQAGTALLAPFPTQRVCSNPPCETHETGTTHTATTVTSNMSSNQDPPPAASDQGEVESTQGDSVNITSSSAITTTVSSTLTRAVTTVTQSTPVPGPSVPPPEELQVSPGPRQQLPPRQLLQSASTALMGESAEVLSASQTPELPAAVDLSSTGEPSSGQESAGSAVVATVVVQPPPPTQSEVDQLSLPQELMAEAQAGTTTLMVTGLTPEELAVTAAAEAAAQAAATEEAQALAIQAVLQAAQQAVMGTGEPMDTSEAAATVTQAELGHLSAEGQEGQATTIPIVLTQQELAALVQQQQLQEAQAQQQHHHLPTEALAPADSLNDPAIESNCLNELAGTVPSTVALLPSTATESLAPSNTFVAPQPVVVASPAKLQAAATLTEVANGIESLGVKPDLPPPPSKAPMKKENQWFDVGVIKGTNVMVTHYFLPPDDAVPSDDDLGTVPDYNQLKKQELQPGTAYKFRVAGINACGRGPFSEISAFKTCLPGFPGAPCAIKISKSPDGAHLTWEPPSVTSGKIIEYSVYLAIQSSQAGGELKSSTPAQLAFMRVYCGPSPSCLVQSSSLSNAHIDYTTKPAIIFRIAARNEKGYGPATQVRWLQETSKDSSGTKPANKRPMSSPEMKSAPKKSKADGQ

SEQ ID NO: 4196 - protein, 302 aa, Homo sapiens
MDVLASYSIFQELQLVHDTGYFSALPSLEETWQQTCLELERYLQTEPRRISETFGEDLDCFLHASPPPCIEESFRRLDPLLLPVEAAICEKSSAVDILLSRDKLLSETCLSLQPASSSLDSYTAVNQAQLNAVTSLTPPSSPELSRHLVKTSQTLSAVDGTVTLKLVAKKAALSSVKVGGVATAAAAVTAAGAVKSGQSDSDQGGLGAEACPENKKRVHRCQFNGCRKVYTKSSHLKAHQRTHTGEKPYKCSWEGCEWRFARSDELTRHYRKHTGAKPFKCNHCDRCFSRSDHLALHMKRHI

SEQ ID NO: 4197 - protein, 1132 aa, Homo sapiens
MPRAPRCRAVRSLLRSHYREVLPLATFVRRLGPQGWRLVQRGDPAAFRALVAQCLVCVPWDARPPPAAPSFRQVSCLKELVARVLQRLCERGAKNVLAFGFALLDGARGGPPEAFTTSVRSYLPNTVTDALRGSGAWGLLLRRVGDDVLVHLLARCALFVLVAPSCAYQVCGPPLYQLGAATQARPPPHASGPRRRLGCERAWNHSVREAGVPLGLPAPGARRRGGSASRSLPLPKRPRRGAAPEPERTPVGQGSWAHPGRTRGPSDRGFCVVSPARPAEEATSLEGALSGTRHSHPSVGRQHHAGPPSTSRPPRPWDTPCPPVYAETKHFLYSSGDKEQLRPSFLLSSLRPSLTGARRLVETIFLGSRPWMPGTPRRLPRLPQRYWQMRPLFLELLGNHAQCPYGVLLKTHCPLRAAVTPAAGVCAREKPQGSVAAPEEEDTDPRRLVQLLRQHSSPWQVYGFVRACLRRLVPPGLWGSRHNERRFLRNTKKFISLGKHAKLSLQELTWKMSVRDCAWLRRSPGVGCVPAAEHRLREEILAKFLHWLMSVYVVELLRSFFYVTETTFQKNRLFFYRKSVWSKLQSIGIRQHLKRVQLRELSEAEVRQHREARPALLTSRLRFIPKPDGLRPIVNMDYVVGARTFRREKRAERLTSRVKALFSVLNYERARRPGLLGASVLGLDDIHRAWRTFVLRVRAQDPPPELYFVKVDVTGAYDTIPQDRLTEVIASIIKPQNTYCVRRYAVVQKAAHGHVRKAFKSHVSTLTDLQPYMRQFVAHLQETSPLRDAVVIEQSSSLNEASSGLFDVFLRFMCHHAVRIRGKSYVQCQGIPQGSILSTLLCSLCYGDMENKLFAGIRRDGLLLRLVDDFLLVTPHLTHAKTFLRTLVRGVPEYGCVVNLRKTVVNFPVEDEALGGTAFVQMPAHGLFPWCGLLLDTRTLEVQSDYSSYARTSIRASLTFNRGFKAGRNMRRKLFGVLRLKCHSLFLDLQVNSLQTVCTNIYKILLLQAYRFHACVLQLPFHQQVWKNPTFFLRVISDTASLCYSILKAKNAGMSLGAKGAAGPLPSEAVQWLCHQAFLLKLTRHRVTYVPLLGSLRTAQTQLSRKLPGTTLTALEAAANPALPSDFKTILD

SEQ ID NO: 4198 - protein, 2429 aa, Homo sapiens
MPAILVASKMKSGLPKPVHSAAPILHVPPARAGPQPCYLKLGSKVEVSKTTYPSQIPLKSQVLQGLQEPAGEGLPLRKSGSVENGFDTQIYTDWANHYLAKSGHKRLIRDLQQDVTDGVLLAQIIQVVANEKIEDINGCPKNRSQMIENIDACLNFLAAKGINIQGLSAEEIRNGNLKAILGLFFSLSRYKQQQQQPQKQHLSSPLPPAVSQVAGAPSQCQAGTPQQQVPVTPQAPCQPHQPAPHQQSKAQAEMQSRLPGPTARVSAAGSEAKTRGGSTTANNRRSQSFNNYDKSKPVTSPPPPPSSHEKEPLASSASSHPGMSDNAPASLESGSSSTPTNCSTSSAIPQPGAATKPWRSKSLSVKHSATVSMLSVKPPGPEAPRPTPEAMKPAPNNQKSMLEKLKLFNSKGGSKAGEGPGSRDTSCERLETLPSFEESEELEAASRMLTTVGPASSSPKIALKGIAQRTFSRALTNKKSSLKGNEKEKEKQQREKDKEKSKDLAKRASVTERLDLKEEPKEDPSGAAVPEMPKKSSKIASFIPKGGKLNSAKKEPMAPSHSGIPKPGMKSMPGKSPSAPAPSKEGERSRSGKLSSGLPQQKPQLDGRHSSSSSSLASSEGKGPGGTTLNHSISSQTVSGSVGTTQTTGSNTVSVQLPQPQQQYNHPNTATVAPFLYRSQTDTEGNVTAESSSTGVSVEPSHFTKTGQPALEELTGEDPEARRLRTVKNIADLRQNLEETMSSLRGTQVTHSTLETTFDTNVTTEMSGRSILSLTGRPTPLSWRLGQSSPRLQAGDAPSMGNGYPPRANASRFINTESGRYVYSAPLRRQLASRGSSVCHVDVSDKAGDEMDLEGISMDAPGYMSDGDVLSKNIRTDDITSGYMTDGGLGLYTRRLNRLPDGMAVVRETLQRNTSLGLGDADSWDDSSSVSSGISDTIDNLSTDDINTSSSISSYANTPASSRKNLDVQTDAEKHSQVERNSLWSGDDVKKSDGGSDSGIKMEPGSKWRRNPSDVSDESDKSTSGKKNPVISQTGSWRRGMTAQVGITMPRTKPSAPAGALKTPGTGKTDDAKVSEKGRLSPKASQVKRSPSDAGRSSGDESKKPLPSSSRTPTANANSFGFKKQSGSAAGLAMITASGVTVTSRSATLGKIPKSSALVSRSAGRKSSMDGAQNQDDGYLALSSRTNLQYRSLPRPSKSNSRNGAGNRSSTSSIDSNISSKSAGLPVPKLREPSKTALGSSLPGLVNQTDKEKGISSDNESVASCNSVKVNPAAQPVSSPAQTSLQPGAKYPDVASPTLRRLFGGKPTKQVPIATAENMKNSVVISNPHATMTQQGNLDSPSGSGVLSSGSSSPLYSKNVDLNQSPLASSPSSAHSAPSNSLTWGTNASSSSAVSKDGLGFQSVSSLHTSCESIDISLSSGGVPSHNSSTGLIASSKDDSLTPFVRTNSVKTTLSESPLSSPAASPKFCRSTLPRKQDSDPHLDRNTLPKKGLRYTPTSQLRTQEDAKEWLRSHSAGGLQDTAANSPFSSGSSVTSPSGTRFNFSQLASPTTVTQMSLSNPTMLRTHSLSNADGQYDPYTDSRFRNSSMSLDEKSRTMSRSGSFRDGFEEVHGSSLSLVSSTSSVYSTPEEKCQSEIRKLRRELDASQEKVSALTTQLTANAHLVAAFEQSLGNMTIRLQSLTMTAEQKDSELNELRKTIELLKKQNAAAQAAINGVINTPELNCKGNGTAQSADLRIRRQHSSDSVSSINSATSHSSVGSNIESDSKKKKRKNWLRSSFKQAFGKKKSPKSASSHSDIEEMTDSSLPSSPKLPHNGSTGSTPLLRNSHSNSLISECMDSEAETVMQLRNELRDKEMKLTDIRLEALSSAHQLDQLREAMNRMQSEIEKLKAENDRLKSESQGSGCSRAPSQVSISASPRQSMGLSQHSLNLTESTSLDMLLDDTGECSARKEGGRHVKIVVSFQEEMKWKEDSRPHLFLIGCIGVSGKTKWDVLDGVVRRLFKEYIIHVDPVSQLGLNSDSVLGYSIGEIKRSNTSETPELLPCGYLVGENTTISVTVKGLAENSLDSLVFESLIPKPILQRYVSLLIEHRRIILSGPSGTGKTYLANRLSEYIVLREGRELTDGVIATFNVDHKSSKELRQYLSNLADQCNSENNAVDMPLVIILDNLHHVSSLGEIFNGLLNCKYHKCPYIIGTMNQATSSTPNLQLHHNFRWVLCANHTEPVKGFLGRFLRRKLMETEISGRVRNMELVKIIDWIPKVWHHLNRFLEAHSSSDVTIGPRLFLSCPIDVDGSRVWFTDLWNYSIIPYLLEAVREGLQLYGRRAPWEDPAKWVMDTYPWAASPQQHEWPPLLQLRPEDVGFDGYSMPREGSTSKQMPPSDAEGDPLMNMLMRLQEAANYSSPQSYDSDSNSNSHHDDILDSSLESTL

SEQ ID NO: 4199 - protein, 1439 aa, Homo sapiens
MVKLDIHTLAHHLKQERLYVNSEKQLIQRLNADVLKTAEKLYRTAWIAKQQRINLDRLIITSAEASPAECCQHAKILEDTQFVDGYKQLGFQETAYGEFLSRLRENPRLIASSLVAGEKLNQENTQSVIYTVFTSLYGNCIMQEDESYLLQVLRYLIEFELKESDNPRRLLRRGTCAFSILFKLFSEGLFSAKLFLTATLHEPIMQLLVEDEDHLETDPNKLIERFSPSQQEKLFGEKGSDRFRQKVQEMVESNEAKLVALVNKFIGYLKQNTYCFPHSLRWIVSQMYKTLSCVDRLEVGEVRAMCTDLLLACFICPAVVNPEQYGIISDAPINEVARFNLMQVGRLLQQLAMTGSEEGDPRTKSSLGKFDKSCVAAFLDVVIGGRAVETPPLSSVNLLEGLSRTVVYITYSQLITLVNFMKSVMSGDQLREDRMALDNLLANLPPAKPGKSSSLEMTPYNTPQLSPATTPANKKNRLPIATRSRSRTNMLMDLHMDHEGSSQETIQEVQPEEVLVISLGTGPQLTPGMMSENEVLNMQLSDGGQGDVPVDENKLHGPSNRSNSVSSLDLEGESVSELGAGPSGSNGVEALQLLEHEQATTQDNLDDKLRKFEIRDMMGLTDDRDISETVSETWSTDVLGSDFDPNIDEDRLQEIAGAAAENMLGSLLCLPGSGSVLLDPCTGSTISETTSEAWSVEVLPSDSEAPDLKQEERLQELESCSGLGSTSDDTDVREVSSRPSTPGLSVVSGISATSEDIPNKIEDLRSECSSDFGGKDSVTSPDMDEITHGAHQLTSPPSQSESLLAMFDPLSSHEGASAVVRPKVHYARPSHPPPDPPILEGAVGGNEARLPNFGSHVLTPAEMEAFKQRHSYPERLVRSRSSDIVSSVRRPMSDPSWNRRPGNEERELPPAAAIGATSLVAAPHSSSSSPSKDSSRGETEERKDSDDEKSDRNRPWWRKRFVSAMPKAPIPFRKKEKQEKDKDDLGPDRFSTLTDDPSPRLSAQAQVAEDILDKYRNAIKRTSPSDGAMANYESTEVMGDGESAHDSPRDEALQNISADDLPDSASQAAHPQDSAFSYRDAKKKLRLALCSADSVAFPVLTHSTRNGLPDHTDPEDNEIVCFLKVQIAEAINLQDKNLMAQLQETMRCVCRFDNRTCRKLLASIAEDYRKRAPYIAYLTRCRQGLQTTQAHLERLLQRVLRDKEVANRYFTTVCVRLLLESKEKKIREFIQDFQKLTAADDKTAQVEDFLQFLYGAMAQDVIWQNASEEQLQDAQLAIERSVMNRIFKLAFYPNQDGDILRDQVLHEHIQRLSKVVTANHRALQIPEVYLREAPWPSAQSEIRTISAYKTPRDKVQCILRMCSTIMNLLSLANEDSVPGADDFVPVLVFVLIKANPPCLLSTVQYISSFYASCLSGEESYWWMQFTAAVEFIKTIDDRK

SEQ ID NO: 4200 - protein, 270 aa, Homo sapiens
MKLGCVLMAWALYLSLGVLWVAQMLLAASFETLQCEGPVCTEESSCHTEDDLTDAREAGFQVKAYTFSEPFHLIVSYELFPAPILRAVPSAEPQAGSPMTLSCQTKLPLQRSAARLLFSFYKDGRIVQSRGLSSEFQIPTASEDHSGSYWCEAATEDNQVWKQSPQLEIRVQGASSSAAPPTLNPAPQKSAAPGTAPEEAPGPLPPPPTPSSEDPGFSSPLGMPDPHLYHQMGLLLKHMQDVRVLLGHLLMELRELSGHRKPGTTKATAE

SEQ ID NO: 4201 - protein, 847 aa, Homo sapiens
MEPLKSLFLKSPLGSWNGSGSGGGGGGGGGRPEGSPKAAGYANPVWTALFDYEPSGQDELALRKGDRVEVLSRDAAISGDEGWWAGQVGGQVGIFPSNYVSRGGGPPPCEVASFQELRLEEVIGIGGFGKVYRGSWRGELVAVKAARQDPDEDISVTAESVRQEARLFAMLAHPNIIALKAVCLEEPNLCLVMEYAAGGPLSRALAGRRVPPHVLVNWAVQIARGMHYLHCEALVPVIHRDLKSNNILLLQPIESDDMEHKTLKITDFGLAREWHKTTQMSAAGTYAWMAPEVIKASTFSKGSDVWSFGVLLWELLTGEVPYRGIDCLAVAYGVAVNKLTLPIPSTCPEPFAQLMADCWAQDPHRRPDFASILQQLEALEAQVLREMPRDSFHSMQEGWKREIQGLFDELRAKEKELLSREEELTRAAREQRSQAEQLRRREHLLAQWELEVFERELTLLLQQVDRERPHVRRRRGTFKRSKLRARDGGERISMPLDFKHRITVQASPGLDRRRNVFEVGPGDSPTFPRFRAIQLEPAEPGQAWGRQSPRRLEDSSNGERRACWAWGPSSPKPGEAQNGRRRSRMDEATWYLDSDDSSPLGSPSTPPALNGNPPRPSLEPEEPKRPVPAERGSSSGTPKLIQRALLRGTALLASLGLGRDLQPPGGPGRERGESPTTPPTPTPAPCPTEPPPSPLICFSLKTPDSPPTPAPLLLDLGIPVGQRSAKSPRREEEPRGGTVSPPPGTSRSAPGTPGTPRSPPLGLISRPRPSPLRSRIDPWSFVSAGPRPSPLPSPQPAPRRAPWTLFPDSDPFWDSPPANPFQGGPQDCRAQTKDMGAQAPWVPEAGP

SEQ ID NO: 4202 - protein, 720 aa, Homo sapiens
MEEAEELLLEGKKALQLAREPRLGLDLGWNPSGEGCTQGLKDVPPEPTRDILALKSLPRGLALGPSLAKEQRLGVWCVGDPLQPGLLWGPLEEESASKEKGEGVKPRQEENLSLGPWGDVCACEQSSGWTSLVQRGRLESEGNVAPVRISERLHLQVYQLVLPGSELLLWPQPSSEGPSLTQPGLDKEAAVAVVTEVESAVQQEVASPGEDAAEPCIDPGSQSPSGIQAENMVSPGLKFPTQDRISKDSQPLGPLLQDGDVDEECPAQAQMPPELQSNSATQQDPDGSGASFSSSARGTQPHGYLAKKLHSPSDQCPPRAKTPEPGAQQSGFPTLSRSPPGPAGSSPKQGRRYRCGECGKAFLQLCHLKKHAFVHTGHKPFLCTECGKSYSSEESFKAHMLGHRGVRPFPCPQCDKAYGTQRDLKEHQVVHSGARPFACDQCGKAFARRPSLRLHRKTHQVPAAPAPCPCPVCGRPLANQGSLRNHMRLHTGEKPFLCPHCGRAFRQRGNLRGHLRLHTGERPYRCPHCADAFPQLPELRRHLISHTGEAHLCPVCGKALRDPHTLRAHERLHSGERPFPCPQCGRAYTLATKLRRHLKSHLEDKPYRCPTCGMGYTLPQSLRRHQLSHRPEAPCSPPSVPSAASEPTVVLLQAEPQLLDTHREEEVSPARDVVEVTISESQEKCFVVPEEPDAAPSLVLIHKDMGLGAWAEVVEVEMGT

SEQ ID NO: 4203 - protein, 480 aa, Homo sapiens
MTSSKIEMPGEVKADPAALMASLHLLPSPTPNLEIKYTKIFINNEWQNSESGRVFPVYNPATGEQVCEVQEADKADIDKAVQAARLAFSLGSVWRRMDASERGRLLDKLADLVERDRAVLATMESLNGGKPFLQAFYVDLQGVIKTFRYYAGWADKIHGMTIPVDGDYFTFTRHEPIGVCGQIIPWNFPLLMFAWKIAPALCCGNTVVIKPAEQTPLSALYMGALIKEVGKLIQEAAGRSNLKRVTLELGGKSPNIIFADADLDYAVEQAHQGVFFNQGQCCTAGSRIFVEESIYEEFVRRSVERAKRRVVGSPFDPTTEQGPQIDKKQYNKILELIQSGVAEGAKLECGGKGLGRKGFFIEPTVFSNVTDDMRIAKEEIFGPVQEILRFKTMDEVIERANNSDFGLVAAVFTNDINKALTVSSAMQAGTVWINCYNALNAQSPFGGFKMSGNGREMGEFGLREYSEVKTVTVKIPQKNS

SEQ ID NO: 4204 - protein, 683 aa, Homo sapiens
MAAAVAAPLAAGGEEAAATTSVPGSPGLPGRRSAERALEEAVATGTLNLSNRRLKHFPRGAARSYDLSDITQADLSRNRFPEVPEAACQLVSLEGLSLYHNCLRCLNPALGNLTALTYLNLSRNQLSLLPPYICQLPLRVLIVSNNKLGALPPDIGTLGSLRQLDVSSNELQSLPSELCGLSSLRDLNVRRNQLSTLPEELGDLPLVRLDFSCNRVSRIPVSFCRLRHLQVILLDSNPLQSPPAQVCLKGKLHIFKYLSTEAGQRGSALGDLAPSRPPSFSPCPAEDLFPGHRYDGGLDSGFHSVDSGSKRWSGNESTDEFSELSFRISELAREPRGPRERKEDGSADGDPVQIDFIDSHVPGEDEERGTVEEQRPPELSPGAGDRERAPSSRREEPAGEERRRPDTLQLWQERERRQQQQSGAWGAPRKDSLLKPGLRAVVGGAAAVSTQAMHNGSPKSSASQAGAAAGQGAPAPAPASQEPLPIAGPATAPAPRPLGSIQRPNSFLFRSSSQSGSGPSSPDSVLRPRRYPQVPDEKDLMTQLRQVLESRLQRPLPEDLAEALASGVILCQLANQLRPRSVPFIHVPSPAVPKLSALKARKNVESFLEACRKMGVPEADLCSPSDLLQGTARGLRTALEAVKRVGGKALPPLWPPSGLGGFVVFYVVLMLLLYVTYTRLLGS

SEQ ID NO: 4205 - protein, 3027 aa, Homo sapiens
MNLHQVLTGAVNPGDHCFSVGSIGDQRFTAYASGCDIVILGSDFERLQIIPGAKHGNIQVGCVDCSMQQGKIAASYGNVISIFEPVNLPKQKKNLELYSQWQKSGQFFLESIAHNITWDPTGSRLLTGSSYLQLWSNTNLEKPTEDENLNKTDLNFGDWKCIWHCKTASQVHLMKFSPDGEFFATAGKDDCLLKVWYNVENWRTAVTSPDGSSEKQSQGEIDFSFVYLAHPRAVNGFSWRKTSKYMPRASVCNVLLTCCKDNVCRLWVETFLPNDCLLYGGDCSHWTESINLTNNFKRNASSKERVQNALEVNLRHFRRGRRRSLALVAHTGYLPHQQDPHHVHRNTPLHANALCHFHIAASINPATDIPLLPSITSLSLNENEEKTGPFVVHWLNNKELHFTLSMEVFLQQLRKSFEQPSSEASVEDSNQADVKSDEETDDGVDDLKINPEKKELGCDKMVPNSSFTSLSSAAIDHQIEVLLSEWSKNADMLFSIHPMDGSLLVWHVDWLDEYQPGMFRQVQVSFVSRIPVAFPTGDANSLCKSIMMYACTKNVDLAIQQGKQKPSGLTRSTSMLISSGHNKSSNSLKLSIFTPNVMMISKHADGSLNQWLVSFAEESAFSTVLSISHKSRYCGHRFHLNDLACHSVLPLLLTTSHHNALRTPDVDNPEQPFDALNIEECSLTQQNKSTVDVAFQDPSAVYSELILWRVDPVGPLSFSGGVSELARINSLHVSAFSNVAWLPTLIPSYCLGAYCNSPSACFVASDGQYLRLYEAVIDAKKLLSELSNPEISKYVGEVFNIVSQQSTARPGCIIALDPITKLHGRKTQLLHVFEEDFILNNLEKKSLGKDSILSNAGSSPNGFSEKFYLIVIECTQDNRSLLHMWNLHLKSIPVSLDEKVDTKLSEAVWQPEEHYSSSPEKILSPFSQKYQACRANLQSTSRLTLFSEMVYSQELHLPEGVEIISIKPSAGHLSSSSIYPACSAPYLLATSCSDEKVRFWRCRVTDGESATSKNGKIDLAYIWEEWPLLIEDGLQSNSSITVPGRPVEVSCAHTNRLAVAYKQPASNSRSSQDFVMHVSIFECESTGGSCWVLEQTIHLDELSTVLDSGISVDSNLVAYNKQDMYLSSKENITSNTKHLVHLDWMSREDGSHILTVGIGSKLFMYGPLAGKVQDQTGKETLAFPLWESTKVVPLSKFVLLRSVDLVSSVDGSPPFPVSLSWVRDGILVVGMDCEMHVYCQWQPSSKQEPVITDSYSGSTPSITSLIKQSNSSSGLHPPKKTLTRSMTSLAQKICGKKTAFDPSVDMEDSGLFEAAHVLSPTLPQYHPLQLLELMDLGKVRRAKAILSHLVKCIAGEVVALNEAESNHERRLRSLTISASGSTTRDPQAFNKAENTDYTEIDSVPPLPLYALLAADDDSCYSSLEKSSNESTLSKSNQLSKESYDELFQTQLLMTDTHMLETDEENTKPRVIDLSQYSPTYFGPEHAQVLSGHLLHSSLPGLSRMEQMSLMALADTIATTSTDIGESRDRSQGGETLDECGLKFLLAVRLHTFLTTSLPAYRAQLLHQGLSTSHFAWAFHSVAEEELLNMLPAMQKDDPTWSELRAMGVGWWVRNTRILRKCIEKVAKAAFYRKNDPLDAAIFYLAMKKKAVIWGLYRAEKNTRMTQFFGHNFEDERWRKAALKNAFSLLGKQRFEHSAAFFLLAGCLRDAIEVCLEKLNDIQLALVIARLYESEFDTSAAYKSILRKKVLGIDSPVSELCSLNINMHHDPFLRSMAYWILEDYSGALETLIKQPIRENDDQVLSASNPTVFNFYNYLRTHPLLLRRHFGSSDTFSTHMSLTGKSGLAGTINLSERRLFFTTASAHLKAGCPMLALEVLSKMPKVIKKTRPFYRASSFLDTSKDCSPSSPLKLDAREDKSSAVDWSQSLINGFGSSSEGSSEKQSNSTLSFDWSQPSVVFQDDSLELKWDSDNDEENEDVPISMKELKPLQRKTDKKLDDISSNYTESFSTLDENDLLNPSEDIIAVQLKFRACLKILTVELRTLSTGYEIDGGKLRYQLYHWLEKEVIALQRTCDFCSDAEELQSAFGRNEDEFGLNEDAEDLPHQTKVKQLRENFQEKRQWLLKYQSLLRMFLSYCILHGSHGGGLASVRMELILLLQESQQETSEPLFSSPLSEQTSVPLLFACTANAKTVVANPLLHLSNLTHDILHAIINFDSPPHPDIQSNKVYVMHTLAASLSACIYQCLCGSHNYSSFQTNQFTGMVYQTVLLPHRPSLKTGSLDEALTPNTSPAQWPGITCLIRLLNSSGEEAQSGLTVLLCEILTAVYLSLFIHGLATHSSNELFRIVAHPLNEKMWSAVFGGGAHVPSKEQTHSKTLPVSSLVEEGEKQNKRFRPSKMSCRESAPLTPSSAPVSQESLAVKEKFIPPELSIWDYFIAKPFLPSSQSRAEYDSEESLGSDDDDNDDDDDVLASDFHLQEHSNSNSYSWSLMRLAMVQLVLNNLKTFYPFAGHDLAELPVSSPLCHAVLKTLQCWEQVLLRRLEIHGGPPQNYIASHTAEESLSAGPAILRHKALLEPTNTPFKSKHHLALSVKRLWQYLVKQEEIQETFIKNIFTKKRCLNEIEADLGYPGGKARIIHKESDIITAFAVNKANRNCIAIASSHDVQELDVSGILATQVYTWVDDDIEVETKGSEDFLVIHARDDLTAVQGTTPYTHSNPGTPINMPWLGSTQTGRGASVMIKKAINNVRRMTSHPTLPYYLTGAQDGSVRMFEWGHSQQITCFRSGGNSRVTRMRFNYQGNKFGIVDADGYLSLYQTNWKCCPVTGSMPKPYLTWQCHNKTANDFVFVSSSSLIATAGLSTDNRNVCLWDTLVAPANSLVHAFTCHDSGATVLAYAPKHQLLISGGRKGFTYVFDLCQRQQRQLFQSHDSPVKAVAVDPTEEYFVTGSAEGNIKIWSLSTFGLLHTFVSEHARQSIFRNIGTGVMQIETGPANHIFSCGADGTMKMRILPDQFSPLNEVLKNDVKFML

SEQ ID NO: 4206 - protein, 324 aa, Homo sapiens
MGPWGEPELLVWRPEAVASEPPVPVGLEVKLGALVLLLVLTLLCSLVPICVLRRPGANHEGSASRQKALSLVSCFAGGVFLATCLLDLLPDYLAAIDEALAALHVTLQFPLQEFILAMGFFLVLVMEQITLAYKEQSGPSPLEETRALLGTVNGGPQHWHDGPGVPQASGAPATPSALRACVLVFSLALHSVFEGLAVGLQRDRARAMELCLALLLHKGILAVSLSLRLLQSHLRAQVVAGCGILFSCMTPLGIGLGAALAESAGPLHQLAQSVLEGMAAGTFLYITFLEILPQELASSEQRILKVILLLAGFALLTGLLFIQI

SEQ ID NO: 4207 - protein, 911 aa, Homo sapiens
MPPRRSIVEVKVLDVQKRRVPNKHYVYIIRVTWSSGSTEAIYRRYSKFFDLQMQMLDKFPMEGGQKDPKQRIIPFLPGKILFRRSHIRDVAVKRLIPIDEYCKALIQLPPYISQCDEVLQFFETRPEDLNPPKEEHIGKKKSGGDQTSVDPMVLEQYVVVANYQKQESSEISLSVGQVVDIIEKNESGWWFVSTAEEQGWVPATCLEGQDGVQDEFSLQPEEEEKYTVIYPYTARDQDEMNLERGAVVEVIQKNLEGWWKIRYQGKEGWAPASYLKKNSGEPLPPKPGPGSPSHPGALDLDGVSRQQNAVGREKELLSSQRDGRFEGRPVPDGDAKQRSPKMRQRPPPRRDMTIPRGLNLPKPPIPPQVEEEYYTIAEFQTTIPDGISFQAGLKVEVIEKNLSGWWYIQIEDKEGWAPATFIDKYKKTSNASRPNFLAPLPHEVTQLRLGEAAALENNTGSEATGPSRPLPDAPHGVMDSGLPWSKDWKGSKDVLRKASSDMSASAGYEEISDPDMEEKPSLPPRKESIIKSEGELLERERERQRTEQLRGPTPKPPGVILPMMPAKHIPPARDSRRPEPKPDKSRLFQLKNDMGLECGHKVLAKEVKKPNLRPISKSKTDLPEEKPDATPQNPFLKSRPQVRPKPAPSPKTEPPQGEDQVDICNLRSKLRPAKSQDKSLLDGEGPQAVGGQDVAFSRSFLPGEGPGRAQDRTGKQDGLSPKEISCRAPPRPAKTTDPVSKSVPVPLQEAPQQRPVVPPRRPPPPKKTSSSSRPLPEVRGPQCEGHESRAAPTPGRALLVPPKAKPFLSNSLGGQDDTRGKGSLGPWGTGKIGENREKAAAASVPNADGLKDSLYVAVADFEGDKDTSSFQEGTVFEVREKNSSGWWFCQVLSGAPSWEGWIPSNYLRKKP

SEQ ID NO: 4208 - protein, 308 aa, Homo sapiens
MGNVPSAVKHCLSYQQLLREHLWIGDSVAGALDPAQETSQLSGLPEFVKIVEVGPRDGLQNEKVIVPTDIKIEFINRLSQTGLSVIEVTSFVSSRWVPQVAAGATEISVFGAASESFSKKNINCSIEESMGKFEEVVKSARHMNIPARGYVSCALGCPYEGSITPQKVTEVSKRLYGMGCYEISLGDTIGVGTPGSMKRMLESVMKEIPPGALAVHCHDTYGQALANILTALQMGINVVDSAVSGLGGCPYAKGASGNVATEDLIYMLNGLGLNTGVNLYKVMEAGDFICKAVNKTTNSKVAQASFNA

SEQ ID NO: 4209 - protein, 724 aa, Homo sapiens
MKSAKGIENLAFVPSSPDILRRLSASPSQIEVSALSSDPQRENSQPQELQKPQEPQKSPEPSLPSAPPNVSEEKLRSLSLSEFEEGSYGWRNFHPQCLQRCNTPGGFLLHYCLLAVTQGIVVNGLVNISISTVEKRYEMKSSLTGLISSSYDISFCLLSLFVSFFGERGHKPRWLAFAAFMIGLGALVFSLPQFFSGEYKLGSLFEDTCVTTRNSTSCTSSTSSLSNYLYVFILGQLLLGAGGTPLYTLGTAFLDDSVPTHKSSLYIGTGYAMSILGPAIGYVLGGQLLTIYIDVAMGESTDVTEDDPRWLGAWWIGFLLSWIFAWSLIIPFSCFPKHLPGTAEIQAGKTSQAHQSNSNADVKFGKSIKDFPAALKNLMKNAVFMCLVLSTSSEALITTGFATFLPKFIENQFGLTSSFAATLGGAVLIPGAALGQILGGFLVSKFRMTCKNTMKFALFTSGVALTLSFVFMYAKCENEPFAGVSESYNGTGELGNLIAPCNANCNCSRSYYYPVCGDGVQYFSPCFAGCSNPVAHRKPKVYYNCSCIERKTEITSTAETFGFEAKAGKCETHCAKLPIFLCIFFIVIIFTFMAGTPITVSILRCVNHRQRSLALGIQFMVLRLLGTIPGPIIFGFTIDSTCILWDINDCGIKGACWIYDNIKMAHMLVAISVTCKVITMFFNGFAIFLYKPPPSATDVSFHKENAVVTNVLAEQDLNKIVKEG

SEQ ID NO: 4210 - protein, 548 aa, Homo sapiens
MNEGAPGDSDLETEARVPWSIMGHCLRTGQARMSATPTPAGEGARSSSTCSSLSRLFWSQLEHINWDGATAKNFINLREFFSFLLPALRKAQIEIIPCKICGDKSSGIHYGVITCEGCKGFFRRSQQSNATYSCPRQKNCLIDRTSRNRCQHCRLQKCLAVGMSRDAVKFGRMSKKQRDSLYAEVQKHRMQQQQRDHQQQPGEAEPLTPTYNISANGLTELHDDLSNYIDGHTPEGSKADSAVSSFYLDIQPSPDQSGLDINGIKPEPICDYTPASGFFPYCSFTNGETSPTVSMAELEHLAQNISKSHLETCQYLREELQQITWQTFLQEEIENYQNKQREVMWQLCAIKITEAIQYVVEFAKRIDGFMELCQNDQIVLLKAGSLEVVFIRMCRAFDSQNNTVYFDGKYASPDVFKSLGCEDFISFVFEFGKSLCSMHLTEDEIALFSAFVLMSADRSWLQEKVKIEKLQQKIQLALQHVLQKNHREDGILTKLICKVSTLRALCGRHTEKLMAFKAIYPDIVRLHFPPLYKELFTSEFEPAMQIDG

SEQ ID NO: 4211 - protein, 2615 aa, Homo sapiens
MKILLIIFVLIIWTETLADQSPGPGPVYADVVFLVDSSDHLGPKSFPFVKTFINKMINSLPIEANKYRVALAQYSDEFHSEFHLSTFKGRSPMLNHLKKNFQFIGGSLQIGKALQEAHRTYFSAPINGRDRKQFPPILVVLASAESEDEVEEASKALQKDGVKIISVGVQKASEENLKAMATSHFHFNLRTIRDLSTFSQNMTQIIKDVTKYKEGAVDADMQVHFPISCQKDSLADLVFLVDESLGTGGNLRHLQTFLENITSSMDVKENCMRLGLMSYSNSAKTISFLKSSTTQSEFQQQIKNLSIQVGKSNTGAAIDQMRRDGFSESYGSRRAQGVPQIAVLVTHRPSDDEVHDAALNLRLEDVNVFALSIQGANNTQLEEIVSYPPEQTISTLKSYADLETYSTKFLKKLQNEIWSQISTYAEQRNLDKTGCVDTKEADIHFLIDGSSSIQEKQFEQIKRFMLEVTEMFSIGPDKVRVGVVQYSDDTEVEFYITDYSNDIDLRKAIFNIKQLTGGTYTGKALDYILQIIKNGMKDRMSKVPCYLIVLTDGMSTDRVVEPAKRLRAEQITVHAVGIGAANKIELQEIAGKEERVSFGQNFDALKSIKNEVVREICAEKGCEDMKADIMFLVDSSWSIGNENFRKMKIFMKNLLTKIQIGADKTQIGVVQFSDKTKEEFQLNRYFTQQEISDAIDRMSLINEGTLTGKALNFVGQYFTHSKGARLGAKKFLILITDGVAQDDVRDPARILRGKDVTIFSVGVYNANRSQLEEISGDSSLVFHVENFDHLKALERKLIFRVCALHDCKRITLLDVVFVLDHSGSIKKQYQDHMINLTIHLVKKADVGRDRVQFGALKYSDQPNILFYLNTYSNRSAIIENLRKRRDTGGNTYTAKALKHANALFTEEHGSRIKQNVKQMLIVITDGESHDHDQLNDTALELRNKGITIFAVGVGKANQKELEGMAGNKNNTIYVDNFDKLKDVFTLVQERMCTEAPEVCHLQEADVIFLCDGSDRVSNSDFVTMTTFLSDLIDNFDIQSQRMKIGMAQFGSNYQSIIELKNSLTKTQWKTQIQNVSKSGGFPRIDFALKKVSNMFNLHAGGRRNAGVPQTLVVITSGDPRYDVADAVKTLKDLGICVLVLGIGDVYKEHLLPITGNSEKIITFQDFDKLKNVDVKKRIIREICQSCGKTNCFMDIVVGFDISTHVQGQPLFQGHPQLESYLPGILEDISSIKGVSCGAGTEAQVSLAFKVNSDQGFPAKFQIYQKAVFDSLLQVNVSGPTHLNAQFLRSLWDTFKDKSASRGQVLLIFSDGLQSESNIMLENQSDRLREAGLDALLVVSLNTTAHHEFSSFEFGKRFDYRTHLTIGMRELGKKLSQYLGNIAERTCCCTFCKCPGIPGPHGTRGLQAMKGSQGLKGSRGHRGEDGNPGVRGDTGPQGDKGIAGCPGAWGQKGLKGFSGPKGGHGDDGIDGLDGEEGCHGFPGIKGEKGDPGSQGSPGSRGAPGQYGEKGFPGDPGNPGQNNNIKGQKGSKGEQGRQGRSGQKGVQGSPSSRGSRGREGQRGLRGVSGEPGNPGPTGTLGAEGLQGPQGSQGNPGRKGEKGSQGQKGPQGSPGLMGAKGSTGRPGLLGKKGEPGLPGDLGPVGQTGQRGRQGDSGIPGYGQMGRKGVKGPRGFPGDAGQKGDIGNPGIPGGPGPKGFRGLALTVGLKGEEGSRGLPGPPGQRGIKGMAGQPVYSQCDLIRFLREHSPCWKEKCPAYPTELVFALDNSYDVTEESFNKTRDIITSIVNDLNIRENNCPVGARVAMVSYNSGTSYLIRWSDYNRKKQLLQQLSQIKYQDTTEPRDVGNAMRFVTRNVFKRTYAGANVRRVAVFFSNGQTASRSSIITATMEFSALDISPTVFAFDERVFLEAFGFDNTGTFQVIPVPPNGENQTLERLRRCALCYDKCFPNACIREAFLPEDSYMDVVFLIDNSRNIAKDEFKAVKALVSSVIDNFNIASDPLISDSGDRIALLSYSPWESSRRKMGTVKTEFDFITYDNQLLMKNHIQTSFQQLNGEATIGRALLWTTENLFPETPYLRKHKVIFVVSAGENYERKEFVKMMALRAKCQGYVIFVISLGSTRKDDMEELASYPLDQHLIQLGRIHKPDLNYIAKFLKPFLYSVRRGFNQYPPPMLEDACRLINLGGENIQNDGFQFVTELQEDFLGGNGFIGQELNSGRESPFVKTEDNGSDYLVYLPSQMFEPQKLMINYEKDQKSAEIASLTSGHENYGRKEEPDHTYEPGDVSLQEYYMDVAFLIDASQRVGSDEFKEVKAFITSVLDYFHIAPTPLTSTLGDRVAVLSYSPPGYMPNTEECPVYLEFDLVTYNSIHQMKHHLQDSQQLNGDVFIGHALQWTIDNVFVGTPNLRKNKVIFVISAGETNSLDKDVLRNVSLRAKCQGYSIFVFSFGPKHNDKELEELASHPLDHHLVQLGRTHKPDWNYIIKFVKPFVHLIRRAINKYPTEDMKATCVNMTSPNPENGGTENTVLLLPGIYEIKTENGDLFDEFDSQAQHLLVLGNNHSSGSETATDLMQKLYLLFSTEKLAMKDKEKAHLEEISALVVDKQQEKEDKEMEATDI

SEQ ID NO: 4212 - protein, 892 aa, Homo sapiens
MDQPEAPCSSTGPRLAVARELLLAALEELSQEQLKRFRHKLRDVGPDGRSIPWGRLERADAVDLAEQLAQFYGPEPALEVARKTLKRADARDVAAQLQERRLQRLGLGSGTLLSVSEYKKKYREHVLQLHARVKERNARSVKITKRFTKLLIAPESAAPEEAMGPAEEPEPGRARRSDTHTFNRLFRRDEEGRRPLTVVLQGPAGIGKTMAAKKILYDWAAGKLYQGQVDFAFFMPCGELLERPGTRSLADLILDQCPDRGAPVPQMLAQPQRLLFILDGADELPALGGPEAAPCTDPFEAASGARVLGGLLSKALLPTALLLVTTRAAAPGRLQGRLCSPQCAEVRGFSDKDKKKYFYKYFRDERRAERAYRFVKENETLFALCFVPFVCWIVCTVLRQQLELGRDLSRTSKTTTSVYLLFITSVLSSAPVADGPRLQGDLRNLCRLAREGVLGRRAQFAEKELEQLELRGSKVQTLFLSKKELPGVLETEVTYQFIDQSFQEFLAALSYLLEDGGVPRTAAGGVGTLLRGDAQPHSHLVLTTRFLFGLLSAERMRDIERHFGCMVSERVKQEALRWVQGQGQGCPGVAPEVTEGAKGLEDTEEPEEEEEGEEPNYPLELLYCLYETQEDAFVRQALCRFPELALQRVRFCRMDVAVLSYCVRCCPAGQALRLISCRLVAAQEKKKKSLGKRLQASLGGGSSSQGTTKQLPASLLHPLFQAMTDPLCHLSSLTLSHCKLPDAVCRDLSEALRAAPALTELGLLHNRLSEAGLRMLSEGLAWPQCRVQTVRVQLPDPQRGLQYLVGMLRQSPALTTLDLSGCQLPAPMVTYLCAVLQHQGCGLQTLSLASVELSEQSLQELQAVKRAKPDLVITHPALDGHPQPPKELISTF

SEQ ID NO: 4213 - protein, 1026 aa, Homo sapiens
MVCRPVFPCRRRFCPRPFLVGLVVAICLFYQTLTLRGSRKLTAAAPGAVPHTSTETQASRCKKGFSQDKQCFLLSGNAQETRKVKESMETHFGSHGRRAILYRPPFYSKTELQLHQHILTQHGYTVVIAEERLNAGLGPGLLEQGDLGSWDLLICLSSKKAEGTPCISKEVMCQLGLHQKANRLPEIQQPLCRKEGLCQIVRRFPELQLPVSPSVCLDQGMQLKPSTSSHLLKTVKPRVWKPGDWSREQLNETTVLAPHETIFRAEDLSVILKAYVLVTSLTPLRAFIHSTGTVWNPPKKKRFTVKLQTFFETFLRASSPQQAFDIMKEAIGKLLLAAEVFSETSTLGPKTFHRCRFCFQLLTFDIGYGSFMYPVVLQVHEHLNFQDYDNMDFEDQNTEEFLLNDTFNFLFPNESSLSIFSEIFQRLYRSDVFKGENYQKELNQCLSLEEINSIMTFIKELGSLGQFQLLFPSTTPGIQSLMHEFYDVANPVGNPGSVLTQYWSLLNVFEQFQFMNKKTQPHPLEWNSFTEDKNIEKPQVPFDAIENKKAAVPQIKNENKEIHCSDDENTPCHIKQIFTHPHLELNPDFHPKIKDYYCEVPFDVVTVTIGVETPKCLCKVHLYEQAGPSFASYPLGLGMNKISIFVVDESPAHGETLITYKLTIYREDRPSLPLFEAFTACGFVQDCGLLIHPEETCGLQPISSDYIEAILQSELKRCPSGDMKGQWIVPCLSCSDNRTCDWREITWQPHNCQYGVLTKPQLQQCLGGRKILFIGDSTNRGIMYYLIERLNETLQEWQKVHGTKFYHNVNGGKTLISYSYYPQFWISPSLRPTFENALEHLLQRSRPLENTGQTVLVVGGVQWLNSNHLQIIHKVLKRENLLNILVIIKTLGIGFHLPVDGVHFLTQSEVQNLWKENLIILDTAKKHGYEVVDTFTITMGRYKEFLQGKCGCHFHEVVKSKLSKEYNFIKMKRSRNHIMGRYFSNQSKLQQGTVTNFRSPYHVRGPINQVCSEILLSRMCANKRTM

SEQ ID NO: 4214 - protein, 1132 aa, Homo sapiens
MIATPLKHSRIYLPPEASSQRRNLPMDAIFFDSIPSGTLTPVKDLVKYQNSSLKLNDHKKNQFLKMTTFNNKNIFQSTMLTEATTSNSSLDISAIKPNKDGLKNKANYESPGKIFLRMKEKVLRDKQEQPSRNSSLLEPQKSGNNETFTPNRVEKKKLQHTYLCEEKENNKSFQSDDSSLRASVQGVPLESSNNDIFLPVKQKIQCQQEKKAPLHNLTYELPTLNQEQENFLAVEARNKTLTRAQLAKQIFHSKESIVATTKSKKDTFVLESVDSADEQFQNTNAETLSTNCIPIKNGSLLMVSDSERTTEGTSQQKVKEGNGKTVPGETGLPGSMKDTCKIVLATPRLHITIPRRSKRNISKLSPPRIFQTVTNGLKKNQVVQLQEWMIKSINNNTAICVEGKLIDVTNIYWHSNVIIERIEHNKLRTISGNVYILKGMIDQISMKEAGYPNYLIRKFMFGFPENWKEHIDNFLEQLRAGEKNREKTKQKQKTGRSVRDIRKSMKNDARENQTDTAQRATTTYDFDCDNLELKSNKHSESPGATELNMCHSNCQNKPTLRFPDDQVNNTIQNGGGDDLSNQELIGKKEYKMSSKKLKIGERTNERIIKSQKQETTEELDVSIDILTSREQFFSDEERKYMAINQKKAYILVTPLKSRKVIEQRCMRYNLSAGTIKAVTDFVIPECQKKSPISKSMGTLENTFEGHKSKNKEDCDERDLLTVNRKIKISNLEKEQMLTSDFKKNTRLLPKLKKIENQVAMSFYKHQSSPDLSSEESETEKEIKRKAEVKKTKAGNTKEAVVHLRKSTRNTSNIPVILEPETEESENEFYIKQKKARPSVKETLQKSGVRKEFPITEAVGSDKTNRHPLECLPGLIQDKEWNEKELQKLHCAFASLPKHKPGFWSEVAAAVGSRSPEECQRKYMENPRGKGSQKHVTKKKPANSKGQNGKRGDADQKQTIKITAKVGTLKRKQQMREFLEQLPKDDHDDFFSTTPLQHQRILLPSFQDSEDDDDILPNMDKNPTTPSSVIFPLVKTPQCQHVSPGMLGSINRNDCDKYVFRMQKYHKSNGGIVWGNIKKKLVETDFSTPTPRRKTPFNTDLGENSGIGKLFTNAVESLDEEEKDYYFSNSDSA

SEQ ID NO: 4215 - protein, 767 aa, Homo sapiens
MSLGRLLRRASSKASDLLTLTPGGSGSGSPSVLDGEIIYSKNNVCVHPPEGLQGLGEHHPGYLCLYMEKDEMLGATLILAWVPNSRIQRQDEEALRYITPESSPVRKAPRPRGRRTRSSGASHQPSPTELRPTLTPKDEDILVVAQSVPDRMLASPAPEDEEKLAQGLGVDGAQPASQPACSPSGILSTVSPQDVTEEGREPRPEAGEEDGSLELSAEGVSRDSSFDSDSDTFSSPFCLSPISAALAESRGSVFLESDSSPPSSSDAGLRFPDSNGLLQTPRWDEPQRVCALEQICGVFRVDLGHMRSLRLFFSDEACTSGQLVVASRESQYKVFHFHHGGLDKLSDVFQQWKYCTEMQLKDQQVAPDKTCMQFSIRRPKLPSSETHPEESMYKRLGVSAWLNHLNELGQVEEEYKLRKAIFFGGIDVSIRGEVWPFLLRYYSHESTSEEREALRLQKRKEYSEIQQKRLSMTPEEHRAFWRNVQFTVDKDVVRTDRNNQFFRGEDNPNVESMRRILLNYAVYNPAVGYSQGMSDLVAPILAEVLDESDTFWCFVGLMQNTIFVSSPRDEDMEKQLLYLRELLRLTHVRFYQHLVSLGEDGLQMLFCHRWLLLCFKREFPEAEALRIWEACWAHYQTDYFHLFICVAIVAIYGDDVIEQQLATDQMLLHFGNLAMHMNGELVLRKARSLLYQFRLLPRIPCSLHDLCKLCGSGMWDSGSMPAVECTGHHPGSESCPYGGTVEMPSPKSLREGKKGPKTPQDGFGFRR

SEQ ID NO: 4216 - protein, 273 aa, Homo sapiens
MSPKRDGLGTGDGLHSQVLQEQVSTGDNLHECDSQGPSKDTLVREGKTYKCKECGSVFNKNSLLVRHQQIHTGVKPYECQECGKAFPEKVDFVRPMRIHTGEKPCKCVECGKVFNRRSHLLCYRQIHTGEKPYECSECGKTFSYHSVFIQHRVTHTGEKLFGCKECGKTFYYNSSLTRHMKIHTGEKPCKCSECGKTFTYRSVFFRHSMTHTAGKPYECKECGKGFYYSYSLTRHTRSHTGEKPYECLEHRKDFGYHSAFAQQSKIHSGGKNL

SEQ ID NO: 4217 - protein, 398 aa, Homo sapiens
MENETVSELNQTQLQPRAVVALEYQVVTILLVLIICGLGIVGNIMVVLVVMRTKHMRTPTNCYLVSLAVADLMVLVAAGLPNITDSIYGSWVYGYVGCLCITYLQYLGINASSCSITAFTIERYIAICHPIKAQFLCTFSRAKKIIIFVWAFTSLYCMLWFFLLDLNISTYKDAIVISCGYKISRNYYSPIYLMDFGVFYVVPMILATVLYGFIARILFLNPIPSDPKENSKTWKNDSTHQNTNLNVNTSNRCFNSTVSSRKQVTKMLAVVVILFALLWMPYRTLVVVNSFLSSPFQENWFLLFCRICIYLNSAINPVIYNLMSQKFRAAFRKLCNCKQKPTEKPANYSVALNYSVIKESDHFSTELDDITVTDTYLSATKVSFDDTCLASEVSFSQS

SEQ ID NO: 4218 - protein, 680 aa, Homo sapiens
MMVESASETIRSAPSGQNGVGSLSGQADGSSGGATGTTASGTGREVTTGADSNGEMSPAELLHFQQQQALQVARQFLLQQASGLSSPGNNDSKQSASAVQVPVSVAMMSPQMLTPQQMQQILSPPQLQALLQQQQALMLQQLQEYYKKQQEQLHLQLLTQQQAGKPQPKEALGNKQLAFQQQLLQMQQLQQQHLLNLQRQGLVSLQPNQASGPLQTLPQAAVCPTDLPQLWKGEGAPGQPAEDSVKQEGLDLTGTAATATSFAAPPKVSPPLSHHTLPNGQPTVLTSRRDSSSHEETPGSHPLYGHGECKWPGCETLCEDLGQFIKHLNTEHALDDRSTAQCRVQMQVVQQLEIQLAKESERLQAMMAHLHMRPSEPKPFSQPLNPVPGSSSFSKVTVSAADSFPDGLVHPPTSAAAPVTPLRPPGLGSASLHGGGPARRRSSDKFCSPISSELAQNHEFYKNADVRPPFTYASLIRQAILETPDRQLTLNEIYNWFTRMFAYFRRNTATWKNAVRHNLSLHKCFVRVENVKGAVWTVDEREYQKRRPPKMTGSPTLVKNMISGLSYGALNASYQAALAESSFPLLNSPGMLNPGSASSLLPLSHDDVGAPVEPLPSNGSSSPPRLSPPQYSHQVQVKEEPAEAEEDRQPGPPLGAPNPSASGPPEDRDLEEELPGEELS

SEQ ID NO: 4219 - protein, 522 aa, Homo sapiens
MEEHGVTQTEHMATIEAHAVAQQVQQVHVATYTEHSMLSADEDSPSSPEDTSYDDSDILNSTAADEVTAHLAAAGPVGMAAAAAVATGKKRKRPHVFESNPSIRKRQQTRLLRKLRATLDEYTTRVGQQAIVLCISPSKPNPVFKVFGAAPLENVVRKYKSMILEDLESALAEHAPAPQEVNSELPPLTIDGIPVSVDKMTQAQLRAFIPEMLKYSTGRGKPGWGKESCKPIWWPEDIPWANVRSDVRTEEQKQRVSWTQALRTIVKNCYKQHGREDLLYAFEDQQTQTQATATHSIAHLVPSQTVVQTFSNPDGTVSLIQVGTGATVATLADASELPTTVTVAQVNYSAVADGEVEQNWATLQGGEMTIQTTQASEATQAVASLAEAAVAASQEMQQGATVTMALNSEAAAHAVATLAEATLQGGGQIVLSGETAAAVGALTGVQDANGLFMADRAGRKWILTDKATGLVQIPVSMYQTVVTSLAQGNGPVQVAMAPVTTRISDSAVTMDGQAVEVVTLEQ

SEQ ID NO: 4220 - protein, 715 aa, Homo sapiens
MAADESSQNTLRLQFKAMQEMQHKRLQKQMEKKREKELSLKSRADDQEEPLEVSDGLSLLHAGEPNSKNSFEKRVLEDEIEHLRNELRETVDENGRLYKLLKERDFEIKHLKKKIEEDRFAFTGTAGVAGDVVATKIVELSKKNRLLMAESEGAKTRVKQLTNRIQELERELQTALTRLSAKGATDAGAKPPRAQMGDRALLETPEVKALQDRLVATNLKMSDLRNQIQSVKQELRMAQKVLAREVGEDINVQQLLSSPGTWRGRAQQILVLQSKVQELEKQLGQARSQSAGTASDELSVYPDPRKLSAQEKNLLRIRSLEREKQEGLEKLASERDVLQRELEELKKKFEGMRSRNKLLSSEMKTLKSQMGTLVEKGRHDDELIDALMDQLKQLQEILGSLSLQEEKTRVSQHHLDQQLNSEAQRSNSLVAQLQAMVAEREAKVRQLEMEIGQLNVHYLRNKGVGEGSSGREVSPAYTQFLEDPGLTKSPASAGDHVGRLGSSRSVTSLGHTLVESALTRPSLPSPHRTSPRFSDSPEQKGWQAQVSEIKALWQAAEVERDRLTEFVTVLQKRVEESNSKLLESERKLQEERHRTVVLEQHLEKIRLEPGKASASQRAAPRTKTGLPTSNNRHNPTGSEKKDPSFAQLSDVPVESQMEELTTRLAIQVEENEMLKAALGSALRGKEEDFRMYHEILGQVKSVFLQALRQQKTGKQ

SEQ ID NO: 4221 - protein, 445 aa, Homo sapiens
MVLEGNPEVGSPRTSDLQHRGNKGSCVLSSPGEDAQPGEEPIKYGELIVLGYNGCLASGDKGRRRSRLALSRRSHANGVKPDVMHHISTPLVSKALSNRGQHSISYTLSRSHSVIVEYTHDSDTDMFQIGRSTENMIDFVVTDTSPGGGAAEGPSAQSTISRYACRILCDRRPPYTARIYAAGFDASSNIFLGERAAKWRTPDGLMDGLTTNGVLVMHPAGGFSEDSAPGVWREISVCGNVYTLRDSRSAQQRGKLVENESNVLQDGSLIDLCGATLLWRTPAGLLRAPTLKQLEAQRQEANAARPQCPVGLSTLAFPSPARGRTAPDKQQPWVYVRCGHVHGYHGWGCRRERGPQERECPLCRLVGPYVPLWLGQEAGLCLDPGPPSHAFAPCGHVCSEKTARYWAQTPLPHGTHAFHAACPFCGAWLTGEHGCVRLIFQGPLD

SEQ ID NO: 4222 - protein, 632 aa, Homo sapiens
MDTMMLNVRNLFEQLVRRVEILSEGNEVQFIQLAKDFEDFRKKWQRTDHELGKYKDLLMKAETERSALDVKLKHARNQVDVEIKRRQRAEADCEKLERQIQLIREMLMCDTSGSIQLSEEQKSALAFLNRGQPSSSNAGNKRLSTIDESGSILSDISFDKTDESLDWDSSLVKTFKLKKREKRRSTSRQFVDGPPGPVKKTRSIGSAVDQGNESIVAKTTVTVPNDGGPIEAVSTIETVPYWTRSRRKTGTLQPWNSDSTLNSRQLEPRTETDSVGTPQSNGGMRLHDFVSKTVIKPESCVPCGKRIKFGKLSLKCRDCRVVSHPECRDRCPLPCIPTLIGTPVKIGEGMLADFVSQTSPMIPSIVVHCVNEIEQRGLTETGLYRISGCDRTVKELKEKFLRVKTVPLLSKVDDIHAICSLLKDFLRNLKEPLLTFRLNRAFMEAAEITDEDNSIAAMYQAVGELPQANRDTLAFLMIHLQRVAQSPHTKMDVANLAKVFGPTIVAHAVPNPDPVTMLQDIKRQPKVVERLLSLPLEYWSQFMMVEQENIDPLHVIENSNAFSTPQTPDIKVSLLGPVTTPEHQLLKTPSSSSLSQRVRSTLTKNTPRFGSKSKSATNLGRQGNFFASPMLK

SEQ ID NO: 4223 - protein, 821 aa, Homo sapiens
MVSWGRFICLVVVTMATLSLARPSFSLVEDTTLEPEEPPTKYQISQPEVYVAAPGESLEVRCLLKDAAVISWTKDGVHLGPNNRTVLIGEYLQIKGATPRDSGLYACTASRTVDSETWYFMVNVTDAISSGDDEDDTDGAEDFVSENSNNKRAPYWTNTEKMEKRLHAVPAANTVKFRCPAGGNPMPTMRWLKNGKEFKQEHRIGGYKVRNQHWSLIMESVVPSDKGNYTCVVENEYGSINHTYHLDVVERSPHRPILQAGLPANASTVVGGDVEFVCKVYSDAQPHIQWIKHVEKNGSKYGPDGLPYLKVLKVFAAGVNTTDKEIEVLYIRNVTFEDAGEYTCLAGNSIGISFHSAWLTVLPAPGREKEITASPDYLEIAIYCIGVFLIACMVVTVILCRMKNTTKKPDFSSQPAVHKLTKRIPLRRQVSAESSSSMNSNTPLVRITTRLSSTADTPMLAGVSEYELPEDPKWEFPRDKLTLGKPLGEGCFGQVVMAEAVGIDKDKPKEAVTVAVKMLKDDATEKDLSDLVSEMEMMKMIGKHKNIINLLGACTQDGPLYVIVEYASKGNLREYLRARRPPGMEYSYDINRVPEEQMTFKDLVSCTYQLARGMEYLASQKCIHRDLAARNVLVTENNVMKIADFGLARDINNIDYYKKTTNGRLPVKWMAPEALFDRVYTHQSDVWSFGVLMWEIFTLGGSPYPGIPVEELFKLLKEGHRMDKPANCTNELYMMMRDCWHAVPSQRPTFKQLVEDLDRILTLTTNEEYLDLSQPLEQYSPSYPDTRSSCSSGDDSVFSPDPMPYEPCLPQYPHINGSVKT

SEQ ID NO: 4224 - protein, 192 aa, Homo sapiens
MSGCDRRETETKGKNSFKKRLRGPKVKNLNPKKFSIHDQDHKVLVLDSGNLIAVPDKNYIRPEIFFALASSLSSASAEKGSPILLGVSKGEFCLYCDKDKGQSHPSLQLKKEKLMKLAAQKESARRPFIFYRAQVGSWNMLESAAHPGWFICTSCNCNEPVGVTDKFENRKHIEFSFQPVCKAEMSPSEVSD

SEQ ID NO: 4225 - protein, 668 aa, Homo sapiens
MGNGMCSRKQKRIFQTLLLLTVVFGFLYGAMLYYELQTQLRKAEAVALKYQQHQESLSAQLQVVYEHRSRLEKSLQKERLEHKKAKEDFLVYKLEAQETLNKGRQDSNSRYSALNVQHQMLKSQHEELKKQHSDLEEEHRKQGEDFSRTFNDHKQKYLQLQQEKEQELSKLKETVYNLREENRQLRKAHQDIHTQLQDVKTQVAEYKQLKDTLNRIPSLRKPDPAEQQNVTQVAHSPQGYNTAREKPTREVQEVSRNNDVWQNHEAVPGRAEDTKLYAPTHKEAEFQAPPEPIQQEVERREPEEHQVEEEHRKALEEEEMEQVGQAEHLEEEHDPSPEEQDREWKEQHEQREAANLLEGHARAEVYPSAKPMIKFQSPYEEQLEQQRLAVQQVEEAQQLREHQEALHQQRLQGHLLRQQEQQQQQVAREMALQRQAELEEGRPQHQEQLRQQAHYDAMDNDIVQGAEDQGIQGEEGAYERDNQHQDEAEGDPGNRHEPREQGPREADPESEADRAAVEDINPADDPNNQGEDEFEEAEQVREENLPDENEEQKQSNQKQENTEVEEHLVMAGNPDQQEDNVDEQYQEEAEEEVQEDLTEEKKRELEHNAEETYGENDENTDDKNNDGEEQEVRDDNRPKGREEHYEEEEEEEEDGAAVAEKSHRRAEM

SEQ ID NO: 4226 - protein, 518 aa, Homo sapiens
MADADEGFGLAHTPLEPDAKDLPCDSKPESALGAPSKSPSSPQAAFTQQGMEGIKVFLHERELWLKFHEVGTEMIITKAGRRMFPSYKVKVTGLNPKTKYILLMDIVPADDHRYKFADNKWSVTGKAEPAMPGRLYVHPDSPATGAHWMRQLVSFQKLKLTNNHLDPFGHIILNSMHKYQPRLHIVKADENNGFGSKNTAFCTHVFPETAFIAVTSYQNHKITQLKIENNPFAKGFRGSDDMELHRMSRMQSKEYPVVPRSTVRQKVASNHSPFSSESRALSTSSNLGSQYQCENGVSGPSQDLLPPPNPYPLPQEHSQIYHCTKRKEEECSTTDHPYKKPYMETSPSEEDSFYRSSYPQQQGLGASYRTESAQRQACMYASSAPPSEPVPSLEDISCNTWPSMPSYSSCTVTTVQPMDRLPYQHFSAHFTSGPLVPRLAGMANHGSPQLGEGMFQHQTSVAHQPVVRQCGPQTGLQSPGTLQPPEFLYSHGVPRTLSPHQYHSVHGVGMVPEWSDNS

SEQ ID NO: 4227 - protein, 824 aa, Homo sapiens
MRQSLLFLTSVVPFVLAPRPPDDPGFGPHQRLEKLDSLLSDYDILSLSNIQQHSVRKRDLQTSTHVETLLTFSALKRHFKLYLTSSTERFSQNFKVVVVDGKNESEYTVKWQDFFTGHVVGEPDSRVLAHIRDDDVIIRINTDGAEYNIEPLWRFVNDTKDKRMLVYKSEDIKNVSRLQSPKVCGYLKVDNEELLPKGLVDREPPEELVHRVKRRADPDPMKNTCKLLVVADHRFYRYMGRGEESTTTNYLIELIDRVDDIYRNTSWDNAGFKGYGIQIEQIRILKSPQEVKPGEKHYNMAKSYPNEEKDAWDVKMLLEQFSFDIAEEASKVCLAHLFTYQDFDMGTLGLAYVGSPRANSHGGVCPKAYYSPVGKKNIYLNSGLTSTKNYGKTILTKEADLVTTHELGHNFGAEHDPDGLAECAPNEDQGGKYVMYPIAVSGDHENNKMFSNCSKQSIYKTIESKAQECFQERSNKVCGNSRVDEGEECDPGIMYLNNDTCCNSDCTLKEGVQCSDRNSPCCKNCQFETAQKKCQEAINATCKGVSYCTGNSSECPPPGNAEDDTVCLDLGKCKDGKCIPFCEREQQLESCACNETDNSCKVCCRDLSGRCVPYVDAEQKNLFLRKGKPCTVGFCDMNGKCEKRVQDVIERFWDFIDQLSINTFGKFLADNIVGSVLVFSLIFWIPFSILVHCVDKKLDKQYESLSLFHPSNVEMLSSMDSASVRIIKPFPAPQTPGRLQPAPVIPSAPAAPKLDHQRMDTIQEDPSTDSHMDEDGFEKDPFPNSSTAAKSFEDLTDHPVTRSEKAASFKLQRQNRVDSKETEC

SEQ ID NO: 4228 - protein, 271 aa, Homo sapiens
MFGLKRNAVIGLNLYCGGAGLGAGSGGATRPGGRLLATEKEASARREIGGGEAGAVIGGSAGASPPSTLTPDSRRVARPPPIGAEVPDVTATPARLLFFAPTRRAAPLEEMEAPAADAIMSPEEELDGYEPEPLGKRPAVLPLLELVGESGNNTSTDGSLPSTPPPAEEEEDELYRQSLEIISRYLREQATGAKDTKPMGRSGATSRKALETLRRVGDGVQRNHETAFQGWVCGVLPCRGPRRWHQECAAGFCRCCWSRSWFGISNKIALL

SEQ ID NO: 4229 - protein, 579 aa, Homo sapiens
MEVNAGGVIAYISSSSSASSPASCHSEGSENSFQSSSSSVPSSPNSSNSDTNGNPKNGDLANIEGILKNDRIDCSMKTSKSSAPGMTKSHSGVTKFSGMVLLCKVCGDVASGFHYGVHACEGCKGFFRRSIQQNIQYKKCLKNENCSIMRMNRNRCQQCRFKKCLSVGMSRDAVRFGRIPKREKQRMLIEMQSAMKTMMNSQFSGHLQNDTLVEHHEQTALPAQEQLRPKPQLEQENIKSSSPPSSDFAKEEVIGMVTRAHKDTFMYNQEQQENSAESMQPQRGERIPKNMEQYNLNHDHCGNGLSSHFPCSESQQHLNGQFKGRNIMHYPNGHAICIANGHCMNFSNAYTQRVCDRVPIDGFSQNENKNSYLCNTGGRMHLVCPMSKSPYVDPHKSGHEIWEEFSMSFTPAVKEVVEFAKRIPGFRDLSQHDQVNLLKAGTFEVLMVRFASLFDAKERTVTFLSGKKYSVDDLHSMGAGDLLNSMFEFSEKLNALQLSDEEMSLFTAVVLVSADRSGIENVNSVEALQETLIRALRTLIMKNHPNEASIFTKLLLKLPDLRSLNNMHSEELLAFKVHP

SEQ ID NO: 4230 - protein, 504 aa, Homo sapiens
MPSPDSMTFEDIIVDFTQEEWALLDTSQRKLFQDVMLENISHLVSIGKQLCKSVVLSQLEQVEKLSTQRISLLQGREVGIKHQEIPFIQHIYQKGTSTISTMRSHTQEDPFLCNDLGEDFTQHIALTQNVITYMRTKHFVSKKFGKIFSDWLSFNQHKEIHTKCKSYGSHLFDYAFIQNSALRPHSVTHTREITLECRVCGKTFSKNSNLRRHEMIHTGEKPHGCHLCGKAFTHCSDLRKHERTHTGEKPYGCHLCGKAFSKSSNLRRHEMIHTREKAQICHLCGKAFTHCSDLRKHERTHLGDKPYGCLLCGKAFSKCSYLRQHERTHNGEKPYECHLCGKAFSHCSHLRQHERSHNGEKPHGCHLCGKAFTESSVLKRHERIHTGEKPYECHVCGKAFTESSDLRRHERTHTGEKPYECHLCGKAFNHSSVLRRHERTHTGEKPYECNICGKAFNRSYNFRLHRRVHTGEKPYVCPLCGKAFSKFFNLRQHERTHTKKAMNM

SEQ ID NO: 4231 - protein, 398 aa, Homo sapiens
MVTLITEKLQSQSLDDLTCKAEAGPLQYSAETLNKSGRLFPLELNDQSPWKVFSGGPPVRSQAATGPDFSFLPGLSAAAHTMGLQWQPQSPRPGAGLGAASTVDPSESTGSSTAPPTKRHCRSLSEPEELVRCRSPWRPGSSKVWTPVSKRRCDSGGSATRQGSPGAVLPRSAVWSTGPTSPATPRPSSASGGFVDSSEGSAGSGPLWCSAESCLPSTRRRPSLSQERLAGAGTPLPWASSSPTSTPALGGRRGLLRCRSQPCVLSGKRSRRKRRREEDARWTRPSLDFLKMTQTLKNSKSLCSLNYEDDDEDDTPVKTVLSSPCDSRGLPGITMPGCSQRGLRTSPVHPNLWASRESVTSDGSRRSSGDPRDGDSVGEEGVFPRARWELDLEQIENN

SEQ ID NO: 4232 - protein, 449 aa, Homo sapiens
MATQAKRPRVAGPVDGGDLDPVACFLSWCRRVGLELSPKVAVSRQGTVAGYGMVARESVQAGELLFVVPRAALLSQHTCSIGGLLERERVALQSQSGWVPLLLALLHELQAPASRWRPYFALWPELGRLEHPMFWPEEERRCLLQGTGVPEAVEKDLANIRSEYQSIVLPFMEAHPDLFSLRVRSLELYHQLVALVMAYSFQEPLEEEEDEKEPNSPVMVPAADILNHLANHNANLEYSANCLRMVATQPIPKGHEIFNTYGQMANWQLIHMYGFVEPYPDNTDDTADIQMVTVREAALQGTKTEAERHLVYERWDFLCKLEMVGEEGAFVIGREEVLTEEELTTTLKVLCMPAEEFRELKDQDGGGDDKREEGSLTITNIPKLKASWRQLLQNSVLLTLQTYATDLKTDQGLLSNKEVYAKLSWREQQALQVRYGQKMILHQLLELTS

SEQ ID NO: 4233 - protein, 1235 aa, Homo sapiens
MPAGGRAGSLKDPDVAELFFKDDPEKLFSDLREIGHGSFGAVYFARDVRNSEVVAIKKMSYSGKQSNEKWQDIIKEVRFLQKLRHPNTIQYRGCYLREHTAWLVMEYCLGSASDLLEVHKKPLQEVEIAAVTHGALQGLAYLHSHNMIHRDVKAGNILLSEPGLVKLGDFGSASIMAPANSFVGTPYWMAPEVILAMDEGQYDGKVDVWSLGITCIELAERKPPLFNMNAMSALYHIAQNESPVLQSGHWSEYFRNFVDSCLQKIPQDRPTSEVLLKHRFVLRERPPTVIMDLIQRTKDAVRELDNLQYRKMKKILFQEAPNGPGAEAPEEEEEAEPYMHRAGTLTSLESSHSVPSMSISASSQSSSVNSLADASDNEEEEEEEEEEEEEEEGPEAREMAMMQEGEHTVTSHSSIIHRLPGSDNLYDDPYQPEITPSPLQPPAAPAPTSTTSSARRRAYCRNRDHFATIRTASLVSRQIQEHEQDSALREQLSGYKRMRRQHQKQLLALESRLRGEREEHSARLQRELEAQRAGFGAEAEKLARRHQAIGEKEARAAQAEERKFQQHILGQQKKELAALLEAQKRTYKLRKEQLKEELQENPSTPKREKAEWLLRQKEQLQQCQAEEEAGLLRRQRQYFELQCRQYKRKMLLARHSLDQDLLREDLNKKQTQKDLECALLLRQHEATRELELRQLQAVQRTRAELTRLQHQTELGNQLEYNKRREQELRQKHAAQVRQQPKSLKVRAGQRPPGLPLPIPGALGPPNTGTPIEQQPCSPGQEAVLDQRMLGEEEEAVGERRILGKEGATLEPKQQRILGEESGAPSPSPQKHGSLVDEEVWGLPEEIEELRVPSLVPQERSIVGQEEAGTWSLWGKEDESLLDEEFELGWVQGPALTPVPEEEEEEEEGAPIGTPRDPGDGCPSPDIPPEPPPTHLRPCPASQLPGLLSHGLLAGLSFAVGSSSGLLPLLLLLLLPLLAAQGGGGLQAALLALEVGLVGLGASYLLLCTALHLPSSLFLLLAQGTALGAVLGLSWRRGLMGVPLGLGAAWLLAWPGLALPLVAMAAGGRWVRQQGPRVRRGISRLWLRVLLRLSPMAFRALQGCGAVGDRGLFALYPKTNKDGFRSRLPVPGPRRRNPRTTQHPLALLARVWVLCKGWNWRLARASQGLASHLPPWAIHTLASWGLLRGERPTRIPRLLPRSQRQLGPPASRQPLPGTLAGRRSRTRQSRALPPWR

SEQ ID NO: 4234 - protein, 606 aa, Homo sapiens
MLHTAISCWQPFLGLAVVLIFMGSTIGCPARCECSAQNKSVSCHRRRLIAIPEGIPIETKILDLSKNRLKSVNPEEFISYPLLEEIDLSDNIIANVEPGAFNNLFNLRSLRLKGNRLKLVPLGVFTGLSNLTKLDISENKIVILLDYMFQDLHNLKSLEVGDNDLVYISHRAFSGLLSLEQLTLEKCNLTAVPTEALSHLRSLISLHLKHLNINNMPVYAFKRLFHLKHLEIDYWPLLDMMPANSLYGLNLTSLSVTNTNLSTVPFLAFKHLVYLTHLNLSYNPISTIEAGMFSDLIRLQELHIVGAQLRTIEPHSFQGLRFLRVLNVSQNLLETLEENVFSSPRALEVLSINNNPLACDCRLLWILQRQPTLQFGGQQPMCAGPDTIRERSFKDFHSTALSFYFTCKKPKIREKKLQHLLVDEGQTVQLECSADGDPQPVISWVTPRRRFITTKSNGRATVLGDGTLEIRFAQDQDSGMYVCIASNAAGNDTFTASLTVKGFASDRFLYANRTPMYMTDSNDTISNGTNANTFSLDLKTILVSTAMGCFTFLGVVLFCFLLLFVWSRGKGKHKNSIDLEYVPRKNNGAVVEGEVAGPRRFNMKMI

SEQ ID NO: 4235 - protein, 427 aa, Homo sapiens
MGTPKPRILPWLVSQLDLGQLEGVAWVNKSRTRFRIPWKHGLRQDAQQEDFGIFQAWAEATGAYVPGRDKPDLPTWKRNFRSALNRKEGLRLAEDRSKDPHDPHKIYEFVNSGVGDFSQPDTSPDTNGGGSTSDTQEDILDELLGNMVLAPLPDPGPPSLAVAPEPCPQPLRSPSLDNPTPFPNLGPSENPLKRLLVPGEEWEFEVTAFYRGRQVFQQTISCPEGLRLVGSEVGDRTLPGWPVTLPDPGMSLTDRGVMSYVRHVLSCLGGGLALWRAGQWLWAQRLGHCHTYWAVSEELLPNSGHGPDGEVPKDKEGGVFDLGPFIVDLITFTEGSGRSPRYALWFCVGESWPQDQPWTKRLVMVKVVPTCLRALVEMARVGGASSLENTVDLHISNSHPLSLTSDQYKAYLQDLVEGMDFQGPGES

SEQ ID NO: 4236 - protein, 908 aa, Homo sapiens
MEEGGRDKAPVQPQQSPAAAPGGTDEKPSGKERRDAGDKDKEQELSEEDKQLQDELEMLVERLGEKDTSLYRPALEELRRQIRSSTTSMTSVPKPLKFLRPHYGKLKEIYENMAPGENKRFAADIISVLAMTMSGERECLKYRLVGSQEELASWGHEYVRHLAGEVAKEWQELDDAEKVQREPLLTLVKEIVPYNMAHNAEHEACDLLMEIEQVDMLEKDIDENAYAKVCLYLTSCVNYVPEPENSALLRCALGVFRKFSRFPEALRLALMLNDMELVEDIFTSCKDVVVQKQMAFMLGRHGVFLELSEDVEEYEDLTEIMSNVQLNSNFLALARELDIMEPKVPDDIYKTHLENNRFGGSGSQVDSARMNLASSFVNGFVNAAFGQDKLLTDDGNKWLYKNKDHGMLSAAASLGMILLWDVDGGLTQIDKYLYSSEDYIKSGALLACGIVNSGVRNECDPALALLSDYVLHNSNTMRLGSIFGLGLAYAGSNREDVLTLLLPVMGDSKSSMEVAGVTALACGMIAVGSCNGDVTSTILQTIMEKSETELKDTYARWLPLGLGLNHLGKGEAIEAILAALEVVSEPFRSFANTLVDVCAYAGSGNVLKVQQLLHICSEHFDSKEKEEDKDKKEKKDKDKKEAPADMGAHQGVAVLGIALIAMGEEIGAEMALRTFGHLLRYGEPTLRRAVPLALALISVSNPRLNILDTLSKFSHDADPEVSYNSIFAMGMVGSGTNNARLAAMLRQLAQYHAKDPNNLFMVRLAQGLTHLGKGTLTLCPYHSDRQLMSQVAVAGLLTVLVSFLDVRNIILGKSHYVLYGLVAAMQPRMLVTFDEELRPLPVSVRVGQAVDVVGQAGKPKTITGFQTHTTPVLLAHGERAELATEEFLPVTPILEGFVILRKNPNYDL

SEQ ID NO: 4237 - protein, 490 aa, Homo sapiens
MALLLLLFLGLLGLWGLLCACAQDPSPAARWPPGPRPLPLVGNLHLLRLSQQDRSLMELSERYGPVFTVHLGRQKTVVLTGFEAVKEALAGPGQELADRPPIAIFQLIQRGGGIFFSSGARWRAARQFTVRALHSLGVGREPVADKILQELKCLSGQLDGYRGRPFPLALLGWAPSNITFALLFGRRFDYRDPVFVSLLGLIDEVMVLLGSPGLQLFNVYPWLGALLQLHRPVLRKIEEVRAILRTLLEARRPHVCPGDPVCSYVDALIQQGQGDDPEGLFAEANAVACTLDMVMAGTETTSATLQWAALLMGRHPDVQGRVQEELDRVLGPGRTPRLEDQQALPYTSAVLHEVQRFITLLPHVPRCTAADTQLGGFLLPKGTPVIPLLTSVLLDETQWQTPGQFNPGHFLDANGHFVKREAFLPFSAGRRVCVGERLARTELFLLFAGLLQRYRLLPPPGVSPASLDTTPARAFTMRPRAQALCAVPRP

SEQ ID NO: 4238 - protein, 241 aa, Homo sapiens
MFYSGLLTEGGRKETDMREAASLRQQRRMKQAVQFIHKDSADLLPLDGLKKLGSSKDMQPHNILQRRLMETNLSKLRSGPRVPWASKTNKLNQAKSEGLKKSEEDDMILVSCQCAGKDVKALVDTGCLYNLISLACVDRLGLKEHVKSHKHEGEKLSLPRHLKVVGQIEHLVITLGSLRLDCPAAVVDDNEKNLSLGLQTLRSLKCIINLDKHRLIMGKTDKEEIPFVETVSLNEDNTSEA

SEQ ID NO: 4239 - protein, 158 aa, Homo sapiens
MNKQRGTYSEVSLAQDPKRQQRKLKGNKISISGTKQEIFQVELNLQNASSDHQGNDKTYHCKGLLPPPEKLTAEVLGIICIVLMATVLKTIVLIPCIGVLEQNNFSLNRRMQKARHCGHCPEEWITYSNSCYYIGKERRTWEERVCWPVLRRTLICFL

SEQ ID NO: 4240 - protein, 1972 aa, Homo sapiens
MGDDSEWLKLPVDQKCEHKLWKARLSGYEEALKIFQKIKDEKSPEWSKFLGLIKKFVTDSNAVVQLKGLEAALVYVENAHVAGKTTGEVVSGVVSKVFNQPKAKAKELGIEICLMYIEIEKGEAVQEELLKGLDNKNPKIIVACIETLRKALSEFGSKIILLKPIIKVLPKLFESREKAVRDEAKLIAVEIYRWIRDALRPPLQNINSVQLKELEEEWVKLPTSAPRPTRFLRSQQELEAKLEQQQSAGGDAEGGGDDGDEVPQIDAYELLEAVEILSKLPKDFYDKIEAKKWQERKEALESVEVLIKNPKLEAGDYADLVKALKKVVGKDTNVMLVALAAKCLTGLAVGLRKKFGQYAGHVVPTILEKFKEKKPQVVQALQEAIDAIFLTTTLQNISEDVLAVMDNKNPTIKQQTSLFIARSFRHCTASTLPKSLLKPFCAALLKHINDSAPEVRDAAFEALGTALKVVGEKAVNPFLADVDKLKLDKIKECSEKVELIHGKKAGLAADKKEFKPLPGRTAASGAAGDKDTKDISAPKPGPLKKAPAAKAGGPPKKGKPAAPGGAGNTGTKNKKGLETKEIVEPELSIEVCEEKASAVLPPTCIQLLDSSNWKERLACMEEFQKAVELMDRTEMPCQALVRMLAKKPGWKETNFQVMQMKLHIVALIAQKGNFSKTSAQVVLDGLVDKIGDVKCGNNAKEAMTAIAEACMLPWTAEQVVSMAFSQKNPKNQSETLNWLSNAIKEFGFSGLNVKAFISNVKTALAATNPAVRTAAITLLGVMYLYVGPSLRMFFEDEKPALLSQIDAEFEKMQGQSPPAPTRGISKHSTSGTDEGEDGDEPDDGSNDVVDLLPRTEISDKITSELVSKIGDKNWKIRKEGLDEVAGIINDAKFIQPNIGELPTALKGRLNDSNKILVQQTLNILQQLAVAMGPNIKQHVKNLGIPIITVLGDSKNNVRAAALATVNAWAEQTGMKEWLEGEDLSEELKKENPFLRQELLGWLAEKLPTLRSTPTDLILCVPHLYSCLEDRNGDVRKKAQDALPFFMMHLGYEKMAKATGKLKPTSKDQVLAMLEKAKVNMPAKPAPPTKATSKPMGGSAPAKFQPASAPAEDCISSSTEPKPDPKKAKAPGLSSKAKSAQGKKMPSKTSLKEDEDKSGPIFIVVPNGKEQRMKDEKGLKVLKWNFTTPRDEYIEQLKTQMSSCVAKWLQDEMFHSDFQHHNKALAVMVDHLESEKEGVIGCLDLILKWLTLRFFDTNTSVLMKALEYLKLLFTLLSEEEYHLTENEASSFIPYLVVKVGEPKDVIRKDVRAILNRMCLVYPASKMFPFIMEGTKSKNSKQRAECLEELGCLVESYGMNVCQPTPGKALKEIAVHIGDRDNAVRNAALNTIVTVYNVHGDQVFKLIGNLSEKDMSMLEERIKRSAKRPSAAPIKQVEEKPQRAQNISSNANMLRKGPAEDMSSKLNQARSMSGHPEAAQMVRREFQLDLDEIENDNGTVRCEMPELVQHKLDDIFEPVLIPEPKIRAVSPHFDDMHSNTASTINFIISQVASGDINTSIQALTQLFQIESLAREASTGVLKDLMHGLITLMLDSRIEDLEEGQQVIRSVNLLVVKVLEKSDQTNILSALLVLLQDSLLATASSPKFSELVMKCLWRMVRLLPDTINSINLDRILLDIHIFMKVFPKEKLKQCKSEFPIRTLKTLLHTLCKLKGPKILDHLTMIDNKNESELEAHLCRMMKHSMDQTGSKSDKETEKGASRIDEKSSKAKVNDFLAEIFKKIGSKENTKEGLAELYEYKKKYSDADIEPFLKNSSQFFQSYVERGLRVIEMEREGKGRISTSTGISPQMEVTCVPTPTSTVSSIGNTNGEEVGPSVYLERLKILRQRCGLDNTKQDDRPPLTSLLSKPAVPTVASSTDMLHSKLSQLRESREQHQHSDLDSNQTHSSGTVTSSSSTANIDDLKKRLERIKSSRK

SEQ ID NO: 4241 - protein, 797 aa, Homo sapiens
MGTLGKAREAPRKPSHGCRAASKARLEAKPANSPFPSHPSLAHITQFRMMVSLGHLAKGASLDDLIDSCIQSFDADGNLCRSNQLLQVMLTMHRIVISSAELLQKVITLYKDALAKNSPGLCLKICYFVRYWITEFWVMFKMDASLTDTMEEFQELVKAKGEELHCRLIDTTQINARDWSRKLTQRIKSNTSKKRKVSLLFDHLEPEELSEHLTYLEFKSFRRISFSDYQNYLVNSCVKENPTMERSIALCNGISQWVQLMVLSRPTPQLRAEVFIKFIQVAQKLHQLQNFNTLMAVIGGLCHSSISRLKETSSHVPHEINKVLGEMTELLSSSRNYDNYRRAYGECTDFKIPILGVHLKDLISLYEAMPDYLEDGKVNVHKLLALYNHISELVQLQEVAPPLEANKDLVHLLTLSLDLYYTEDEIYELSYAREPRNHRAPPLTPSKPPVVVDWASGVSPKPDPKTISKHVQRMVDSVFKNYDHDQDGYISQEEFEKIAASFPFSFCVMDKDREGLISRDEITAYFMRASSIYSKLGLGFPHNFQETTYLKPTFCDNCAGFLWGVIKQGYRCKDCGMNCHKQCKDLVVFECKKRAKNPVAPTENNTSVGPVSNLCSLGAKDLLHAPEEGPFTFPNGEAVEHGEESKDRTIMLMGVSSQKISLRLKRAVAHKATQTESQPWIGSEGPSGPFVLSSPRKTAQDTLYVLPSPTSPCPSPVLVRKRAFVKWENKDSLIKSKEELRHLRLPTYQELEQEINTLKADNDALKIQLKYAQKKIESLQLEKSNHVLAQMEQGDCS

SEQ ID NO: 4242 - protein, 781 aa, Homo sapiens
MTAPEKPVKQEEMAALDVDSGGGGGGGGGHGEYLQQQQQHGNGAVAAAAAAQDTQPSPLALLAATCSKIGPPSPGDDEEEAAAAAGAPAAAGATGDLASAQLGGAPNRWEVLSATPTTIKDEAGNLVQIPSAATSSGQYVLPLQNLQNQQIFSVAPGSDSSNGTVSSVQYQVIPQIQSADGQQVQIGFTGSSDNGGINQESSQIQIIPGSNQTLLASGTPSANIQNLIPQTGQVQVQGVAIGGSSFPGQTQVVANVPLGLPGNITFVPINSVDLDSLGLSGSSQTMTAGINADGHLINTGQAMDSSDNSERTGERVSPDINETNTDTDLFVPTSSSSQLPVTIDSTGILQQNTNSLTTSSGQVHSSDLQGNYIQSPVSEETQAQNIQVSTAQPVVQHLQLQESQQPTSQAQIVQGITPQTIHGVQASGQNISQQALQNLQLQLNPGTFLIQAQTVTPSGQVTWQTFQVQGVQNLQNLQIQNTAAQQITLTPVQTLTLGQVAAGGAFTSTPVSLSTGQLPNLQTVTVNSIDSAGIQLHPGENADSPADIRIKEEEPDPEEWQLSGDSTLNTNDLTHLRVQVVDEEGDQQHQEGKRLRRVACTCPNCKEGGGRGTNLGKKKQHICHIPGCGKVYGKTSHLRAHLRWHSGERPFVCNWMYCGKRFTRSDELQRHRRTHTGEKKFVCPECSKRFMRSDHLAKHIKTHQNKKGIHSSSTVLASVEAARDDTLITAGGTTLILANIQQGSVSGIGTVNTSATSNQDILTNTEIPLQLVTVSGNETME

SEQ ID NO: 4243 - protein, 1692 aa, Homo sapiens
MRRPPPLGPTTASGPEGNVRNLQKRQAPGPGAAGGCGPEAGGCRENKQKRRMVARATPGRGEVESDKSVAASGAGKAARRQVEGRRGPVSPSDSSDPRGLEAAKEAELPLQTERHTKEKRKVTEASSDDPQPGLDLVRKESLTSSESFQTVECLQSLGKESIIEGIKRRIRNKKLKSLENPPLKITENEATQNIKVEFQDELYKNTPKYSCNILSPEVENNSVLKLRDCNCFPHSKGCNDENNLPYKPDGGCMHVAENFSKKENLRSLAEKSDTNSIPQLLQTEENVMGVNKLLPEESDLYQSKTNGLLSCLQHEKNKYSIEESSVGRKPRKRMKLSEKADETVTEMNFSNEYNKSELMLQENQMIADGKEAETKSPLNVLRKVSHNTVSLMDHLLSVPETVEKETSSEHHVNAVFQKTIEPLLKEETENASEPLGYESMASKEDFKSMKSFIGKSPNEYHIERRSSREDLRSASEELKLSCQRTIPMTGKRTWPYYSCARISAWCWKKASLPESSYFLRGSQESCRQVDVPKHQTNQTHLTDSKLLLQSSLTETNTESSSKEKLDSNSNCLSSVSAVEPTLMVIKEPIIKDDKKIKSEELSRRGSEVISNTTEDTQLTSETQSLTGNKKKARGNLTKLNLTATSKDGQEANNSAGKTIHRKACIAQQTFIVPDLVKILNTGRLTNFKIPLLKNKSEKRKEVNAKSSEREAYSPLELLDNLSGADVRQNRSKENVSMMMLGPQTLSIRNSVTPVQASSDSFYNKKSYSISPSFTKQGNNSKPSNHVSEPGNIVSNKEVASLTVENNAFSCDPGYVEKSPSFCCNEQETFRPVSSEVRGRKITKNFSEVGFPDILKAYEDDVLLIDVIQDDPDLFGVSNEGELSFTSEVPKISQEPNVAGEHQSTDSKYMETPVKKEPSDDLRELPVLDCGWIKPDICASNSAESEIKRDPKDVNTSLGEVANETSENETLGDFSEQIKGSDLDEKHRFTDKVITKEEKENIYEVCKSKDSRNADFMVGECQFAVPVPKPLCLLVPPLNLSGRQEDTILNTWMNDFRFLGKHSVLKLQNPETCEIFKREKNVGVFQKSLGLMIPYKYCKFHFNTLRGCERPLCKFAHVPEQGDEKVCMDVFKKYININELCLLQRAVNIFMEYYRKFPPGVYFDLQVLNDLLNSLLKHCLLKEVFQIVNLSIMVKMLPSLKILLNIFEYVATMKLRNAVPALIDIFCKLVEAGMVLDPEHFNYIVKLLYQVQASKQEITAVLEMKSRLQMRRFKKNWKCDLDSALNKLEHCKEKGDWTKLGKLYINVKMGCEKFADFQTFCACIAETLTKNYEDERPDIPFCEFAETVSKDPQNSKVDKGVLGRIGISAMYFYHKLLQWSKGRKVLEKLYELKIHFTSLKGLIGPEKLASRCQIVNVAAEIFLKSGSLDGAIWVMRESEWIINTPLWPCDRLDVLNRHNLLCTIAHEILAKSLYRQTFEVLQNLPGFQNSQETVEVSQYSLLFNKLLGSCIESSSLGMSSSVAEFMISKSIPIDFSFLRRLITSLGRSRLWLKARAHYKSALSLGCYPPLEGNLYRKLLLIPSYLSEIEMLLAIEIFMVSNASSIQSPGTSTQILQIVLKRCEDNQSRSNDDYQAAVERLIMAARISDPKLFVKHMTVNVNKEQVYSLEHCSALKWLKENMKWAGKVWLFSNH

SEQ ID NO: 4244 - protein, 1747 aa, Homo sapiens
MNWNEKPKSATLPPLYPKSQPPFLHQSLINQITTTSQSSFSYPGSNQEACMYPGNSNPISQPLLNIQNYPQQISVSDMHNGTVVASHTSVERITYANVNGPKQLTHNLQMSSGVTQNVWLNSPMRNPVHSHIGATVSHQTDFGANVPNMPALQSQLITSDTYSMQMQMIPSNSTRLPVAYQGNQGLNQSFSEQQVDWTQQCISKGLTYPDYRPPPKLYRYSPQSFLPDSTIQKQNFIPHTSLQVKNSQLLNSVLTLPSRQTSAVPSQQYATQTDKRPPPPPYNCRYGSQPLQSTQHITKHLSMEVPQSREMLSSEIRTSFQQQWQNPNENVSTIGNFTNLKVNTNSKQPFNSPIRSSVDGVQTLAQTNEEKIMDSCNPTSNQVLDTSVAKEKLVRDIKTLVEIKQKFSELARKIKINKDLLMAAGCIKMTNTSYSEPAQNSKLSLKQTAKIQSGPQITPVMPENAERQTPTVVESAETNKTQCMLNSDIQEVNCRRFNQVDSVLPNPVYSEKRPMPDSSHDVKVLTSKTSAVEMTQAVLNTQLSSENVTKVEQNSPAVCETISVPKSMSTEEYKSKIQNENMLLLALLSQARKTQKTVLKDANQTIQDSKPDSCEMNPNTQMTGNQLNLKNMETPSTSNVSGRVLDNSFCSGQESSTKGMPAKSDSSCSMEVLATCLSLWKKQPSDTAKEKECDKLRTNTTAVGISKPANIHVKSPCSVVGNSNSQNKISNPSQQTALSMVMHNYESSGINITKGTELQIAVVSPLVLSEVKTLSVKGITPAVLPETVYPVIKEGSVCSLQNQLAENAKATAALKVDVSGPVASTATSTKIFPLTQKEKQNESTNGNSEVTPNVNQGKHNKLESAIHSPMNDQQISQESRNSTVVSSDTLQIDNICSLVEGDTSYNSQIAKIFSSLPLKMVEPQKPSLPNQQGIGSREPEKQLDNTTENKDFGFQKDKPVQCTDVSHKICDQSKSEPPLESSFNNLETNRVILEKSSLEHATEKSTANDTCSSAAIQEDIYPQEIDASSNYTPQDPARNEIHSDKAPVLYLHDQLSELLKEFPYGIEAVNTREGSVGQQTTYQTSEDQTADKTSSDSKDPADQIQITILSSEQMKEIFPEQDDQPYVVDKLAEPQKEEPITEVVSQCDLQAPAAGQSRDSVILDSEKDDIHCCALGWLSMVYEGVPQCQCNSIKNSSSEEEKQKEQCSPLDTNSCKQGERTSDRDVTVVQFKSLVNNPKTPPDGKSHFPELQDDSRKDTPKTKHKSLPRTEQELVAGQFSSKCDKLNPLQNHKRKKLRFHEVTFHSSNKMTASYEQASQETRQKKHVTQNSRPLKTKTAFLPNKDVYKKHSSLGQSLSPEKIKLKLKSVSFKQKRKLDQGNVLDMEVKKKKHDKQEQKGSVGATFKLGDSLSNPNERAIVKEKMVSNTKSVDTKASSSKFSRILTPKEYLQRQKHKEALSNKASKKICVKNVPCDSEHMRPSKLAVQVESCGKSNEKHSSGVQTSKESLNGLTSHGKNLKIHHSQESKTYNILRNVKEKVGGKQPDKIWIDKTKLDKLTNISNEAQFSQMPPQVKDQKKLYLNRVGFKCTERESISLTKLESSPRKLHKDKRQENKHKTFLPVKGNTEKSNMLEFKLCPDILLKNTNSVEERKDVKPHPRKEQAPLQVSGIKSTKEDWLKFVATKKRTQKDSQERDNVNSRLSKRSFSADGFEMLQNPVKDSKEMFQTYKQMYLEKRSRSLGSSPVK

SEQ ID NO: 4245 - protein, 1660 aa, Homo sapiens
MMDSENKPENDEDEKINKEAQDLTKLSSHNEDGGPVSDVIASFPENSMGKRGFSESSNSDSVVIGEDRNKHASKRRKLDEAEPLKSGKQGICRLETSESSVTEGGIALDETGKETFLSDCTVGGTCLPNALSPSCNFSTIDVVSLKTDTEKTSAQEMVSLDLERESPFPPKEISVSCTIGNVDTVLKCSICGHLFSSCSDLEKHAESHMQQPKEHTCCHCSHKAESSSALHMHIKQAHGPQKVFSCDLCGFQCSEENLLNAHYLGKTHLRRQNLAARGGFVQILTKQPFPKKSRTMATKNVHSKPRTSKSIAKNSDSKGLRNVGSTFKDFRGSISKQSGSSSELLVEMMPSRNTLSQEVEIVEEHVTSLGLAQNPENQSRKLDTLVTSEGLLEKLESTKNTLQAAHGNSVTSRPRPERNILVLGNSFRRRSSTFTLKGQAKKRFNLLGIKRGTSETQRMYMKHLRTQMKTHDAESVLKHLEACSSVQRVCVTTSETQEAEQGQGSARPPDSGLHSLTVKPASGSQTLCACTDCGQVATNRTDLEIHVKRCHAREMKFYCRTCDFSSMSRRDLDEHLHSNQHQQTASVLSCQCCSFISLDEINLRDHMKEKHNMHFLCTPCNLFFLSEKDVEEHKATEKHINSLVQPKTLQSSNSDLVLQTLPLSTLESENAKESMDDSGKASQEEPLKSRVSHGNEVRHSSKPQFQCKKCFYKTRSSTVLTRHIKLRHGQDYHFLCKACNLYSLSKEGMEKHIKRSKHLENAKKNNIGLSFEECIERVCIGANDKKEEFDVSGNGRIEGHIGVQLQEHSYLEKGMLASEELSQSGGSTKDDELASTTTPKRGRPKGNISRTCSHCGLLASSITNLTVHIRRKHSHQYSYLCKVCKYYTVTKGDMERHCATKKHKGRVEIEASGKHSSDIIVGPEGGSLEAGKKNAGSAVTMSDEHANKPAESPTSVLEKPDRGNSIEAEVENVFHSLDGEVNSHLLDKKEQISSEPEDFAQPGDVYSQRDVTGTGENKCLHCEFSAHSSASLELHVKRKHTKEFEFYCMACDYYAVTRREMTRHAATEKHKMKRQSYLNSANVEAGSADMSKNIIMPEEEHQQNSEEFQIISGQPSDTLKSRNAADCSILNENTNLDMSKVLCAADSVEVETEEESNFNEDHSFCETFQQAPVKDKVRKPEEMMSLTMSSNYGSPSRFQNENSGSSALNCETAKKNHEISNDAGELRVHCEGEGGNAGDGGGVVPHRHLCPVTLDGERSAESPVLVVTRITREQGNLESGGQNRVARGHGLEDLKGVQEDPVLGNKEILMNSQHETEFILEEDGPASDSTVESSDVYETIISIDDKGQAMYSFGRFDSSIIRIKNPEDGELIDQSEEGLIATGVRISELPLKDCAQGVKKKKSEGSSIGESTRIRCDDCGFLADGLSGLNVHIAMKHPTKEKHFHCLLCGKSFYTESNLHQHLASAGHMRNEQASVEELPEGGATFKCVKCTEPFDSEQNLFLHIKGQHEELLREVNKYIVEDTEQINREREENQGNVCKYCGKMCRSSNSMAFLAHIRTHTGSKPFKCKICHFATAQLGDARNHVKRHLGMREYKCHVCGVAFVMKKHLNTHLLGKHGVGTPKERVKVAYRKIGTLPGIQNNRNASSASEAQSLCEHFS

SEQ ID NO: 4246 - protein, 328 aa, Homo sapiens
MGFWILAILTILMYSTAAKFSKQSWGLENEALIVRCPRQGKPSYTVDWYYSQTNKSIPTQERNRVFASGQLLKFLPAAVADSGIYTCIVRSPTFNRTGYANVTIYKKQSDCNVPDYLMYSTVSGSEKNSKIYCPTIDLYNWTAPLEWFKNCQALQGSRYRAHKSFLVIDNVMTEDAGDYTCKFIHNENGANYSVTATRSFTVKDEQGFSLFPVIGAPAQNEIKEVEIGKNANLTCSACFGKGTQFLAAVLWQLNGTKITDFGEPRIQQEEGQNQSFSNGLACLDMVLRIADVKEEDLLLQYDCLALNLHGLRRHTVRLSRKNPSKECF

SEQ ID NO: 4247 - protein, 1061 aa, Homo sapiens
MENLESRLKNAPYFRCEKGTDSIPLCRKCETCVLAWKIFSTKEWFCRINDISQRRFLVGILKQLNSLYLLHYFQNILQTTQGKDFIYNRSRINLSKKEGKVVKSSLNQMLDKTVEQKMKEILYWFANSTQWTKANYTLLLLQMCNPKLLLTAANVIRVLFLREENNISGLNQDITDVCFSPEKDHSSKSATSQVYWTAKTQHTSLPLSKAPENEHLLGAASNPEEPWRNSLRCISEMNRLFSGKGDITKPGYDPCNLLVDLDDIRDLSSGFSKYRDFIRYLPIHLSKYILSMLGCMRGFPRHLPSWPSSGVSGSIFFFPGMLDRHTLNKCASVSQHWAAMAQQVKMDLSAHGFIQNQITFLQGSYTRGIDPNYANKVSIPVPKMVDDGKSMRVKHPKWKLRTKNEYNLWTAYQNEETQQVLIEERNVFCGTYNVRILSDTWDQNRVIHYSGGDLIAVSSNRKIHLLDIIQVKAIPVEFRGHAGSVRALFLCEEENFLLSGSYDLSIRYWDLKSGVCTRIFGGHQGTITCMDLCKNRLVSGGRDCQVKVWDVDTGKCLKTFRHKDPILATRINDTYIVSSCERGLVKVWHIAMAQLVKTLSGHEGAVKCLFFDQWHLLSGSTDGLVMAWSMVGKYERCLMAFKHPKEVLDVSLLFLRVISACADGKIRIYNFLNGNCMKVLKANGRGDPVLSFFIQGNRMVVNTESNVLMFQFEHIKWQYAVEKTKQKKNKEKEEEKEENSLMEILSKCNIQVHSPRESVSSKQTVIQELLPGKPPKSRVLLKPAKFSSDDVEKAQKQGQLETPGKLPSHPKKKSWKIPMSPDQFLLTVSALQHAHNSGEFAYPCRPQTEITDVWGPSISYPRKVLNFKGKSIQRAVDRLRLSNPPIDVKRTSIPLEIQKLQPNLKISLHSPRVQSTIPQPMIIRSRFSGSLKGGDQVTSSIERAVCSTGPLTSMQVIKPNRMLAPQVGTATLSLKKERPRIYTALDPFRVNTEFVLLTVKEEKEHQEAKMKEYQARESTGVVDPGKVSKAAWIRKIKGLPIDNFTKQGKTAAPELGQNVFI

SEQ ID NO: 4248 - protein, 333 aa, Homo sapiens
MESSGNPESTTFFYYDLQSQPCENQAWVFATLATTVLYCLVFLLSLVGNSLVLWVLVKYESLESLTNIFILNLCLSDLVFACLLPVWISPYHWGWVLGDFLCKLLNMIFSISLYSSIFFLTIMTIHRYLSVVSPLSTLRVPTLRCRVLVTMAVWVASILSSILDTIFHKVLSSGCDYSELTWYLTSVYQHNLFFLLSLGIILFCYVEILRTLFRSRSKRRHRTVKLIFAIVVAYFLSWGPYNFTLFLQTLFRTQIIRSCEAKQQLEYALLICRNLAFSHCCFNPVLYVFVGVKFRTHLKHVLRQFWFCRLQAPSPASIPHSPGAFAYEGASFY

SEQ ID NO: 4249 - protein, 783 aa, Homo sapiens
MESPGESGAGSPGAPSPSSFTTGHLAREKPAQDPLYDVPNASGGQAGGPQRPGRVVSLRERLLLTRPVWLQLQANAAAALHMLRTEPPGTFLVRKSNTRQCQALCMRLPEASGPSFVSSHYILESPGGVSLEGSELMFPDLVQLICAYCHTRDILLLPLQLPRAIHHAATHKELEAISHLGIEFWSSSLNIKAQRGPAGGPVLPQLKARSPQELDQGTGAALCFFNPLFPGDLGPTKREKFKRSFKVRVSTETSSPLSPPAVPPPPVPVLPGAVPSQTERLPPCQLLRRESSVGYRVPAGSGPSLPPMPSLQEVDCGSPSSSEEEGVPGSRGSPATSPHLGRRRPLLRSMSAAFCSLLAPERQVGRAAAALMQDRHTAAGQLVQDLLTQVRAGPEPQELQGIRQALSRARAMLSAELGPEKLLSPKRLEHVLEKSLHCSVLKPLRPILAARLRRRLAADGSLGRLAEGLRLARAQGPGAFGSHLSLPSPVELEQVRQKLLQLLRTYSPSAQVKRLLQACKLLYMALRTQEGEGAGADEFLPLLSLVLAHCDLPELLLEAEYMSELLEPSLLTGEGGYYLTSLSASLALLSGLGQAHTLPLSPVQELRRSLSLWEQRRLPATHCFQHLLRVAYQDPSSGCTSKTLAVPPEASIATLNQLCATKFRVTQPNTFGLFLYKEQGYHRLPPGALAHRLPTTGYLVYRRAEWPETQGAVTEEEGSGQSEARSRGEEQGCQGDGDAGVKASPRDIREQSETTAEGGQGQAQEGPAQPGEPEAEGSRAAEE

SEQ ID NO: 4250 - protein, 526 aa, Homo sapiens
MPAVSGPGPLFCLLLLLLDPHSPETGCPPLRRFEYKLSFKGPRLALPGAGIPFWSHHGDAILGLEEVRLTPSMRNRSGAVWSRASVPFSAWEVEVQMRVTGLGRRGAQGMAVWYTRGRGHVGSVLGGLASWDGIGIFFDSPAEDTQDSPAIRVLASDGHIPSEQPGDGASQGLGSCHWDFRNRPHPFRARITYWGQRLRMSLNSGLTPSDPGEFCVDVGPLLLVPGGFFGVSAATGTLADDHDVLSFLTFSLSEPSPEVPPQPFLEMQQLRLARQLEGLWARLGLGTREDVTPKSDSEAQGEGERLFDLEETLGRHRRILQALRGLSKQLAQAERQWKKQLGPPGQARPDGGWALDASCQIPSTPGRGGHLSMSLNKDSAKVGALLHGQWTLLQALQEMRDAAVRMAAEAQVSYLPVGIEHHFLELDHILGLLQEELRGPAKAAAKAPRPPGQPPRASSCLQPGIFLFYLLIQTVGFFGYVHFRQELNKSLQECLSTGSLPLGPAPHTPRALGILRRQPLPASMPA

SEQ ID NO: 4251 - protein, 1661 aa, Homo sapiens
MEEAGGPMARAKARVVSATLTWRQRPPTQEEIKHGFHKVSLVSGAQMEAPQKEMFEFSRREEVEVNGFATQEEETVNCQGPRDTAGSKNFQSHGPIFSKKYIPPPKEKRPEGRLKEAVDQSDGSRQAPRTEPPCVGAMARTELLVPLPGPREPSPHPGVGLTSGSSRSLEEYRVTRTVRTTTVVGGHVDRRMSSSVTVRPVSSGEALPRGRQVSRMVPPVVVGSPPGSPSRSQAVKVLSNLVPAGHSPPASHLPRPTAGGPRSTGLGSTVGAALRQLPETGTAELKDSSALASTGIPASAHLPKNQDAPAACPDRDQGRAPDARACELWQVLGAPSSTELPLQTSQGQASVPSSPRLETHVPSPGLTHPAKQPVVPTHPGARLTPLVLPPKKKDGPVDPPAATVLPMVRSEHVTVPGQPPAPSTTRRKDVPSPGGLSAPSSPRNKFVQNSENVPVLPFTQREVVKGPGAPAASSPTRKEVVQGSSASAASSPTWKEVVKGPGAPAASSPTQKEVVQGSSAPAALFPTWKEVVKGPGAPDASFPTWKEVVKGPGAPAASSPTQKEVVQGSGAPAALSTTPKEVVKGPGAPAASSPTQKEVVKGPCAPAASSPTQKEVVQGSGAPAALSPKSTEVVQGPKGSSSIQKEAVQGIAGSLAPPLTKEETVQGPIAPATSLPKQDKGVQDSEGSPISSLTQKEVVQDPDALPAPSSSVDRVSPSPGGTPAPVPTGAEASTESQLVSDPTEGKTCTETSREEDEVALAADLEIFLDTLRSMEPPEILRTHRLPRAPRSSYLSMYATLPAIEEDQLGPWVLGPGPQEVPSLEEKEEEEEEEPENPYLSDDEKLQRRQEKAGPSPSRDLHPARPTQVSCSPLEMMKKHVAGTKGPHSELGLELQGGSRPTSRLGGSLLFGSLVPTAKEASTPEPLGTKLSALLPHGAPGLRKVPGQLPLLCSERSSPTEKLACSLPLEGWSPALKTQGKLNTRPGKVIFFSESGCQGSGREVWGDIVDASGWAPVASIRVVRGCWVLYEEPEFRGQKLVLPEGDMELRTPGTKWSPQGIGSLRRVVWDYSTPEISLFSEEGLKGEQVKLTEALKNSQGLEKPLQVASATVSAGLWLLYPKPLFEDTPYILEPGEYPTSEAWGTSDPSVGSLKPMRLGCPSVEKPGEPRAVVYEAPGFQGRSWEVSRDIYNLQQPEDSQSPHLASVGSLRVLGGCWVGYEKEGFRGHQYLLEEGEYPDWSHWGGYDELLTSLRVIRTDFGDPAVVLFEAMDFEGHGVEVSKALPDVELVQHGPSTQAIHVLSGVWVAYQEVGFSGEQYVLEKGVYRNCEDWGAGNSTLASLQPVLQVGEHDLHFVSKIQLFSRPDFLGDHFSFEDDQAALPASFRPQSCRVHGGSWILFDETNFEGDQHILSEGEFPTLTAMGCLASTVLGSLQKVSLHFSEPSIFLYGLECFEGKEIELSREVRSLQAEGFNNHVLSVRIKGGIWVLCEHSDFRGRQWLVGSCEITNWLTYSGTQRVGSLYPIKQRRVYFRLWNAALGGFLAVPDHVEDMKAGRVVVADPQAGGSCIWYYEDGLLKNQMAPTMSLQVIGPPSPGSKVVLWAESRLPRQTWSISESGHICSQMFEGQILDVKGGRGYDRDHVVLWEPDEDRASQIWTIHVL

SEQ ID NO: 4252 - protein, 602 aa, Homo sapiens
MRSMKALQKALSRAGSHCGRGGWGHPSRSPLLGGGVRHHLSEAAAQGRETPHSHQPQHQDHDSSESGMLSRLGDLLFYTIAEGQERIPIHKFTTALKATGLQTSDPRLRDCMSEMHRVVQESSSGGLLDRDLFRKCVSSNIVLLTQAFRKKFVIPDFEEFTGHVDRIFEDVKELTGGKVAAYIPQLAKSNPDLWGVSLCTVDGQRHSVGHTKIPFCLQSCVKPLTYAISISTLGTDYVHKFVGKEPSGLRYNKLSLNEEGIPHNPMVNAGAIVVSSLIKMDCNKAEKFDFVLQYLNKMAGNEYMGFSNATFQSEKETGDRNYAIGYYLKEKKCFPKGVDMMAALDLYFQLCSVEVTCESGSVMAATLANGGICPITGESVLSAEAVRNTLSLMHSCGMYDFSGQFAFHVGLPAKSAVSGAILLVVPNVMGMMCLSPPLDKLGNSHRGTSFCQKLVSLFNFHNYDNLRHCARKLDPRREGAEIRNKTVVNLLFAAYSGDVSALRRFALSAMDMEQKDYDSRTALHVAAAEGHIEVVKFLIEACKVNPFAKDRWGNIPLDDAVQFNHLEVVKLLQDYQDSYTLSETQAEAAAEALSKENLESMV

SEQ ID NO: 4253 - protein, 800 aa, Homo sapiens
MGSSKKHRGEKEAAGTTAAAGTGGATEQPPRHREHKKHKHRSGGSGGSGGERRKRSRERGGERGSGRRGAEAEARSSTHGRERSQAEPSERRVKREKRDDGYEAAASSKTSSGDASSLSIEETNKLRAKLGLKPLEVNAIKKEAGTKEEPVTADVINPMALRQREELREKLAAAKEKRLLNQKLGKIKTLGEDDPWLDDTAAWIERSRQLQKEKDLAEKRAKLLEEMDQEFGVSTLVEEEFGQRRQDLYSARDLQGLTVEHAIDSFREGETMILTLKDKGVLQEEEDVLVNVNLVDKERAEKNVELRKKKPDYLPYAEDESVDDLAQQKPRSILSKYDEELEGERPHSFRLEQGGTADGLRERELEEIRAKLRLQAQSLSTVGPRLASEYLTPEEMVTFKKTKRRVKKIRKKEKEVVVRADDLLPLGDQTQDGDFGSRLRGRGRRRVSEVEEEKEPVPQPLPSDDTRVENMDISDEEEGGAPPPGSPQVLEEDEAELELQKQLEKGRRLRQLQQLQQLRDSGEKVVEIVKKLESRQRGWEEDEDPERKGAIVFNATSEFCRTLGEIPTYGLAGNREEQEELMDFERDEERSANGGSESDGEENIGWSTVNLDEEKQQQDFSASSTTILDEEPIVNRGLAAALLLCQNKGLLETTVQKVARVKAPNKSLPSAVYCIEDKMAIDDKYSRREEYRGFTQDFKEKDGYKPDVKIEYVDETGRKLTPKEAFRQLSHRFHGKGSGKMKTERRMKKLDEEALLKKMSSSDTPLGTVALLQEKQKAQKTPYIVLSGSGKSMNANTITK

SEQ ID NO: 4254 - protein, 1121 aa, Homo sapiens
MAPTLFQKLFSKRTGLGAPGRDARDPDCGFSWPLPEFDPSQIRLIVYQDCERRGRNVLFDSSVKRRNEDISVSGSRCSSDANMLGEMMFGSVAMSYKGSTLKIHQIRSPPQLMLSKVFTARTGSSICGSLNTLQDSLEFINQDNNTLKADNNTVINGLLGNIGLSQFCSPRRAFSEQGPLRLIRSASFFAVHSNPMDMPGRELNEDRDSGIARSASLSSLLITPFPSPNSSLTRSCASSYQRRWRRSQTTSLENGVFPRWSIEESFNLSDESCGPNPGIVRKKKIAIGVIFSLSKDEDENNKFNEFFFSHFPLFESHMNKLKSAIEQAMKMSRRSADASQRSLAYNRIVDALNEFRTTICNLYTMPRIGEPVWLTMMSGTPEKNHLCYRFMKEFTFLMENASKNQFLPALITAVLTNHLAWVPTVMPNGQPPIKIFLEKHSSQSVDMLAKTHPYNPLWAQLGDLYGAIGSPVRLARTVVVGKRQDMVQRLLYFLTYFIRCSELQETHLLENGEDEAIVMPGTVITTTLEKGEIEESEYVLVTMHRNKSSLLFKESEEIRTPNCNCKYCSHPLLGQNVENISQQEREDIQNSSKELLGISDECQMISPSDCQEENAVDVKQYRDKLRTCFDAKLETVVCTGSVPVDKCALSESGLESTEETWQSEKLLDSDSHTGKAMRSTGMVVEKKPPDKIVPASFSCEAAQTKVTFLIGDSMSPDSDTELRSQAVVDQITRHHTKPLKEERGAIDQHQETKQTTKDQSGESDTQNMVSEEPCELPCWNHSDPESMSLFDEYFNDDSIETRTIDDVPFKTSTDSKDHCCMLEFSKILCTKNNKQNNEFCKCIETVPQDSCKTCFPQQDQRDTLSILVPHGDKESSDKKIAVGTEWDIPRNESSDSALGDSESEDTGHDMTRQVSSYYGGEQEDWAEEDEIPFPGSKLIEVSAVQPNIANFGRSLLGGYCSSYVPDFVLQGIGSDERFRQCLMSDLSHAVQHPVLDEPIAEAVCIIADMDKWTVQVASSQRRVTDNKLGKEVLVSSLVSNLLHSTLQLYKHNLSPNFCVMHLEDRLQELYFKSKMLSEYLRGQMRVHVKELGVVLGIESSDLPLLAAVASTHSPYVAQILL

SEQ ID NO: 4255 - protein, 865 aa, Homo sapiens
MSLQDSTLSREGKPEGEIMAAVFFSVGRLSPEVTQPDEDLHLQAEETQLVKESVTFKDVAIDFTLEEWRLMDPTQRNLHKDVMLENYRNLVSLGLAVSKPDMISHLENGKGPWVTVREISRIPYPDMEPKPATKKATRTKAISEDLSQEAILEKLTENGLWDSRMEGLWKWNDRILRLQNNQENHLSQRIIPLKKTPTSQRGFRFESILIPEPGIATEELHSRCQTQEENFTENLNLITDTHLGKIICKEMKGSKAIRQTSELTLGKKSNNKEKPYKCSTCEKAFHYRSLLIQHQRTHTKEKPYECNECGKTFSQPSYLSQHKKIHTGEKPYKCNECGKAFIASSSLMVHQRIHTKEKPYQCNVCGKSFSQCARLNQHQRIQTGEKPYKCSECGKAFSDKSKLARHQETHNGEKPYKCDDCGKAFRNKSYLSVHQKTHTEEKPYQCNECGKSFKNTTIFNVHQRIHTGEKPFRCNECGKAYRSNSSLIVHIRTHTGEKPYECNECGKAFNRIANFTEHQRIHTGEKPYKCNECGKAFINYSCLTVHHRMHTGEKPYKCTECGKAFMRSSSLIIHQRIHTEEKPYLCNECGESFRIKSHLTVHQRIHTGEKPYKCTDCERAFTKMVNLKEHQKIHTGVKPYKCYDCGKSFRTKSYLIVHQRTHTGEKPYKCNECEKAFTNTSQLTVHQRRHTGEKPYKCNECGKVFTSNSGFNTHQRTHTGEKPFKCNDCGKAFSQMVHVTEHQKIHSGEKPYKCDVCGKAFRRGSYLTVHWRTHTGEKPYTCKECGKGCITLSQLTLHQRIHTGERPYKCEECGKAFRTNSDFTVHLRMHTGEKPYKCNECGKAFRSSSSLTVHQRIHQRETQLI

SEQ ID NO: 4256 - protein, 471 aa, Homo sapiens
MPAPQRKHRRGGFSHRCFPTPQTAMTPQPAGPPDGGWGWVVAAAAFAINGLSYGLLRSLGLAFPDLAEHFDRSAQDTAWISALALAVQQAASPVGSALSTRWGARPVVMVGGVLASLGFVFSAFASDLLHLYLGLGLLAGFGWALVFAPALGTLSRYFSRRRVLAVGLALTGNGASSLLLAPALQLLLDTFGWRGALLLLGAITLHLTPCGALLLPLVLPGDPPAPPRSPLAALGLSLFTRRAFSIFALGTALVGGGYFVPYVHLAPHALDRGLGGYGAALVVAVAAMGDAGARLVCGWLADQGWVPLPRLLAVFGALTGLGLWVVGLVPVVGGEESWGGPLLAAAVAYGLSAGSYAPLVFGVLPGLVGVGGVVQATGLVMMLMSLGGLLGPPLSGFLRDETGDFTASFLLSGSLILSGSFIYIGLPRALPSCGPASPPATPPPETGELLPAPQAVLLSPGGPGSTLDTTC

SEQ ID NO: 4257 - protein, 916 aa, Homo sapiens
MESGQPARRIAMAPLLEYERQLVLELLDTDGLVVCARGLGADRLLYHFLQLHCHPACLVLVLNTQPAEEEYFINQLKIEGVEHLPRRVTNEITSNSRYEVYTQGGVIFATSRILVVDFLTDRIPSDLITGILVYRAHRIIESCQEAFILRLFRQKNKRGFIKAFTDNAVAFDTGFCHVERVMRNLFVRKLYLWPRFHVAVNSFLEQHKPEVVEIHVSMTPTMLAIQTAILDILNACLKELKCHNPSLEVEDLSLENAIGKPFDKTIRHYLDPLWHQLGAKTKSLVQDLKILRTLLQYLSQYDCVTFLNLLESLRATEKAFGQNSGWLFLDSSTSMFINARARVYHLPDAKMSKKEKISEKMEIKEGEETKKELVLESNPKWEALTEVLKEIEAENKESEALGGPGQVLICASDDRTCSQLRDYITLGAEAFLLRLYRKTFEKDSKAEEVWMKFRKEDSSKRIRKSHKRPKDPQNKERASTKERTLKKKKRKLTLTQMVGKPEELEEEGDVEEGYRREISSSPESCPEEIKHEEFDVNLSSDAAFGILKEPLTIIHPLLGCSDPYALTRVLHEVEPRYVVLYDAELTFVRQLEIYRASRPGKPLRVYFLIYGGSTEEQRYLTALRKEKEAFEKLIREKASMVVPEEREGRDETNLDLVRGTASADVSTDTRKAGGQEQNGTQQSIVVDMREFRSELPSLIHRRGIDIEPVTLEVGDYILTPEMCVERKSISDLIGSLNNGRLYSQCISMSRYYKRPVLLIEFDPSKPFSLTSRGALFQEISSNDISSKLTLLTLHFPRLRILWCPSPHATAELFEELKQSKPQPDAATALAITADSETLPESEKYNPGPQDFLLKMPGVNAKNCRSLMHHVKNIAELAALSQDELTSILGNAANAKQLYDFIHTSFAEVVSKGKGKK

SEQ ID NO: 4258 - protein, 580 aa, Homo sapiens
MWRPVQLCHFHSALLHSRQKPWPSPAVFFRRNVRGLPPRFSSPTPLWRKVLSTAVVGAPLLLGARYVMAEAREKRRMRLVVDGMGRFGRSLKVGLQISLDYWWCTNVVLRGVEENSPGYLEVMSACHQRAADALVAGAISNGGLYVKLGQGLCSFNHLLPPEYTRTLRVLEDRALKRGFQEVDELFLEDFQALPHELFQEFDYQPIAAASLAQVHRAKLHDGTSVAVKVQYIDLRDRFDGDIHTLELLLRLVEVMHPSFGFSWVLQDLKGTLAQELDFENEGRNAERCARELAHFPYVVVPRVHWDKSSKRVLTADFCAGCKVNDVEAIRSQGLAVHDIAEKLIKAFAEQIFYTGFIHSDPHPGNVLVRKGPDGKAELVLLDHGLYQFLEEKDRAALCQLWRAIILRDDAAMRAHAAALGVQDYLLFAEMLMQRPVRLGQLWGSHLLSREEAAYMVDMARERFEAVMAVLRELPRPMLLVLRNINTVRAINVALGAPVDRYFLMAKRAVRGWSRLAGATYRGVYGTSLLRHAKVVWEMLKFEVALRLETLAMRLTALLARALVHLSLVPPAEELYQYLET

SEQ ID NO: 4259 - protein, 414 aa, Homo sapiens [sequence omitted]

SEQ ID NO: 4260 - protein, 2087 aa, Homo sapiens
METESESSTLGDDSVFWLESEVIIQVTDCEEEEREEKFRKMKSSVHSEEDDFVPELHRNVHPRERPDWEETLSAMARGADVPEIPGDLTLKTCGSTASMKVKHVKKLPFTKGHFPKMAECAHFHYENVEFGSIQLSLSEEQNEVMKNGCESKELVYLVQIACQGKSWIVKRSYEDFRVLDKHLHLCIYDRRFSQLSELPRSDTLKDSPESVTQMLMAYLSRLSAIAGNKINCGPALTWMEIDNKGNHLLVHEESSINTPAVGAAHVIKRYTARAPDELTLEVGDIVSVIDMPPKVLSTWWRGKHGFQVGLFPGHCVELINQKVPQSVTNSVPKPVSKKHGKLITFLRTFMKSRPTKQKLKQRGILKERVFGCDLGEHLLNSGFEVPQVLQSCTAFIERYGIVDGIYRLSGVASNIQRLRHEFDSEHVPDLTKEPYVQDIHSVGSLCKLYFRELPNPLLTYQLYEKFSDAVSAATDEERLIKIHDVIQQLPPPHYRTLEFLMRHLSLLADYCSITNMHAKNLAIVWAPNLLRSKQIESACFSGTAAFMEVRIQSVVVEFILNHVDVLFSGRISMAMQEGAASLSRPKSLLVSSPSTKLLTLEEAQARTQAQVNSPIVTENKYIEVGEGPAALQGKFHTIIEFPLERKRPQNKMKKSPVGSWRSFFNLGKSSSVSKRKLQRNESEPSEMKAMALKGGRAEGTLRSAKSEESLTSLHAVDGDSKLFRPRRPRSSSDALSASFNGEMLGNRCNSYDNLPHDNESEEEGGLLHIPALMSPHSAEDVDLSPPDIGVASLDFDPMSFQCSPPKAESECLESGASFLDSPGYSKDKPSANKKDAETGSSQCQTPGSTASSEPVSPLQEKLSPFFTLDLSPTEDKSSKPSSFTEKVVYAFSPKIGRKLSKSPSMSISEPISVTLPPRVSEVIGTVSNTTAQNASSSTWDKCVEERDATNRSPTQIVKMKTNETVAQEAYESEVQPLDQVAAEEVELPGKEDQSVSSSQSKAVASGQTQTGAVTHDPPQDSVPVSSVSLIPPPPPPKNVARMLALALAESAQQASTQSLKRPGTSQAGYTNYGDIAVATTEDNLSSSYSAVALDKAYFQTDRPAEQFHLQNNAPGNCDHPLPETTATGDPTHSNTTESGEQHHQVDLTGNQPHQAYLSGDPEKARITSVPLDSEKSDDHVSFPEDQSGKNSMPTVSFLDQDQSPPRFYSGDQPPSYLGASVDKLHHPLEFADKSPTPPNLPSDKIYPPSGSPEENTSTATMTYMTTTPATAQMSTKEASWDVAEQPTTADFAAATLQRTHRTNRPLPPPPSQRSAEQPPVVGQVQAATNIGLNNSHKVQGVVPVPERPPEPRAMDDPASAFISDSGAAAAQCPMATAVQPGLPEKVRDGARVPLLHLRAESVPAHPCGFPAPLPPTRMMESKMIAAIHSSSADATSSSNYHSFVTASSTSVDDALPLPLPVPQPKHASQKTVYSSFARPDVTTEPFGPDNCLHFNMTPNCQYRPQSVPPHHNKLEQHQVYGARSEPPASMGLRYNTYVAPGRNASGHHSKPCSRVEYVSSLSSSVRNTCYPEDIPPYPTIRRVQSLHAPPSSMIRSVPISRTEVPPDDEPAYCPRPLYQYKPYQSSQARSDYHVTQLQPYFENGRVHYRYSPYSSSSSSYYSPDGALCDVDAYGTVQLRPLHRLPNRDFAFYNPRLQGKSLYSYAGLAPRPRANVTGYFSPNDHNVVSMPPAADVKHTYTSWDLEDMEKYRMQSIRRESRARQKVKGPVMSQYDNMTPAVQDDLGGIYVIHLRSKSDPGKTGLLSVAEGKESRHAAKAISPEGEDRFYRRHPEAEMDRAHHHGGHGSTQPEKPSLPQKQSSLRSRKLPDMGCSLPEHRAHQEASHRQFCESKNGPPYPQGAGQLDYGSKGIPDTSEPVSYHNSGVKYAASGQESLRLNHKEVRLSKEMERPWVRQPSAPEKHSRDCYKEEEHLTQSIVPPPKPERSHSLKLHHTQNVERDPSVLYQYQPHGKRQSSVTVVSQYDNLEDYHSLPQHQRGVFGGGGMGTYVPPGFPHPQSRTYATALGQGAFLPAELSLQHPETQIHAE

SEQ ID NO: 4261 - protein, 1222 aa, Homo sapiens
MPKGGAPPWIMALMFTGHLLFLALLMFAFSTFEESVSNYSEWAVFTDDIDQFKTQKVQDFRPNQKLKKSMLHPSLYFDAGEIQAMRQKSRASHLHLFRAIRSAVTVMLSNPTYYLPPPKHADFAAKWNEIYGNNLPPLALYCLLCPEDKVAFEFVLEYMDRMVGYKDWLVENAPGDEVPIGHSLTGFATAFDFLYNLLDNHRRQKYLEKIWVITEEMYEYSKVRSWGKQLLHNHQATNMIALLTGALVTGVDKGSKANIWKQAVVDVMEKTMFLLNHIVDGSLDEGVAYGSYTAKSVTQYVFLAQRHFNINNLDNNWLKMHFWFYYATLLPGFQRTVGIADSNYNWFYGPESQLVFLDKFILKNGAGNWLAQQIRKHRPKDGPMVPSTAQRWSTLHTEYIWYDPQLTPQPPADYGTAKIHTFPNWGVVTYGAGLPNTQTNTFVSFKSGKLGGRAVYDIVHFQPYSWIDGWRSFNPGHEHPDQNSFTFAPNGQVFVSEALYGPKLSHLNNVLVFAPSPSSQCNKPWEGQLGECAQWLKWTGEEVGDAAGEIITASQHGEMVFVSGEAVSAYSSAMRLKSVYRALLLLNSQTLLVVDHIERQEDSPINSVSAFFHNLDIDFKYIPYKFMNRYNGAMMDVWDAHYKMFWFDHHGNSPMASIQEAEQAAEFKKRWTQFVNVTFQMEPTITRIAYVFYGPYINVSSCRFIDSSNPGLQISLNVNNTEHVVSIVTDYHNLKTRFNYLGFGGFASVADQGQITRFGLGTQAIVKPVRHDRIIFPFGFKFNIAVGLILCISLVILTFQWRFYLSFRKLMRWILILVIALWFIELLDVWSTCSQPICAKWTRTEAEGSKKSLSSEGHHMDLPDVVITSLPGSGAEILKQLFFNSSDFLYIRVPTAYIDIPETELEIDSFVDACEWKVSDIRSGHFRLLRGWLQSLVQDTKLHLQNIHLHEPNRGKLAQYFAMNKDKKRKFKRRESLPEQRSQMKGAFDRDAEYIRALRRHLVYYPSARPVLSLSSGSWTLKLHFFQEVLGASMRALYIVRDPRAWIYSMLYNSKPSLYSLKNVPEHLAKLFKIEGGKGKCNLNSGYAFEYEPLRKELSKSKSNAVSLLSHLWLANTAAALRINTDLLPTSYQLVKFEDIVHFPQKTTERIFAFLGIPLSPASLNQILFATSTNLFYLPYEGEISPTNTNVWKQNLPRDEIKLIENICWTLMDRLGYPKFMD

SEQ ID NO: 4262 - protein, 543 aa, Homo sapiens
MEDGFKGDRTEGCRSDSVAVPAAAPVCQPKSATNGQPPAPAPTPTPRLSISSRATVVARMEGTSQGGLQTVMKWKTVVAIFVVVVVYLVTGGLVFRALEQPFESSQKNTIALEKAEFLRDHVCVSPQELETLIQHALDADNAGVSPIGNSSNNSSHWDLGSAFFFAGTVITTIGYGNIAPSTEGGKIFCILYAIFGIPLFGFLLAGIGDQLGTIFGKSIARVEKVFRKKQVSQTKIRVISTILFILAGCIVFVTIPAVIFKYIEGWTALESIYFVVVTLTTVGFGDFVAGGNAGINYREWYKPLVWFWILVGLAYFAAVLSMIGDWLRVLSKKTKEEVGEIKAHAAEWKANVTAEFRETRRRLSVEIHDKLQRAATIRSMERRRLGLDQRAHSLDMLSPEKRSVFAALDTGRFKASSQESINNRPNNLRLKGPEQLNKHGQGASEDNIINKFGSTSRLTKRKNKDLKKTLPEDVQKIYKTFRNYSLDEEKKEEETEKMCNSDNSSTAMLTDCIQQHAELENGMIPTDTKDREPENNSLLEDRN

SEQ ID NO: 4263 - protein, 406 aa, Homo sapiens
MALDGPEQMELEEGKAGSGLRQYYLSKIEELQLIVNDKSQNLRRLQAQRNELNAKVRLLREELQLLQEQGSYVGEVVRAMDKKKVLVKVHPEGKFVVDVDKNIDINDVTPNCRVALRNDSYTLHKILPNKVDPLVSLMMVEKVPDSTYEMIGGLDKQIKEIKEVIELPVKHPELFEALGIAQPKGVLLYGPPGTGKTLLARAVAHHTDCTFIRVSGSELVQKFIGEGARMVRELFVMAREHAPSIIFMDEIDSIGSSRLEGGSGGDSEVQRTMLELLNQLDGFEATKNIKVIMATNRIDILDSALLRPGRIDRKIEFPPPNEEARLDILKIHSRKMNLTRGINLRKIAELMPGASGAEVKGVCTEAGMYALRERRVHVTQEDFEMAVAKVMQKDSEKNMSIKKLWK

SEQ ID NO: 4264 - protein, 1123 aa, Homo sapiens
MPIVDKLKEALKPGRKDSADDGELGKLLASSAKKVLLQKIEFEPASKSFSYQLEALKSKYVLLNPKTEGASRHKSGDDPPARRQGSEHTYESCGDGVPAPQKVLFPTERLSLRWERVFRVGAGLHNLGNTCFLNATIQCLTYTPPLANYLLSKEHARSCHQGSFCMLCVMQNHIVQAFANSGNAIKPVSFIRDLKKIARHFRFGNQEDAHEFLRYTIDAMQKACLNGCAKLDRQTQATTLVHQIFGGYLRSRVKCSVCKSVSDTYDPYLDVALEIRQAANIVRALELFVKADVLSGENAYMCAKCKKKVPASKRFTIHRTSNVLTLSLKRFANFSGGKITKDVGYPEFLNIRPYMSQNNGDPVMYGLYAVLVHSGYSCHAGHYYCYVKASNGQWYQMNDSLVHSSNVKVVLNQQAYVLFYLRIPGSKKSPEGLISRTGSSSLPGRPSVIPDHSKKNIGNGIISSPLTGKRQDSGTMKKPHTTEEIGVPISRNGSTLGLKSQNGCIPPKLPSGSPSPKLSQTPTHMPTILDDPGKKVKKPAPPQHFSPRTAQGLPGTSNSNSSRSGSQRQGSWDSRDVVLSTSPKLLATATANGHGLKGNDESAGLDRRGSSSSSPEHSASSDSTKAPQTPRSGAAHLCDSQETNCSTAGHSKTPPSGADSKTVKLKSPVLSNTTTEPASTMSPPPAKKLALSAKKASTLWRATGNDLRPPPPSPSSDLTHPMKTSHPVVASTWPVHRARAVSPAPQSSSRLQPPFSPHPTLLSSTPKPPGTSEPRSCSSISTALPQVNEDLVSLPHQLPEASEPPQSPSEKRKKTFVGEPQRLGSETRLPQHIREATAAPHGKRKRKKKKRPEDTAASALQEGQTQRQPGSPMYRREGQAQLPAVRRQEDGTQPQVNGQQVGCVTDGHHASSRKRRRKGAEGLGEEGGLHQDPLRHSCSPMGDGDPEAMEESPRKKKKKKRKQETQRAVEEDGHLKCPRSAKPQDAVVPESSSCAPSANGWCPGDRMGLSQAPPVSWNGERESDVVQELLKYSSDKAYGRKVLTWDGKMSAVSQDAIEDSRQARTETVVDDWDEEFDRGKEKKIKKFKREKRRNFNAFQKLQTRRNFWSVTHPAKAASLSYRR

SEQ ID NO: 4265 - protein, 647 aa, Homo sapiens
MSDEVFSTTLAYTKSPKVTKRTTFQDELIRAITARSARQRSSEYSDDFDSDEIVSLGDFSDTSADENSVNKKMNDFHISDDEEKNPSKLLFLKTNKSNGNITKDEPVCAIKNEEEMAPDGCEDIVVKSFSESQNKDEEFEKDKIKMKPKPRILSIKSTSSAENNSLDTDDHFKPSPRPRSMLKKKSHMEEKDGLEDKETALSEELELHSAPSSLPTPNGIQLEAEKKAFSENLDPEDSCLTSLASSSLKQILGDSFSPGSEGNASGKDPNEEITENHNSLKSDENKENSFSADHVTTAVEKSKESQVTADDLEEEKAKAELIMDDDRTVDPLLSKSQSILISTSATASSKKTIEDRNIKNKKSTNNRASSASARLMTSEFLKKSSSKRRTPSTTTSSHYLGTLKVLDQKPSQKQSIEPDRADNIRAAVYQEWLEKKNVYLHEMHRIKRIESENLRIQNEQKKAAKREEALASFEAWKAMKEKEAKKIAAKKRLEEKNKKKTEEENAARKGEALQAFEKWKEKKMEYLKEKNRKEREYERAKKQKEEETVAEKKKDNLTAVEKWNEKKEAFFKQKEKEKINEKRKEELKRAEKKDKDKQAINEYEKWLENKEKQERIERKQKKRHSFLESEALPPWSPPSRTVFAKVF

SEQ ID NO: 4266 - protein, 504 aa, Homo sapiens
MGIKTALPAAELGLYSLVLSGALAYAGRGLLEASQDGAHRKAFRESVRPGWEYIGRKMDVADFEWVMWFTSFRNVIIFALSGHVLFAKLCTMVAPKLRSWMYAVYGALAVMGTMGPWYLLLLLGHCVGLYVASLLGQPWLCLGLGLASLASFKMDPLISWQSGFVTGTFDLQEVLFHGGSSFTVLRCTSFALESCAHPDRHYSLADLLKYNFYLPFFFFGPIMTFDRFHAQVSQVEPVRREGELWHIRAQAGLSVVAIMAVDIFFHFFYILTIPSDLKFANRLPDSALAGLAYSNLVYDWVKAAVLFGVVNTVACLDHLDPPQPPKCITALYVFAETHFDRGINDWLCKYVYNHIGGEHSAVIPELAATVATFAITTLWLGPCDIVYLWSFLNCFGLNFELWMQKLAEWGPLARIEASLSVQMSRRVRALFGAMNFWAIIMYNLVSLNSLKFTELVARRLLLTGFPQTTLSILFVTYCGVQLVKERERTLALEEEQKQDKEKPE

SEQ ID NO: 4267 - protein, 367 aa, Homo sapiens
MEPIYEEYLANHGTIVKPYYWLSFSLDCSNCPYHIRTGEEARVSLTEFCQIFGFPYGTTFPQTKHLTFYELKTSSGSLVQKGHASSCTGNYIHPESMLFEMNGYLDSAIYNNDSIRHIILYSNNSPCNEANHCCISKMYNFLITYPGITLSIYFSQLYHTEMDFPASAWNREALRSLASLWPRVVLSPISGGIWHSVLHSFISGVSGSHVFQPILTGRALADRHNAYEINAITGVKPYFTDVLLQTKRNPNTKAQEALESYPLNNAFPGQFFQMPSGQLQPNLPPDLRAPVVFVLVPLRDLPPMHMGQNPNKPRNIVRHLNMPQMSFQETKDLGRLPTGRSVEIVEITEQFASSKEADEKKKKKGKK

SEQ ID NO: 4268 - protein, 359 aa, Homo sapiens
MALGNHSTITEFLLLGLSADPNIRALLFVLFLGIYLLTIMENLMLLLMIRADSCLHKPMYFFLSHLSFVDLCFSSVIVPKMLENLLSQRKTISVEGCLAQVFFVFVTAGTEACLLSGMAYDRHAAICRPLLYGQIMGKQLYMHLVWGSWGLGFLDALINVLLAVNMVFCEAKIIHHYSYEMPSLLPLSCSDISRSLIALLCSTLLHGLGNFLLVFLSYTRIISTILSISSTSGRSKAFSTCSAHLTAVTLYYGSGLLRHLMPNSGSPIELIFSVQYTVVTPMLNSLIYSLKNKEVKGERSLRDSSHLPQLHKGQARWKRPAFTEGRREPGHPELSIPVTPQPQGACACSALRAAPTALP

SEQ ID NO: 4269 - protein, 778 aa, Homo sapiens
MSSGAKEGGGGSPAYHLPHPHPHPPQHAQYVGPYRLEKTLGKGQTGLVKLGVHCITGQKVAIKIVNREKLSESVLMKVEREIAILKLIEHPHVLKLHDVYENKKYLYLVLEHVSGGELFDYLVKKGRLTPKEARKFFRQIVSALDFCHSYSICHRDLKPENLLLDEKNNIRIADFGMASLQVGDSLLETSCGSPHYACPEVIKGEKYDGRRADMWSCGVILFALLVGALPFDDDNLRQLLEKVKRGVFHMPHFIPPDCQSLLRGMIEVEPEKRLSLEQIQKHPWYLGGKHEPDPCLEPAPGRRVAMRSLPSNGELDPDVLESMASLGCFRDRERLHRELRSEEENQEKMIYYLLLDRKERYPSCEDQDLPPRNDVDPPRKRVDSPMLSRHGKRRPERKSMEVLSITDAGGGGSPVPTRRALEMAQHSQRSRSVSGASTGLSSSPLSSPRSPVFSFSPEPGAGDEARGGGSPTSKTQTLPSRGPRGGGAGEQPPPPSARSTPLPGPPGSPRSSGGTPLHSPLHTPRASPTGTPGTTPPPSPGGGVGGAAWRSRLNSIRNSFLGSPRFHRRKMQVPTAEEMSSLTPESSPELAKRSWFGNFISLDKEEQIFLVLKDKPLSSIKADIVHAFLSIPSLSHSVLSQTSFRAEYKASGGPSVFQKPVRFQVDISSSEGPEPSPRRDGSGGGGIYSVTFTLISGPSRRFKRVVETIQAQLLSTHDQPSVQALADEKNGAQTRPAGAPPRSLQPPPGRPDPELSSSPRRGPPKDKKLLATNGTPLP

SEQ ID NO: 4270 - protein, 450 aa, Homo sapiens
MSCLMVERCGEILFENPDQNAKCVCMLGDIRLRGQTGVRAERRGSYPFIDFRLLNSTTYSGEIGTKKKVKRLLSFQRYFHASRLLRGIIPQAPLHLLDEDYLGQARHMLSKVGMWDFDIFLFDRLTNGNSLVTLLCHLFNTHGLIHHFKLDMVTLHRFLVMVQEDYHSQNPYHNAVHAADVTQAMHCYLKEPKLASFLTPLDIMLGLLAAAAHDVDHPGVNQPFLIKTNHHLANLYQNMSVLENHHWRSTIGMLRESRLLAHLPKEMTQDIEQQLGSLILATDINRQNEFLTRLKAHLHNKDLRLEDAQDRHFMLQIALKCADICNPCRIWEMSKQWSERVCEEFYRQGELEQKFELEISPLCNQQKDSIPSIQIGFMSYIVEPLFREWAHFTGNSTLSENMLGHLAHNKAQWKSLLPRQHRSRGSSGSGPDHDHAGQGTESEEQEGDSP

SEQ ID NO: 4271 - protein, 819 aa, Homo sapiens
MDTEGFGELLQQAEQLAAETEGISELPHVERNLQEIQQAGERLRSRTLTRTSQETADVKASVLLGSRGLDISHISQRLESLSAATTFEPLEPVKDTDIQGFLKNEKDNALLSAIEESRKRTFGMAEEYHRESMLVEWEQVKQRILHTLLASGEDALDFTQESEPSYISDVGPPGRSSLDNIEMAYARQIYIYNEKIVNGHLQPNLVDLCASVAELDDKSISDMWTMVKQMTDVLLTPATDALKNRSSVEVRMEFVRQALAYLEQSYKNYTLVTVFGNLHQAQLGGVPGTYQLVRSFLNIKLPAPLPGLQDGEVEGHPVWALIYYCMRCGDLLAASQVVNRAQHQLGEFKTWFQEYMNSKDRRLSPATENKLRLHYRRALRNNTDPYKRAVYCIIGRCDVTDNQSEVADKTEDYLWLKLNQVCFDDDGTSSPQDRLTLSQFQKQLLEDYGESHFTVNQQPFLYFQVLFLTAQFEAAVAFLFRMERLRCHAVHVALVLFELKLLLKSSGQSAQLLSHEPGDPPCLRRLNFVRLLMLYTRKFESTDPREALQYFYFLRDEKDSQGENMFLRCVSELVIESREFDMILGKLENDGSRKPGVIDKFTSDTKPIINKVASVAENKGLFEEAAKLYDLAKNADKVLELMNKLLSPVVPQISAPQSNKERLKNMALSIAERYRAQGISANKFVDSTFYLLLDLITFFDEYHSGHIDRAFDIIERLKLVPLNQESVEERVAAFRNFSDEIRHNLSEVLLATMNILFTQFKRLKGTSPSSSSRPQRVIEDRDSQLRSQARTLITFAGMIPYRTSGDTNARLVQMEVLMN

SEQ ID NO: 4272 - protein, 923 aa, Homo sapiens
MSQFKRQRINPLPGGRNFSGTASTSLLGPPPGLLTPPVATELSQNARHLQGGEKQRVFTGIVTSLHDYFGVVDEEVFFQLSVVKGRLPQLGEKVLVKAAYNPGQAVPWNAVKVQTLSNQPLLKSPAPPLLHVAALGQKQGILGAQPQLIFQPHRIPPLFPQKPLSLFQTSHTLHLSHLNRFPARGPHGRLDQGRSDDYDSKKRKQRAGGEPWGAKKPRHDLPPYRVHLTPYTVDSPICDFLELQRRYRSLLVPSDFLSVHLSWLSAFPLSQPFSLHHPSRIQVSSEKEAAPDAGAEPITADSDPAYSSKVLLLSSPGLEELYRCCMLFVDDMAEPRETPEHPLKQIKFLLGRKEEEAVLVGGEWSPSLDGLDPQADPQVLVRTAIRCAQAQTGIDLSGCTKWWRFAEFQYLQPGPPRRLQTVVVYLPDVWTIMPTLEEWEALCQQKAAEAAPPTQEAQGETEPTEQAPDALEQAADTSRRNAETPEATTQQETDTDLPEAPPPPLEPAVIARPGCVNLSLHGIVEDRRPKERISFEVMVLAELFLEMLQRDFGYRVYKMLLSLPEKVVSPPEPEKEEAAKEEATKEEEAIKEEVVKEPKDEAQNEGPATESEAPLKEDGLLPKPLSSGGEEEEKPRGEASEDLCEMALDPELLLLRDDGEEEFAGAKLEDSEVRSVASNQSEMEFSSLQDMPKELDPSAVLPLDCLLAFVFFDANWCGYLHRRDLERILLTLGIRLSAEQAKQLVSRVVTQNICQYRSLQYSRQEGLDGGLPEEVLFGNLDLLPPPGKSTKPGAAPTEHKALVSHNGSLINVGSLLQRAEQQDSGRLYLENKIHTLELKLEESHNRFSATEVTNKTLAAEMQELRVRLAEAEETARTAERQKSQLQRLLQELRRRLTPLQLEIQRVVEKADSWVEKEEPAPSN

SEQ ID NO: 4273 - protein, 740 aa, Homo sapiens
MTHMLNAAADRVKWTRSSAAKRAACLVAAAYALKTLYPIIGKRLKQSGHGKKKAAAYPAAENTEILHCTETICEKPSPGVNADFFKQLLELRKILFPKLVTTETGWLCLHSVALISRTFLSIYVAGLDGKIVKSIVEKKPRTFIIKLIKWLMIAIPATFVNSAIRYLECKLALAFRTRLVDHAYETYFTNQTYYKVINMDGRLANPDQSLTEDIMMFSQSVAHLYSNLTKPILDVMLTSYTLIQTATSRGASPIGPTLLAGLVVYATAKVLKACSPKFGKLVAEEAHRKGYLRYVHSRIIANVEEIAFYRGHKVEMKQLQKSYKALADQMNLILSKRLWYIMIEQFLMKYVWSSSGLIMVAIPIITATGFADGEDGQKQVMVSERTEAFTTARNLLASGADAIERIMSSYKEVTELAGYTARVYNMFWVFDEVKRGIYKRTAVIQESESHSKNGAKVELPLSDTLAIKGKVIDVDHGIICENVPIITPAGEVVASRLNFKVEEGMHLLITGPNGCGKSSLFRILSGLWPVYEGVLYKPPPQHMFYIPQRPYMSLGSLRDQVIYPDSVDDMHDKGYTDQDLERILHNVHLYHIVQREGGWDAVMDWKDVLSGGEKQRMGMARMFYHKPKYALLDECTSAVSIDVEGKIFQAAKGAGISLLSITHRPSLWKYHTHLLQFDGEGGWRFEQLDTAIRLTLSEEKQKLESQLAGIPKMQQRLNELCKILGEDSVLKTIKNEDETS

SEQ ID NO: 4274 - protein, 401 aa, Homo sapiens
MAVEVQEQWPCLPAAGCPGPLGGPVAACGMSRLLGGTLERVCKAVLLLCLLHFLVAVILYFDVYAQHLAFFSRFSARGPAHALHPAASSSSSSSNCSRPNATASSSGLPEVPSALPGPTAPTLPPCPDSPPGLVGRLLIEFTSPMPLERVQRENPGVLMGGRYTPPDCTPAQTVAVIIPFRHREHHLRYWLHYLHPILRRQRLRYGVYVINQHGEDTFNRAKLLNVGFLEALKEDAAYDCFIFSDVDLVPMDDRNLYRCGDQPRHFAIAMDKFGFRLPYAGYFGGVSGLSKAQFLRINGFPNEYWGWGGEDDDIFNRISLTGMKISRPDIRIGRYRMIKHDRDKHNEPNPQRFTKIQNTKLTMKRDGIGSVRYQVLEVSRQPLFTNITVDIGRPPSWPPRG

SEQ ID NO: 4275 - protein, 668 aa, Homo sapiens
MTSTGKDGGAQHAQYVGPYRLEKTLGKGQTGLVKLGVHCVTCQKVAIKIVNREKLSESVLMKVEREIAILKLIEHPHVLKLHDVYENKKYLYLVLEHVSGGELFDYLVKKGRLTPKEARKFFRQIISALDFCHSHSICHRDLKPENLLLDEKNNIRIADFGMASLQVGDSLLETSCGSPHYACPEVIRGEKYDGRKADVWSCGVILFALLVGALPFDDDNLRQLLEKVKRGVFHMPHFIPPDCQSLLRGMIEVDAARRLTLEHIQKHIWYIGGKNEPEPEQPIPRKVQIRSLPSLEDIDPDVLDSMHSLGCFRDRNKLLQDLLSEEENQEKMIYFLLLDRKERYPSQEDEDLPPRNEIDPPRKRVDSPMLNRHGKRRPERKSMEVLSVTDGGSPVPARRAIEMAQHGQRSRSISGASSGLSTSPLSSPRVTPHPSPRGSPLPTPKGTPVHTPKESPAGTPNPTPPSSPSVGGVPWRARLNSIKNSFLGSPRFHRRKLQVPTPEEMSNLTPESSPELAKKSWFGNFISLEKEEQIFVVIKDKPLSSIKADIVHAFLSIPSLSHSVISQTSFRAEYKATGGPAVFQKPVKFQVDITYTEGGEAQKENGIYSVTFTLLSGPSRRFKRVVETIQAQLLSTHDPPAAQHLSDTTNCMEMMTGRLSKCGIIPKS

SEQ ID NO: 4276 - protein, 447 aa, Homo sapiens
MGEPRAGAALDDGSGWTGSEEGSEEGTGGSEGAGGDGGPDAEGVWSPDIEQSFQEALAIYPPCGRRKIILSDEGKMYGRNELIARYIKLRTGKTRTRKQVSSHIQVLARRKSREIQSKLKDQVSKDKAFQTMATMSSAQLISAPSLQAKLGPTGPQASELFQFWSGGSGPPWNVPDVKPFSQTPFTLSLTPPSTDLPGYEPPQALSPLPPPTPSPPAWQARGLGTARLQLVEFSAFVEPPDAVDSYQRHLFVHISQHCPSPGAPPLESVDVRQIYDKFPEKKGGLRELYDRGPPHAFFLVKFWADLNWGPSGEEAGAGGSISSGGFYGVSSQYESLEHMTLTCSSKVCSFGKQVVEKVETERAQLEDGRFVYRLLRSPMCEYLVNFLHKLRQLPERYMMNSVLENFTILQVVTNRDTQELLLCTAYVFEVSTSERGAQHHIYRLVRD

SEQ ID NO: 4277 - protein, 506 aa, Homo sapiens
MAGEVSAATGRFSLERLGLPGLALAAALLLLALCLLVRRTRRPGEPPLIKGWLPYLGVVLNLRKDPLRFMKTLQKQHGDTFTVLLGGKYITFILDPFQYQLVIKNHKQLSFRVFSNKLLEKAFSISQLQKNHDMNDELHLCYQFLQGKSLDILLESMMQNLKQVFEPQLLKTTSWDTAELYPFCSSIIFEITFTTIYGKVIVCDNNKFISELRDDFLKFDDKFAYLVSNIPIELLGNVKSIREKIIKCFSSEKLAKMQGWSEVFQSRQDVLEKYYVHEDLEIGAHHLGFLWASVANTIPTMFWAMYYLLRHPEAMAAVRDEIDRLLQSTGQKKGSGFPIHLTREQLDSLICLESSIFEALRLSSYSTTIRFVEEDLTLSSETGDYCVRKGDLVAIFPPVLHGDPEIFEAPEEFRYDRFIEDGKKKTTFFKRGKKLKCYLMPFGTGTSKCPGRFFALMEIKQLLVILLTYFDLEIIDDKPIGLNYSRLLFGIQYPDSDVLFRYKVKS

SEQ ID NO: 4278 - protein, 346 aa, Homo sapiens
MPSPLALRPYLRSEFSPSVDARPCSSPSELPAKLLLGATLPRAPRLPRRLAWCSIDWEQVCLLQRLGAGGFGSVYKATYRGVPVAIKQVNKCTKNRLASRRSFWAELNVARLRHDNIVRVVAASTRTPAGSNSLGTIIMEFGGNVTLHQVIYGAAGHPEGDAGEPHCRTGGQLSLGKCLKYSLDVVNGLLFLHSQSIVHLDLKPANILISEQDVCKISDFGCSEKLEDLLCFQTPSYPLGGTYTHRAPELLKGEGVTPKADIYSFAITLWQMTTKQAPYSGERQHILYAVVAYDLRPSLSAAVFEDSLPGQRLGDVIQRCWRPSAAQRPSARLLLVDLTSLKAELG

SEQ ID NO: 4279 - protein, 820 aa, Homo sapiens
MAGELADKKDRDASPSKEERKRSRTPDRERDRDRDRKSSPSKDRKRHRSRDRRRGGSRSRSRSRSKSAERERRHKERERDKERDRNKKDRDRDKDGHRRDKDRKRSSLSPGRGKDFKSRKDRDSKKDEEDEHGDKKPKAQPLSLEELLAKKKAEEEAEAKPKFLSKAEREAEALKRRQQEVEERQRMLEEERKKRKQFQDLGRKMLEDPQERERRERRERMERETNGNEDEEGRQKIREEKDKSKELHAIKERYLGGIKKRRRTRHLNDRKFVFEWDASEDTSIDYNPLYKERHQVQLLGRGFIAGIDLKQQKREQSRFYGDLMEKRRTLEEKEQEEARLRKLRKKEAKQRWDDRHWSQKKLDEMTDRDWRIFREDYSITTKGGKIPNPIRSWKDSSLPPHILEVIDKCGYKEPTPIQRQAIPIGLQNRDIIGVAETGSGKTAAFLIPLLVWITTLPKIDRIEESDQGPYAIILAPTRELAQQIEEETIKFGKPLGIRTVAVIGGISREDQGFRLRMGCEIVIATPGRLIDVLENRYLVLSRCTYVVLDEADRMIDMGFEPDVQKILEHMPVSNQKPDTDEAEDPEKMLANFESGKHKYRQTVMFTATMPPAVERLARSYLRRPAVVYIGSAGKPHERVEQKVFLMSESEKRKKLLAILEQGFDPPIIIFVNQKKGCDVLAKSLEKMGYNACTLHGGKGQEQREFALSNLKAGAKDILVATDVAGRGIDIQDVSMVVNYDMAKNIEDYIHRIGRTGRAGKSGVAITFLTKEDSAVFYELKQAILESPVSSCPPELANHPDAQHKPGTILTKKRREETIFA

SEQ ID NO: 4280 - protein, 406 aa, Homo sapiens
MDQSGMEIPVTLIIKAPNQKYSDQTISCFLNWTVGKLKTHLSNVYPSKPLTKDQRLVYSGRLLPDHLQLKDILRKQDEYHMVHLVCTSRTPPSSPKSSTNRESHEALASSSNSSSDHSGSTTPSSGQETLSLAVGSSSEGLRQRTLPQAQTDQAQSHQFPYVMQGNVDNQFPGQAAPPGFPVYPAFSPLQMLWWQQMYAHQYYMQYQAAVSAQATSNVNPTQPTTSQPLNLAHVPGEEPPPAPNLVAQENRPMNENVQMNAQGGPVLNEEDFNRDWLDWMYTFSRAAILLSIVYFYSSFSRFIMVMGAMLLVYLHQAGWFPFRQEGGHQQAPNNNAEVNNDGQNANNLELEEMERLMDDGLEDESGEDGGEDASAIQRPGLMASAWSFITTFFTSLIPEGPPQVAN

SEQ ID NO: 4281 - protein, 756 aa, Homo sapiens
MAAFGLLSYEQRPLKRPRLGPPDVYPQDPKQKEDELTAVNVKQGFNNQPAFTGDEHGSARNIVINPSKIGAYFSSILAEKLKLNTFQDTGKKKPQVNAKDNYWLVTARSQSAIHSWFSDLAGNKPLSILAKKVPILSKKEDVFAYLAKYSVPMVRATWLIKMTCAYYSAISEAKIKKRQAPDPNLEWTQISTRYLREQLAKISDFYHMASSTGDGPVPVPPEVEQAMKQWEYNEKLAFHMFQEGMLEKHEYLTWILDVLEKIRPMDDDLLKLLLPLMLQYSDEFVQSAYLSRRLAYFCARRLSLLLSDSPNLLAAHSPHMMIGPNNSSIGAPSPGPPGPGMSPVQLAFSDFLSCAQHGPLVYGLSCMLQTVTLCCPSALVWNYSTNENKSANPGSPLDLLQVAPSSLPMPGGNTAFNQQVRARIYEVEQQIKQRGRAVEVRWSFDKCQESTAGVTISRVLHTLEVLDRHCFDRTDSSNSMETLYHKIFWANQNKDNQEVAPNDEAVVTLLCEWAVSCKRSGKHRAMAVAKLLEKRQAEIEAERCGESEVLDEKESISSSSLAGSSLPVFQNVLLRFLDTQAPSLSDPNSECEKVEFVNLVLLFCEFIRHDVFSHDAYMCTLISRGDLSVTASTRPRSPVGENADEHYSKDHDVKMEEQSIMAHMGIDSGTTNIFDEVDKSDFKTDFGSEFPIFSPMPGESCENANTSLGRRMSVNCEKLVKREKPRELIFPSNYDLLRHLQYATHFPIPLVSHCFS

SEQ ID NO: 4282 - protein, 310 aa, Homo sapiens
MGRNNLTRPSEFILLGLSSRPEDQKPLFAVFLPIYLITVIGNLLIILAIRSDTRLQTPMYFFLSILSFVDICYVTVIIPKMLVNFLSETKTISYSECLTQMYFFLAFGNTDSYLLAAMAIDRYVAICNPFHYITIMSHRCCVLLLVLSFCIPHFHSLLHILLTNQLIFCASNVIHHFFCDDQPVLKLSCSSHFVKEITVMTEGLAVIMTPFSCIIISYLRILITVLKIPSAAGKRKAFSTCGSHLTVVTLFYGSISYLYFQPLSNYTVKDQIATIIYTVLTPMLNPFIYSLRNKDMKQGLAKLMHRMKCQ

SEQ ID NO: 4283 - protein, 312 aa, Homo sapiens
MADDNFTVVTEFILLGLTDHAELKAVLFVVFLVIYAITLLRNLGMILLIQITSKLHTPMYFLLSCLSFVDACYSSAIAPKMLVNLLVVKATISFSACMVQHLCFGVFITTEGFLLSVMAYDRYVAIVSPLLYTVAMSDRKCVELVTGSWIGGIVNTLIHTISLRRLSFCRLNAVSHFFCDIPSLLKLSCSDTSMNELLLLTFSGVIAMATFLTVIISYIFIAFASLRIHSASGRQQAFSTCASHLTAVTIFYGTLIFSYIQPSSQYFVEQEKVVSMFYTLGIPMLNLLIHSLRNKDVKEAVKRAIEMKHFLC

SEQ ID NO: 4284 - protein, 240 aa, Homo sapiens
MPPPAKEGGRKGPRERSGKSAPGTAQGEERAKGAPATEPPKPGWALTPQGLAAMLPAQRHRHLLFGDLLEDVGAAASTFPCGSVEPGYRMPDPRPWTQSLELPAERQNRLLGVLKAAEARGRVRALRLRYTRMRAEEIALLIQRQKSARAAIRLELFLPPQLKPARIPDPLDRQEVQTSPGRGGERGGALPASAHAGPQPLSPAAEARGDHPGGERGWHHLPAVTATESVRRAPASHIKL

SEQ ID NO: 4285 - protein, 637 aa, Homo sapiens
MSRMLPFLLLLWFLPITEGSQRAEPMFTAVTNSVLPPDYDSNPTQLNYGVAVTDVDHDGDFEIVVAGYNGPNLVLKYDRAQKRLVNIAVDERSSPYYALRDRQGNAIGVTACDIDGDGREEIYFLNTNNAFSGVATYTDKLFKFRNNRWEDILSDEVNVARGVASLFAGRSVACVDRKGSGRYSIYIANYAYGNVGPDALIEMDPEASDLSRGILALRDVAAEAGVSKYTGGRGVSVGPILSSSASDIFCDNENGPNFLFHNRGDGTFVDAAASAGVDDPHQHGRGVALADFNRDGKVDIVYGNWNGPHRLYLQMSTHGKVRFRDIASPKFSMPSPVRTVITADFDNDQELEIFFNNIAYRSSSANRLFRVIRREHGDPLIEELNPGDALEPEGRGTGGVVTDFDGDGMLDLILSHGESMAQPLSVFRGNQGFNNNWLRVVPRTRFGAFARGAKVVLYTKKSGAHLRIIDGGSGYLCEMEPVAHFGLGKDEASSVEVTWPDGKMVSRNVASGEMNSVLEILYPRDEDTLQDPAPLECGQGFSQQENGHCMDTNECIQFPFVCPRDKPVCVNTYGSYRCRTNKKCSRGYEPNEDGTACVAQVAFLGGYSSAASRISEPLSRASYLSLGLGLCLQLYAL

SEQ ID NO: 4286 - protein, 1065 aa, Homo sapiens
MPRLKESRSHESLLSPSSAVEALDLSMEEEVVIKPVHSSILGQDYCFEVTTSSGSKCFSCRSAAERDKWMENLRRAVHPNKDNSRRVEHILKLWVIEAKDLPAKKKYLCELCLDDVLYARTTGKLKTDNVFWGEHFEFHNLPPLRTVTVHLYRETDKKKKKERNSYLGLVSLPAASVAGRQFVEKWYPVVTPNPKGGKGPGPMIRIKARYQTITILPMEMYKEFAEHITNHYLGLCAALEPILSAKTKEEMASALVHILQSTGKVKDFLTDLMMSEVDRCGDNEHLIFRENTLATKAIEEYLKLVGQKYLQDALGEFIKALYESDENCEVDPSKCSAADLPEHQGNLKMCCELAFCKIINSYCVFPRELKEVFASWRQECSSRGRPDISERLISASLFLRFLCPAIMSPSLFNLLQEYPDDRTARTLTLIAKVTQNLANFAKFGSKEEYMSFMNQFLEHEWTNMQRFLLEISNPETLSNTAGFEGYIDLGRELSSLHSLLWEAVSQLEQSIVSKLGPLPRILRDVHTALSTPGSGQLPGTNDLASTPGSGSSSISAGLQKMVIENDLSGLIDFTRLPSPTPENKDLFFVTRSSGVQPSPARSSSYSEANEPDLQMANGGKSLSMVDLQDARTLDGEAGSPAGPDVLPTDGQAAAAQLVAGWPARATPVNLAGLATVRRAGQTPTTPGTSEGAPGRPQLLAPLSFQNPVYQMAAGLPLSPRGLGDSGSEGHSSLSSHSNSEELAAAAKLGSFSTAAEELARRPGELARRQMSLTEKGGQPTVPRQNSAGPQRRIDQPPPPPPPPPPAPRGRTPPNLLSTLQYPRPSSGTLASASPDWVGPSTRLRQQSSSSKGDSPELKPRAVHKQGPSPVSPNALDRTAAWLLTMNAQLLEDEGLGPDPPHRDRLRSKDELSQAEKDLAVLQDKLRISTKKLEEYETLFKCQEETTQKLVLEYQARLEEGEERLRRQQEDKDIQMKGIISRLMSVEEELKKDHAEMQAAVDSKQKIIDAQEKRIASLDAANARLMSALTQLKERYSMQARNGISPTNPTKLQITENGEFRNSSNC

SEQ ID NO: 4287 - protein, 539 aa, Homo sapiens
MAVCARLCGVGPSRGCRRRQQRRGPAETAAADSEPDTDPEEERIEASAGVGGGLCAGPSPPPPRCSLLELPPELLVEIFASLPGTDLPSLAQVCTKFRRILHTDTIWRRRCREEYGVCENLRKLEITGVSCRDVYAKLLHRYRHILGLWQPDIGPYGGLLNVVVDGLFIIGWMYLPPHDPHVDDPMRFKPLFRIHLMERKAATVECMYGHKGPHHGHIQIVKKDEFSTKCNQTDHHRMSGGRQEEFRTWLREEWGRTLEDIFHEHMQELILMKFIYTSQYDNCLTYRRIYLPPSRPDDLIKPGLFKGTYGSHGLEIVMLSFHGRRARGTKITGDPNIPAGQQTVEIDLRHRIQLPDLENQRNFNELSRIVLEVRERVRQEQQEGGHEAGEGRGRQGPRESQPSPAQPRAEAPSKGPDGTPGEDGGEPGDAVAAAEQPAQCGQGQPFVLPVGVSSRNEDYPRTCRMCFYGTGLIAGHGFTSPERTPGVFILFDEDRFGFVWLELKSFSLYSRVQATFRNADAPSPQAFDEMLKNIQSLTS

SEQ ID NO: 4288 - protein, 1328 aa, Homo sapiens
MDQKILSLAAEKTADKLQEFLQTLREGDLTNLLQNQAVKGKVAGALLRAIFKGSPCSEEAGTLRRRKIYTCCIQLVESGDLQKEIASEIIGLLMLEAHHFPGPLLVELANEFISAVREGSLVNGKSLELLPIILTALATKKENLAYGKGVLSGEECKKQLINTLCSGRWDQQYVIQLTSMFKDVPLTAEEVEFVVEKALSMFSKMNLQEIPPLVYQLLVLSSKGSRKSVLEGIIAFFSALDKQHNEEQSGDELLDVVTVPSGELRHVEGTIILHIVFAIKLDYELGRELVKHLKVGQQGDSNNNLSPFSIALLLSVTRIQRFQDQVLDLLKTSVVKSFKDLQLLQGSKFLQNLVPHRSYVSTMILEVVKNSVHSWDHVTQGLVELGFILMDSYGPKKVLDGKTIETSPSLSRMPNQHACKLGANILLETFKIHEMIRQEILEQVLNRVVTRASSPISHFLDLLSNIVMYAPLVLQSCSSKVTEAFDYLSFLPLQTVQRLLKAVQPLLKVSMSMRDCLILVLRKAMFANQLDARKSAVAGFLLLLKNFKVLGSLSSSQCSQSLSVSQVHVDVHSHYNSVANETFCLEIMDSLRRCLSQQADVRLMLYEGFYDVLRRNSQLANSVMQTLLSQLKQFYEPKPDLLPPLKLEACILTQGDKISLQEPLDYLLCCIQHCLAWYKNTVIPLQQGEEEEEEEEAFYEDLDDILESITNRMIKSELEDFELDKSADFSQSTSIGIKNNICAFLVMGVCEVLIEYNFSISSFSKNRFEDILSLFMCYKKLSDILNEKAGKAKTKMANKTSDSLLSMKFVSSLLTALFRDSIQSHQESLSVLRSSNEFMRYAVNVALQKVQQLKETGHVSGPDGQNPEKIFQNLCDITRVLLWRYTSIPTSVEESGKKEKGKSISLLCLEGLQKIFSAVQQFYQPKIQQFLRALDVTDKEGEEREDADVSVTQRTAFQIRQFQRSLLNLLSSQEEDFNSKEALLLVTVLTSLSKLLEPSSPQFVQMLSWTSKICKENSREDALFCKSLMNLLFSLHVSYKSPVILLRDLSQDIHGHLGDIDQDVEVEKTNHFAIVNLRTAAPTVCLLVLSQAEKVLEEVDWLITKLKGQVSQETLSEEASSQATLPNQPVEKAIIMQLGTLLTFFHELVQTALPSGSCVDTLLKDLCKMYTTLTALVRYYLQVCQSSGGIPKNMEKLVKLSGSHLTPLCYSFISYVQNKSKSLNYTGEKKEKPAAVATAMARVLRETKPIPNLIFAIEQYEKFLIHLSKKSKVNLMQHMKLSTSRDFKIKGNILDMVLREDGEDENEEGTASEHGGQNKEPAKKKRKK

SEQ ID NO: 4289 - protein, 639 aa, Homo sapiens
MSCQISCKSRGRGGGGGGFRGFSSGSAVVSGGSRRSTSSFSCLSRHGGGGGGFGGGGFGSRSLVGLGGTKSISISVAGGGGGFGAAGGFGGRGGGFGGGSSFGGGSGFSGGGFGGGGFGGGRFGGFGGPGGVGGLGGPGGFGPGGYPGGIHEVSVNQSLLQPLNVKVDPEIQNVKAQEREQIKTLNNKFASFIDKVRFLEQQNQVLQTKWELLQQMNVGTRPINLEPIFQGYIDSLKRYLDGLTAERTSQNSELNNMQDLVEDYKKKYEDEINKRTAAENDFVTLKKDVDNAYMIKVELQSKVDLLNQEIEFLKVLYDAEISQIHQSVTDTNVILSMDNSRNLDLDSIIAEVKAQYEEIAQRSKEEAEALYHSKYEELQVTVGRHGDSLKEIKIEISELNRVIQRLQGEIAHVKKQCKNVQDAIADAEQRGEHALKDARNKLNDLEEALQQAKEDLARLLRDYQELMNVKLALDVEIATYRKLLEGEECRMSGDLSSNVTVSVTSSTISSNVASKAAFGGSGGRGSSSGGGYSSGSSSYGSGGRQSGSRGGSGGGGSISGGGYGSGGGSGGRYGSGGGSKGGSISGGGYGSGGGKHSSGGGSRGGSSSGGGYGSGGGGSSSVKGSSGEAFGSSVTFSFR

SEQ ID NO: 4290 - protein, 327 aa, Homo sapiens
MNILFLQWKVKLPPQKEVITSDELMAHLGNCLLSIKPQEKSEGLQLNFQQNVDDAMTVLPKLATGLDVNVRFTGVSDFEYTPECSVFDLLGIPLYHGWLVDPQSPEAVRAVGKLSYNQLVERIITCKHSSDTNLVTEGLIAEQFLETTAAQLTYHGLCELTAAAKEGELSVFFRNNHFSTMTKHKSHLYLLVTDQGFLQEEQVVWESLHNVDGDSCFCDSDFHLSHSLGKGPGAEGGSGSPETQLQVDQDYLIALSLQQQQPRGPLGLTDLELAQQLQQEEYQQQQAAQPVRMRTRVLSLQGRGATSGRPAGERRQRPKHESDCILL

SEQ ID NO: 4291 - protein, 441 aa, Homo sapiens
MEQPQEEAPEVREEEEKEEVAEAEGAPELNGGPQHALPSSSYTDLSRSSSPPSLLDQLQMGCDGASCGSLNMECRVCGDKASGFHYGVHACEGCKGFFRRTIRMKLEYEKCERSCKIQKKNRNKCQYCRFQKCLALGMSHNAIRFGRMPEAEKRKLVAGLTANEGSQYNPQVADLKAFSKHIYNAYLKNFNMTKKKARSILTGKASHTAPFVIHDIETLWQAEKGLVWKQLVNGLPPYKEISVHVFYRCQCTTVETVRELTEFAKSIPSFSSLFLNDQVTLLKYGVHEAIFAMLASIVNKDGLLVANGSGFVTREFLRSLRKPFSDIIEPKFEFAVKFNALELDDSDLALFIAAIILCGDRPGLMNVPRVEAIQDTILRALEFHLQANHPDAQYLFPKLLQKMADLRQLVTEHAQMMQRIKKTETETSLHPLLQEIYKDMY

SEQ ID NO: 4292 - protein, 1647 aa, Homo sapiens
MVQKKKFCPRLLDYLVIVGARHPSSDSVAQTPELLRRYPLEDHTEFPLPPDVVFFCQPEGCLSVRQRRMSLRDDTSFVFTLTDKDTGVTRYGICVNFYRSFQKRISKEKGEGGAGSRGKEGTHATCASEEGGTESSESGSSLQPLSADSTPDVNQSPRGKRRAKAGSRSRNSTLTSLCVLSHYPFFSTFRECLYTLKRLVDCCSERLLGKKLGIPRGVQRDTMWRIFTGSLLVEEKSSALLHDLREIEAWIYRLLRSPVPVSGQKRVDIEVLPQELQPALTFALPDPSRFTLVDFPLHLPLELLGVDACLQVLTCILLEHKVVLQSRDYNALSMSVMAFVAMIYPLEYMFPVIPLLPTCMASAEQLLLAPTPYIIGVPASFFLYKLDFKMPDDVWLVDLDSNRVIAPTNAEVLPILPEPESLELKKHLKQALASMSLNTQPILNLEKFHEGQEIPLLLGRPSNDLQSTPSTEFNPLIYGNDVDSVDVATRVAMVRFFNSANVLQGFQMHTRTLRLFPRPVVAFQAGSFLASRPRQTPFAEKLARTQAVEYFGEWILNPTNYAFQRIHNNMFDPALIGDKPKWYAHQLQPIHYRVYDSNSQLAEALSVPPERDSDSEPTDDSGSDSMDYDDSSSSYSSLGDFVSEMMKCDINGDTPNVDPLTHAALGDASEVEIDELQNQKEAEEPGPDSENSQENPPLRSSSSTTASSSPSTVIHGANSEPADSTEMDDKAAVGVSKPLPSVPPSIGKSNVDRRQAEIGEGSVRRRIYDNPYFEPQYGFPPEEDEDEQGESYTPRFSQHVSGNRAQKLLRPNSLRLASDSDAESDSRASSPNSTVSNTSTEGFGGIMSFASSLYRNHSTSFSLSNLTLPTKGAREKATPFPSLKVFGLNTLMEIVTEAGPGSGEGNRRALVDQKSSVIKHSPTVKREPPSPQGRSSNSSENQQFLKEVVHSVLDGQGVGWLNMKKVRRLLESEQLRVFVLSKLNRMVQSEDDARQDIIPDVEISRKVYKGMLDLLKCTVLSLEQSYAHAGLGGMASIFGLLEIAQTHYYSKEPDKRKRSPTESVNTPVGKDPGLAGRGDPKAMAQLRVPQLGPRAPSATGKGPKELDTRSLKEENFIASIELWNKHQEVKKQKALEKQRPEVIKPVFDLGETEEKKSQISADSGVSLTSSSQRTDQDSVIGVSPAVMIRSSSQDSEVSTVVSNSSGETLGADSDLSSNAGDGPGGEGSVHLASSRGTLSDSEIETNSATSTIFGKAHSLKPSIKEKLAGSPIRTSEDVSQRVYLYEGLLGRDKGSMWDQLEDAAMETFSISKERSTLWDQMQFWEDAFLDAVMLEREGMGMDQGPQEMIDRYLSLGEHDRKRLEDDEDRLLATLLHNLISYMLLMKVNKNDIRKKVRRLMGKSHIGLVYSQQINEVLDQLANLNGRDLSIWSSGSRHMKKQTFVVHAGTDTNGDIFFMEVCDDCVVLRSNIGTVYERWWYEKLINMTYCPKTKVLCLWRRNGSETQLNKFYTKKCRELYYCVKDSMERAAARQQSIKPGPELGGEFPVQDLKTGEGGLLQVTLEGINLKFMHNQVFIELNHIKKCNTVRGVFVLEEFVPEIKEVVSHKYKTPMAHEICYSVLCLFSYVAAVHSSEEDLRTPPRPVSS

SEQ ID NO: 4293 - protein, 142 aa, Homo sapiens
MRLSWFRVLTVLSICLSAVATATGAEGKRKLQIGVKKRVDHCPIKSRKGDVLHMHYTGKLEDGTEFDSSLPQNQPFVFSLGTGQVIKGWDQGLLGMCEGEKRKLVIPSELGYGERGAPPKIPGGATLVFEVELLKIERRTEL

SEQ ID NO: 4294 - protein, 707 aa, Homo sapiens
MSGSRQAGSGSAGTSPGSSAASSVTSASSSLSSSPSPPSVAVSAAALVSGGVAQAAGSGGLGGPVRPVLVAPAVSGSGGGAVSTGLSRHSCAARPSAGVGGSSSSLGSGSRKRPLLAPLCNGLINSYEDKSNDFVCPICFDMIEEAYMTKCGHSFCYKCIHQSLEDNNRCPKCNYVVDNIDHLYPNFLVNELILKQKQRFEEKRFKLDHSNGHRWQIFQDWLGTDQDNLDLANVNLMLELLVQKKKQLEAESHAAQLQILMEFLKVARRNKREEMSGLYSPVSEDSTVPQFEAPSPSHSSIIDSTEYSQPPGFSGSSQTKKQPWYNSTLASRRKRLTAHFEDLEQCYFSTRMSRISDDSRTASQLDEFQECLSKFTRYNSVRPLATLSYASDLYNGSSIVSSIEFDRDCDYFAIAGVTKKIKVYEYDTVIQDAVDIHYPENEMTCNSKISCISWSSYHKNLLASSDYEGTVILWDGFTGQRSKVYQEHEKRCWSVDFNLMDPKLLASGSDDAKVKLWSTNLDNSVASIEAKANVCCVKFSPSSRYHLAFGCADHCVHYYDLRNTKQPIMVFKGHRKAVSYAKFVSGEEIVSASTDSQLKLWNVGKPYCLRSFKGHINEKNFVGLASNGDYIACGSENNSLYLYYKGLSKTLLTFKFDTVKSVLDKDRKEDDTNEFVSAVCWRALPDGESNVLIAANSQGTIKVLELV

SEQ ID NO: 4295 - protein, 794 aa, Homo sapiens
MKMADRSGKIIPGQVYIEVEYDYEYEAKDRKIVIKQGERYILVKKTNDDWWQVKPDENSKAFYVPAQYVKEVTRKALMPPVKQVAGLPNNSTKIMQSLHLQRSTENVNKLPELSSFGKPSSSVQGTGLIRDANQNFGPSYNQGQTVNLSLDLTHNNGKFNNDSHSPKVSSQNRTRSFGHFPGPEFLDVEKTSFSQEQSCDSAGEGSERIHQDSESGDELSSSSTEQIRATTPPNQGRPDSPVYANLQELKISQSALPPLPGSPAIQINGEWETHKDSSGRCYYYNRGTQERTWKPPRWTRDASISKGDFQNPGDQEWLKHVDDQGRQYYYSADGSRSEWELPKYNASSQQQREIIKSRSLDRRLQEPIVLTKWRHSTIVLDTNDKESPTASKPCFPENESSPSSPKHQDTDQEKYGLLNVTKIAENGKKVRKNWLSSWAVLQGSSLLFTKTQGSSTSWFGSNQSKPEFTVDLKGATIEMASKDKSSKKNVFELKTRQGTELLIQSDNDTVINDWFKVLSSTINNQAVETDEGIEEEIPDSPGIEKHDKEKEQKDPKKLRSFKVSSIDSSEQKKTKKNLKKFLTRRPTLQAVREKGYIKDQVFGSNLANLCQRENGTVPKFVKLCIEHVEEHGLDIDGIYRVSGNLAVIQKLRFAVNHDEKLDLNDSKWEDIHVITGALKMFFRELPEPLFTFNHFNDFVNAIKQEPRQRVAAVKDLIRQLPKPNQDTMQILFRHLRRVIENGEKNRMTYQSIAIVFGPTLLKPEKETGNIAVHTVYQNQIVELILLELSSIFGR

SEQ ID NO: 4296 - protein, 816 aa, Homo sapiens
MAEPLKEEDGEDGSAEPPGPVKAEPAHTAASVAAKNLALLKARSFDVTFDVGDEYEIIETIGNGAYGVVSSARRRLTGQQVAIKKIPNAFDVVTNAKRTLRELKILKHFKHDNIIAIKDILRPTVPYGEFKSVYVVLDLMESDLHQIIHSSQPLTLEHVRYFLYQLLRGLKYMHSAQVIHRDLKPSNLLVNENCELKIGDFGMARGLCTSPAEHQYFMTEYVATRWYRAPELMLSLHEYTQAIDLWSVGCIFGEMLARRQLFPGKNYVHQLQLIMMVLGTPSPAVIQAVGAERVRAYIQSLPPRQPVPWETVYPGADRQALSLLGRMLRFEPSARISAAAALRHPFLAKYHDPDDEPDCAPPFDFAFDREALTRERIKEAIVAEIEDFHARREGIRQQIRFQPSLQPVASEPGCPDVEMPSPWAPSGDCAMESPPPAPPPCPGPAPDTIDLTLQPPPPVSEPAPPKKDGAISDNTKAALKAALLKSLRSRLRDGPSAPLEAPEPRKPVTAQERQREREEKRRRRQERAKEREKRRQERERKERGAGASGGPSTDPLAGLVLSDNDRSLLERWTRMARPAAPALTSVPAPAPAPTPTPTPVQPTSPPPGPVAQPTGPQPQSAGSTSGPVPQPACPPPGPAPHPTGPPGPIPVPAPPQIATSTSLLAAQSLVPPPGLPGSSTPGVLPYFPPGLPPPDAGGAPQSSMSESPDVNLVTQQLSKSQVEDPLPPVFSGTPKGSGAGYGVGFDLEEFLNQSFDMGVADGPQDGQADSASLSASLLADWLEGHGMNPADIESLQREIQMDSPMLLADLPDLQDP

SEQ ID NO: 4297 - protein, 839 aa, Homo sapiens
MDYLTTFTEKSGRLLRGTANRLLGFGGGGEARQVRFEDYLREPAQGDLGCGSPPHRPPAPSSPEGPDTGQKKTLDKKDGRRMSFQKPKGTIEYTVESRDSLNSIALKFDTTPNELVQLNKLFSRAVVTGQVLYVPDPEYVSSVESSPSLSPVSPLSPTSSEAEFDKTTNPDVHPTEATPSSTFTGIRPARVVSSTSEEEEAFTEKFLKINCKYITSGKGTVSGVLLVTPNNIMFDPHKNDPLVQENGCEEYGIMCPMEEVMSAAMYKEILDSKIKESLPIDIDQLSGRDFCHSKKMTGSNTEEIDSRIRDAGNDSASTAPRSTEESLSEDVFTESELSPIREELVSSDELRQDKSSGASSESVQTVNQAEVESLTVKSESTGTPGHLRSDTEHSTNEVGTLCHKTDLNNLEMAIKEDQIADNFQGISGPKEDSTSIKGNSDQDSFLHENSLHQEESQKENMPCGETAEFKQKQSVNKGKQGKEQNQDSQTEAEELRKLWKTHTMQQTKQQRENIQQVSQKEAKHKITSADGHIESSALLKEKQRHRLHKFLCLRVGKPMRKTFVSQASATMQQYAQRDKKHEYWFAVPQERTDHLYAFFIQWSPEIYAEDTGEYTREPGFIVVKKIEESETIEDSSNQAAAREWEITTREDINSKQVATVKADLESESFRPNLSDPSELLLPDQIEKLTKHLPPRTIGYPWTLVYGTGKHGTSLKTLYRTMTGLDTPVLMVIKDSDGQVFGALASEPLKVSDGFYGTGETFVFTFCPEFEVFKWTGDNMFFIKGDMDSLAFGGGGGEFALWLDGDLYHGRSHSCKTFGNRTLSKKEDFFIQDIEIWAFE

SEQ ID NO: 4298 - protein, 1359 aa, Homo sapiens
MVGEGPYLISDLDQRGRRRSFAERYDPSLKTMIPVRPCARLAPNPVDDAGLLSFATFSWLTPVMVKGYRQRLTVDTLPPLSTYDSSDTNAKRFRVLWDEEVARVGPEKASLSHVVWKFQRTRVLMDIVANILCIIMAAIGPVILIHQILQQTERTSGKVWVGIGLCIALFATEFTKVFFWALAWAINYRTAIRLKVALSTLVFENLVSFKTLTHISVGEVLNILSSDSYSLFEAALFCPLPATIPILMVFCAAYAFFILGPTALIGISVYVIFIPVQMFMAKLNSAFRRSAILVTDKRVQTMNEFLTCIRLIKMYAWEKSFTNTIQDIRRRERKLLEKAGFVQSGNSALAPIVSTIAIVLTLSCHILLRRKLTAPVAFSVIAMFNVMKFSIAILPFSIKAMAEANVSLRRMKKILIDKSPPSYITQPEDPDTVLLLANATLTWEHEASRKSTPKKLQNQKRHLCKKQRSEAYSERSPPAKGATGPEEQSDSLKSVLHSISFVVRKGKILGICGNVGSGKSSLLAALLGQMQLQKGVVAVNGTLAYVSQQAWIFHGNVRENILFGEKYDHQRYQHTVRVCGLQKDLSNLPYGDLTEIGERGLNLSGGQRQRISLARAVYSDRQLYLLDDPLSAVDAHVGKHVFEECIKKTLRGKTVVLVTHQLQFLESCDEVILLEDGEICEKGTHKELMEERGRYAKLIHNLRGLQFKDPEHLYNAAMVEAFKESPAEREEDAGIIVLAPGNEKDEGKESETGSEFVDTKVPEHQLIQTESPQEGTVTWKTYHTYIKASGGYLLSLFTVFLFLLMIGSAAFSNWWLGLWLDKGSRMTCGPQGNRTMCEVGAVLADIGQHVYQWVYTASMVFMLVFGVTKGFVFTKTTLMASSSLHDTVFDKILKSPMSFFDTTPTGRLMNRFSKDMDELDVRLPFHAENFLQQFFMVVFILVILAAVFPAVLLVVASLAVGFFILLRIFHRGVQELKKVENVSRSPWFTHITSSMQGLGIIHAYGKKESCITYHLLYFNCALRWFALRMDVLMNILTFTVALLVTLSFSSISTSSKGLSLSYIIQLSGLLQVCVRTGTETQAKFTSVELLREYISTCVPECTHPLKVGTCPKDWPSRGEITFRDYQMRYRDNTPLVLDSLNLNIQSGQTVGIVGRTGSGKSSLGMALFRLVEPASGTIFIDEVDICILSLEDLRTKLTVIPQDPVLFVGTVRYNLDPFESHTDEMLWQVLERTFMRDTIMKLPEKLQAEVTENGENFSVGERQLLCVARALLRNSKIILLDEATASMDSKTDTLVQNTIKDAFKGCTVLTIAHRLNTVLNCDHVLVMENGKVIEFDKPEVLAEKPDSAFAMLLAAEVRL

SEQ ID NO: 4299 - protein, 313 aa, Homo sapiens
MGNWSTVTEITLIAFPALLEIRISLFVVLVVTYTLTATGNITIISLIWIDHRLQTPMYFFLSNLSFLDILYTTVITPKLLACLLGEEKTISFAGCMIQTYFYFFLGTVEFILLAVMSFDRYMAICDPLHYTVIMNSRACLLLVLGCWVGAFLSVLFPTIVVTRLPYCRKEINHFFCDIAPLLQVACINTHLIEKINFLLSALVILSSLAFTTGSYVYIISTILRIPSTQGRQKAFSTCASHITVVSIAHGSNIFVYVRPNQNSSLDYDKVAAVLITVVTPLLNPFIYSLRNEKVQEVLRETVNRIMTLIQRKT

SEQ ID NO: 4300 - protein, 519 aa, Homo sapiens
MSVSVLSPSRLLGDVSGILQAASLLILLLLLIKAVQLYLHRQWLLKALQQFPCPPSHWLFGHIQELQQDQELQRIQKWVETFPSACPHWLWGGKVRVQLYDPDYMKVILGRSDPKSHGSYRFLAPWIGYGLLLLNGQTWFQHRRMLTPAFHYDILKPYVGLMADSVRVMLDKWEELLGQDSPLEVFQHVSLMTLDTIMKCAFSHQGSIQVDRNSQSYIQAISDLNNLVFSRVRNAFHQNDTIYSLTSAGRWTHRACQLAHQHTDQVIQLRKAQLQKEGELEKIKRKRHLDFLDILLLAKMENGSILSDKDLRAEVDTFMFEGHDTTASGISWILYALATHPKHQERCREEIHSLLGDGASITWNHLDQMPYTTMCIKEALRLYPPVPGIGRELSTPVTFPDGRSLPKGIMVLLSIYGLHHNPKVWPNPEVFDPFRFAPGSAQHSHAFLPFSGGSRNCIGKQFAMNELKVATALTLLRFELLPDPTRIPIPIARLVLKSKNGIHLRLRRLPNPCEDKDQL

SEQ ID NO: 4301 - protein, 544 aa, Homo sapiens
MVMYARKQQRLSDGCHDRRGDSQPYQALKYSSKSHPSSGDHRHEKMRDAGDPSPPNKMLRRSDSPENKYSDSTGHSKAKNVHTHRVRERDGGTSYSPQENSHNHSALHSSNSHSSNPSNNPSKTSDAPYDSADDWSEHISSSGKKYYYNCRTEVSQWEKPKEWLEREQRQKEANKMAVNSFPKDRDYRREVMQATATSGFASGKSTSGDKPVSHSCTTPSTSSASGLNPTSAPPTSASAVPVSPVPQSPIPPLLQDPNLLRQLLPALQATLQLNNSNVDISKINEVLTAAVTQASLQSIIHKFLTAGPSAFNITSLISQAAQLSTQAQPSNQSPMSLTSDASSPRSYVSPRISTPQTNTVPIKPLISTPPVSSQPKVSTPVVKQGPVSQSATQQPVTADKQQGHEPVSPRSLQRSSSQRSPSPGPNHTSNSSNASNATVVPQNSSARSTCSLTPALAAHFSENLIKHVQGWPADHAEKQASRLREEAHNMGTIHMSEICTELKNLRSLVRVCEIQATLREQRILFLRQQIKELEKLKNQNSFMV

SEQ ID NO: 4302 - protein, 745 aa, Homo sapiens
MEVMNLMEQPIKVTEWQQTYTYDSGIHSGANTCVPSVSSKGIMEEDEACGRQYTLKKTTTYTQGVPPSQGDLEYQMSTTARAKRVREAMCPGVSGEDSSLLLATQVEGQATNLQRLAEPSQLLKSAIVHLINYQDDAELATRALPELTKLLNDEDPVVVTKAAMIVNQLSKKEASRRALMGSPQLVAAVVRTMQNTSDLDTARCTTSILHNLSHHREGLLAIFKSGGIPALVRMLSSPVESVLFYAITTLHNLLLYQEGAKMAVRLADGLQKMVPLLNKNNPKFLAITTDCLQLLAYGNQESKLIILANGGPQALVQIMRNYSYEKLLWTTSRVLKVLSVCPSNKPAIVEAGGMQALGKHLTSNSPRLVQNCLWTLRNLSDVATKQEGLESVLKILVNQLSVDDVNVLTCATGTLSNLTCNNSKNKTLVTQNSGVEALIHAILRAGDKDDITEPAVCALRHLTSRHPEAEMAQNSVRLNYGIPAIVKLLNQPNQWPLVKATIGLIRNLALCPANHAPLQEAAVIPRLVQLLVKAHQDAQRHVAAGTQQPYTDGVRMEEIVEGCTGALHILARDPMNRMEIFRLNTIPLFVQLLYSSVENIQRVAAGVLCELAQDKEAADAIDAEGASAPLMELLHSRNEGTATYAAAVLFRISEDKNPDYRKRVSVELTNSLFKHDPAAWEAAQSMIPINEPYGDDMDATYRPMYSSDVPLDPLEMHMDMDGDYPIDTYSDGLRPPYPTADHMLA

SEQ ID NO: 4303 - protein, 256 aa, Homo sapiens
MASRYDRAITVFSPDGHLFQVEYAQEAVKKGSTAVGIRGTNIVVLGVEKKSVAKLQDERTVRKICALDDHVCMAFAVLTIFIGLTADARVVINRARVECQSHKLTVEDPVTVEYITRFIATLKQKYTQSNGRRPFGISALIVGFDDDGISRLYQTDPSGTYHAWKANAIGRSAKTVREFLEKNYTEDAIASDSEAIKLAIKALLEVVQSGGKNIELAIIRRNQPLKMFSAKEVELYVTEIEKEKEEAEKKKSKKSV

SEQ ID NO: 4304 - protein, 729 aa, Homo sapiens
MFSALKKLVGSDQAPGRDKNIPAGLQSMNQALQRRFAKGVQYNMKIVIRGDRNTGKTALWHRLQGRPFVEEYIPTQEIQVTSIHWSYKTTDDIVKVEVWDVVDKGKCKKRGDGLKMENDPQEAESEMALDAEFLDVYKNCNGVVMMFDITKQWTFNYILRELPKVPTHVPVCVLGNYRDMGEHRVILPDDVRDFIDNLDRPPGSSYFRYAESSMKNSFGLKYLHKFFNIPFLQLQRETLLRQLETNQLDMDATLEELSVQQETEDQNYGIFLEMMEARSRGHASPLAANGQSPSPGSQSPVVPAGAVSTGSSSPGTPQPAPQLPLNAAPPSSVPPVPPSEALPPPACPSAPAPRRSIISRLFGTSPATEAAPPPPEPVPAAEGPATVQSVEDFVPDDRLDRSFLEDTTPARDEKKVGAKAAQQDSDSDGEALGGNPMVAGFQDDVDLEDQPRGSPPLPAGPVPSQDITLSSEEEAEVAAPTKGPAPAPQQCSEPETKWSSIPASKPRRGTAPTRTAAPPWPGGVSVRTGPEKRSSTRPPAEMEPGKGEQASSSESDPEGPIAAQMLSFVMDDPDFESEGSDTQRRADDFPVRDDPSDVTDEDEGPAEPPPPPKLPLPAFRLKNDSDLFGLGLEEAGPKESSEEGKEGKTPSKEKKKKKKKGKEEEEKAAKKKSKHKKSKDKEEGKEERRRRQQRPPRSRERTAADELEAFLGGGAPGGRHPGGGDYEEL

SEQ ID NO: 4305 - protein, 1157 aa, Homo sapiens
MGKLRRRYNIKGRQQAGPGPSKGPPEPPPVQLELEDKDTLKGVDASNALVLPGKKKKKTKAPPLSKKEKKPLTKKEKKVLQKILEQKEKKSQRAEMLQKLSEVQASEAEMRLFYTTSKLGTGNRMYHTKEKADEVVAPGQEKISSLSGAHRKRRRWPSAEEEEEEEEESESELEEESELDEDPAAEPAEAGVGTTVAPLPPAPAPSSQPVPAGMTVPPPPAAAPPLPRALAKPAVFIPVNRSPEMQEERLKLPILSEEQVIMEAVAEHPIVIVCGETGSGKTTQVPQFLYEAGFSSEDSIIGVTEPRRVAAVAMSQRVAKEMNLSQRVVSYQIRYEGNVTEETRIKFMTDGVLLKEIQKDFLLLRYKVVIIDEAHERSVYTDILIGLLSRIVTLRAKRNLPLKLLIMSATLRVEDFTQNPRLFAKPPPVIKVESRQFPVTVHFNKRTPLEDYSGECFRKVCKIHRMLPAGGILVFLTGQAEVHALCRRLRKAFPPSRARPQEKDDDQKDSVEEMRKFKKSRARAKKARAEVLPQINLDHYSVLPAGEGDEDREAEVDEEEGALDSDLDLDLGDGGQDGGEQPDASLPLHVLPLYSLLAPEKQAQVFKPPPEGTRLCVVATNVAETSLTIPGIKYVVDCGKVKKRYYDRVTGVSSFRVTWVSQASADQRAGRAGRTEPGHCYRLYSSAVFGDFEQFPPPEITRRPVEDLILQMKALNVEKVINFPFPTPPSVEALLAAEELLIALGALQPPQKAERVKQLQENRLSCPITALGRTMATFPVAPRYAKMLALSRQHGCLPYAITIVASMTVRELFEELDRPAASDEELTRLKSKRARVAQMKRTWAGQGASLKLGDLMVLLGAVGACEYASCTPQFCEANGLRYKAMMEIRRLRGQLTTAVNAVCPEAELFVDPKMQPPTESQVTYLRQIVTAGLGDHLARRVQSEEMLEDKWRNAYKTPLLDDPVFIHPSSVLFKELPEFVVYQEIVETTKMYMKGVSSVEVQWIPALLPSYCQFDKPLEEPAPTYCPERGRVLCHRASVFYRVGWPLPAIEVDFPEGIDRYKHFARFLLEGQVFRKLASYRSCLLSSPGTMLKTWARLQPRTESLLRALVAEKADCHEALLAAWKKNPKYLLAEYCEWLPQAMHPDIEKAWPPTTVH

SEQ ID NO: 4306 - protein, 719 aa, Homo sapiens
MGFSNMEDDGPEEEERVAEPQANFNTPQALRFEELLANLLNEQHQIAKELFEQLKMKKPSAKQQKEVEKVKPQCKEVHQTLILDPAQRKRLQQQMQQHVQLLTQIHLLATCNPNLNPEASSTRICLKELGTFAQSSIALHHQYNPKFQTLFQPCNLMGAMQLIEDFSTHVSIDCSPHKTVKKTANEFPCLPKQVAWILATSKVFMYPELLPVCSLKAKNPQDKILFTKAEDNKYLLTCKTARQLTVRIKNLNMNRAPDNIIKFYKKTKQLPVLGKCCEEIQPHQWKPPIEREEHRLPFWLKASLPSIQEELRHMADGAREVGNMTGTTEINSDQGLEKDNSELGSETRYPLLLPKGVVLKLKPVADRFPKKAWRQKRSSVLKPLLIQPSPSLQPSFNPGKTPAQSTHSEAPPSKMVLRIPHPIQPATVLQTVPGVPPLGVSGGESFESPAALPAMPPEARTSFPLSESQTLLSSAPVPKVMMPSPASSMFRKPYVRRRPSKRRGARAFRCIKPAPVIHPASVIFTVPATTVKIVSLGGGCNMIQPVNAAVAQSPQTIPIATLLVNPTSFPCPLNQPLVASSVSPLIVSGNSVNLPIPSTPEDKAHMNVDIACAVADGENAFQGLEPKLEPQELSPLSATVFPKVEHSPGPPPVDKQCQEGLSENSAYRWTVVKTEEGRQALEPLPQGIQESLNNSSPGDLEEVVKMEPEDATEEISGFL

SEQ ID NO: 4307 - protein, 498 aa, Homo sapiens
MESPRGWTLQVAPEEGQVLCNVKTATRGLSEGAVSGGWGAWENSTEVPREAGDGQRQQATLGAADEQGGPGRELGPADGGRDGAGPRSEPADRALRPSPLPEEPGCRCGECGKAFSQGSYLLQHRRVHTGEKPYTCPECGKAFAWSSNLSQHQRIHSGEKPYACRECGKAFRAHSQLIHHQETHSGLKPFRCPDCGKSFGRSTTLVQHRRTHTGEKPYECPECGKAFSWNSNFLEHRRVHTGARPHACRDCGKAFSQSSNLAEHLKIHAGARPHACPDCGKAFVRVAGLRQHRRTHSSEKPFPCAECGKAFRESSQLLQHQRTHTGERPFECAECGQAFVMGSYLAEHRRVHTGEKPHACAQCGKAFSQRSNLLSHRRTHSGAKPFACADCGKAFRGSSGLAHHRLSHTGERPFACAECGKAFRGSSELRQHQRLHSGERPFVCAHCSKAFVRKSELLSHRRTHTGERPYACGECGKPFSHRCNLNEHQKRHGGRAAP

SEQ ID NO: 4308 - protein, 576 aa, Homo sapiens
MWAPRCRRFWSRWEQVAALLLLLLLLGVPPRSLALPPIRYSHAGICPNDMNPNLWVDAQSTCRRECETDQECETYEKCCPNVCGTKSCVAARYMDVKGKKGPVGMPKEATCDHFMCLQQGSECDIWDGQPVCKCKDRCEKEPSFTCASDGLTYYNRCYMDAEACSKGITLAVVTCRYHFTWPNTSPPPPETTMHPTTASPETPELDMAAPALLNNPVHQSVTMGETVSFLCDVVGRPRPEITWEKQLEDRENVVMRPNHVRGNVVVTNIAQLVIYNAQLQDAGIYTCTARNVAGVLRADFPLSVVRGHQAAATSESSPNGTAFPAAECLKPPDSEDCGEEQTRWHFDAQANNCLTFTFGHCHRNLNHFETYEACMLACMSGPLAACSLPALQGPCKAYAPRWAYNSQTGQCQSFVYGGCEGNGNNFESREACEESCPFPRGNQRCRACKPRQKLVTSFCRSDFVILGRVSELTEEPDSGRALVTVDEVLKDEKMGLKFLGQEPLEVTLLHVDWACPCPNVTVSEMPLIIMGEVDGGMAMLRPDSFVGASSARRVRKLREVMHKKTCDVLKEFLGLH

SEQ ID NO: 4309 - protein, 997 aa, Homo sapiens
MENAHTKTVEEVLGHFGVNESTGLSLEQVKKLKERWGSNELPAEEGKTLLELVIEQFEDLLVRILLLAACISFVLAWFEEGEETITAFVEPFVILLILVANAIVGVWQERNAENAIEALKEYEPEMGKVYRQDRKSVQRIKAKDIVPGDIVEIAVGDKVPADIRLTSIKSTTLRVDQSILTGESVSVIKHTDPVPDPRAVNQDKKNMLFSGTNIAAGKAMGVVVATGVNTEIGKIRDEMVATEQERTPLQQKLDEFGEQLSKVISLICIAVWIINIGHFNDPVHGGSWIRGAIYYFKIAVALAVAAIPEGLPAVITTCLALGTRRMAKKNAIVRSLPSVETLGCTSVICSDKTGTLTTNQMSVCRMFILDRVEGDTCSLNEFTITGSTYAPIGEVHKDDKPVNCHQYDGLVELATICALCNDSALDYNEAKGVYEKVGEATETALTCLVEKMNVFDTELKGLSKIERANACNSVIKQLMKKEFTLEFSRDRKSMSVYCTPNKPSRTSMSKMFVKGAPEGVIDRCTHIRVGSTKVPMTSGVKQKIMSVIREWGSGSDTLRCLALATHDNPLRREEMHLEDSANFIKYETNLTFVGCVGMLDPPRIEVASSVKLCRQAGIRVIMITGDNKGTAVAICRRIGIFGQDEDVTSKAFTGREFDELNPSAQRDACLNARCFARVEPSHKSKIVEFLQSFDEITAMTGDGVNDAPALKKAEIGIAMGSGTAVAKTASEMVLADDNFSTIVAAVEEGRAIYNNMKQFIRYLISSNVGEVVCIFLTAALGFPEALIPVQLLWVNLVTDGLPATALGFNPPDLDIMNKPPRNPKEPLISGWLFFRYLAIGCYVGAATVGAAAWWFIAADGGPRVSFYQLSHFLQCKEDNPDFEGVDCAIFESPYPMTMALSVLVTIEMCNALNSLSENQSLLRMPPWENIWLVGSICLSMSLHFLILYVEPLPLIFQITPLNVTQWLMVLKISLPVILMDETLKFVARNYLEPAILE

SEQ ID NO: 4310 - protein, 802 aa, Homo sapiens
MYRSTKGASKARRDQINAEIRNLKELLPLAEADKVRLSYLHIMSLACIYTRKGVFFAGGTPLAGPTGLLSAQELEDIVAALPGFLLVFTAEGKLLYLSESVSEHLGHSMVDLVAQGDSIYDIIDPADHLTVRQQLTLPSALDTDRLFRCRFNTSKSLRRQSAGNKLVLIRGRFHAHPPGAYWAGNPVFTAFCAPLEPRPRPGPGPGPGPASLFLAMFQSRHAKDLALLDISESVLIYLGFERSELLCKSWYGLLHPEDLAHASAQHYRLLAESGDIQAEMVVRLQAKTGGWAWIYCLLYSEGPEGPITANNYPISDMEAWSLRQQLNSEDTQAAYVLGTPTMLPSFPENILSQEECSSTNPLFTAALGAPRSTSFPSAPELSVVSASEELPRPSKELDFSYLTFPSGPEPSLQAELSKDLVCTPPYTPHQPGGCAFLFSLHEPFQTHLPTPSSTLQEQLTPSTATFSDQLTPSSATFPDPLTSPLQGQLTETSVRSYEDQLTPCTSTFPDQLLPSTATFPEPLGSPAHEQLTPPSTAFQAHLDSPSQTFPEQLSPNPTKTYFAQEGCSFLYEKLPPSPSSPGNGDCTLLALAQLRGPLSVDVPLVPEGLLTPEASPVKQSFFHYSEKEQNEIDRLIQQISQLAQGMDRPFSAEAGTGGLEPLGGLEPLDSNLSLSGAGPPVLSLDLKPWKCQELDFLADPDNMFLEETPVEDIFMDLSTPDPSEEWGSGDPEAEGPGGAPSPCNNLSPEDHSFLEDLATYETAFETGVSAFPYDGFTDELHQLQSQVQDSFHEDGSGGEPTF

SEQ ID NO: 4311 - protein, 147 aa, Homo sapiens
MTAIRLREFIERRPVIPPSIFIAHQGRDVQGYYPGQLARLHFDHSAKRAPRPLIDLTIPPKTKYHYQPQLDQQTLIRYICLRRHSKPAEPWYKETTYRRDYSLPFYEIDWNQKLATVSLNPRPLNSLPELYCCEERSSFERNAFKLK

SEQ ID NO: 4312 - protein, 289 aa, Homo sapiens
MILLQHAVLPPPKQPSPSPPMSVATRSTGTLQLPPQKPFGQEASLPLAGEEELSKGGEQDCALEELCKPLYCKLCNVTLNSAQQAQAHYQGKNHGKKLRNYYAANSCPPPARMSNVVEPAATPVVPVPPQMGSFKPGGRVILATENDYCKLCDASFSSPAVAQAHYQGKNHAKRLRLAEAQSNSFSESSELGQRRARKEGNEFKMMPNRRNMYTVQNNSAGPYFNPRSRQRIPRDLAMCVTPSGQFYCSMCNVGAGEEMEFRQHLESKQHKSKVSEQRYRNEMENLGYV

SEQ ID NO: 4313 - protein, 926 aa, Homo sapiens
MKKTRSTTLRRAWPSSDFSDRASDRMRSRSEKDYRLHKRFPAAFAPQASRGYMTSGDVSPISMSPISQSQFIPLGEILCLAISAMNSARKPVTQEALMEHLTTCFPGVPTPSQEILRHTLNTLVRERKIYPTPDGYFIVTPQTYFITPSLIRTNSKWYHLDERIPDRSQCTSPQPGTITPSASGCVRERTLPRNHCDSCHCCREDVHSTHAPTLQRKSAKDCKDPYCPPSLCQVPPTEKSKSTVNFSYKTETLSKPKDSEKQSKKFGLKLFRLSFKKDKTKQLANFSAQFPPEEWPLRDEDTPATIPREVEMEIIRRINPDLTVENVMRHTALMKKLEEEKAQRSKAGSSAHHSGRSKKSRTHRKSHGKSRSHSKTRVSKGDPSDGSHLDIPAEREYDFCDPLTRVPREGCFIIEHKGDNFIMHSNTNVLESHFPMTPEWDVSGELAKRRTEMPFPEPSRGSSHSKVHRSHSHTQDRRSRNERSNKAKERSRSMDNSKGPLGASSLGTPEDLAEGCSQDDQTPSQSYIDDSTLRPAQTVSLQRAHISSTSYKEVCIPEIVSGSKEPSSACSLLEPGKPPESLPSYGELNSCPTKTATDDYFQCNTSSETVLTAPSPLGKNKEDHDTLTLAEGVKKLSPSDRQVPHSSREPVGHKEESPKGPGGGPAASGGVAEGIANGRLVQHHGAEPSSLDKRKEIFSKDTLFKPLHSTLSVNSYHKSSLSLLKSHPKTPADTLPGRCEKLEPSLGTSAAQAMPASQRQQESGGNQEASFDYYNVSDDDDSEEGANKNTEEEKNREDVGTMQWLLEREKERDLQRKFEKNLTLLAPKETDSSSNQRATHSARLDSMDSSSITVDSGFNSPRTRESLASNTSSIVESNRRQNPALSPAHGGAGPAFNFRASAEPPTNEAEKLQKPSNCLQASVTSV

SEQ ID NO: 4314 - protein, 4024 aa, Homo sapiens
MSSEQDKSASKEKSKKPVRFLPQLSMEKLASKEKFKAPARALPQLSMVSTKPHWQQAAPSFHLSVKQDDESPEPFSVKNEQSHAEYMERFGKKGKLPHQVDDSYVGPSTSKSKGKSPHKERENFRSTLVNVIMQQDADLDSAVPDGSTIPKPTASAIEKDILRYYYYIHHGIDTDHVAPMEDSWLEHVLDLVPQHLKVFTDSIVTLSDEMREDYLLSVRKSIVDFVLKDPREKGDDKKTDELPAHRAEMEILPKPWRKSFLAASSYIRDHLNAMNPTMLAVLDLWHTNFKKLRLVDIKEFHNCQDALELSSFQNIIMRHMDSAKETLLKMWFPEVQNIYYQGNKKKQLPTGDSSAKLESFFNCAAALMTLQLQDLTLVSMQDFTDLIAQPPDSVRAFEHPGFIMRLILDNDTIKFEPELSDYIDIFLNVYDVMIKAVSFVPRVETKLYSKWESKSKPTTLKPIILNEIVDAHKEKIKEVIMKESVAPTEHLRLYDKYDFLITRKAERDVDNFLAENHSYEKIIDEICKYQKLIEEIQYTSIKTIRLGMFEMHCEELIRALVKRADIICGKLLAKMFRDHQEVNTRLCDEFERIAEKALSTPPNTAELMEMKAYIQKVEVTDMIELEQRLVDSKNCLAFLIEYVNFSPADMRLNNSVFQWYGRMGEIFEEHRKIIKEKIEQYQEGLKLRCERFVEELESYAKQSEEFYSFGDLQDVQRYLKKAQILNGKLDLAADKIEQFNAEEEAFGWLPSVYPQRKKIQDGLNPYLRLYETAVEFSSNYRAWTEGPYHKVNPDQVEADIGNYWRGLYKLEKTFHDSPYALAMTKKVRSKVEDFKQHIPLIQVICNPGLRPRHWEAMSAIVGYPLQPSDDSTVSSFLDMNLEPYIDRFEGISEAASKEYSLEKAMEKMITEWDAVEFVIHSYRETGTFILASVDEIQMLLDDHIIKTQTMRGSPFIKPYEKQMREWEGKLLLLQEILDEWLKVQATWLYLEPIFSSPDIMSQMPEEGRRFTAVDKTWRDIMRSVMQDKHVLTVVTIDRMLERLKKSNELLELILKGLNEYLEKKRLFFPRFFFLSNDELLEILSETKDPTRVQPHLKKCFEGIAKVEFTETLDITHMKSSEGEVVELIEIISTAKARGQVEKWLVELERVMINSIHKVTGDATFAYTKYERINWVRDWPGQTVLCVSQIFWTKEVQTAIPMGIKALEQYLKTCNRQIDDIVTLVRGKLSMQNRVTLGALVVLDVHARDVLSSLVKKNISDDSDFEWLSQLRYYWQENHLETKMINAGLRYGYEYLGNSPRLVITPLTDRCYRTLFGALHLHLGGAPEGPAGTGKTETTKDLAKAVAKQCVVFNCSDGLDYLALGKFFKGLLSCGAWACFDEFNRIDLEVLSVVAQQILTIQRGINAGADILMFEGTELKLDPTCAVFITMNPGYAGRSELPDNLKALFRTVAMMVPDYAMIAEIVLYSCGFVTARPLSVKIVATYRLCSEQLSSQHHYDYGMRAVKSVLTAAGNLKLKYPNENEEILLLRSIIDVNLPKFLSHDLPLFEGITSDLFPGVKLPKPDYNDLLAAIKDNCASMNLQMTAFFSEKILQVYEMMIVRHGFMIVGEPFGGKTSAYRVLAGALNDICEKGLMEENKVQITVLNPKSVTMGQLYGQFDSVSHEWSDGVLAVSFRAFASSVTPDRKWLIFDGPVDAVWIENMNTVLDDNKKLCLMSGEIIQMSPQMNLIFEPMDLEVASPATVSRCGMIYMEPHMLGWRPLMLSWVNLLPASVSVIQKEFIMGLFDRMVPVSVEFIRKHTKELSPTSDTNLVRSLMNLIDCFMDDFADEVKLKERNDRETYSLLEGIFLFSLIWSVGASCTDDDRLKFNKILRELMESPISDRTRNTFKLQSGTEQTSSKALTVPFPEKGTIYDYQFVTEGIGKWEPWIKKLKEAPPIPKDVMFNEIIVPTLDTIRYSALMELLTTHQKPSIFVGPTGTGKSVYITNFLLNQLNKEIYKPLLINFSAQTTAAQTQNIVMSKLDKRRKGVFGPPLGKRMVVFVDDVNMPAREVYGAQPPIELLRQWLDHWNWYDLKDCSMIKLVDIQIMCAMGPPGGGRNPVTPRYMRHFNIITINEFSDKSMYTIFSRILTWHLEICYKFPDEFLDLTTQIVNGTMTLYKEAMKNLLPTPAKSHYLFNLRDFSRVIQGVCLSRPETTETTEVIKRLWVHEVLRVYYDRLLDNTDRSWLINYIQEILRNYMYEDFHELFQRLDFDNDGMVEADDLRSLMFCDFHDPKREDTNYREIADVDNLRMIVEIHLEEYNNISKKPMNLVLFRFAIEHISRISRILKQPRSHALLVGVGGSGRQSVTRLAAHMADYSVFQVEISKGYDTTEWHEDLKVILRKCAEGEMQGVFLFTDTQIKEESFLEDVSNLLNAGEIPNLFALDEKQEICDKMRQLDRQRDKTKQTDGSPIALFNMFIDHCRSQLHVVLAMSPIGDAFRNRLRKFPALVNCCTIDWFQSWPEDALQAVASRFLEEIEMSEEIRDGCIDMCKSFHTSTIDLSKSFFVELQRYNYVTPTSYLELISTFKLLLEKKRSEVMKMKKRYEVGLEKLDSASSQVATMQMELEALHPQLKVASKEVDEMMIMIEKESVEVAKTEKIVKADETIANEQAMASKAIKDECDADLAGALPILESALAALDTLTAQDITVVKSMKSPPAGVKLVMEAICILKGIKADKIPDPTGSGKKIEDFWGPAKRLLGDMRFLQSLHEYDKDNIPPAYMNIIRKNYIPNPDFVPEKIRNASTAAEGLCKWVIAMDSYDKVAKIVAPKKIKLAAAEGELKIAMDGLRKKQAALKEVQDKLARLQDTLELNKQKKADLENQVDLCSKKLERAEQLIGGLGGEKTRWSHTALELGQLYINLTGDILISSGVVAYLGAFTSTYRQNQTKEWTTLCKGRDIPCSDDCSLMGTLGEAVTIRTWNIAGLPSDSFSIDNGIIIMNARRWPLMIDPQSQANKWIKNMEKANSLYVIKLSEPDYVRTLENCIQFGTPVLLENVGEELDPILEPLLLKQTFKQGGSTCIRLGDSTIEYAPDFRFYITTKLRNPHYLPETSVKVTLLNFMITPEGMQDQLLGIVVAQERPDLEEEKQALILQGAENKRQLKEIEDKILEVLSSSEGNILEDETAIKILSSSKALANEISQKQEVAEETEKKIDTTRMGYRPIAIHSSILFFSLADLANIEPMYQYSLTWFINLFILSIENSEKSEILAKRLQILKDHFTYSLYVNVCRSLFEKDKLLFSFCLTINLLLHERAINKAEWRFLLTGGIGLDNPYANLCTWLPQKSWDEICRLDDLPAFKTIRREFMRLKDGWKKVYDSLEPHHEVFPEEWEDKANEFQRMLIIRCLRPDKVIPMLQEFIINRLGRAFIEPPPFDLAKAFGDSNCCAPLIFVLSPGADPMAALLKFADDQGYGGSKLSSLSLGQGQGPIAMKMLEKAVKEGTWVVLQNCHLATSWMPTLEKVCEELSPESTHPDFRMWLTSYPSPNFPVSVLQNGVKMTNEAPKGLRANIIRSYLMDPISDPEFFGSCKKPEEFKKLLYGLCFFHALVQERRKFGPLGWNIPYEFNETDLRISVQQLHMFLNQYEELPYEALRYMTGECNYGGRVTDDWDRRTLRSILNKFFNPELVENSDYKFDSSGIYFVPPSGDHKSYIEYTKTLPLTPAPEIFGMNANADITKDQSETQLLFDNILLTQSRSAGAGAKSSDEVVNEVASDILGKLPNNFDIEAAMRRYPTTYTQSMNTVLVQEMGRFNKLLKTIRDSCVNIQKAIKGLAVMSTDLEEVVSSILNVKIPEMWMGKSYPSLKPLGSYVNDFLARLKFLQQWYEVGPPPVFWLSGFFFTQAFLTGAQQNYARKYTIPIDLLGFDYEVMEDKEYKHPPEDGVFIHGLFLDGASWNRKIKKLAESHPKILYDTVPVMWLKPCKRADIPKRPSYVAPLYKTSERRGVLSTTGHSTNFVIAMTLPSDQPKEHWIGRGVALLCQLNS

SEQ ID NO: 4315 - protein, 643 aa, Homo sapiens [sequence omitted]

SEQ ID NO: 4316 - protein, 644 aa, Homo sapiens
MEQLSDEEIDHGAEEDSDKEDQDLDKMFGAWLGELDKLTQSLDSDKPMEPVKRSPLRQETNMANFSYRFSIYNLNEALNQGETVDLDALMADLCSIEQELSSIGSGNSKRQITETKATQKLPVSRHTLKHGTLKGLSSSSNRIAKPSHASYSLDDVTAQLEQASLSMDEAAQQSVLEDTKPLVTNQHRRTASAGTVSDAEVHSISNSSHSSITSAASSMDSLDIDKVTRPQELDLTHQGQPITEHAISLRCSSKQAKRHIDFTEEQAELTPHSYLDRETSLLLRNIAGKPSHLLTKEEQAAKLKAEKIRVALEKIKEAQVKKLVIRVHMSDDSSKTMMVDERQTVRQVLDNLMDKSHCGYSLDWSLVETVSELQMERIFEDHENLVENLLNWTRDSQNKLIFMERIEKYALFKNPQNYLLGKKETAEMADRNKEVLLEECFCGSSVTVPEIEGVLWLKDDGKKSWKKRYFLLRASGIYYVPKGKAKVSRDLVCFLQLDHVNVYYGQDYRNKYKAPTDYCLVLKHPQIQKKSQYIKYLCCDDVRTLHQWVNGIRIAKYGKQLYMNYQEALKRTESAYDWTSLSSSSIKSGSSSSSIPESQSNHSNQSDSGVSDTQPAGHVRSQSIVSSVFSEAWKRGTQLEESSK

SEQ ID NO: 4317 - protein, 130 aa, Homo sapiens
MARRHCFSYWLLVCWLVVTVAEGQEEVFTPPGDSQNNADATDCQIFTLTPPPAPRSPVTRAQPITKTPRCPFHFFPRRPRIHFRFPNRPFVPSRCNHRFPFQPFYWPHRYLTYRYFPRRRLQRGSSSEES

SEQ ID NO: 4318 - protein, 194 aa, Homo sapiens
MSALWLLLGLLALMDLSESSNWGCYGNIQSLDTPGASCGIGRRHGLNYCGVRASERLAEIDMPYLLKYQPMMQTIGQKYCMDPAVIAGVLSRKSPGDKILVNMGDRTSMVQDPGSQAPTSWISESQVSQTTEVLTTRIKEIQRRFPTWTPDQYLRGGLCAYSGGAGYVRSSQDLSCDFCNDVLARAKYLKRHGF

SEQ ID NO: 4319 - protein, 1344 aa, Homo sapiens
MTRKRTYWVPNSSGGLVNRGIDIGDDMVSGLIYKTYTLQDGPWSQQERNPEAPGRAAVPPWGKYDAALRTMIPFRPKPRFPAPQPLDNAGLFSYLTVSWLTPLMIQSLRSRLDENTIPPLSVHDASDKNVQRLHRLWEEEVSRRGIEKASVLLVMLRFQRTRLIFDALLGICFCIASVLGPILIIPKILEYSEEQLGNVVHGVGLCFALFLSECVKSLSFSSSWIINQRTAIRFRAAVSSFAFEKLIQFKSVIHITSGEAISFFTGDVNYLFEGVCYGPLVLITCASLVICSISSYFIIGYTAFIAILCYLLVFPLAVFMTRMAVKAQHHTSEVSDQRIRVTSEVLTCIKLIKMYTWEKPFAKIIEDLRRKERKLLEKCGLVQSLTSITLFIIPTVATAVWVLIHTSLKLKLTASMAFSMLASLNLLRLSVFFVPIAVKGLTNSKSAVMRFKKFFLQESPVFYVQTLQDPSKALVFEEATLSWQQTCPGIVNGALELERNGHASEGMTRPRDALGPEEEGNSLGPELHKINLVVSKGMMLGVCGNTGSGKSSLLSAILEEMHLLEGSVGVQGSLAYVPQQAWIVSGNIRENILMGGAYDKARYLQVLHCCSLNRDLELLPFGDMTEIGERGLNLSGGQKQRISLARAVYSDRQIYLLDDPLSAVDAHVGKHIFEECIKKTLRGKTVVLVTHQLQYLEFCGQIILLENGKICENGTHSELMQKKGKYAQLIQKMHKEATSDMLQDTAKIAEKPKVESQALATSLEESLNGNAVPEHQLTQEEEMEEGSLSWRVYHHYIQAAGGYMVSCIIFFFVVLIVFLTIFSFWWLSYWLEQGSGTNSSRESNGTMADLGNIADNPQLSFYQLVYGLNALLLICVGVCSSGIFTKVTRKASTALHNKLFNKVFRCPMSFFDTIPIGRLLNCFAGDLEQLDQLLPIFSEQFLVLSLMVIAVLLIVSVLSPYILLMGAIIMVICFIYYMMFKKAIGVFKRLENYSRSPLFSHILNSLQGLSSIHVYGKTEDFISQFKRLTDAQNNYLLLFLSSTRWMALRLEIMTNLVTLAVALFVAFGISSTPYSFKVMAVNIVLQLASSFQATARIGLETEAQFTAVERILQYMKMCVSEAPLHMEGTSCPQGWPQHGEIIFQDYHMKYRDNTPTVLHGINLTIRGHEVVGIVGRTGSGKSSLGMALFRLVEPMAGRILIDGVDICSIGLEDLRSKLSVIPQDPVLLSGTIRFNLDPFDRHTDQQIWDALERTFLTKAIILIDEATASIDMETDTLIQRTIREAFQGCTVLVIAHRVTTVLNCDHILVMGNGKVVEFDRPEVLRKKPGSLFAALMATATSSLR

SEQ ID NO: 4320 - protein, 1300 aa, Homo sapiens
MGTGPAQTPRSTRAGPEPSPAPPGPGDTGDSDVTQEGSGPAGIRGGETVIRAGMGDSPGRGAPERRHKAQPGRARKYEWRPEGPTSMGSLGQREDLQDEDRNSAFTWKVQANNRAYNGQFKEKVILCWQRKKYKTNVIRTAKYNFYSFLPLNLYEQFHRVSNLFFLIIIILQSIPDISTLPWFSLSTPMVCLLFIRATRDLVDDMGRHKSDRAINNRPCQILMGKSFKQKKWQDLCVGDVVCLRKDNIVPADMLLLASTEPSSLCYVETVDIDGETNLKFRQALMVTHKELATIKKMASFQGTVTCEAPNSRMHHFVGCLEWNDKKYSLDIGNLLLRGCRIRNTDTCYGLVIYAGFDTKIMKNCGKIHLKRTKLDLLMNKLVVVIFISVVLVCLVLAFGFGFSVKEFKDHHYYLSGVHGSSVAAESFFVFWSFLILLSVTIPMSMFILSEFIYLGNSVFIDWDVQMYYKPQDVPAKARSTSLNDHLGQVEYIFSDKTGTLTQNILTFNKCCISGRVYGPDSEATTRPKENPYLWNKFADGKLLFHNAALLHLVRTNGDEAVREFWRLLAICHTVMVRESPRERPDQLLYQAASPDEGALVTAARNFGYVFLSRTQDTVTIMELGEERVYQVLAIMDFNSTRKRMSVLVRKPEGAICLYTKGADTVIFERLHRRGAMEFATEEALAAFAQETLRTLCLAYREVAEDIYEDWQQRHQEASLLLQNRAQALQQLLGATAIEDRLQDGVPETIKCLKKSNIKIWVLTGDKQETAVNIGFACELLSENMLILEEKEISRILETYWENSNNLLTRESLSQVKLALVINGDFLDKLLVSLRKEPRALAQNVNMDEAWQELGQSRRDFLYARRLSLLCRRFGLPLAAPPAQDSRARRSSEVLQERAFVDLASKCQAVICCRVTPKQKALIVALVKKYHQVVTLAIGDGANDINMIKTADVGVGLAGQEGMQAVQNSDFVLGQFCFLQRLLLVHGRWSYVRICKFLRYFFYKSMASMMVQVWFACYNGFTGQPLYEGWFLALFNLLYSTLPVLYIGLFEQDVSAEQSLEKPELYVVGQKDELFNYWVFVQAIAHGVTTSLVNFFMTLWISRDTAGPASFSDHQSFAVVVALSCLLSITMEVILIIKYWTALCVATILLSLGFYAIMTTTTQSFWLFRVSPTTFPFLYADLSVMSSPSILLVVLLSVSINTFPVLALRVIFPALKELRAKEEKVEEGPSEEIFTMEPLPHVHRESRARRSSYAFSHREGYANLITQGTILRRGPGVSSDIASESLDPSDEEAASSPKESQ

SEQ ID NO: 4321 - protein, 697 aa, Homo sapiens
MAWREKSKKRLNMTSFNIAQGIHAFDYHSRLNLIATAGINNKVCLWNPYVVSKPVGVLWGHSASVIAVQFFVERKQLFSFSKDKVLRLWDIQHQLSIQRIACSFPKSQDFRCLFHFDEAHGRLFISFNNQLALLAMKSEASKRVKSHEKAVTCVLYNSILKQVISSDTGSTVSFWMIDTGQKIKQFTGCHGNAEISTMALDANETRLLTGSTDGTVKIWDFNGYCHHTLNVGQDGAVDISQILILKKKILVTGWERAITVFRPQNFNQFFIQPEEWKGGIQHHDDILCAAFLPPQTLVTGSYDGEIVLWNNSTENAHHVLHPDYQRLLKSKLDTKPQKLLSAGRSQPSHPMADHSTTGVRNFEIDTEGKNAVMRLCFLKARKNTAVTGGANLVSCGGSGYVRFWDIYKKQLLAEFLAHSGVGSIIMSTDKMNRYLTTGDLDGWLKIWNIEEYCLNSSKNKITKAPTLIRSFQPHEDRISSLEMCEPGGQLLIISSSADCSICVTGVCNAPVWIFGQAKHWHIENCLFLPKRDTNLVESEIQKEISLFSKEESCLDPTEHSLLNKKNKDDSTYNVRPSEDINLDIKYKERSTCMKETQKPYYGEVIKKSFSTFRSLNIGALEELPEVNKPAFLLDPEKYFRKEPEEERPQILEAPSLFKTLKAVFDEKNLFPKEILHHERKAKQLCQEKSCEVKKNKK

SEQ ID NO: 4322 - protein, 511 aa, Homo sapiens
MKLSKKDRGEDEESDSAKKKLDWSCSLLVASLAGAFGSSFLYGYNLSVVNAPTPYIKAFYNESWERRHGRPIDPDTLTLLWSVTVSIFAIGGLVGTLIVKMIGKVLGRKHTLLANNGFAISAALLMACSLQAGAFEMLIVGRFIMGIDGGVALSVLPMYLSEISPKEIRGSLGQVTAIFICIGVFTGQLLGLPELLGKESTWPYLFGVIVVPAVVQLLSLPFLPDSPRYLLLEKHNEARAVKAFQTFLGKADVSQEVEEVLAESRVQRSIRLVSVLELLRAPYVRWQVVTVIVTMACYQLCGLNAIWFYTNSIFGKAGIPPAKIPYVTLSTGGIETLAAVFSGLVIEHLGRRPLLIGGFGLMGLFFGTLTITLTLQDHAPWVPYLSIVGILAIIASFCSGPGGIPFILTGEFFQQSQRPAAFIIAGTVNWLSNFAVGLLFPFIQKSLDTYCFLVFATICITGAIYLYFVLPETKNRTYAEISQAFSKRNKAYPPEEKIDSAVTDGKINGRP

SEQ ID NO: 4323 - protein, 1168 aa, Homo sapiens
MSWFSGLLVPKVDERKTAWGERNGQKRSRRRGTRAGGFCTPRYMSCLRDAEPPSPTPAGPPRCPWQDDAFIRRGGPGKGKELGLRAVALGFEDTEVTTTAGGTAEVAPDAVPRSGRSCWRRLVQVFQSKQFRSAKLERLYQRYFFQMNQSSLTLLMAVLVLLTAVLLAFHAAPARPQPAYVALLACAAALFVGLMVVCNRHSFRQDSMWVVSYVVLGILAAVQVGGALAADPRSPSAGLWCPVFFVYIAYTLLPIRMRAAVLSGLGLSTLHLILAWQLNRGDAFLWKQLGANVLLFLCTNVIGICTHYPAEVSQRQAFQETRGYIQARLHLQHENRQQERLLLSVLPQHVAMEMKEDINTKKEDMMFHKIYIQKHDNVSILFADIEGFTSLASQCTAQELVMTLNELFARFDKLAAENHCLRIKILGDCYYCVSGLPEARADHAHCCVEMGVDMIEAISLVREVTGVNVNMRVGIHSGRVHCGVLGLRKWQFDVWSNDVTLANHMEAGGRAGRIHITRATLQYLNGDYEVEPGRGGERNAYLKEQHIETFLILGASQKRKEEKAMLAKLQRTRANSMEGLMPRWVPDRAFSRTKDSKAFRQMGIDDSSKDNRGTQDALNPEDEVDEFLSRAIDARSIDQLRKDHVRRFLLTFQREDLEKKYSRKVDPRFGAYVACALLVFCFICFIQLLIFPHSTLMLGIYASIFLLLLITVLICAVYSCGSLFPKALQRLSRSIVRSRAHSTAVGIFSVLLVFTSAIANMFTCNHTPIRSCAARMLNLTPADITACHLQQLNYSLGLDAPLCEGTMPTCSFPEYFIGNMLLSLLASSVFLHISSIGKLAMIFVLGLIYLVLLLLGPPATIFDNYDLLLGVHGLASSNETFDGLDCPAAGRVALKYMTPVILLVFALALYLHAQQVESTARLDFLWKLQATGEKEEMEELQAYNRRLLHNILPKDVAAHFLARERRNDELYYQSCECVAVMFASIANFSEFYVELEANNEGVECLRLLNEIIADFDEIISEERFRQLEKIKTIGSTYMAASGLNASTYDQVGRSHITALADYAMRLMEQMKHINEHSFNNFQMKIGLNMGPVVAGVIGARKPQYDIWGNTVNVSSRMDSTGVPDRIQVTTDLYQVLAAKGYQLECRGVVKVKGKGEMTTYFLNGGPSS

SEQ ID NO: 4324 - protein, 1391 aa, Homo sapiens
MNSPVDPGARQALRKKPPERTPEDLNTIYSYLHGMEILSNLREHQLRLMSARARYERYSGNQVLFCSETIARCWYILLSGSVLVKGSMVLPPCSFGKQFGGKRGCDCLVLEPSEMIVVENAKDNEDSILQREIPARQSRRRFRKINYKGERQTITDDVEVNSYLSLPADLTKMHLTENPHPQVTHVSSSQSGCSIASDSGSSSLSDIYQATESEVGDVDLTRLPEGPVDSEDDEEEDEEIDRTDPLQGRDLVRECLEKEPADKTDDDIEQLLEFMHQLPAFANMTMSVRRELCSVMIFEVVEQAGAIILEDGQELDSWYVILNGTVEISHPDGKVENLFMGNSFGITPTLDKQYMHGIVRTKVDDCQFVCIAQQDYWRILNHVEKNTHKVEEEGEIVMVHEHRELDRSGTRKGHIVIKATPERLIMHLIEEHSIVDPTYIEDFLLTYRTFLESPLDVGIKLLEWFKIDSLRDKVTRIVLLWVNNHFNDFEGDPAMTRFLEEFEKNLEDTKMNGHLRLLNIACAAKAKWRQVVLQKASRESPLQFSLNGGSEKGFGIFVEGVEPGSKAADSGLKRGDQIMEVNGQNFENITFMKAVEILRNNTHLALTVKTNIFVFKELLFRTEQEKSGVPHIPKIAEKKSNRHSIQHVPGDIEQTSQEKGSKKVKANTVSGGRNKIRKILDKTRFSILPPKLFSDGGLSQSQDDSIVGTRHCRHSLAIMPIPGTLSSSSPDLLQPTTSMLDFSNPSDIPDQVIRVFKVDQQSCYIIISKDTTAKEVVFHAVHEFGLTGASDTYSLCEVSVTPEGVIKQRRLPDQFSKLADRIQLNGRYYLKNNMETETLCSDEDAQELVKESQLSMLQLSTIEVATQLSMRDFDLFRNIEPTEYIDDLFKLNSKTGNTHLKRFEDIVNQETFWVASEILTEANQLKRMKIIKHFIKIALHCRECKNFNSMFAIISGLNLASVARLRGTWEKLPSKYEKHLQDLQDIFDPSRNMAKYRNILSSQSMQPPIIPLFPVVKKDMTFLHEGNDSKVDGLVNFEKLRMISKEIRQVVRMTSANMDPAMMFRQRSLSQGSTNSNMLDVQGGAHKKRARRSSLLNAKKLYEDAQMARKVKQYLSSLDVETDEEKFQMMSLQWEPAYGTLTKNLSEKRSAKSSEMSPVPMRSAGQTTKAHLHQPHRVSQVLQVPAVNLHPIRKKGQTKDPALNTSLPQKVLGTTEEISGKKHTEDTISVASSLHSSPPASPQGSPHKVGSIISDHSSKISGQSCPGIGGAYLQKKILQITRSTAKRTDSTEKATEENRDRTSCENTTRKRMTSPFRRLRERMLSRERLVNSQKEDTDHNQATESCEKVKDVGSNIKDEKGSAIFNSNSQGNSNTLNCFYTRFKSKRRKTL

SEQ ID NO: 4325 - protein, 591 aa, Homo sapiens
MWERLNCAAEDFYSRLLQKFNEEKKGIRKDPFLYEADVQVQLISKGQPNPLKNILNENDIVFIVEKVPLEKEETSHIEELQSEETAISDFSTGENVGPLALPVGKARQLIGLYTMAHNPNMTHLKINLPVTALPPLWVRCDSSDPEGTCWLGAELITTNNSITGIVLYVVSCKADKNYSVNLENLKNLHKKRHHLSTVTSKGFAQYELFKSSALDDTITASQTAIALDISWSPVDEILQIPPLSSTATLNIKVESGEPRGPLNHLYRELKFLLVLADGLRTGVTEWLEPLEAKSAVELVQEFLNDLNKLDGFGDSTKKDTEVETLKHDTAAVDRSVKRLFKVRSDLDFAEQLWCKMSSSVISYQDLVKCFTLIIQSLQRGDIQPWLHSGSNSLLSKLIHQSYHGTMDTVSLSGTIPVQMLLEIGLDKLKKDYISFFIGQELASLNHLEYFIAPSVDIQEQVYRVQKLHHILEILVSCMPFIKSQHELLFSLTQICIKYYKQNPLDEQHIFQLPVRPTAVKNLYQSEKPQKWRVEIYSGQKKIKTVWQLSDSSPIDHLNFHKPDFSELTLNGSLEERIFFTNMVTCSQVHFK

SEQ ID NO: 4326 - protein, 381 aa, Homo sapiens
MAPGEKESGEGPAKSALRKIRTATLVISLARGWQQWANENSIRQAQEPTGWLPGGTQDSPQAPKPITPPTSHQKAQSAPKSPPRLPEGHGDGQSSEKAPEVSHIKKKEVSKTVVSKTYERGGDVSHLSHRYERDAGVLEPGQPENDIDRILHSHGSPTRRRKCANLVSELTKGWRVMEQEEPTWRSDSVDTEDSGYGGEAEERPEQDGVQVAVVRIKRPLPSQVNRFTEKLNCKAQQKYSPVGNLKGRWQQWADEHIQSQKLNPFSEEFDYELAMSTRLHKGDEGYGRPKEGTKTAERAKRAEEHIYREMMDMCFIICTMARHRRDGKIQVTFGDLFDRYVRISDKVVGILMRARKHGLVDFEGEMLWQGRDDHVVITLLK

SEQ ID NO: 4327 - protein, 533 aa, Homo sapiens
MTFSEILDRVGSMGHFQFLHVAILGLPILNMANHNLLQIFTAATPVHHCRPPHNASTGPWVLPMGPNGKPERCLRFVHPPNASLPNDTQRAMEPCLDGWVYNSTKDSIVTEWDLVCNSNKLKEMAQSIFMAGILIGGLVLGDLSDRFGRRPILTCSYLLLAASGSGAAFSPTFPIYMVFRFLCGFGISGITLSTVILNVEWVPTRMRAIMSTALGYCYTFGQFILPGLAYAIPQWRWLQLTVSIPFFVFFLSSWWTPESIRWLVLSGKSSKALKILRRVAVFNGKKEEGERLSLEELKLNLQKEISLAKAKYTASDLFRIPMLRRMTFCLSLAWFATGFAYYSLAMGVEEFGVNLYILQIIFGGVDVPAKFITILSLSYLGRHTTQAAALLLAGGAILALTFVPLDLQTVRTVLAVFGKGCLSSSFSCLFLYTSELYPTVIRQTGMGVSNLWTRVGSMVSPLVKITGEVQPFIPNIIYGITALLGGSAALFLPETLNQPLPETIEDLENWSVTASGPISAPPWGSRSGPRAFP

SEQ ID NO: 4328 - protein, 218 aa, Homo sapiens
MPMILGYWDIRGLAHAIRLLLEYTDSSYEEKKYTMGDAPDYDRSQWLNEKFKLGLDFPNLPYLIDGAHKITQSNAILCYIARKHNLCGETEEEKIRVDILENQTMDNHMQLGMICYNPEFEKLKPKYLEELPEKLKLYSEFLGKRPWFAGNKITFVDFLVYDVLDLHRIFEPKCLDAFPNLKDFISRFEGLEKISAYMKSSRFLPRPVFSKMAVWGNK

SEQ ID NO: 4329 - protein, 301 aa, Homo sapiens
MEFVLLGFSDIPNLHWMLFSIFLLMYLMILMCNGIIILLIKIHPALQTPMYFFLSNFSLLEICYVTIIIPRMLMDIWTQKGNISLFACATQMCFFLMLGGTECLLLTVMAYDRYVAICKPLQYPLVMNHKVCIQLIIASWTITIPVVIGETCQIFLLPFCGTNTINHFFCDIPPILKLACGNIFVNEITVHVVAVVFITVPFLLIVVSYGKIISNILKLSSARGKAKAFSTCSSHLIVVILFFGAGTITYLQPKPHQFQRMGKLISLFYTILIPTLNPIIYTLRNKDIMVALRKLLAKLLT

SEQ ID NO: 4330 - protein, 2390 aa, Homo sapiens
MSSTLSPTDFDSLEIQGQYSDINNRWDLPDSDWDNDSSSARLFERSRIKALADEREAVQKKTFTKWVNSHLARVTCRVGDLYSDLRDGRNLLRLLEVLSGEILPKPTKGRMRIHCLENVDKALQFLKEQKVHLENMGSHDIVDGNHRLTLGLVWTIILRFQIQDISVETEDNKEKKSAKDALLLWCQMKTAGYPNVNVHNFTTSWRDGLAFNAIVHKHRPDLLDFESLKKCNAHYNLQNAFNLAEKELGLTKLLDPEDVNVDQPDEKSIITYVATYYHYFSKMKALAVEGKRIGKVLDHAMEAERLVEKYESLASELLQWIEQTIVTLNDRQLANSLSGVQNQLQSFNSYRTVEKPPKFTEKGNLEVLLFTIQSKLRANNQKVYTPREGRLISDINKAWERLEKAEHERELALRTELIRQEKLEQLAARFDRKAAMRETWLSENQRLVSQDNFGLELAAVEAAVRKHEAIETDIVAYSGRVQAVDAVAAELAAERYHDIKRIAARQHNVARLWDFLRQMVAARRERLLLNLELQKVFQDLLYLMDWMEEMKGRLQSQDLGRHLAGVEDLLQLHELVEADIAVQAERVRAVSASALRFCNPGKEYRPCDPQLVSERVAKLEQSYEALCELAAARRARLEESRRLWRFLWEVGEAEAWVREQQHLLASADTGRDLTGALRLLNKHTALRGEMSGRLGPLKLTLEQGQQLVAEGHPGASQASARAAELQAQWERLEALAEERAQRLAQAASLYQFQADANDMEAWLVDALRLVSSPELGHDEFSTQALARQHRALEEEIRSHRPTLDALREQAAALPPTLSRTPEVQSRVPTLERHYEELQARAGERARALEAALALYTMLSEAGACGLWVEEKEQWLNGLALPERLEDLEVVQQRFETLEPEMNTLAAQITAVNDIAEQLLKANPPGKDRIVNTQEQLNHRWQQFRRLADGKKAALTSALSIQNYHLECTETQAWMREKTKVIESTQGLGNDLAGVLALQRKLAGTERDLEAIAARVGELTREANALAAGHPAQAVAINARLREVQTGWEDLRATMRRREESLGEARRLQDFLRSLDDFQAWLGRTQTAVASEEGPATLPEAEALLAQHAALRGEVERAQSEYSRLRALGEEVTRDQADPQCLFLRQRLEALGTGWEELGRMWESRQGRLAQAHGFQGFLRDARQAEGVLSSQEYVLSHTEMPGTLQAADAAIKKLEDFMSTMDANGERIHGLLEAGRQLVSEGNIHADKIREKADSIERRHKKNQDAAQQFLGRLRDNREQQHFLQDCHELKLWIDEKMLTAQDVSYDEARNLHTKWQKHQAFMAELAANKDWLDKVDKEGRELTLEKPELKALVSEKLRDLHRRWDELETTTQAKARSLFDANRAELFAQSCCALESWLESLQAQLHSDDYGKDLTSVNILLKKQQMLEWEMAVREKEVEAIQAQAKALAQEDQGAGEVERTSRAVEEKFRALCQPMRERCRRLQASREQHQFHRDVEDEILWVTERLPMASSMEHGKDLPSVQLLMKKNQTLQKEIQGHEPRIADLRERQRALGAAAAGPELAELQEMWKRLGHELELRGKRLEDALRAQQFYRDAAEAEAWMGEQELHMMGQEKAKDELSAQAEVKKHQVLEQALADYAQTIHQLAASSQDMIDHEHPESTRISIRQAQVDKLYAGLKELAGERRERLQEHLRLCQLRRELDDLEQWIQEREVVAASHELGQDYEHVTMLRDKFREFSRDTSTIGQERVDSANALANGLIAGGHAARATVAEWKDSLNEAWADLLELLDTRGQVLAAAYELQRFLHGARQALARVQHKQQQLPDGTGRDLNAAEALQRRHCAYEHDIQALSPQVQQVQDDGHRLQKAYAGDKAEEIGRHMQAVAEAWAQLQGSSAARRQLLLDTTDKFRFFKAVRELMLWMDEVNLQMDAQERPRDVSSADLVIKNQQGIKAEIEARADRFSSCIDMGKELLARSHYAAEEISEKLSQLQARRQETAEKWQEKMDWLQLVLEVLVFGRDAGMAEAWLCSQEPLVRSAELGCTVDEVESLIKRHEAFQKSAVAWEERFCALEKLTALEEREKERKRKREEEERRKQPPAPEPTASVPPGDLVGGQTASDTTWDGTQPRPPPSTQAPSVNGVCTDGEPSQPLLGQQRLEHSSFPEGPGPGSGDEANGPRGERQTRTRGPAPSAMPQSRSTESAHAATLPPRGPEPSAQEQMEGMLCRKQEMEAFGKKAANRSWQNVYCVLRRGSLGFYKDAKAASAGVPYHGEVPVSLARAQGSVAFDYRKRKHVFKLGLQDGKEYLFQAKDEAEMSSWLRVVNAAIATASSASGEPEEPVVPSTTRGMTRAMTMPPVSPVGAEGPVVLRSKDGREREREKRFSFFKKNK

SEQ ID NO: 4331 - protein, 808 aa, Homo sapiens
MLHDARDRQKFFSDVQYLRDMQHKVDSEYQACLRRQEYRRDPNEKKRDQFWGQETSFERSRFSSRSSSKQSSSEEDALTEPRSSIKISAFKCDSKLPAIDQTSVKQKHKSTMTVRKAEKVDPSEPSPADQAPMVLLRKRKPNLRRFTVSPESHSPRASGDRSRQKQQWPAKVPVPRGADQVVQQEGLMCNTKLKRPNQERRNLVPSSQPMTENAPDRAKKGDPSAPSQSELHPALSQAFQGKNSPQVLSEFSGPPLTPTTVGGPRKASFRFRDEDFYSILSLNSRRESDDTEEETQSEECLWVGVRSPCSPSHHKRSRFGGTSTPQAKNKNFEENAENCRGHSSRRSEPSHGSLRISNAMEPATERPSAGQRLSQDPGLPDRESATEKDRGGSENAKKSPLSWDTKSEPRQEVGVNAENVWSDCISVEHRPGTHDSEGYWKDYLNSSQNSLDYFISGRPISPRSSVNSSYNPPASFMHSALRDDIPVDLSMSSTSVHSSDSEGNSGFHVCQPLSPIRNRTPFASAENHNYFPVNSAHEFAVREAEDTTLTSQPQGAPLYTDLLLNPQGNLSLVDSSSSSPSRMNSEGHLHVSGSLQENTPFTFFAVSHFPNQNDNGSRMAASGFTDEKETSKIKADPEKLKKLQESLLEEDSEEEGDLCRICQIAGGSPSNPLLEPCGCVGSLQFVHQECLKKWLKVKITSGADLGAVKTCEMCKQGLLVDLGDFNMIEFYQKHQQSQAQNELMNSGLYLVLLLHLYEQRFAELMRLNHNQVERERLSRNYPQPRTEENENSELGDGNEGSISQSQVV

SEQ ID NO: 4332 - protein, 1381 aa, Homo sapiens
MASPRASRWPPPLLLLLLPLLLLPPAAPGTRDPPPSPARRALSLAPLAGAGLELQLERRPEREPPPTPPRERRGPATPGPSYRAPEPGAATQRGPSGRAPRGGSADAAWKHWPESNTEAHVENITFYQNQEDFSTVSSKEGVMVQTSGKSHAASDAPENLTLLAETADARGRSGSSSRTNFTILPVGYSLEIATALTSQSGNLASESLHLPSSSSEFDERIAAFQTKSGTASEMGTERAMGLSEEWTVHSQEATTSAWSPSFLPALEMGELTTPSRKRNSSGPDLSWLHFYRTAASSPLLDLSSSSESTEKLNNSTGLQSSSVSQTKTMHVATVFTDGGPRTLRSLTVSLGPVSKTEGFPKDSRIATTSSSVLLSPSAVESRRNSRVTGNPGDEEFIEPSTENEFGLTSLRWQNDSPTFGEHQLASSSEVQNGSPMSQTETVSRSVAPMRGGEITAHWLLTNSTTSADVTGSSASYPEGVNASVLTQFSDSTVQSGGSHTALGDRSYSESSSTSSSESLNSSAPRGERSIAGISYGQVRGTAIEQRTSSDHTDHTYLSSTFTKGERALLSITDNSSSSDIVESSTSYIKISNSSHSEYSSFFHAQTERSNISSYDGEYAQPSTESPVLHTSNLPSYTPTINMPNTSVVLDTDAEFVSDSSSSSSSSSSSSSSGPPLPLPSVSQSHHLFSSILPSTRASVHLLKSTSDASTPWSSSPSPLPVSLTTSTSAPLSVSQTTLPQSSSTPVLPRARETPVTSFQTSTMTSFMTMLHSSQTADLKSQSTPHQEKVITESKSPSLVSLPTESTKAVTTNSPLPPSLTESSTEQTLPATSTNLAQMSPTFTTTILKTSQPLMTTPGTLSSTASLVTGPIAVQTTAGKQLSLTHPEILVPQISTEGGISTERNRVIVDATTGLIPLTSVPTSAKEMTTKLGVTAEYSPASRSLGTSPSPQTTVVSTAEDLAPKSATFAVQSSTQSPTTVSSSASVNSCAVNPCLHNGECVADNTSRGYHCRCPPSWQGDDCSVDVNECLSNPCPSTAMCNNTQGSFICKCPVGYQLEKGICNLVRTFVTEFKLKRTFLNTTVEKHSDLQEVENEITKTLNMCFSALPSYIRSTVHASRESNAVVISLQTTFSLASNVTLFDLADRMQKCVNSCKSSAEVCQLLGSQRRIFRAGSLCKRKSPECDKDTSICTDLDGVALCQCKSGYFQFNKMDHSCRACEDGYRLENETCMSCPFGLGGLNCGNPYQLITVVIAAAGGGLLLILGIALIVTCCRKNKNDISKLIFKSGDFQMSPYAEYPKNPRSQEWGREAIEMHENGSTKNLLQMTDVYYSPTSVRNPELERNGLYPAYTGLPGSRHSCIFPGQYNPSFISDESRRRDYF

SEQ ID NO: 4333 - protein, 598 aa, Homo sapiens
MKPTGTDPRILSIAAEVAKSPEQNVPVILLKLKEIINITPLGSSELKKIKQDIYCYDLIQYCLLVLSQDYSRIQGGWTTISQLTQILSHCCVGLEPGEDAEEFYNELLPSAAENFLVLGRQLQTCFINAAKAEEKDELLHFFQIVTDSLFWLLGGHVELIQNVLQSDHFLHLLQADNVQIGSAVMMMLQNILQINSGDLLRIGRKALYSILDEVIFKLFSTPSPVIRSTATKLLLLMAESHQEILILLRQSTCYKGLRRLLSKQETGTEFSQELRQLVGLLSPMVYQEVEEQKLHQAACLIQAYWKGFQTRKRLKKLPSAVIALQRSFRSKRSKMLLEINRQKEEEDLKLQLQLQRQRAMRLSRELQLSMLEIVHPGQVEKHYREMEEKSALIIQKHWRGYRERKNFHQQRQSLIEYKAAVTLQRAALKFLAKCRKKKKLFAPWRGLQELTDARRVELKKRVDDYVRRHLGSPMSDVVSRELHAQAQERLQHYFMGRALEERAQQHREALIAQISTNVEQLMKAPSLKEAEGKEPELFLSRSRPVAAKAKQAHLTTLKHIQAPWWKKLGEESGDEIDVPKDELSIELENLFIGGTKPP

SEQ ID NO: 4334 - protein, 548 aa, Homo sapiens
MDELFPLIFPAEPAQASGPYVEIIEQPKQRGMRFRYKCEGRSAGSIPGERSTDTTKTHPTIKINGYTGPGTVRISLVTKDPPHRPHPHELVGKDCRDGFYEAELCPDRCIHSFQNLGIQCVKKRDLEQAISQRIQTNNNPFQEEQRGDYDLNAVRLCFQVTVRDPSGRPLRLPPVLSHPIFDNRAPNTAELKICRVNRNSGSCLGGDEIFLLCDKVQKEDIEVYFTGPGWEARGSFSQADVHRQVAIVFRTPPYADPSLQAPVRVSMQLRRPSDRELSEPMEFQYLPDTDDRHRIEEKRKRTYETFKSIMKKSPFSGPTDPRPPPRRIAVPSRSSASVPKPAPQPYPFTSSLSTINYDEFPTMVFPSGQISQASALAPAPPQVLPQAPAPAPAPAMVSALAQAPAPVPVLAPGPPQAVAPPAPKPTQAGEGTLSEALLQLQFDDEDLGALLGNSTDPAVFTDLASVDNSEFQQLLNQGIPVAPHTTEPMLMEYPEAITRLVTGAQRPPDPAPAPLGAPGLPNGLLSGDEDFSSIADMDFSALLSQISS

SEQ ID NO: 4335 - protein, 1441 aa, Homo sapiens
MATAAAAAAVMAPPGCPGSCPNFAVVCSFLERYGPLLDLPELPFPELERVLQAPPPDVGNGEVPKELVELHLKLMRKIGKSVTADRWEKYLIKICQEFNSTWAWEMEKKGYLEMSVECKLALLKYLCECQFDDNLKFKNIINEEDADTMRLQPIGRDKDGLMYWYQLDQDHNVRMYIEEQDDQDGSSWKCIVRNRNELAETLALLKAQIDPVLLKNSSQQDNSSRESPSLEDEETKKEEETPKQEEQKESEKMKSEEQPMDLENRSTANVLEETTVKKEKEDEKELVKLPVIVKLEKPLPENEEKKIIKEESDSFKENVKPIKVEVKECRADPKDTKSSMEKPVAQEPERIEFGGNIKSSHEITEKSTEETEKLKNDQQAKIPLKKREIKLSDDFDSPVKGPLCKSVTPTKEFLKDEIKQEEETCKRISTITALGHEGKQLVNGEVSDERVAPNFKTEPIETKFYETKEESYSPSKDRNIITEGNGTESLNSVITSMKTGELEKETAPLRKDADSSISVLEIHSQKAQIEEPDPPEMETSLDSSEMAKDLSSKTALSSTESCTMKGEEKSPKTKKDKRPPILECLEKLEKSKKTFLDKDAQRLSPIPEEVPKSTLESEKPGSPEAAETSPPSNIIDHCEKLASEKEVVECQSTSTVGGQSVKKVDLETLKEDSEFTKVEMDNLDNAQTSGIEEPSETKGSMQKSKFKYKLVPEEETTASENTEITSERQKEGIKLTIRISSRKKKPDSPPKVLEPENKQEKTEKEEEKTNVGRTLRRSPRISRPTAKVAEIRDQKADKKRGEGEDEVEEESTALQKTDKKEILKKSEKDTNSKVSKVKPKGKVRWTGSRTRGRWKYSSNDESEGSGSEKSSAASEEEEEKESEEAILADDDEPCKKCGLPNHPELILLCDSCDSGYHTACLRPPLMIIPDGEWFCPPCQHKLLCEKLEEQLQDLDVALKKKERAERRKERLVYVGISIENIIPPQEPDFSEDQEEKKKDSKKSKANLLERRSTRTRKCISYRFDEFDEAIDEAIEDDIKEADGGGVGRGKDISTITGHRGKDISTILDEERKENKRPQRAAAARRKKRRRLNDLDSDSNLDEEESEDEFKISDGSQDEFVVSDENPDESEEDPPSNDDSDTDFCSRRLRRHPSRPMRQSRRLRRKTPKKKYSDDDEEEESEENSRDSESDFSDDFSDDFVETRRRRSRRNQKRQINYKEDSESDGSQKSLRRGKEIRRVHKRRLSSSESEESYLSKNSEDDELAKESKRSVRKRGRSTDEYSEADEEEEEEEGKPSRKRLHRIETDEEESCDNAHGDANQPARDSQPRVLPSEQESTKKPYRIESDEEEDFENVGKVGSPLDYSLVDLPSTNGQSPGKAIENLIGKPTEKSQTPKDNSTASASLASNGTSGGQEAGAPEEEEDELLRVTDLVDYVCNSEQL

SEQ ID NO: 4336 - protein, 529 aa, Homo sapiens
MRRNSSLSFQMERPLEEQVQSKWSSSQGRTGTGGSDVLQMQNSEHHGQSIKTQTDSISLEDVAVNFTLEEWALLDPGQRNIYRDVMRATFKNLACIGEKWKDQDIEDEHKNQGRNLRSPMVEALCENKEDCPCGKSTSQIPDLNTNLETPTGLKPCDCSVCGEVFMHQVSLNRHMRSHTEQKPNECHEYGEKPHKCKECGKTFTRSSSIRTHERIHTGEKPYECKECGKAFAFLFSFRNHIRIHTGETPYECKECGKAFRYLTALRRHEKNHTGEKPYKCKQCGKAFIYYQPFLTHERTHTGEKPYECKQCGKAFSCPTYLRSHEKTHTGEKPFVCRECGRAFFSHSSLRKHVKTHTGVQPYTCKKCGEAFKSSSSCEVHERTHFGEKPYECKQCGKAFNSSSYLQLHERVHTGEKTYECKECGKAFLYSTHFRIHERTHTREKPYECKQCGRVFIYFSHLRRHERSHTGVKPCECKQCGKAFTCLNSLKVHKRIHTGERPFQCRQCGKAFSYSKSLHVHERTHSRQKP

SEQ ID NO: 4337 - protein, 886 aa, Homo sapiens
MRGFNLLLFWGCCVMHSWEGHIRPTRKPNTKGNNCRDSTLCPAYATCTNTVDSYYCACKQGFLSSNGQNHFKDPGVRCKDIDECSQSPQPCGPNSSCKNLSGRYKCSCLDGFSSPTGNDWVPGKPGNFSCTDINECLTSSVCPEHSDCVNSMGSYSCSCQVGFISRNSTCEDVDECADPRACPEHATCNNTVGNYSCFCNPGFESSSGHLSFQGLKASCEDIDECTEMCPINSTCTNTPGSYFCTCHPGFAPSNGQLNFTDQGVECRDIDECRQDPSTCGPNSICTNALGSYSCGCIAGFHPNPEGSQKDGNFSCQRVLFKCKEDVIPDNKQIQQCQEGTAVKPAYVSFCAQINNIFSVLDKVCENKTTVVSLKNTTESFVPVLKQISTWTKFTKEETSSLATVFLESVESMTLASFWKPSANITPAVRTEYLDIESKVINKECSEENVTLDLVAKGDKMKIGCSTIEESESTETTGVAFVSFVGMESVLNERFFKDHQAPLTTSEIKLKMNSRVVGGIMTGEKKDGFSDPIIYTLENIQPKQKFERPICVSWSTDVKGGRWTSFGCVILEASETYTICSCNQMANLAVIMASGELTMDFSLYIISHVGIIISLVCLVLAIATFLLCRSIRNHNTYLHLHLCVCLLLAKTLFLAGIHKTDNKMGCAIIAGFLHYLFLACFFWMLVEAVILFLMVRNLKVVNYFSSRNIKMLHICAFGYGLPMLVVVISASVQPQGYGMHNRCWLNTETGFIWSFLGPVCTVIVINSLLLTWTLWILRQRLSSVNAEVSTLKDTRLLTFKAFAQLFILGCSWVLGIFQIGPVAGVMAYLFTIINSLQGAFIFLIHCLLNGQVREEYKRWITGKTKPSSQSQTSRILLSSMPSASKTG

SEQ ID NO: 4338 - protein, 361 aa, Homo sapiens
MQEKDASSQGFLPHFQHFATQAIHVGQDPEQWTSRAVVPPISLSTTFKQGAPGQHSGFEYSRSGNPTRNCLEKAVAALDGAKYCLAFASGLAATVTITHLLKAGDQIICMDDVYGGTNRYFRQVASEFGLKISFVDCSKIKLLEAAITPETKRPLALGADISMYSATKYMNGHSDVVMGLVSVNCESLHNRLRFLQNSLGAVPSPIDCYLCNRGLKTLHVRMEKHFKNGMAVAQFLESNPWVEKVIYPGLPSHPQHELVKRQCTGCTGMVTFYIKGTLQHAEIFLKNLKLFTLAESLGGFESLAELPAIMTHASVLKNDRDVLGISDTLIRLSVGLEDEEDLLEDLDQALKAAHPPSGSHS

SEQ ID NO: 4339 - protein, 1327 aa, Homo sapiens
MAASRRSQHHHHHHQQQLQPAPGASAPPPPPPPPLSPGLAPGTTPASPTASGLAPFASPRHGLALPEGDGSRDPPDRPRSPDPVDGTSCCSTTSTICTVAAAPVVPAVSTSSAAGVAPNPAGSGSNNSPSSSSSPTSSSSSSPSSPGSSLAESPEAAGVSSTAPLGPGAAGPGTGVPAVSGALRELLEACRNGDVSRVKRLVDAANVNAKDMAGRKSSPLHFAAGFGRKDVVEHLLQMGANVHARDDGGLIPLHNACSFGHAEVVSLLLCQGADPNARDNWNYTPLHEAAIKGKIDVCIVLLQHGADPNIRNTDGKSALDLADPSAKAVLTGEYKKDELLEAARSGNEEKLMALLTPLNVNCHASDGRKSTPLHLAAGYNRVRIVQLLLQHGADVHAKDKGGLVPLHNACSYGHYEVTELLLKHGACVNAMDLWQFTPLHEAASKNRVEVCSLLLSHGADPTLVNCHGKSAVDMAPTPELRERLTYEFKGHSLLQAAREADLAKVKKTLALEIINFKQPQSHETALHCAVASLHPKRKQVTELLLRKGANVNEKNKDFMTPLHVAAERAHNDVMEVLHKHGAKMNALDTLGQTALHRAALAGHLQTCRLLLSYGSDPSIISLQGFTAAQMGNEAVQQILSESTPIRTSDVDYRLLEASKAGDLETVKQLCSSQNVNCRDLEGRHSTPLHFAAGYNRVSVVEYLLHHGADVHAKDKGGLVPLHNACSYGHYEVAELLVRHGASVNVADLWKFTPLHEAAAKGKYEICKLLLKHGADPTKKNRDGNTPLDLVKEGDTDIQDLLRGDAALLDAAKKGCLARVQKLCTPENINCRDTQGRNSTPLHLAAGYNNLEVAEYLLEHGADVNAQDKGGLIPLHNAASYGHVDIAALLIKYNTCVNATDKWAFTPLHEAAQKGRTQLCALLLAHGADPTMKNQEGQTPLDLATADDIRALLIDAMPPEALPTCFKPQATVVSASLISPASTPSCLSAASSIDNLTGPLAELAVGGASNAGDGAAGTERKEGEVAGLDMNISQFLKSLGLEHLRDIFETEQITLDVLADMGHEELKEIGINAYGHRHKLIKGVERLLGGQQGTNPYLTFHCVNQGTILLDLAPEDKEYQSVEEEMQSTIREHRDGGNAGGIFNRYNVIRIQKVVNKKLRERFCHRQKEVSEENHNHHNERMLFHGSPFINAIIHKGFDERHAYIGGMFGAGIYFAENSSKSNQYVYGIGGGTGCPTHKDRSCYICHRQMLFCRVTLGKSFLQFSTMKMAHAPPGHHSVIGRPSVNGLAYAEYVIYRGEQAYPEYLITYQIMKPEAPSQTATAAEQKT

SEQ ID NO: 4340 - protein, 541 aa, Homo sapiens
MKSYTPYFILLWSAVGIAKAAKIIIVPPIMFESHMYIFKTLASALHERGHHTVFLLSEGRDIAPSNHYSLQRYPGIFNSTTSDAFLQSKMRNIFSGRLTAIELFDILDHYTKNCDLMVGNHALIQGLKKEKFDLLLVDPNDMCGFVIAHLLGVKYAVFSTGLWYPAEVGAPAPLAYVPEFNSLLTDRMNLLQRMKNTGVYLISRLGVSFLVLPKYERIMQKYNLLPEKSMYDLVHGSSLWMLCTDVALEFPRPTLPNVVYVGGILTKPASPLPEDLQRWVNGANEHGFVLVSFGAGVKYLSEDIANKLAGALGRLPQKVIWRFSGPKPKNLGNNTKLIEWLPQNDLLGHSKIKAFLSHGGLNSIFETIYHGVPVVGIPLFGDHYDTMTRVQAKGMGILLEWKTVTEKELYEALVKVINNPSYRQRAQKLSEIHKDQPGHPVNRTIYWIDYIIRHNGAHHLRAAVHQISFCQYFLLDIAFVLLLGAALLYFLLSWVTKFIYRKIKSLWSRNKHSTVNGHYHNGILNGKYKRNGHIKHEKKVK

SEQ ID NO: 4341 - protein, 757 aa, Homo sapiens
MSENSSDSDSSCGWTVISHEGSDIEMLNSVTPTDSCEPAPECSSLEQEELQALQIEQGESSQNGTVLMEETAYPALEETSSTIEAEEQKIPEDSIYIGTASDDSDIVTLEPPKLEEIGNQEVVIVEEAQSSEDFNMGSSSSSQYTFCQPETVFSSQPSDDESSSDETSNQPSPAFRRRRARKKTVSASESEDRLVAEQETEPSKELSKRQFSSGLNKCVILALVIAISMGFGHFYGTIQIQKRQQLVRKIHEDELNDMKDYLSQCQQEQESFIDYKSLKENLARCWTLTEAEKMSFETQKTNLATENQYLRVSLEKEEKALSSLQEELNKLREQIRILEDKGTSTELVKENQKLKQHLEEEKQKKHSFLSQRETLLTEAKMLKRELERERLVTTALRGELQQLSGSQLHGKSDSPNVYTEKKEIAILRERLTELERKLTFEQQRSDLWERLYVEAKDQNGKQGTDGKKKGGRGSHRAKNKSKETFLGSVKETFDAMKNSTKEFVRHHKEKIKQAKEAVKENLKKFSDSVKSTFRHFKDTTKNIFDEKGNKRFGATKEAAEKPRTVFSDYLHPQYKAPTENHHNRGPTMQNDGRKEKPVHFKEFRKNTNSKKCSPGHDCRENSHSFRKACSGVFDCAQQESMSLFNTVVNPIRMDEFRQIIQRYMLKELDTFCHWNELDQFINKFFLNGVFIHDQKLFTDFVNDVKDYLRNMKEYEVDNDGVFEKLDEYIYRHFFGHTFSPPYGPRSVYIKPCHYSSL

SEQ ID NO: 4342 - protein, 299 aa, Homo sapiens
MLGWVQRVLPQPPGTPRKTKMQEEEEVEPEPEMEAEVEPEPNPEEAETESESMPPEESFKEEEVAVADPSPQETKEAALTSTISLRAQGAEISEMNSPSRRVLTWLMKGVEKVIPQPVHSITEDPAQILGHGSTGDTGCTDEPNEALEAQDTRPGLRLLLWLEQNLERVLPQPPKSSEVWRDEPAVATGAASDPAPPGRPQEMGPKLQARETPSLPTPIPLQPKEEPKEAPAPEPQPGSQAQTSSLPPTRDPARLVAWVLHRLEMALPQPVLHGKIGEQEPDSPGICDVQTRVMGAGGL

SEQ ID NO: 4343 - protein, 744 aa, Homo sapiens
MQAVVPLNKMTAISPEPQTLASTEQNEVPRVVTSGEQEAILRGNAADAESFRQRFRWFCYSEVAGPRKALSQLWELCNQWLRPDIHTKEQILELLVFEQFLTILPGEIRIWVKSQHPESSEEVVTLIEDLTQMLEEKDPVSQDSTVSQEENSKEDKMVTVCPNTESCESITLKDVAVNFSRGEWKKLEPFQKELYKEVLLENLRNLEFLDFPVSKLELISQLKWVELPWLLEEVSKSSRLDESALDKIIERCLRDDDHGLMEESQQYCGSSEEDHGNQGNSKGRVAQNKTLGSGSRGKKFDPDKSPFGHNFKETSDLIKHLRVYLRKKSRRYNESKKPFSFHSDLVLNRKEKTAGEKSRKSNDGGKVLSHSSALTEHQKRQKIHLGDRSQKCSKCGIIFIRRSTLSRRKTPMCEKCRKDSCQEAALNKDEGNESGEKTHKCSKCGKAFGYSASLTKHRRIHTGEKPYMCNECGKAFSDSSSLTPHHRTHSGEKPFKCDDCGKGFTLSAHLIKHQRIHTGEKPYKCKDCGRPFSDSSSLIQHQRIHTGEKPYTCSNCGKSFSHSSSLSKHQRIHTGEKPYKCGECGKAFRQNSCLTRHQRIHTGEKPYLCNDCGMTFSHFTSVIYHQRLHSGEKPYKCNQCEKAFPTHSLLSRHQRIHTGVKPYKCKECGKSFSQSSSLNEHHRIHTGEKPYECNYCGATFSRSSILVEHLKIHTGRREYECNECEKTFKSNSGLIRHRGFHSAE

SEQ ID NO: 4344 - protein, 1228 aa, Homo sapiens
MIWPKVECCHFKTAVEAPLGMKLDKKMEVFIPLSTSAASSGPWAHSLFAFIPSWPKKNLFKRESPITHRLYGDISREVQGTSENGVIFQKCALVSGSSEAQTARIWLLVNNTKTTSSANLSELLLLDSIAGLTIWDSVGNRTSEGFQAFSKKFLQVGDAFAVSYAATLQAGDLGNGESLKLPAQLTFQSSSRNRTQLKVLFSITAEENVTVLPHHGLHAAGFFIAFLLSLVLTWAALFLMVRYQCLKGNMLTRHRVWQYESKLEPLPFTSADGVNEDLSLNDQMIDILSSEDPGSMLQALEELEIATLNRADADLEACRTQISKDIIALLLKNLTSSGHLSPQVERKMSAVFKKQFLLLENEIQEEYDRKMVALTAECDLETRKKMENQYQREMMAMEEAEELLKRAGERSAVECSNLLRTLHGLEQEHLRKSLALQQEEDFAKAHRQLAVFQRNELHSIFFTQIKSAIFKGELKPEAAKMLLQNYSKIQENVEELMDFFQASKRYHLSKRFGHREYLVQNLQSSETRVQGLLSTAAAQLTHLIQKHERAGYLDEDQMEMLLERAQTEVFSIKQKLDNDLKQEKKKLHQKLITKRRRELLQKHREQRREQASVGEAFRTVEDAGQYLHQKRSLMEEHGATLEELQERLDQAALDDLRTLTLSLFEKATDELRRLQNSAMTQELLKRGVPWLFLQQILEEHGKEMAARAEQLEGEERDRDQEGVQSVRQRLKDDAPEAVTEEQAELRRWEHLIFMKLCSSVFSLSEEELLRMRQEVHGCFAQMDRSLALPKIRARVLLQQFQTAWREAEFVKLDQAVAAPELQQQSKVRKSRSKSKSKGELLKKCIEDKIHLCEEQASEDLVEKVRGELLRERVQRMEAQEGGFAQSLVALQFQKASRVTETLSAYTALLSIQDLLLEELSASEMLTKSACTQILESHSRELQELERKLEDQLVQQEAAQQQQALASWQQWVADGPGILNEPGEVDSERQVSTVLHQALSKSQTLLEQHQQCLREEQQNSVVLEDLLENMEADTFATLCSQELRLASYLARMAMVPGATLRRLLSVVLPTASQPQLLALLDSATERHVDHAAESDGGAEQADVGRRRKHQSWWQALDGKLRGDLISRGLEKMLWARKRKQSILKKTCLPLRERMIFSGKGSWPHLSLEPIGELAPVPIVGAETIDLLNTGEKLFIFRNPKEPEISLHVPPRKKKNFLNAKKAMRALGMD

SEQ ID NO: 4345 - protein, 3267 aa, Homo sapiens
MQKARGTRGEDAGTRAPPSPGVPPKRAKVGAGGGAPVAVAGAPVFLRPLKNAAVCAGSDVRLRVVVSGTPQPSLRWFRDGQLLPAPAPEPSCLWLRRCGAQDAGVYSCMAQNERGRASCEAVLTVLEVGDSETAEDDISDVQGTQRLELRDDGAFSTPTGGSDTLVGTSLDTPPTSVTGTSEEQVSWWGSGQTVLEQEAGSGGGTRRLPGSPRQAQATGAGPRHLGVEPLVRASRANLVGASWGSEDSLSVASDLYGSAFSLYRGRALSIHVSVPQSGLRREEPDLQPQLASEAPRRPAQPPPSKSALLPPPSPRVGKRSPPGPPAQPAATPTSPHRRTQEPVLPEDTTTEEKRGKKSKSSGPSLAGTAESRPQTPLSEASGRLSALGRSPRLVRAGSRILDKLQFFEERRRSLERSDSPPAPLRPWVPLRKARSLEQPKSERGAPWGTPGASQEELRAPGSVAERRRLFQQKAASLDERTRQRSPASDLELRFAQELGRIRRSTSREELVRSHESLRATLQRAPSPREPGEPPLFSRPSTPKTSRAVSPAAAQPPSPSSAEKPGDEPGRPRSRGPAGRTEPGEGPQQEVRRRDQFPLTRSRAIQECRSPVPPPAADPPEARTKAPPGRKREPPAQAVRFLPWATPGLEGAAVPQTLEKNRAGPEAEKRLRRGPEEDGPWGPWDRRGARSQGKGRRARPTSPELESSDDSYVSAGEEPLEAPVFEIPLQNVVVAPGADVLLKCIITANPPPQVSWHKDGSALRSEGRLLLRAEGERHTLLLREARAADAGSYMATATNELGQATCAASLTVRPGGSTSPFSSPITSDEEYLSPPEEFPEPGETWPRTPTMKPSPSQNRRSSDTGSKAPPTFKVSLMDQSVREGQDVIMSIRVQGEPKPVVSWLRNRQPVRPDQRRFAEEAEGGLCRLRILAAERGDAGFYTCKAVNEYGARQCEARLEVRAHPESRSLAVLAPLQDVDVGAGEMALFECLVAGPTDVEVDWLCRGRLLQPALLKCKMHFDGRKCKLLLTSVHEDDSGVYTCKLSTAKDELTCSARLTVRPSLAPLFTRLLEDVEVLEGRAARFDCKISGTPPPVVTWTHFGCPMEESENLRLRQDGGLHSLHIAHVGSEDEGLYAVSAVNTHGQAHCSAQLYVEEPRTAASGPSSKLEKMPSIPEEPEQGELERLSIPDFLRPLQDLEVGLAKEAMLECQVTGLPYPTISWFHNGHRIQSSDDRRMTQYRDVHRLVFPAVGPQHAGVYKSVIANKLGKAACYAHLYVTDVVPGPPDGAPQVVAVTGRMVTLTWNPPRSLDMAIDPDSLTYTVQHQVLGSDQWTALVTGLREPGWAATGLRKGVQHIFRVLSTTVKSSSKPSPPSEPVQLLEHGPTLEEAPAMLDKPDIVYVVEGQPASVTVTFNHVEAQVVWRSCRGALLEARAGVYELSQPDDDQYCLRICRVSRRDMGALTCTARNRHGTQTCSVTLELAEAPRFESIMEDVEVGAGETARFAVVVEGKPLPDIMWYKDEVLLTESSHVSFVYEENECSLVVLSTGAQDGGVYTCTAQNLAGEVSCKAELAVHSAQTAMEVEGVGEDEDHRGRRLSDFYDIHQEIGRGAFSYLRRIVERSSGLEFAAKFIPSQAKPKASARREARLLARLQHDCVLYFHEAFERRRGLVIVTELCTEELLERIARKPTVCESEIRAYMRQVLEGIHYLHQSHVLHLDVKPENLLVWDGAAGEQQVRICDFGNAQELTPGEPQYCQYGTPEFVAPEIVNQSPVSGVTDIWPVGVVAFLCLTGISPFVGENDRTTLMNIRNYNVAFEETTFLSLSREARGFLIKVLVQDRLRPTAEETLEHPWFKTQAKGAEVSTDHLKLFLSRRRWQRSQISYKCHLVLRPIPELLRAPPERVWVTMPRRPPPSGGLSSSSDSEEEELEELPSVPRPLQPEFSGSRVSLTDIPTEDEALGTPETGAATPMDWQEQGRAPSQDQEAPSPEALPSPGQEPAAGASPRRGELRRGSSAESALPRAGPRELGRGLHKAASVELPQRRSPSPGATRLARGGLGEGEYAQRLQALRQRLLRGGPEDGKVSGLRGPLLESLGGRARDPRMARAASSEAAPHHQPPLENRGLQKSSSFSQGEAEPRGRHRRAGAPLEIPVARLGARRLQESPSLSALSEAQPSSPARPSAPKPSTPKSAEPSATTPSDAPQPPAPQPAQDKAPEPRPEPVRASKPAPPPQALQTLALPLTPYAQIIQSLQLSGHAQGPSQGPAAPPSEPKPHAAVFARVASPPPGAPEKRVPSAGGPPVLAEKARVPTVPPRPGSSLSSSIENLESEAVFEAKFKRSRESPLSLGLRLLSRSRSEERGPFRGAEEEDGIYRPSPAGTPLELVRRPERSRSVQDLRAVGEPGLVRRLSLSLSQRLRRTPPAQRHPAWEARGGDGESSEGGSSARGSPVLAMRRRLSFTLERLSSRLQRSGSSEDSGGASGRSTPLFGRLRRATSEGESLRRLGLPHNQLAAQAGATTPSAESLGSEASATSGSSAPGESRSRLRWGFSRPRKDKGLSPPNLSASVQEELGHQYVRSESDFPPVFHIKLKDQVLLEGEAATLLCLPAACPAPHISWMKDKKSLRSEPSVIIVSCKDGRQLLSIPRAGKRHAGLYECSATNVLGSITSSCTVAVARVPGKLAPPEVPQTYQDTALVLWKPGDSRAPCTYTLERRVDGESVWHPVSSGIPDCYYNVTHLPVGVTVRFRVACANRAGQGPFSNSSEKVFVRGTQDSSAVPSAAHQEAPVTSRPARARPPDSPTSLAPPLAPAAPTPPSVTVSPSSPPTPPSQALSSLKAVGPPPQTPPRRHRGLQAARPAEPTLPSTHVTPSEPKPFVLDTGTPIPASTPQGVKPVSSSTPVYVVTSFVSAPPAPEPPAPEPPPEPTKVTVQSLSPAKEVVSSPGSSPRSSPRPEGTTLRQGPPQKPYTFLEEKARGRFGVVRACRENATGRTFVAKIVPYAAEGKRRVLQEYEVLRTLHHERIMSLHEAYITPRYLVLIAESCGNRELLCGLSDRFRYSEDDVATYMVQLLQGLDYLHGHHVLHLDIKPDNLLLAPDNALKIVDFGSAQPYNPQALRPLGHRTGTLEFMAPEMVKGEPIGSATDIWGAGVLTYIMLSGRSPFYEPDPQETEARIVGGRFDAFQLYPNTSQSATLFLRKVLSVHPWSRPSLQDCLAHPWLQDAYLMKLRRQTLTFTTNRLKEFLGEQRRRRAEAATRHKVLLRSYPGGP

SEQ ID NO: 4346 - protein, 337 aa, Homo sapiens
MGPRARPALLLLMLLQTAVLQGRLLRSHSLHYLFMGASEQDLGLSLFEALGYVDDQLFVFYDHESRRVEPRTPWVSSRISSQMWLQLSQSLKGWDHMFTVDFWTIMENHNHSKESHTLQVILGCEMQEDNSTEGYWKYGYDGQDHLEFCPDTLDWRAAEPRAWPTKLEWERHKIRARQNRAYLERDCPAQLQQLLELGRGVLDQQVPPLVKVTHHVTSSVTTLRCRALNYYPQNITMKWLKDKQPMDAKEFEPKDVLPNGDGTYQGWITLAVPPGEEQRYTCQVEHPGLDQPLIVIWEPSPSGTLVIGVISGIAVFVVILFIGILFIILRKRQGSSF

SEQ ID NO: 4347 - protein, 373 aa, Homo sapiens
MRMEDEDYNTSISYGDEYPDYLDSIVVLEDLSPLEARVTRIFLVVVYSIVCFLGILGNGLVIIIATFKMKKTVNMVWFLNLAVADFLFNVFLPIHITYAAMDYHWVFGTAMCKISNFLLIHNMFTSVFLLTIISSDRCISVLLPVWSQNHRSVRLAYMACMVIWVLAFFLSSPSLVFRDTANLHGKISCFNNFSLSTPGSSSWPTHSQMDPVGYSRHMVVTVTRFLCGFLVPVLIITACYLTIVCKLQRNRLAKTKKPFKIIVTIIITFFLCWCPYHTLNLLELHHTAMPGSVFSLGLPLATALAIANSCMNPILYVFMGQDFKKFKVALFSRLVNALSEDTGHSSYPSHRSFTKMSSMNERTSMNERETGML

SEQ ID NO: 4348 - protein, 669 aa, Homo sapiens
MKIFVGNVDGADTTPEELAALFAPYGTVMSCAVMKQFAFVHMRENAGALRAIEALHGHELRPGRALVVEMSRPRPLNTWKIFVGNVSAACTSQELRSLFERRGRVIECDVVKDYAFVHMEKEADAKAAIAQLNGKEVKGKRINVELSTKGQKKGPGLAVQSGDKTKKPGAGDTAFPGTGGFSATFDYQQAFGNSTGGFDGQARQPTPPFFGRDRSPLRRSPPRASYVAPLTAQPATYRAQPSVSLGAAYRAQPSASLGVGYRTQPMTAQAASYRAQPSVSLGAPYRGQLASPSSQSAAASSLGPYGGAQPSASALSSYGGQAAAASSLNSYGAQGSSLASYGNQPSSYGAQAASSYGVRAAASSYNTQGAASSLGSYGAQAASYGAQSAASSLAYGAQAASYNAQPSASYNAQSAPYAAQQAASYSSQPAAYVAQPATAAAYASQPAAYAAQATTPMAGSYGAQPVVQTQLNSYGAQASMGLSGSYGAQSAAAATGSYGAAAAYGAQPSATLAAPYRTQSSASLAASYAAQQHPQAAASYRGQPGNAYDGAGQPSAAYLSMSQGAVANANSTPPPYERTRLSPPRASYDDPYKKAVAMSKRYGSDRRLAELSDYRRLSESQLSFRRSPTKSSLDYRRLPDAHSDYARYSGSYNDYLRAAQMHSGYQRRM

SEQ ID NO: 4349 - protein, 975 aa, Homo sapiens
MRLGSGTFATCCVAIEVLGIAVFLRGFFPAPVRSSARAEHGAEPPAPEPSAGASSNWTTLPPPLFSKVVIVLIDALRDDFVFGSKGVKFMPYTTYLVEKGASHSFVAEAKPPTVTMPRIKALMTGSLPGFVDVIRNLNSPALLEDSVIRQAKAAGKRIVFYGDETWVKLFPKHFVEYDGTTSFFVSDYTEVDNNVTRHLDKVLKRGDWDILILHYLGLDHIGHISGPNSPLIGQKLSEMDSVLMKIHTSLQSKERETPLPNLLVLCGDHGMSETGSHGASSTEEVNTPLILISSAFERKPGDIRHPKHVQQTDVAATLAIALGLPIPKDSVGSLLFPVVEGRPMREQLRFLHLNTVQLSKLLQENVPSYEKDPGFEQFKMSERLHGNWIRLYLEEKHSEVLFNLGSKVLRQYLDALKTLSLSLSAQVAQYDIYSMMVLTLLLLSVPQALRRKAELEVPLSSPGFSLLFYLVILVLSAVHVIVCTSAESSCYFCGLSWLAAGGVMVLASALLCVIVSVLTNVLVGGNTPRKNPMHPSSRWSELDLLILLGTAGHVLSLGASSFVEEEHQTWYFLVNTLCLALSQETYRNYFLGDDGEPPCGLCVEQGHDGATAAWQDGPGCDVLERDKGHGSPSTSEVLRGREKWMVLASPWLILACCRLLRSLNQTGVQWAHRPDLGHWLTSSDHKAELSVLAALSLLVVFVLVQRGCSPVSKAALALGLLGVYCYRAAIGSVRFPWRPDSKDISKGIIEARFVYVFVLGILFTGTKDLLKSQVIAADFKLKTVGLWEIYSGLVLLAALLFRPHNLPVLAFSLLIQTLMTKFIWKPLRHDAAEITVMHYWFGQAFFYFQGNSNNIATVDISAGFVGLDTYVEIPAVLLTAFGTYAGPVLWASHLVHFLSSETRSGSALSHACFCYALICSIPVFTYIVLVTSLRYHLFIWSVFSPKLLYEGMHLLITAAVCVFFTAMDQTRLTQS

SEQ ID NO: 4350 - protein, 920 aa, Homo sapiens
MNSMNPMKPALPPAPHGDGSFAYESVPWQQSATQPAGSLSVVTTVWGVGNATQSQVLGNPMGPAGSPSGSSMMPGVAGGSSALTSPQCLGQQAFAEGGANKGYVQQGVYSRGGYPGAPGFTTGYAGGPGGLGLPSHAARPSTDFTQAAAAAAVAAAAATATATATATVAALQEKQSQELSQYGAMGAGQSFNSQFLQHGGPRGPSVPAGMNPTGIGGVMGPSGLSPLAMNPTRAAGMTPLYAGQRLPQHGYPGPPQAQPLPRQGVKRTYSEVYPGQQYLQGGQYAPSTAQFAPSPGQPPAPSPSYPGHRLPLQQGMTQSLSVPGPTGLHYKPTEQFNGQGASFNGGSVSYSQPGLSGPTRSIPGYPSSPLPGNPTPPMTPSSSVPYMSPNQEVKSPFLPDLKPNLNSLHSSPSGSGPCDELRLTFPVRDGVVLEPFRLQHNLAVSNHVFQLRDSVYKTLIMRPDLELQFKCYHHEDRQMNTNWPASVQVSVNATPLTIERGDNKTSHKPLYLKHVCQPGRNTIQITVTACCCSHLFVLQLVHRPSVRSVLQGLLKKRLLPAEHCITKIKRNFSSGTIPGTPGPNGEDGVEQTAIKVSLKCPITFRRIQLPARGHDCRHIQCFDLESYLQLNCERGTWRCPVCNKTALLEGLEVDQYMLGILIYIQNSDYEEITIDPTCSWKPVPVKPDMHIKEEPDGPALKRCRTVSPAHVLMPSVMEMIAALGPGAAPFAPLQPPSVPAPSDYPGQGSSFLGPGTFPESFPPTTPSTPTLAEFTPGPPPISYQSDIPSSLLTSEKSTACLPSQMAPAGHLDPTHNPGTPGLHTSNLGAPPGPQLHHSNPPPASRQSLGQASLGPTGELAFSPATGVMGPPSMSGAGEAPEPALDLLPELTNPDELLSYLGPPDLPTNNNDDLLSLFENN

SEQ ID NO: 4351 - protein, 1780 aa, Homo sapiens
MKIFQRKMRYWLLPPFLAIVYFCTIVQGQVAPPTRLRYNVISHDSIQISWKAPRGKFGGYKLLVTPTSGGKTNQLNLQNTATKAIIQGLMPDQNYTVQIIAYNKDKESKPAQGQFRIKDLEKRKDPKPRVKVVDRGNGSRPSSPEEVKFVCQTPAIADIVILVDGSWSIGRFNFRLVRHFLENLVTAFDVGSEKTRIGLAQYSGDPRIEWHLNAFSTKDEVIEAVRNLPYKGGNTLTGLALNYIFENSFKPEAGSRTGVSKIGILITDGKSQDDIIPPSRNLRESGVELFAIGVKNADVNELQEIASEPDSTHVYNVAEFDLMHTVVESLTRTLCSRVEEQDREIKASAHAITGPPTELITSEVTARSFMVNWTHAPGNVEKYRVVYYPTRGGKPDEVVVDGTVSSTVLKNLMSLTEYQIAVFAIYAHTASEGLRGTETTLALPMASDLLLYDVTENSMRVKWDAVPGASGYLILYAPLTEGLAGDEKEMKIGETHTDIELSGLLPNTEYTVTVYAMFGEEASDPVTGQETTLALSPPRNLRISNVGSNSARLTWDPTSRQINGYRIVYNNADGTEINEVEVDPITTFPLKGLTPLTEYTIAIFSIYDEGQSEPLTGVFTTEEVPAQQYLEIDEVTTDSFRVTWHPLSADEGLHKLMWIPVYGGKTEEVVLKEEQDSHVIEGLEPGTEYEVSLLAVLDDGSESEVVTAVGTTLDSFWTEPATTIVPTTSVTSVFQTGIRNLVVGDETTSSLRVKWDISDSDVQQFRVTYMTAQGDPEEEVIGTVMVPGSQNNLLLKPLLPDTEYKVTVTPIYTDGEGVSVSAPGKTLPSSGPQNLRVSEEWYNRLRITWDPPSSPVKGYRIVYKPVSVPGPTLETFVGADINTILITNLLSGMDYNVKIFASQASGFSDALTGMVKTLFLGVTNLQAKHVEMTSLCAHWQVHRHATAYRVVIESLQDRQKQESTVGGGTTRHCFYGLQPDSEYKISVYTKLQEIEGPSVSIMEKTQSLPTRPPTFPPTIPPAKEVCKAAKADLVFMVDGSWSIGDENFNKIISFLYSTVGALNKIGTDGTQVAMVQFTDDPRTEFKLNAYKTKETLLDAIKHISYKGGNTKTGKAIKYVRDTLFTAESGTRRGIPKVIVVITDGRSQDDVNKISREMQLDGYSIFAIGVADADYSELVSIGSKPSARHVFFVDDFDAFKKIEDELITFVCETASATCPVVHKDGIDLAGFKMMEMFGLVEKDFSSVEGVSMEPGTFNVFPCYQLHKDALVSQPTRYLHPEGLPSDYTISFLFRILPDTPQEPFALWEILNKNSDPLVGVILDNGGKTLTYFNYDQSGDFQTVTFEGPEIRKIFYGSFHKLHIVVSETLVKVVIDCKQVGEKAMNASANITSDGVEVLGKMVRSRGPGGNSAPFQLQMFDIVCSTSWANTDKCCELPGLRDDESCPDLPHSCSCSETNEVALGPAGPPGGPGLRGPKGQQGEPGPKGPDGPRGEIGLPGPQGPPGPQGPSGLSIQGMPGMPGEKGEKGDTGLPGPQGIPGGVGSPGRDGSPGQRGLPGKDGSSGPPGPPGPIGIPGTPGVPGITGSMGPQGALGPPGVPGAKGERGERGDLQSQAMVRSVARQVCEQLIQSHMARYTAILNQIPSHSSSIRTVQGPPGEPGRPGSPGAPGEQGPPGTPGFPGNAGVPGTPGERGLTGIKGEKGNPGVGTQGPRGPPGPAGPSGESRPGSPGPPGSPGPRGPPGHLGVPGPQGPSGQPGYCDPSSCSAYGVRDLIPYNDYQH

SEQ ID NO: 4352 - protein, 1097 aa, Homo sapiens
MATQVMGQSSGGGGLFTSSGNIGMALPNDMYDLHDLSKAELAAPQLIMLANVALTGEVNGSCCDYLVGEERQMAELMPVGDNNFSDSEEGEGLEESADIKGEPHGLENMELRSLELSVVEPQPVFEASGAPDIYSSNKDLPPETPGAEDKGKSSKTKPFRCKPCQYEAESEEQFVHHIRVHSAKKFFVEESAEKQAKARESGSSTAEEGDFSKGPIRCDRCGYNTNRYDHYTAHLKHHTRAGDNERVYKCIICTYTTVSEYHWRKHLRNHFPRKVYTCGKCNYFSDRKNNYVQHVRTHTGERPYKCELCPYSSSQKTHLTRHMRTHSGEKPFKCDQCSYVASNQHEVTRHARQVHNGPKPLNCPHCDYKTADRSNFKKHVELHVNPRQFNCPVCDYAASKKCNLQYHFKSKHPTCPNKTMDVSKVKLKKTKKREADLPDNITNEKTEIEQTKIKGDVAGKKNEKSVKAEKRDVSKEKKPSNNVSVIQVTTRTRKSVTEVKEMDVHTGSNSEKFSKTKKSKRKLEVDSHSLHGPVNDEESSTKKKKKVESKSKNNSQEVPKGDSKVEENKKQNTCMKKSTKKKTLKNKSSKKSSKPPQKEPVEKGSAQMDPPQMGPAPTEAVQKGPVQVEPPPPMEHAQMEGAQIRPAPDEPVQMEVVQEGPAQKELLPPVEPAQMVGAQIVLAHMELPPPMETAQTEVAQMGPAPMEPAQMEVAQVESAPMQVVQKEPVQMELSPPMEVVQKEPVQIELSPPMEVVQKEPVKIELSPPIEVVQKEPVQMELSPPMGVVQKEPAQREPPPPREPPLHMEPISKKPPLRKDKKEKSNMQSERARKEQVLIEVGLVPVKDSWLLKESVSTEDLSPPSPPLPKENLREEASGDQKLLNTGEGNKEAPLQKVGAEEADESLPGLAANINESTHISSSGQNLNTPEGETLNGKHQTDSIVCEMKMDTDQNTRENLTGINSTVEEPVSPMLPPSAVEEREAVSKTALASPPATMAANESQEIDEDEGIHSHEGSDLSDNMSEGSDDSGLHGARPVPQESSRKNAKEALAVKAAKGDFVCIFCDRSFRKGKDYSKHLNRHLVNVYYLEEAAQGQE

SEQ ID NO: 4353 - protein, 985 aa, Homo sapiens
MPVPSRHINIGRSQSWDAAGWYEGPWENAESLRPLGRRSSLTYGTAEGTWFEPNHRPQDAALPVAAEPYLYREAVYNSVAARKGSTPDFTFYDSRQAVMSGRSPLLPREYYSDPSGAARVPKEPPLYRDPGVSRPVPSYGVLGSRTSWDPMQGRSPALQDAGHLYRDPGGKMIPQGRQTQSRAASPGRYGREQPDTRYGAEVPAYPLSQVFSDISERPIDPAPARQVAPTCLVVDPSSAAAPEGSTGVAPGALNRGYGPARESIPSKMAYETYEADLSTFQGPGGKRTVLPEFLAFLRAEGLAEATLGALLQQGFDSPAVLATLEDADIKSVAPNLGQARVLSRLANSCRTEMQLRRQDRGGPLPRARSSSFSHRSELLHGDLASLGAAAPLQTASPRAGDPARRPSSAPSQHLLETAATYSAPGVGTHAPHFPSNSGYSSPTPCALTARLSPTYPLQAGVALTNPGPSNPLHPGPRTAYSTAYTVPMELLKRERNVAASPLPSPHGSPQVLRKPGAPLGPSTLPPASQSLHTPHSPYQKVARRTGAPIIVSTMLAPEPSIRPQIMNGPLHPRPLVALLDGRDCTVEMPILKDLATVAFCDAQSTQEIHEKVLNEAVGAMMYHTITLTREDLEKFKALRVIVRIGSGYDNVDIKAAGELGIAVCNIPSAAVEETADSTICHILNLYRRNTWLYQALREGTRVQSVEQIREVASGAARIRGETLGLIGFGRTGQAVAVRAKAFGFSVIFYDPYLQDGIERSLGVQRVYTLQDLLYQSDCVSLHCNLNEHNHHLINDFTIKQMRQGAFLVNAARGGLVDEKALAQALKEGRIRGAALDVHESEPFSFAQGPLKDAPNLICTPHTAWYSEQASLEMREAAATEIRRAITGRIPESLRNCVNKEFFVTSAPWSVIDQQAIHPELNGATYRYPPGIVGVAPGGLPAAMEGIIPGGIPVTHNLPTVAHPSQAPSPNQPTKHGDNREHPNEQ

SEQ ID NO: 4354 - protein, 577 aa, Homo sapiens
MNPVNATALYISASRLVLNYDPGDPKAFTEINRLLPYFRQSLSCCVCGHLLQDPIAPTNSTCQHYVCKTCKGKKMMMKPSCSWCKDYEQFEENKQLSILVNCYKKLCEYITQTTLARDIIEAVDCSSDILALLNDGSLFCEETEKPSDSSFTLCLTHSPLPSTSEPTTDPQASLSPMSESTLSIAIGSSVINGLPTYNGLSIDRFGINIPSPEHSNTIDVCNTVDIKTEDLSDSLPPVCDTVATDLCSTGIDICSFSEDIKPGDSLLLSVEEVLRSLETVSNTEVCCPNLQPNLEATVSNGPFLQLSSQSLSHNVFMSTSPALHGLSCTAATPKIAKLNRKRSRSESDSEKVQPLPISTIIRGPTLGASAPVTVKRESKISLQPIATVPNGGTTPKISKTVLLSTKSMKKSHEHGSKKSHSKTKPGILKKDKAVKEKIPSHHFMPGSPTKTVYKKPQEKKGCKCGRATQNPSVLTCRGQRCPCYSNRKACLDCICRGCQNSYMANGEKKLEAFAVPEKALEQTRLTLGINVTSIAVRNASTSTSVINVTGSPVTTFLAASTHDDKSLDEAIDMRFDC

SEQ ID NO: 4355 - protein, 505 aa, Homo sapiens
MRSSLAPGVWFFRAFSRDSWFRGLILLLTFLIYACYHMSRKPISIVKSRLHQNCSEQIKPINDTHSLNDTMWCSWAPFDKDNYKELLGGVDNAFLIAYAIGMFISGVFGERLPLRYYLSAGMLLSGLFTSLFGLGYFWNIHELWYFVVIQVCNGLVQTTGWPSVVTCVGNWFGKGKRGFIMGIWNSHTSVGNILGSLIAGIWVNGQWGLSFIVPGIITAVMGVITFLFLIEHPEDVDCAPPQHHGEPAENQDNPEDPGNSPCSIRESGLETVAKCSKGPCEEPAAISFFGALRIPGVVEFSLCLLFAKLVSYTFLYWLPLYIANVAHFSAKEAGDLSTLFDVGGIIGGIVAGLVSDYTNGRATTCCVMLILAAPMMFLYNYIGQDGIASSIVMLIICGGLVNGPYALITTAVSADLGTHKSLKGNAKALSTVTAIIDGTGSIGAALGPLLAGLISPTGWNNVFYMLISADVLACLLLCRLVYKEILAWKVSLSRGSGSSMVLTHQ

SEQ ID NO: 4356 - protein, 539 aa, Homo sapiens
MGTEGPPPPAASRGRQGCLLVPARTKTTIALLYDEESENAYDIRLKLTKEVLTIQKQDVVCVGGSHQGRNRRTVTLRRQPVGGLGLSIKGGSEHNVPVVISKIFEDQAADQTGMLFVGDAVLQVNGIHVENATHEEVVHLLRNAGDEVTITVEYLREAPAFLKLPLGSPGPSSDHSSGASSPLFDSGLHLNGNSSTTAPSSPSSPIAKDPRYEKRWLDTLSVPLSMARISRYKAGTEKLRWNAFEVLALDGVSSGILRFYTAQDGTDWLRAVSANIRELTLQNMKMANKCCSPSDQVVHMGWVNEKLQGADSSQTFRPKFLALKGPSFYVFSTPPVSTFDWVRAERTYHLCEVLFKVHKFWLTEDCWLQANLYLGLQDFDFEDQRPYCFSIVAGHGKSHVFNVELGSELAMWEKSFQRATFMEVQRTGSRTYMCSWQGEMLCFTVDFALGFTCFESKTKNVLWRFKFSQLKGSSDDGKTRVKLLFQNLDTKQIETKELEFQDLRAVLHCIHSFIAAKVASVDPGFMDSQSLARKYMYSS

SEQ ID NO: 4357 - protein, 219 aa, Homo sapiens
MEPGLWLLFGLTVTSAAGFVPCSQSGDAGRRGVSQAPTAARSEGDCEETVAGPGEETVAGPGEGTVAPTALQGPSPGSPGQEQAAEGAPEHHRSRRCTCFTYKDKECVYYCHLDIIWINTPEQTVPYGLSNYRGSFRGKRSAGPLPGNLQLSHRPHLRCACVGRYDKACLHFCTQTLDVSSNSRTAEKTDKEEEGKVRGANRGLCQRRLKSRTNKASRL

SEQ ID NO: 4358 - protein, 415 aa, Homo sapiens
MPTTIEREFEELDTQRRWQPLYLEIRNESHDYPHRVAKFPENRNRNRYRDVSPYDHSRVKLQNAENDYINASLVDIEEAQRSYILTQGPLPNTCCHFWLMVWQQKTKAVVMLNRIVEKESVKCAQYWPTDDQEMLFKETGFSVKLLSEDVKSYYTVHLLQLENINSGETRTISHFHYTTWPDFGVPESPASFLNFLFKVRESGSLNPDHGPAVIHCSAGIGRSGTFSLVDTCLVLMEKGDDINIKQVLLNMRKYRMGLIQTPDQLRFSYMAIIEGAKCIKGDSSIQKRWKELSKEDLSPAFDHSPNKIMTEKYNGNRIGLEEEKLTGDRCTGLSSKMQDTMEENSESALRKRIREDRKATTAQKVQQMKQRLNENERKRKRWLYWQPILTKMGFMSVILVGAFVGWTLFFQQNAL

SEQ ID NO: 4359 - protein, 1040 aa, Homo sapiens
MDWLFFRNICLLIILMVVMEVNSEFIVEVKEFDIENGTTKWQTVRRQKREWIKFAAACREGEDNSKRNPIAKIRSDCESNQKITYRISGVGIDRPPYGVFTINPRTGEINITSVVDREITPLFLIYCRALNSRGEDLERPLELRVKVMDINDNAPVFSQSVYTASIEENSDANTLVVKLCATDADEENHLNSKIAYKIVSQEPSGAPMFILNRYTGEVCTMSSFLDREQHSMYNLVVRGSDRDGAADGLSSECDCRIKVLDVNDNFPTLEKTSYSASIEENCLSSELIRLQAIDLDEEGTDNWLAQYLILSGNDGNWFDIQTDPQTNEGILKVVKMLDYEQAPNIQLSIGVKNQADFHYSVASQFQMHPTPVRIQVVDVREGPAFHPSTMAFSVREGIKGSSLLNYVLGTYTAIDLDTGNPATDVRYIIGHDAGSWLKIDSRTGEIQFSREFDKKSKYIINGIYTAEILAIDDGSGKTATGTICIEVPDINDYCPNIFPERRTICIDSPSVLISVNEHSYGSPFTFCVVDEPPGIADMWDVRSTNATSAILTAKQVLSPGFYEIPILVKDSYNRACELAQMVQLYACDCDDNHMCLDSGAAGIYTEDITGDTYGPVTEDQAGVSNVGLGPAGIGMMVLGILLLILAPLLLLLCCCKQRQPEGLGTRFAPVPEGGEGVMQSWRIEGAHPEDRDVSNICAPMTASNTQDRMDSSEIYTNTYAAGGTVEGGVSGVELNTGMGTAVGLMAAGAAGASGAARKRSSTMGTLRDYADADINMAFLDSYFSEKAYAYADEDEGRPANDCLLIYDHEGVGSPVGSIGCCSWIVDDLDESCMETLDPKFRTLAEICLNTEIEPFPSHQACIPISTDLPLLGPNYFVNESSGLTPSEVEFQEEMAASEPVVHGDIIVTETYGNADPCVQPTTIIFDPQLAPNVVVTEAVMAPVYDIQGNICVPAELADYNNVIYAERVLASPGVPDMSNSSTTEGCMGPVMSGNILVGPEIQVMQMMSPDLPIGQTVGSTSPMTSRHRVTRYSNIHYTQQ

SEQ ID NO: 4360 - protein, 846 aa, Homo sapiens
MGIQGLLQFIKEASEPIHVRKYKGQVVAVDTYCWLHKGAIACAEKLAKGEPTDRYVGFCMKFVNMLLSHGIKPILVFDGCTLPSKKEVERSRRERRQANLLKGKQLLREGKVSEARECFTRSINITHAMAHKVIKAARSQGVDCLVAPYEADAQLAYLNKAGIVQAIITEDSDLLAFGCKKVILKMDQFGNGLEIDQARLGMCRQLGDVFTEEKFRYMCILSGCDYLSSLRGIGLAKACKVLRLANNPDIVKVIKKIGHYLKMNITVPEDYINGFIRANNTFLYQLVFDPIKRKLIPLNAYEDDVDPETLSYAGQYVDDSIALQIALGNKDINTFEQIDDYNPDTAMPAHSRSHSWDDKTCQKSANVSSIWHRNYSPRPESGTVSDAPQLKENPSTVGVERVISTKGLNLPRKSSIVKRPRSAELSEDDLLSQYSLSFTKKTKKNSSEGNKSLSFSEVFVPDLVNGPTNKKSVSTPPRTRNKFATFLQRKNEESGAVVVPGTRSRFFCSSDSTDCVSNKVSIQPLDETAVTDKENNLHESEYGDQEGKRLVDTDVARNSSDDIPNNHIPGDHIPDKATVFTDEESYSFESSKFTRTISPPTLGTLRSCFSWSGGLGDFSRTPSPSPSTALQQFRRKSDSPTSLPENNMSDVSQLKSEESSDDESHPLREEACSSQSQESGEFSLQSSNASKLSQCSSKDSDSEESDCNIKLLDSQSDQTSKLRLSHFSKKDTPLRNKVPGLYKSSSADSLSTTKIKPLGPARASGLSKKPASIQKRKHHNAENKPGLQIKLNELWKNFGFKKDSEKLPPCKKPLSPVRDNIQLTPEAEEDIFNKPECGRVQRAIFQ

SEQ ID NO: 4361 - protein, 415 aa, Homo sapiens
MKLKSLLLRYYPPGIMLEYEKHGELKTKSIDLLDLGPSTDVSALVEEIQKAEPLLTASRTEQVKLLIQRLQEKLGQNSNHTFYLFKVLKAHILPLTNVALNKSGSCFITGSYDRTCKLWDTASGEELNTLEGHRNVVYAIAFNNPYGDKIATGSFDKTCKLWSVETGKCYHTFRGHTAEIVCLSFNPQSTLVATGSMDTTAKLWDIQNGEEVYTLRGHSAEIISLSFNTSGDRIITGSFDHTVVVWDADTGRKVNILIGHCAEISSASFNWDCSLILTGSMDKTCKLWDATNGKCVATLTGHDDEILDSCFDYTGKLIATASADGTARIFSAATRKCIAKLEGHEGEISKISFNPQGNHLLTGSSDKTARIWDAQTGQCLQVLEGHTDEIFSCAFNYKGNIVITGSKDNTCRIWR

SEQ ID NO: 4362 - protein, 1624 aa, Homo sapiens
MPRPGTSGRRPLLLVLLLPLFAAATSAASPSPSPSQVVEVPGVPSRPASVAVCRCCPGQTSRRSRCIRAFCRVRSCQPKKCAGPQRCLNPVPAVPSPSPSVRKRQVSLNWQPLTLQEARALLKRRRPRGPGGRGLLRRRPPQRAPAGKAPVLCPLICHNGGVCVKPDRCLCPPDFAGKFCQLHSSGARPPAPAVPGLTRSVYTMPLANHRDDEHGVASMVSVHVEHPQEASVVVHQVERVSGPWEEADAEAVARAEAAARAEAAAPYTVLAQSAPREDGYSDASGFGYCFRELRGGECASPLPGLRTQEVCCRGAGLAWGVHDCQLCSERLGNSERVSAPDGPCPTGFERVNGSCEDVDECATGGRCQHGECANTRGGYTCVCPDGFLLDSSRSSCISQHVISEAKGPCFRVLRDGGCSLPILRNITKQICCCSRVGKAWGRGCQLCPPFGSEGFREICPAGPGYHYSASDLRYNTRPLGQEPPRVSLSQPRTLPATSRPSAGFLPTHRLEPRPEPRPDPRPGPELPLPSIPAWTGPEIPESGPSSGMCQRNPQVCGPGRCISRPSGYTCACDSGFRLSPQGTRCIDVDECRRVPPPCAPGRCENSPGSFRCVCGPGFRAGPRAAECLDVDECHRVPPPCDLGRCENTPGSFLCVCPAGYQAAPHGASCQDVDECTQSPGLCGRGACKNLPGSFRCVCPAGFRGSACEEDVDECAQEPPPCGPGRCDNTAGSFHCACPAGFRSRGPGAPCQDVDECARSPPPCTYGRCENTEGSFQCVCPMGFQPNTAGSECEDVDECENHLACPGQECVNSPGSFQCRTCPSGHHLHRGRCTDVDECSSGAPPCGPHGHCTNTEGSFRCSCAPGYRAPSGRPGPCADVNECLEGDFCFPHGECLNTDGSFACTCAPGYRPGPRGASCLDVDECSEEDLCQSGICTNTDGSFECICPPGHRAGPDLASCLDVDECRERGPALCGSQRCENSPGSYRCVRDCDPGYHAGPEGTCDDVDECQEYGPEICGAQRCENTPGSYRCTPACDPGYQPTPGGGCQDVDECRNRSFCGAHAVCQNLPGSFQCLCDQGYEGARDGRHCVDVNECETLQGVCGAALCENVEGSFLCVCPNSPEEFDPMTGRCVPPRTSAGTFPGSQPQAPASPVLPARPPPPPLPRRPSTPRQGPVGSGRRECYFDTAAPDACDNILARNVTWQECCCTVGEGWGSGCRIQQCPGTETAEYQSLCPHGRGYLAPSGDLSLRRDVDECQLFRDQVCKSGVCVNTAPGYSCYCSNGYYYHTQRLECIDNDECADEEPACEGGRCVNTVGSYHCTCEPPLVLDGSQRRCVSNESQSLDDNLGVCWQEVGADLVCSHPRLDRQATYTECCCLYGEAWGMDCALCPAQDSDDFEALCNVLRPPAYSPPRPGGFGLPYEYGPDLGPPYQGLPYGPELYPPPALPYDPYPPPPGPFARREAPYGAPRFDMPDFEDDGGPYGESEAPAPPGPGTRWPYRSRDTRRSFPEPEEPPEGGSYAGSLAEPYEELEAEECGILDGCTNGRCVRVPEGFTCRCFDGYRLDMTRMACVDINECDEAEAASPLCVNARCLNTDGSFRCICRPGFAPTHQPHHCAPARPRA

SEQ ID NO: 4363 - protein, 860 aa, Homo sapiens
MSRGGSYPHLLWDVRKRSLGLEDPSRLRSRYLGRREFIQRLKLEATLNVHDGCVNTICWNDTGEYILSGSDDTKLVISNPYSRKVLTTIRSGHRANIFSAKFLPCTNDKQIVSCSGDGVIFYTNVEQDAETNRQCQFTCHYGTTYEIMTVPNDPYTFLSCGEDGTVRWFDTRIKTSCTKEDCKDDILINCRRAATSVAICPPIPYYLAVGCSDSSVRIYDRRMLGTRATGNYAGRGTTGMVARFIPSHLNNKSCRVTSLCYSEDGQEILVSYSSDYIYLFDPKDDTARELKTPSAEERREELRQPPVKRLRLRGDWSDTGPRARPESERERDGEQSPNVSLMQRMSDMLSRWFEEASEVAQSNRGRGRSRPRGGTSQSDISTLPTVPSSPDLEVSETAMEVDTPAEQFLQPSTSSTMSAQAHSTSSPTESPHSTPLLSSPDSEQRQSVEASGHHTHHQSDNNNEKLSPKPGTGEPVLSLHYSTEGTTTSTIKLNFTDEWSSIASSSRGIGSHCKSEGQEESFVPQSSVQPPEGDSETKAPEESSEDVTKYQEGVSAENPVENHINITQSDKFTAKPLDSNSGERNDLNLDRSCGVPEESASSEKAKEPETSDQTSTESATNENNTNPEPQFQTEATGPSAHEETSTRDSALQDTDDSDDDPVLIPGARYRAGPGDRRSAVARIQEFFRRRKERKEMEELDTLNIRRPLVKMVYKGHRNSRTMIKEANFWGANFVMSGSDCGHIFIWDRHTAEHLMLLEADNHVVNCLQPHPFDPILASSGIDYDIKIWSPLEESRIFNRKLADEVITRNELMLEETRNTITVPASFMLRMLASLNHIRADRLEGDRSEGSGQENENEDEE

SEQ ID NO: 4364 - protein, 781 aa, Homo sapiens
MSNAMYNKMWHQTQEALGALLDKEPQKMIEPQRNQVFIFQTLATFYVKYVQIFRNLENVYDQFVHPQKRILIRKVLDGVMGRILELKNEMVELELTEFHYFDDILQDLKLAPQQLDIPIPKYFLKEKLEVIKGREKILAQILADSGIDTSDMKYPVKSIPFDEAVKLIQIAERARQGRLRALFMKQIYLQEYRAKQSKMLGKKVTDTWAAALRIQKVWRRFHQRKETEKLREEEMIFLGMNPPPLFNEVSATVIQAEKVDRLRNEVQIKHEEDYREALVTIKNDLKLIEGVDIKENLQDQIRHWFIECRNLTGTFPDYPDVEEGGSAIIFSDKTIQQEEDEKWKMSPSLFLPAMKEGCNAYKEIWMKKDESWNFSQDYDPELIKEEKRKELQSEIRIQVDELMRQELKNLKLAVDRERERPVKAGKKKDKKGKKGKKKEKKAKKDKDLTADRTIESLYKELVEEGLLIQALKVNLSDYIGEYSYLGTTLRQVSIEPMPSLLDVRQLITLYGIWPLGSAAVHEKAPLVKSLLLAGPSGVGKKMLVHAICTETGANLFNLSSSNIAGKYPGKNGLQMMLHAVFKVARQLQPSVVWIEDTEKTFYKKVPNAEKMNEPKRLKKHLPQILKLLKPDDRILIVGTTRRPFDAELQSFCKVYQKIILVPRPDYASRYVLWKQIIERNGGVLTSALNVSCLAKVTDGFTQGHIVEVVKGVLTDQRIRRQIHKPLTAVEFITAITSMNPVYKEEEESFKNWYAKTPLGKKRALAITGGSTEKAKDKGKRK

SEQ ID NO: 4365 - protein, 613 aa, Homo sapiens
MAATAVAAAVAGTESAQGPPGPAASLELWLNKATDPSMSEQDWSAIQNFCEQVNTDPNGPTHAPWLLAHKIQSPQEKEALYALTVLEMCMNHCGEKFHSEVAKFRFLNELIKVLSPKYLGSWATGKVKGRVIEILFSWTVWFPEDIKIRDAYQMLKKQGIIKQDPKLPVDKILPPPSPWPKSSIFDADEEKSKLLTRLLKSNHPEDLQAANRLIKNLVKEEQEKSEKVSKRVSAVEEVRSHVKVLQEMLSMYRRPGQAPPDQEALQVVYERCEKLRPTLFRLASDTTDDDDALAEILQANDLLTQGVLLYKQVMEGRVTFGNRVTSSLGDIPVSRVFQNPAGCMKTCPLIDLEVDNGPAQMGTVVPSLLHQDLAALGISDAPVTGMVSGQNCCEEKRNPSSSTLPGGGVQNPSADRNLLDLLSAQPAPCPLNYVSQKSVPKEVPPGTKSSPGWSWEAGPLAPSPSSQNTPLAQVFVPLESVKPSSLPPLIVYDRNGFRILLHFSQTGAPGHPEVQVLLLTMMSTAPQPVWDIMFQVAVPKSMRVKLQPASSSKLPAFSPLMPPAVISQMLLLDNPHKEPIRLRYKLTFNQGGQPFSEVGEVKDFPDLAVLGAA

SEQ ID NO: 4366 - protein, 390 aa, Homo sapiens
MVTRAGAGTAVAGAVVVALLSAALALYGPPLDAVLERAFSLRKAHSIKDMENTLQLVRNIIPPLSSTKHKGQDGRIGVVGGCQEYTGAPYFAAISALKVGADLSHVFCASAAAPVIKAYSPELIVHPVLDSPNAVHEVEKWLPRLHALVVGPGLGRDDALLRNVQGILEVSKARDIPVVIDADGLWLVAQQPALIHGYRKAVLTPNHVEFSRLYDAVLRGPMDSDDSHGSVLRLSQALGNVTVVQKGERDILSNGQQVLVCSQEGSSRRCGGQGDLLSGSLGVLVHWALLAGPQKTNGGISDLKLTIWGPEIETGVKTRAQGSCGPRTTTPTSPHLLLSPSPQVQPSPGGRVWRLLSHQAVQPPSLPEARSLHHHLRHDRRGGGRLQQAL

SEQ ID NO: 4367 - protein, 1310 aa, Homo sapiens
MKVTVCFGRTRVVVPCGDGHMKVFSLIQQAVTRYRKAIAKDPNYWIQVHRLEHGDGGILDLDDILCDVADDKDRLVAVFDEQDPHHGGDGTSASSTGTQSPEIFGSELGTNNVSAFQPYQATSEIEVTPSVLRANMPLHVRRSSDPALIGLSTSVSDSNFSSEEPSRKNPTRWSTTAGFLKQNTAGSPKTCDRKKDENYRSLPRDTSNWSNQFQRDNARSSLSASHPMVGKWLEKQEQDEDGTEEDNSRVEPVGHADTGLEHIPNFSLDDMVKLVEVPNDGGPLGIHVVPFSARGGRTLGLLVKRLEKGGKAEHENLFRENDCIVRINDGDLRNRRFEQAQHMFRQAMRTPIIWFHVVPAANKEQYEQLSQSEKNNYYSSRFSPDSQYIDNRSVNSAGLHTVQRAPRLNHPPEQIDSHSRLPHSAHPSGKPPSAPASAPQNVFSTTVSSGYNTKKIGKRLNIQLKKGTEGLGFSITSRDVTIGGSAPIYVKNILPRGAAIQDGRLKAGDRLIEVNGVDLVGKSQEEVVSLLRSTKMEGTVSLLVFRQEDAFHPRELKAEDEDIVLTPDGTREFLTFEVPLNDSGSAGLGVSVKGNRSKENHADLGIFVKSIINGGAASKDGRLRVNDQLIAVNGESLLGKTNQDAMETLRRSMSTEGNKRGMIQLIVARRISKCNELKSPGSPPGPELPIETALDDRERRISHSLYSGIEGLDESPSRNAALSRIMGKYQLSPTVNMPQDDTVIIEDDRLPVLPPHLSDQSSSSSHDDVGFVTADAGTWAKAAISDSADCSLSPDVDPVLAFQREGFGRQIADETKLNTVDDQKAGSPSRDVGPSLGLKKSSSLESLQTAVAEVTLNGDIPFHRPRPRIIRGRGCNESFRAAIDKSYDKPAVDDDDEGMETLEEDTEESSRSGRESVSTASDQPSHSLERQMNGNQEKGDKTDRKKDKTGKEKKKDRDKEKDKMKAKKGMLKGLGDMFRFGKHRKDDKIEKTGKIKIQESFTSEEERIRMKQEQERIQAKTREFRERQARERDYAEIQDFHRTFGCDDELMYGGVSSYEGSMALNARPQSPREGHMMDALYAQVKKPRNSKPSPVDSNRSTPSNHDRIQRLRQEFQQAKQDEDVEDRRRTYSFEQPWPNARPATQSGRHSVSVEVQMQRQRQEERESSQQAQRQYSSLPRQSRKNASSVSQDSWEQNYSPGEGFQSAKENPRYSSYQGSRNGYLGGHGFNARVMLETQELLRQEQRRKEQQMKKQPPSEGPSNYDSYKKVQDPSYAPPKGPFRQDVPPSPSQVARLNRLQTPEKGRPFYS

SEQ ID NO: 4368 - protein, 1020 aa, Homo sapiens
MMSFGGADALLGAPFAPLHGGGSLHYALARKGGAGGTRSAAGSSSGFHSWTRTSVSSVSASPSRFRGAGAASSTDSLDTLSNGPEGCMVAVATSRSEKEQLQALNDRFAGYIDKVRQLEAHNRSLEGEAAALRQQQAGRSAMGELYEREVREMRGAVLRLGAARGQLRLEQEHLLEDIAHVRQRLDDEARQREEAEAAARALARFAQEAEAARVDLQKKAQALQEECGYLRRHHQEEVGELLGQIQGSGAAQAQMQAETRDALKCDVTSALREIRAQLEGHAVQSTLQSEEWFRVRLDRLSEAAKVNTDAMRSAQEEITEYRRQLQARTTELEALKSTKDSLERQRSELEDRHQADIASYQEAIQQLDAELRNTKWEMAAQLREYQDLLNVKMALDIEIAAYRKLLEGEECRIGFGPIPFSLPEGLPKIPSVSTHIKVKSEEKIKVVEKSEKETVIVEEQTEETQVTEEVTEEEEKEAKEEEGKEEEGGEEEEAEGGEEETKSPPAEEAASPEKEAKSPVKEEAKSPAEAKSPEKEEAKSPAEVKSPEKAKSPAKEEAKSPPEAKSPEKEEAKSPAEVKSPEKAKSPAKEEAKSPAEAKSPEKAKSPVKEEAKSPAEAKSPVKEEAKSPAEVKSPEKAKSPTKEEAKSPEKAKSPEKEEAKSPEKAKSPVKAEAKSPEKAKSPVKAEAKSPEKAKSPVKEEAKSPEKAKSPVKEEAKSPEKAKSPVKEEAKTPEKAKSPVKEEAKSPEKAKSPEKAKTLDVKSPEAKTPAKEEARSPADKFPEKAKSPVKEEVKSPEKAKSPLKEDAKAPEKEIPKKEEVKSPVKEEEKPQEVKVKEPPKKAEEEKAPATPKTEEKKDSKKEEAPKKEAPKPKVEEKKEPAVEKPKESKVEAKKEEAEDKKKVPTPEKEAPAKVEVKEDAKPKEKTEVAKKEPDDAKAKEPSKPAEKKEAAPEKKDTKEEKAKKPEEKPKTEAKAKEDDKTLSKEPSKPKAEKAEKSSSTDQKDSKPPEKATEDKAAKGK

SEQ ID NO: 4369 - protein, 708 aa, Homo sapiens
MKDMPLRIHVLLGLAITTLVQAVDKKVDCPRLCTCEIRPWFTPRSIYMEASTVDCNDLGLLTFPARLPANTQILLLQTNNIAKIEYSTDFPVNLTGLDLSQNNLSSVTNINVKKMPQLLSVYLEENKLTELPEKCLSELSNLQELYINHNLLSTISPGAFIGLHNLLRLHLNSNRLQMINSKWFDALPNLEILMIGENPIIRIKDMNFKPLINLRSLVIAGINLTEIPDNALVGLENLESISFYDNRLIKVPHVALQKVVNLKFLDLNKNPINRIRRGDFSNMLHLKELGINNMPELISIDSLAVDNLPDLRKIEATNNPRLSYIHPNAFFRLPKLESLMLNSNALSALYHGTIESLPNLKEISIHSNPIRCDCVIRWMNMNKTNIRFMEPDSLFCVDPPEFQGQNVRQVHFRDMMEICLPLIAPESFPSNLNVEAGSYVSFHCRATAEPQPEIYWITPSGQKLLPNTLTDKFYVHSEGTLDINGVTPKEGGLYTCIATNLVGADLKSVMIKVDGSFPQDNNGSLNIKIRDIQANSVLVSWKASSKILKSSVKWTAFVKTENSHAAQSARIPSDVKVYNLTHLNPSTEYKICIDIPTIYQKNRKKCVNVTTKGLHPDQKEYEKNNTTTLMACLGGLLGIIGVICLISCLSPEMNCDGGHSYVRNYLQKPTFALGELYPPLINLWEAGKEKSTSLKVKATVIGLPTNMS

SEQ ID NO: 4370 - protein, 365 aa, Homo sapiens
MWLRSHRQLCLAFLLVCVLSVIFFLHIHQDSFPHGLGLSILCPDRRLVTPPVAIFCLPGTAMGPNASSSCPQHPASLSGTWTVYPNGRFGNQMGQYATLLALAQLNGRRAFILPAMHAALAPVFRITLPVLAPEVDSRTPWRELQLHDWMSEEYADLRDPFLKLSGFPCSWTFFHHLREQIRREFTLHDHLREEAQSVLGQLRLGRTGDRPRTFVGVHVRRGDYLQVMPQRWKGVVGDSAYLRQAMDWFRARHEAPVFVVTSNGMEWCKENIDTSQGDVTFAGDGQEATPWKDFALLTQCNHTIMTIGTFGFWAAYLAGGDTVYLANFTLPDSEFLKIFKPEAAFLPEWVGINADLSPLWTLAKP

SEQ ID NO: 4371 - protein, 864 aa, Homo sapiens
MVRSGARPGQVLSSGRHTGPAKLTNGKKATYLRKIPRFNADSGYSIHSDSESQAETVHGLDGCASLLRDILRNEDSASSDNKKQIPNEASARSERDTSDLEQNWSLQDHYRMYSPIIYQALCEHVQTQMSLMNDLTSKNIPNGIPAVPCHAPSHSESQATPHSSYGLCTSTPVWSLQRPPCPPKVHSEVQTDGNSQFASQGKTVSATCTDVLRNSFNTSPGVPCSLPKTDISAIPTLQQLGLVNGILPQQGIHKETDLLKCIQTYLSLFRSHGKETHLDSQTHRSPTQSQPAFLATNEEKCAREQIREATSERKDLNIHVRDTKTVKDVQKAKNVNKTAEKVRIIKYLLGELKALVAEQEDSEIQRLITEMEACISVLPTVSGNTDIQVEIALAMQPLRSENAQLRRQLRILNQQLREQQKTQKPSGAVDCNLELFSLQSLNMSLQNQLEESLKSQELLQSKNEELLKVIENQKDENKKFSSIFKDKDQTILENKQQYDIEITRIKIELEEALVNVKSSQFKLETAEKENQILGITLRQRDAEVTRLRELTRTLQTSMAKLLSDLSVDSARCKPGNNLTKSLLNIHDKQLQHDPAPAHTSIMSYLNKLETNYSFTHSEPLSTIKNEETIEPDKTYENVLSSRGPQNSNTRGMEEASAPGIISALSKQDSDEGSETMALIEDEHNLDNTIYIPFARSTPEKKSPLSKRLSPQPQIRAATTQLVSNSGLAVSGKENKLCTPVICSSSTKEAEDAPEKLSRASDMKDTQLLKKIKEAIGKIPAATKEPEEQTACHGPSGCLSNSLQVKGNTVCDGSVFTSDLMSDWSISSFSTFTSRDEQDFRNGLAALDANIARLQKSLRTGLLEK

SEQ ID NO: 4372 - protein, 163 aa, Homo sapiens
MGNCAKRPWRRGPKDRELRPEEIEELQVAFQEFDRDRDGYIGCRELGACMRTLGYMPTEMELIEISQQISGGKVDFEDFVELMGPKLLAETADMIGVRELRDAFREFDTNGDGRISVGELRAALKALLGERLSQREVDEILQDVDLNGDGLVDFEEFVRMMSR

SEQ ID NO: 4373 - protein, 1268 aa, Homo sapiens
MSSVAVLTQESFAEHRSGLVPQQIKVATLNSEEESDPPTYKDAFPPLPEKAACLESAQEPAGAWGNKIRPIKASVITQVFHVPLEERKYKDMNQFGEGEQAKICLEIMQRTGAHLELSLAKDQGLSIMVSGKLDAVMKARKDIVARLQTQASATVAIPKEHHRFVIGKNGEKLQDLELKTATKIQIPRPDDPSNQIKITGTKEGIEKARHEVLLISAEQDKRAVERLEVEKAFHPFIAGPYNRLVGEIMQETGTRINIPPPSVNRTEIVFTGEKEQLAQAVARIKKIYEEKKKKTTTIAVEVKKSQHKYVIGPKGNSLQEILERTGVSVEIPPSDSISETVILRGEPEKLGQALTEVYAKANSFTVSSVAAPSWLHRFIIGKKGQNLAKITQQMPKVHIEFTEGEDKITLEGPTEDVNVAQEQIEGMVKDLINRMDYVEINIDHKFHRHLIGKSGANINRIKDQYKVSVRIPPDSEKSNLIRIEGDPQGVQQAKRELLELASRMENERTKDLIIEQRFHRTIIGQKGERIREIRDKFPEVIINFPDPAQKSDIVQLRGPKNEVEKCTKYMQKMVADLVENSYSISVPIFKQFHKNIIGKGGANIKKIREESNTKIDLPAENSNSETIIITGKRANCEAARSRILSIQKDLANIAEVEVSIPAKLHNSLIGTKGRLIRSIMEECGGVHIHFPVEGSGSDTVVIRGPSSDVEKAKKQLLHLAEEKQTKSFTVDIRAKPEYHKFLIGKGGGKIRKVRDSTGARVIFPAAEDKDQDLITIIGKEDAVREAQKELEALIQNLDNVVEDSMLVDPKHHRHFVIRRGQVLREIAEEYGGVMVSFPRSGTQSDKVTLKGAKDCVEAAKKRIQEIIEDLEAQVTLECAIPQKFHRSVMGPKGSRIQQITRDFSVQIKFPDREENAVHSTEPVVQENGDEAGEGREAKDCDPGSPRRCDIIIISGRKEKCEAAKEALEALVPVTIEVEVPFDLHRYVIGQKGSGIRKMMDEFEVNIHVPAPELQSDIIAITGLAANLDRAKAGLLERVKELQAEQEDRALRSFKLSVTVDPKYHPKIIGRKGAVITQIRLEHDVNIQFPDKDDGNQPQDQITITGYEKNTEAARDAILRIVGELEQMVSEDVPLDHRVHARIIGARGKAIRKIMDEFKVDIRFPQSGAPDPNCVTVTGLPENVEEAIDHILNLEEEYLADVVDSEALQVYMKPPAHEEAKAPSRGFVVRDAPWTASSSEKAPDMSSSEEFPSFGAQVAPKTLPWGPKR

SEQ ID NO: 4374 - protein, 627 aa, Homo sapiens
MAAEKQVPGGGGGGGSGGGGGSGGGGSGGGRGAGGEENKENERPSAGSKANKEFGDSLSLEILQIIKESQQQHGLRHGDFQRYRGYCSRRQRRLRKTLNFKMGNRHKFTGKKVTEELLTDNRYLLLVLMDAERAWSYAMQLKQEANTEPRKRFHLLSRLRKAVKHAEELERLCESNRVDAKTKLEAQAYTAYLSGMLRFEHQEWKAAIEAFNKCKTIYEKLASAFTEEQAVLYNQRVEEISPNIRYCAYNIGDQSAINELMQMRLRSGGTEGLLAEKLEALITQTRAKQAATMSEVEWRGRTVPVKIDKVRIFLLGLADNEAAIVQAESEETKERLFESMLSECRDAIQVVREELKPDQKQRDYILEGEPGKVSNLQYLHSYLTYIKLSTAIKRNENMAKGLQRALLQQQPEDDSKRSPRPQDLIRLYDIILQNLVELLQLPGLEEDKAFQKEIGLKTLVFKAYRCFFIAQSYVLVKKWSEALVLYDRVLKYANEVNSDAGAFKNSLKDLPDVQELITQVRSEKCSLQAAAILDANDAHQTETSSSQVKDNKPLVERFETFCLDPSLVTKQANLVHFPPGFQPIPCKPLFFDLALNHVAFPPLEDKLEQKTKSGLTGYIKGIFGFRS

SEQ ID NO: 4375 - protein, 890 aa, Homo sapiens
MDGEPPASSGLGLPDYTSGVSFHDQADLPETEDFQAGLYVTESPQPQEAEAVSLGRLSDKSSTSETSLGEERAPDEGGAPVDKSSLRSGDSSQDLKQSEGSEEEEEEEDSCVVLEEEEGEQEEVTGASELTLSDTVLSMETVVAGGSGGDGEEEEEALPEQSEGKEQKILLDTACKMVRWLSAKLGPTVASRHVARNLLRLLTSCYVGPTRQQFTVSSGESPPLSAGNIYQKRPVLGDIVSGPVLSCLLHIARLYGEPVLTYQYLPYISYLVAPGSASGPSRLNSRKEAGLLAAVTLTQKIIVYLSDTTLMDILPRISHEVLLPVLSFLTSLVTGFPSGAQARTILCVKTISLIALICLRIGQEMVQQHLSEPVATFFQVFSQLHELRQQDLKLDPAGRGEGQLPQVVFSDGQQRPVDPALLDELQKVFTLEMAYTIYVPFSCLLGDIIRKIIPNHELVGELAALYLESISPSSRNPASVEPTMPGTGPEWDPHGGGCPQDDGHSGTFGSVLVGNRIQIPNDSRPENPGPLGPISGVGGGGLGSGSDDNALKQELPRSVHGLSGNWLAYWQYEIGVSQQDAHFHFHQIRLQSFPGHSGAVKCVAPLSSEDFFLSGSKDRTVRLWPLYNYGDGTSETAPRLVYTQHRKSVFFVGQLEAPQHVVSCDGAVHVWDPFTGKTLRTVEPLDSRVPLTAVAVMPAPHTSITMASSDSTLRFVDCRKPGLQHEFRLGGGLNPGLVRALAISPSGRSVVAGFSSGFMVLLDTRTGLVLRGWPAHEGDILQIKAVEGSVLVSSSSDHSLTVWKELEQKPTHHYKSASDPIHTFDLYGSEVVTGTVSNKIGVCSLLEPPSQATTKLSSENFRGTLTSLALLPTKRHLLLGSDNGVIRLLA

SEQ ID NO: 4376 - protein, 659 aa, Homo sapiens
MALVTVSRSPPGSGASTPVGPWDQAVQRRSRLQRRQSFAVLRGAVLGLQDGGDNDDAAEASSEPTEKAPSEEELHGDQTDFGQGSQSPQKQEEQRQHLHLMVQLLRPQDDIRLAAQLEAPRPPRLRYLLVVSTREGEGLSQDETVLLGVDFPDSSSPSCTLGLVLPLWSDTQVYLDGDGGFSVTSGGQSRIFKPISIQTMWATLQVLHQACEAALGSGLVPGGSALTWASHYQERLNSEQSCLNEWTAMADLESLRPPSAEPGGSSEQEQMEQAIRAELWKVLDVSDLESVTSKEIRQALELRLGLPLQQYRDFIDNQMLLLVAQRDRASRIFPHLYLGSEWNAANLEELQRNRVTHILNMAREIDNFYPERFTYHNVRLWDEESAQLLPHWKETHRFIEAARAQGTHVLVHCKMGVSRSAATVLAYAMKQYECSLEQALRHVQELRPIARPNPGFLRQLQIYQGILTASRQSHVWEQKVGGVSPEEHPAPEVSTPFPPLPPEPEGGGEEKVVGMEESQAAPKEEPGPRPRINLRGVMRSISLLEPSLELESTSETSDMPEVFSSHESSHEEPLQPFPQLARTKGGQQVDRGPQPALKSRQSVVTLQGSAVVANRTQAFQEQEQGQGQGQGEPCISSTPRFRKVVRQASVHDSGEEGEA

SEQ ID NO: 4377 - protein, 204 aa, Homo sapiens
MALVSGISLDPEAAIGVTKRPPPKWVDGVDEIQYDVGRIKQKMKELASLHDKHLNRPTLDDSSEEEHAIEITTQEITQLFHRCQRAVQALPSRARACSEQEGRLLGNVVASLAQALQELSTSFRHAQSGYLKRMKNREERSQHFFDTSVPLMDDGDDNTLYHRGFTEDQLVLVEQNTLMVEEREREIRQIVQSISDLNEIFRDL

SEQ ID NO: 4378 - protein, 322 aa, Homo sapiens
MVSVINTVDTSHEDMIHDAQMDYYGTRLATCSSDRSVKIFDVRNGGQILIADLRGHEGPVWQVAWAHPMYGNILASCSYDRKVIIWREENGTWEKSHEHAGHDSSVNSVCWAPHDYGLILACGSSDGAISLLTYTGEGQWEVKKINNAHTIGCNAVSWAPAVVPGSLIDHPSGQKPNYIKRFASGGCDNLIKLWKEEEDGQWKEEQKLEAHSDWVRDVAWAPSIGLPTSTIASCSQDGRVFIWTCDDASSNTWSPKLLHKFNDVVWHVSWSITANILAVSGGDNKVTLWKESVDGQWVCISDVNKGQGSVSASVTEGQQNEQ

SEQ ID NO: 4379 - protein, 1077 aa, Homo sapiens
MARLFSPRPPPSEDLFYETYYSLSQQYPLLLLLLGIVLCALAALLAVAWASGRELTSDPSFLTTVLCALGGFSLLLGLASREQRLQRWTRPLSGLVWVALLALGHAFLFTGGVVSAWDQVSYFLFVIFTAYAMLPLGMRDAAVAGLASSLSHLLVLGLYLGPQPDSRPALLPQLAANAVLFLCGNVAGVYHKALMERALRATFREALSSLHSRRRLDTEKKHQEHLLLSILPAYLAREMKAEIMARLQAGQGSRPESTNNFHSLYVKRHQGVSVLYADIVGFTRLASECSPKELVLMLNELFGKFDQIAKEHECMRIKILGDCYYCVSGLPLSLPDHAINCVRMGLDMCRAIRKLRAATGVDINMRVGVHSGSVLCGVIGLQKWQYDVWSHDVTLANHMEAGGVPGRVHITGATLALLAGAYAVEDAGMEHRDPYLRELGEPTYLVIDPRAEEEDEKGTAGGLLSSLEGLKMRPSLLMTRYLESWGAAKPFAHLSHGDSPVSTSTPLPEKTLASFSTQWSLDRSRTPRGLDDELDTGDAKFFQVIEQLNSQKQWKQSKDFNPLTLYFREKEMEKEYRLSAIPAFKYYEACTFLVFLSNFIIQMLVTNRPPALAITYSITFLLFLLILFVCFSEDLMRCVLKGPKMLHWLPALSGLVATRPGLRIALGTATILLVFAMAITSLFFFPTSSDCPFQAPNVSSMISNLSWELPGSLPLISVPYSMHCCTLGFLSCSLFLHMSFELKLLLLLLWLAASCSLFLHSHAWLSECLIVRLYLGPLDSRPGVLKEPKLMGAISFFIFFFTLLVLARQNEYYCRLDFLWKKKLRQEREETETMENLTRLLLENVLPAHVAPQFIGQNRRNEDLYHQSYECVCVLFASVPDFKEFYSESNINHEGLECLRLLNEIIADFDELLSKPKFSGVEKIKTIGSTYMAATGLNATSGQDAQQDAERSCSHLGTMVEFAVALGSKLDVINKHSFNNFRLRVGLNHGPVVAGVIGAQKPQYDIWGNTVNVASRMESTGVLGKIQVTEETAWALQSLGYTCYSRGVIKVKGKGQLCTYFLNTDLTRTGPPSATLG

SEQ ID NO: 4380 - protein, 519 aa, Homo sapiens
MPMPSRDGGLHPRHHHYGSHSPWSQLLSSPMETPSIKGLYYRRVRKVGALDASPVDLKKEILINVGGRRYLLPWSTLDRFPLSRLSKLRLCRSYEEIVQLCDDYDEDSQEFFFDRSPSAFGVIVSFLAAGKLVLLQEMCALSFQEELAYWGIEEAHLERCCLRKLLRKLEELEELAKLHREDVLRQQRETRRPASHSSRWGLCMNRLREMVENPQSGLPGKVFACLSILFVATTAVSLCVSTMPDLRAEEDQGECSRKCYYIFIVETICVAWFSLEFCLRFVQAQDKCQFFQGPLNIIDILAISPYYVSLAVSEEPPEDGERPSGSSYLEKVGLVLRVLRALRILYVMRLARHSLGLQTLGLTVRRCTREFGLLLLFLAVAITLFSPLVYVAEKESGRVLEFTSIPASYWWAIISMTTVGYGDMVPRSVPGQMVALSSILSGILIMAFPATSIFHTFSHSYLELKKEQEQLQARLRHLQNTGPASECELLDPHVASEHELMNDVNDLILEGPALPIMHM

SEQ ID NO: 4381 - protein, 222 aa, Homo sapiens
MKLPLLLALLFGAVSALHLRSETSTFETPLGAKTLPEDEETPEQEMEETPCRELEEEEEWGSGSEDASKKDGAVESISVPDMVDKNLTCPEEEDTVKVVGIPGCQTCRYLLVRSLQTFSQAWFTCRRCYRGNLVSIHNFNINYRIQCSVSALNQGQVWIGGRITGSGRCRRFQWVDGSRWNFAYWAAHQPWSRGGHCVALCTRGGHWRRAHCLRRLPFICSY

SEQ ID NO: 4382 - protein, 1445 aa, Homo sapiens
MEEGHGLDLTYITERIIAVSFPAGCSEESYLHNLQEVTRMLKSKHGDNYLVLNLSEKRYDLTKLNPKIMDVGWPELHAPPLDKMCTICKAQESWLNSNLQHVVVIHCRGGKGRIGVVISSYMHFTNVSASADQALDRFAMKKFYDDKVSALMQPSQKRYVQFLSGLLSGSVKMNASPLFLHFVILHGTPNFDTGGVCRPFLKLYQAMQPVYTSGIYNVGPENPSRICIVIEPAQLLKGDVMVKCYHKKYRSATRDVIFRLQFHTGAVQGYGLVFGKEDLDNASKDDRFPDYGKVELVFSATPEKIQGSEHLYNDHGVIVDYNTTDPLIRWDSYENLSADGEVLHTQGPVDGSLYAKVRKKSSSDPGIPGGPQAIPATNSPDHSDHTLSVSSDSGHSTASARTDKTEERLAPGTRRGLSAQEKAELDQLLSGFGLEDPGSSLKEMTDARSKYSGTRHVVPAQVHVNGDAALKDRETDILDDEMPHHDLHSVDSLGTLSSSEGPQSAHLGPFTCHKSSQNSLLSDGFGSNVGEDPQGTLVPDLGLGMDGPYERERTFGSREPKQPQPLLRKPSVSAQMQAYGQSSYSTQTWVRQQQMVVAHQYSFAPDGEARLVSRCPADNPGLVQAQPRVPLTPTRGTSSRVAVQRGVGSGPHPPDTQQPSPSKAFKPRFPGDQVVNGAGPELSTGPSPGSPTLDIDQSIEQLNRLILELDPTFEPIPTHMNALGSQANGSVSPDSVGGGLRASSRLPDTGEGPSRATGRQGSSAEQPLGGRLRKLSLGQYDNDAGGQLPFSKCAWGKAGVDYAPNLPPFPSPADVKETMTPGYPQDLDIIDGRILSSKESMCSTPAFPVSPETPYVKTALRHPPFSPPEPPLSSPASQHKGGREPRSCPETLTHAVGMSESPIGPKSTMLRADASSTPSFQQAFASSCTISSNGPGQRRESSSSAERQWVESSPKPMVSLLGSGRPTGSPLSAEFSGTRKDSPVLSCFPPSELQAPFHSHELSLAEPPDSLAPPSSQAFLGFGTAPVGSGLPPEEDLGALLANSHGASPTPSIPLTATGAADNGFLSHNFLTVAPGHSSHHSPGLQGQGVTLPGQPPLPEKKRASEGDRSLGSVSPSSSGFSSPHSGSTISIPFPNVLPDFSKASEAASPLPDSPGDKLVIVKFVQDTSKFWYKADISREQAIAMLKDKEPGSFIVRDSHSFRGAYGLAMKVATPPPSVLQLNKKAGDLANELVRHFLIECTPKGVRLKGCSNEPYFGSLTALVCQHSITPLALPCKLLIPERDPLEEIAESSPQTAANSAAELLKQGAACNVWYLNSVEMESLTGHQAIQKALSITLVQEPPPVSTVVHFKVSAQGITLTDNQRKLFFRRHYPVNSVIFCALDPQDRKWIKDGPSSKVFGFVARKQGSATDNVCHLFAEHDPEQPASAIVNFVSKVMIGSPKKV

SEQ ID NO: 4383 - protein, 527 aa, Homo sapiens
MESAAALHFSRPASLLLLLLSLCALVSAQFIVVGPTDPILATVGENTTLRCHLSPEKNAEDMEVRWFRSQFSPAVFVYKGGRERTEEQMEEYRGRTTFVSKDISRGSVALVIHNITAQENGTYRCYFQEGRSYDEAILHLVVAGLGSKPLISMRGHEDGGIRLECISRGWYPKPLTVWRDPYGGVAPALKEVSMPDADGLFMVTTAVIIRDKSVRNMSCSINNTLLGQKKESVIFIPESFMPSVSPCAVALPIIVVILMIPIAVCIYWINKLQKEKKILSGEKEFERETREIALKELEKERVQKEEELQVKEKLQEELRWRRTFLHAVDVVLDPDTAHPDLFLSEDRRSVRRCPFRHLGESVPDNPERFDSQPCVLGRESFASGKHYWEVEVENVIEWTVGVCRDSVERKGEVLLIPQNGFWTLEMHKGQYRAVSSPDRILPLKESLCRVGVFLDYEAGDVSFYNMRDRSHIYTCPRSAFSVPVRPFFRLGCEDSPIFICPALTGANGVTVPEEGLTLHRVGTHQSL

SEQ ID NO: 4384 - protein, 727 aa, Homo sapiens
MPPPADIVKVAIEWPGAYPKLMEIDQKKPLSAIIKEVCDGWSLANHEYFALQHADSSNFYITEKNRNEIKNGTILRLTTSPAQNAQQLHERIQSSSMDAKLEALKDLASLSRDVTFAQEFINLDGISLLTQMVESGTERYQKLQKIMKPCFGDMLSFTLTAFVELMDHGIVSWDTFSVAFIKKIASFVNKSAIDISILQRSLAILESMVLNSHDLYQKVAQEITIGQLIPHLQGSDQEIQTYTIAVINALFLKAPDERRQEMANILAQKQLRSIILTHVIRAQRAINNEMAHQLYVLQVLTFNLLEDRMMTKMDPQDQAQRDIIFELRRIAFDAESEPNNSSGSMEKRKSMYTRDYKKLGFINHVNPAMDFTQTPPGMLALDNMLYFAKHHQDAYIRIVLENSSREDKHECPFGRSSIELTKMLCEILKVGELPSETCNDFHPMFFTHDRSFEEFFCICIQLLNKTWKEMRATSEDFNKVMQVVKEQVMRALTTKPSSLDQFKSKLQNLSYTEILKIRQSERMNQEDFQSRPILELKEKIQPEILELIKQQRLNRLVEGTCFRKLNARRRQDKFWYCRLSPNHKVLHYGDLEESPQGEVPHDSLQDKLPVADIKAVVTGKDCPHMKEKGALKQNKEVLELAFSILYDSNCQLNFIAPDKHEYCIWTDGLNALLGKDMMSDLTRNDLDTLLSMEIKLRLLDLENIQIPDAPPPIPKEPSNYDFVYDCN

SEQ ID NO: 4385 - protein, 772 aa, Homo sapiens
MAEAHQAVAFQFTVTPDGVDFRLSREALKHVYLSGINSWKKRLIRIKNGILRGVYPGSPTSWLVVIMATVGSSFCNVDISLGLVSCIQRCLPQGCGPYQTPQTRALLSMAIFSTGVWVTGIFFFRQTLKLLLCYHGWMFEMHGKTSNLTRIWAMCIRLLSSRHPMLYSFQTSLPKLPVPRVSATIQRYLESVRPLLDDEEYYRMELLAKEFQDKTAPRLQKYLVLKSWWASNYVSDWWEEYIYLRGRSPLMVNSNYYVMDLVLIKNTDVQAARLGNIIHAMIMYRRKLDREEIKPVMALGIVPMCSYQMERMFNTTRIPGKDTDVLQHLSDSRHVAVYHKGRFFKLWLYEGARLLKPQDLEMQFQRILDDPSPPQPGEEKLAALTAGGRVEWAQARQAFFSSGKNKAALEAIERAAFFVALDEESYSYDPEDEASLSLYGKALLHGNCYNRWFDKSFTLISFKNGQLGLNAEHAWADAPIIGHLWEFVLGTDSFHLGYTETGHCLGKPNPALAPPTRLQWDIPKQCQAVIESSYQVAKALADDVELYCFQFLPFGKGLIKKCRTSPDAFVQIALQLAHFRDRGKFCLTYEASMTRMFREGRTETVRSCTSESTAFVQAMMEGSHTKADLRDLFQKAAKKHQNMYRLAMTGAGIDRHLFCLYLVSKYLGVSSPFLAEVLSEPWRLSTSQIPQSQIRMFDPEQHPNHLGAGGGFGPVADDGYGVSYMIAGENTIFFHISSKFSSSETNAQRFGNHIRKALLDIADLFQVPKAYS

SEQ ID NO: 4386 - protein, 307 aa, Homo sapiens
MLNFTDVTEFILLGLTSRREWQVLFFIIFLVVYIITMVGNIGMMVLIKVSPQLNNPMYFFLSHLSFVDVWFSSNVTPKMLENLLSDKKTITYAGCLVQCFFFIALVHVEIFILAAMAFDRYMAIGNPLLYGSKMSRVVCIRLITFPYIYGFLTSLAATLWTYGLYFCGKIEINHFYCADPPLIKMACAGTFVKEYTMIILAGINFTYSLTVIIISYLFILIAILRMRSAEGRQKAFSTCGSHLTAVIIFYGTLIFMYLRRPTEESVEQGKMVAVFYTTVIPMLNPMIYSLRNKDVKKAMMKVISRSC

SEQ ID NO: 4387 - protein, 956 aa, Homo sapiens
MASKRKSTTPCMIPVKTVVLQDASMEAQPAETLPEGPQQDLPPEASAASSEAAQNPSSTDGSTLANGHRSTLDGYLYSCKYCDFRSHDMTQFVGHMNSEHTDFNKDPTFVCSGCSFLAKTPEGLSLHNATCHSGEASFVWNVAKPDNHVVVEQSIPESTSTPDLAGEPSAEGADGQAEIIITKTPIMKIMKGKAEAKKIHTLKENVPSQPVGEALPKLSTGEMEVREGDHSFINGAVPVSQASASSAKNPHAANGPLIGTVPVLPAGIAQFLSLQQQPPVHAQHHVHQPLPTAKALPKVMIPLSSIPTYNAAMDSNSFLKNSFHKFPYPTKAELCYLTVVTKYPEEQLKIWFTAQRLKQGISWSPEEIEDARKKMFNTVIQSVPQPTITVLNTPLVASAGNVQHLIQAALPGHVVGQPEGTGGGLLVTQPLMANGLQATSSPLPLTVTSVPKQPGVAPINTVCSNTTSAVKVVNAAQSLLTACPSITSQAFLDASIYKNKKSHEQLSALKGSFCRNQFPGQSEVEHLTKVTGLSTREVRKWFSDRRYHCRNLKGSRAMIPGDHSSIIIDSVPEVSFSPSSKVPEVTCIPTTATLATHPSAKRQSWHQTPDFTPTKYKERAPEQLRALESSFAQNPLPLDEELDRLRSETKMTRREIDSWFSERRKKVNAEETKKAEENASQEEEEAAEDEGGEEDLASELRVSGENGSLEMPSSHILAERKVSPIKINLKNLRVTEANGRNEIPGLGACDPEDDESNKLAEQLPGKVSCKKTAQQRHLLRQLFVQTQWPSNQDYDSIMAQTGLPRPEVVRWFGDSRYALKNGQLKWYEDYKRGNFPPGLLVIAPGNRELLQDYYMTHKMLYEEDLQNLCDKTQMSSQQVKQWFAEKMGEETRAVADTGSEDQGPGTGELTAVHKGMGDTYSEVSENSESWEPRVPEASSEPFDTSSPQAGRQLETD

SEQ ID NO: 4388 - protein, 721 aa, Homo sapiens
MDLSALRVEEVQNVINAMQKILECPICLELIKEPVSTKCDHIFCKFCMLKLLNQKKGPSQCPLCKNDITKRSLQESTRFSQLVEELLKIICAFQLDTGLEYANSYNFAKKENNSPEHLKDEVSIIQSMGYRNRAKRLLQSEPENPSLQETSLSVQLSNLGTVRTLRTKQRIQPQKTSVYIELGSDSSEDTVNKATYCSVGDQELLQITPQGTRDEISLDSAKKGEAASGCESETSVSEDCSGLSSQSDILTTQQRDTMQHNLIKLQQEMAELEAVLEQHGSQPSNSYPSIISDSSALEDLRNPEQSTSEKAVLTSQKSSEYPISQNPEGLSADKFEVSADSSTSKNKEPGVERSSPSKCPSLDDRWYMHSCSGSLQNRNYPSQEELIKVVDVEEQQLEESGPHDLTETSYLPRQDLEGTPYLESGISLFSDDPESDPSEDRAPESARVGNIPSSTSALKVPQLKVAESAQSPAAAHTTDTAGYNAMEESVSREKPELTASTERVNKRMSMVVSGLTPEEFMLVYKFARKHHITLTNLITEETTHVVMKTDAEFVCERTLKYFLGIAGGKWVVSYFWVTQSIKERKMLNEHDFEVRGDVVNGRNHQGPKRARESQDRKIFRGLEICCYGPFTNMPTDQLEWMVQLCGASVVKELSSFTLGTGVHPIVVVQPDAWTEDNGFHAIGQMCEAPVVTREWVLDSVALYQCQELDTYLIPQIPHSHY

SEQ ID NO: 4389 - protein, 1186 aa, Homo sapiens
MDISTRSKDPGSAERTAQKRKFPSPPHSSNGHSPQDTSTSPIKKKKKPGLLNSNNKEQSELRHGPFYYMKQPLTTDPVDVVPQDGRNDFYCWVCHREGQVLCCELCPRVYHAKCLRLTSEPEGDWFCPECEKITVAECIETQSKAMTMLTIEQLSYLLKFAIQKMKQPGTDAFQKPVPLEQHPDYAEYIFHPMDLCTLEKNAKKKMYGCTEAFLADAKWILHNCIIYNGGNHKLTQIAKVVIKICEHEMNEIEVCPECYLAACQKRDNWFCEPCSNPHPLVWAKLKGFPFWPAKALRDKDGQVDARFFGQHDRAWVPINNCYLMSKEIPFSVKKTKSIFNSAMQEMEVYVENIRRKFGVFNYSPFRTPYTPNSQYQMLLDPTNPSAGTAKIDKQEKVKLNFDMTASPKILMSKPVLSGGTGRRISLSDMPRSPMSTNSSVHTGSDVEQDAEKKATSSHFSASEESMDFLDKSTASPASTKTGQAGSLSGSPKPFSPQLSAPITTKTDKTSTTGSILNLNLDRSKAEMDLKELSESVQQQSTPVPLISPKRQIRSRFQLNLDKTIESCKAQLGINEISEDVYTAVEHSDSEDSEKSDSSDSEYISDDEQKSKNEPEDTEDKEGCQMDKEPSAVKKKPKPTNPVEIKEELKSTSPASEKADPGAVKDKASPEPEKDFSEKAKPSPHPIKDKLKGKDETDSPTVHLGLDSDSESELVIDLGEDHSGREGRKNKKEPKEPSPKQDVVGKTPPSTTVGSHSPPETPVLTRSSAQTSAAGATATTSTSSTVTVTAPAPAATGSPVKKQRPLLPKETAPAVQRVVWNSSSKFQTSSQKWHMQKMQRQQQQQQQQNQQQQPQSSQGTRYQTRQAVKAVQQKEITQSPSTSTITLVTSTQSSPLVTSSGSMSTLVSSVNADLPIATASADVAADIAKYTSKMMDAIKGTMTEIYNDLSKNTTGSTIAEIRRLRIEIEKLQWLHQQELSEMKHNLELTMAEMRQSLEQERDRLIAEVKKQLELEKQQAVDETKKKQWCANCKKEAIFYCCWNTSYCDYPCQQAHWPEHMKSCTQSATAPQQEADAEVNTETLNKSSQGSSSSTQSAPSETASASKEKETSAEKSKESGSTLDLSGSRETPSSILLGSNQGSDHSRSNKSSWSSSDEKRGSTRSDHNTSTSTKSLLPKESRLDTFWD

SEQ ID NO: 4390 - protein, 622 aa, Homo sapiens
MAAEEEAAAGGKVLREENQCIAPVVSSRVSPGTRPTAMGSFSSHMTEFPRKRKGSDSDPSQSGIMTEKVVEKLSQNPLTYLLSTRIEISASSGSREAHSQTEKRRRDKMNNLIEELSAMIPQCNPMARKLDKLTVLRMAVQHLRSLKGLTNSYVGSNYRPSFLQDNELRHLILKTAEGFLFVVGCERGKILFVSKSVSKILNYDQASLTGQSLFDFLHPKDVAKVKEQLSSFDISPREKLIDAKTGLQVHSNLHAGRTRVYSGSRRSFFCRIKSCKISVKEEHGCLPNSKKKEHRKFYTIHCTGYLRSWPPNIVGMEEERNSKKDNSNFTCLVAIGRLQPYIVPQNSGEINVKPTEFITRFAVNGKFVYVDQRATAILGYLPQELLGTSCYEYFHQDDHNNLTDKHKAVLQSKEKILTDSYKFRAKDGSFVTLKSQWFSFTNPWTKELEYIVSVNTLVLGHSEPGEASFLPCSSQSSEESSRQSCMSVPGMSTGTVLGAGSIGTDIANEILDLQRLQSSSYLDDSSPTGLMKDTHTVNCRSMSNKELFPPSPSEMGELEATRQNQSTVAVHSHEPLLSDGAQLDFDALCDNDDTAMAAFMNYLEAEGGLGDPGDFSDIQWTL

SEQ ID NO: 4391 - protein, 689 aa, Homo sapiens
MADLEAVLADVSYLMAMEKSKATPAARASKKILLPEPSIRSVMQKYLEDRGEVTFEKIFSQKLGYLLFRDFCLNHLEEARPLVEFYEEIKKYEKLETEEERVARSREIFDSYIMKELLACSHPFSKSATEHVQGHLGKKQVPPDLFQPYIEEICQNLRGDVFQKFIESDKFTRFCQWKNVELNIHLTMNDFSVHRIIGRGGFGEVYGCRKADTGKMYAMKCLDKKRIKMKQGETLALNERIMLSLVSTGDCPFIVCMSYAFHTPDKLSFILDLMNGGDLHYHLSQHGVFSEADMRFYAAEIILGLEHMHNRFVVYRDLKPANILLDEHGHVRISDLGLACDFSKKKPHASVGTHGYMAPEVLQKGVAYDSSADWFSLGCMLFKLLRGHSPFRQHKTKDKHEIDRMTLTMAVELPDSFSPELRSLLEGLLQRDVNRRLGCLGRGAQEVKESPFFRSLDWQMVFLQKYPPPLIPPRGEVNAADAFDIGSFDEEDTKGIKLLDSDQELYRNFPLTISERWQQEVAETVFDTINAETDRLEARKKAKNKQLGHEEDYALGKDCIMHGYMSKMGNPFLTQWQRRYFYLFPNRLEWRGEGEAPQSLLTMEEIQSVEETQIKERKCLLLKIRGGKQFILQCDSDPELVQWKKELRDAYREAQQLVQRVPKMKNKPRSPVVELSKVPLVQRGSANGL

SEQ ID NO: 4392 - protein, 537 aa, Homo sapiens
MGGAGILLLLLAGAGVVVAWRPPKGKCPLRCSCSKDSALCEGSPDLPVSFSPTLLSLSLVRTGVTQLKAGSFLRIPSLHLLLFTSNSFSVIEDDAFAGLSHLQYLFIEDNEIGSISKNALRGLRSLTHLSLANNHLETLPRFLFRGLDTLTHVDLRGNPFQCDCRVLWLLQWMPTVNASVGTGACAGPASLSHMQLHHLDPKTFKCRAIELSWFQTVGESALSVEPFSYQGEPHIVLAQPFAGRCLILSWDYSLQRFRPEEELPAASVVSCKPLVLGPSLFVLAARLWGGSQLWARPSPGLRLAPTQTLAPRRLLRPNDAELLWLEGQPCFVVADASKAGSTTLLCRDGPGFYPHQSLHAWHRDTDAEALELDGRPHLLLASASQRPVLFHWTGGRFERRTDIPEAEDVYATRHFQAGGDVFLCLTRYIGDSMVMRWDGSMFRLLQQLPSRGAHVFQPLLIARDQLAILGSDFAFSQVLRLEPDKGLLEPLQELGPPALVAPRAFAHITMAGRRFLFAACFKGPTQIYQHHEIDLSA

SEQ ID NO: 4393 - protein, 185 aa, Homo sapiens
MSAFNLLHLVTKSQPVALRACGLPSGSCRDKKNCKVVFSQQELRKRLTPLQYHVTQEKGTESAFEGEYTHHKDPGIYKCVVCGTPLFKSETKFDSGSGWPSFHDVINSEAITFTDDFSYGMHRVETSCSQCGAHLGHIFDDGPRPTGKRYCINSAALSFTPADSSGTAEGGSGVASPAQADKAEL

SEQ ID NO: 4394 - protein, 953 aa, Homo sapiens
MEESSSVAMLVPDIGEQEAILTAESIISPSLEIDEQRKTKPDPLIHVIQKLSKIVENEKSQKCLLIGKKRPRSSAATHSLETQELCEIPAKVIQSPAADTRRAEMSQTNFTPDTLAQNEGKAMSYQCSLCKFLSSSFSVLKDHIKQHGQQNEVILMCSECHITSRSQEELEAHVVNDHDNDANIHTQSKAQQCVSPSSSLCRKTTERNETIPDIPVSVDNLQTHTVQTASVAEMGRRKWYAYEQYGMYRCLFCSYTCGQQRMLKTHAWKHAGEVDCSYPIFENENEPLGLLDSSAAAAPGGVDAVVIAIGESELSIHNGPSVQVQICSSEQLSSSSPLEQSAERGVHLSQSVTLDPNEEEMLEVISDAEENLIPDSLLTSAQKIISSSPNKKGHVNVIVERLPSAEETLSQKRFLMNTEMEEGKDLSLTEAQIGREGMDDVYRADKCTVDIGGLIIGWSSSEKKDELMNKGLATDENAPPGRRRTNSESLRLHSLAAEALVTMPIRAAELTRANLGHYGDINLLDPDTSQRQVDSTLAAYSKMMSPLKNSSDGLTSLNQSNSTLVALPEGRQELSDGQVKTGISMSLLTVIEKLRERTDQNASDDDILKELQDNAQCQPNSDTSLSGNNVVEYIPNAERPYRCRLCHYTSGNKGYIKQHLRVHRQRQPYQCPICEHIADNSKDLESHMIHHCKTRIYQCKQCEESFHYKSQLRNHEREQHSLPDTLSIATSNEPRISSDTADGKCVQEGNKSSVQKQYRCDVCDYTSTTYVGVRNHRRIHNSDKPYRCSLCGYVCSHPPSLKSHMWKHASDQNYNYEQVNKAINDAISQSGRVLGKSPGKTQLKSSEESADPVTGSSENAVSSSELMSQTPSEVLGTNENEKLSPTSNTSYSLEKISSLAPPSMEYCVLLFCCCICGFESTSKENLLDHMKEHEGEIVNIILNKDHNTALNTN

SEQ ID NO: 4395 - protein, 245 aa, Homo sapiens
MDGTRTSLDIEEYSDTEVQKNQVLTLEEWQDKWVNGKTAFHQEQGHQLLKKHLDTFLKGKSGLRVFFPLCGKAVEMKWFADRGHSVVGVEISELGIQEFFTEQNLSYSEEPITEIPGTKVFKSSSGNISLYCCSIFDLPRTNIGKFDMIWDRGALVAINPGDRKCYADTMFSLLGKKFQYLLCVLSYDPTKHPGPPFYVPHAEIERLFGKICNIRCLEKVDAFEERHKSWGIDCLFEKLYLLTEK

SEQ ID NO: 4396 - protein, 168 aa, Homo sapiens
MGPRARPALLLLMLLQTAVLQGRLLLPPLVKVTHHVTSSVTTLRCRALNYYPQNITMKWLKDKQPMDAKEFEPKDVLPNGDGTYQGWITLAVPPGEEQRYTCQVEHPGLDQPLIVIWEPSPSGTLVIGVISGIAVFVVILFIGILFIILRKRQGSRGAMGHYVLAERE

SEQ ID NO: 4397 - protein, 1682 aa, Homo sapiens
MNQNTTEPVAATETLAEVPEHVLRGLPEEVRLFPSAVDKTRIGVWATKPILKGKKFGPFVGDKKKRSQVKNNVYMWEVYYPNLGWMCIDATDPEKGNWLRYVNWACSGEEQNLFPLEINRAIYYKTLKPIAPGEELLVWYNGEDNPEIAAAIEEERASARSKRSSPKSRKGKKKSQENKNKGNKIQDIQLKTSEPDFTSANMRDSAEGPKEDEEKPSASALEQPATLQEVASQEVPPELATPAPAWEPQPEPDERLEAAACEVNDLGEEEEEEEEEDEEEEEDDDDDELEDEGEEEASMPNENSVKEPEIRCDEKPEDLLEEPKTTSEETLEDCSEVTPAMQIPRTKEEANGDVFETFMFPCQHCERKFTTKQGLERHMHIHISTVNHAFKCKYCGKAFGTQINRRRHERRHEAGLKRKPSQTLQPSEDLADGKASGENVASKDDSSPPSLGPDCLIMNSEKASQDTINSSVVEENGEVKELHPCKYCKKVFGTHTNMRRHQRRVHERHLIPKGVRRKGGLEEPQPPAEQAQATQNVYVPSTEPEEEGEADDVYIMDISSNISENLNYYIDGKIQTNNNTSNCDVIEMESASADLYGINCLLTPVTVEITQNIKTTQVPVTEDLPKEPLGSTNSEAKKRRTASPPALPKIKAETDSDPMVPSCSLSLPLSISTTEAVSFHKEKSVYLSSKLKQLLQTQDKLTPAGISATEIAKLGPVCVSAPASMLPVTSSRFKRRTSSPPSSPQHSPALRDFGKPSDGKAAWTDAGLTSKKSKLESHSDSPAWSLSGRDERETVSPPCFDEYKMSKEWTASSAFSSVCNQQPLDLSSGVKQKAEGTGKTPVQWESVLDLSVHKKHCSDSEGKEFKESHSVQPTCSAVKKRKPTTCMLQKVLLNEYNGIDLPVENPADGTRSPSPCKSLEAQPDPDLGPGSGFPAPTVESTPDVCPSSPALQTPSLSSGQLPPLLIPTDPSSPPPCPPVLTVATPPPPLLPTVPLPAPSSSASPHPCPSPLSNATAQSPLPILSPTVSPSPSPIPPVEPLMSAASPGPPTLSSSSSSSSSSSSFSSSSSSSSPSPPPLSAISSVVSSGDNLEASLPMISFKQEELENEGLKPREEPQSAAEQDVVVQETFNKNFVCNVCESPFLSIKDLTKHLSIHAEEWPFKCEFCVQLFKDKTDLSEHRFLLHGVGNIFVCSVCKKEFAFLCNLQQHQRDLHPDKVCTHHEFESGTLRPQNFTDPSKAHVEHMQSLPEDPLETSKEEEELNDSSEELYTTIKIMASGIKTKDPDVRLGLNQHYPSFKPPPFQYHHRNPMGIGVTATNFTTHNIPQTFTTAIRCTKCGKGVDNMPELHKHILACASASDKKRYTPKKNPVPLKQTVQPKNGVVVLDNSGKNAFRRMGQPKRLNFSVELSKMSSNKLKLNALKKKNQLVQKAILQKNKSAKQKADLKNACESSSHICPYCNREFTYIGSLNKHAAFSCPKKPLSPPKKKVSHSSKKGGHSSPASSDKNSNSNHRRRTADAEIKMQSMQTPLGKTRARSSGPTQVPLPSSSFRSKQNVKFAASVKSKKPSSSSLRNSSPIRMAKITHVEGKKPKAVAKNHSAQLSSKTSRSLHVRVQKSKAVLQSKSTLASKKRTDRFNIKSRERSGGPVTRSLQLAAAADLSENKREDGSAKQELKDFRNFL

SEQ ID NO: 4398 - protein, 403 aa, Homo sapiens
MAAFLKMSVSVNFFRPFTRFLVPFTLHRKRNNLTILQRYMSSKIPAVTYPKNESTPPSEELELDKWKTTMKSSVQEECVSTISSSKDEDPLAATREFIEMWRLLGREVPEHITEEELKTLMECVSNTAKKKYLKYLYTKEKVKKARQIKKEMKAAAREEAKNIKLLETTEEDKQKNFLFLRLWDRNMDIAMGWKGAQAMQFGQPLVFDMAYENYMKRKELQNTVSQLLESEGWNRRNVDPFHIYFCNLKIDGALHRELVKRYQEKWDKLLLTSTEKSHVDLFPKDSIIYLTADSPNVMTTFRHDKVYVIGSFVDKSMQPGTSLAKAKRLNLATECLPLDKYLQWEIGNKNLTLDQMIRILLCLKNNGNWQEALQFVPKRKHTGFLEISQHSQEFINRLKKAKT

SEQ ID NO: 4399 - protein, 345 aa, Homo sapiens
MAQHHLWILLLCLQTWPEAAGKDSEIFTVNGILGESVTFPVNIQEPRQVKIIAWTSKTSVAYVTPGDSETAPVVTVTHRNYYERIHALGPNYNLVISDLRMEDAGDYKADINTQADPYTTTKRYNLQIYRRLGKPKITQSLMASVNSTCNVTLTCSVEKEEKNVTYNWSPLGEEGNVLQIFQTPEDQELTYTCTAQNPVSNNSDSISARQLCADIAMGFRTHHTGLLSVLAMFFLLVLILSSVFLFRLFKRRQGRIFPEGSCLNTFTKNPYAASKKTIYTYIMASRNTQPAESRIYDEILQSKVLPSKEEPVNTVYSEVQFADKMGKASTQDSKPPGTSSYEIVI

SEQ ID NO: 4400 - protein, 373 aa, Homo sapiens
MGSQVSVESGALHVVIVGGGFGGIAAASQLQALNVPFMLVDMKDSFHHNVAALRASVETGFAKKTFISYSVTFKDNFRQGLVVGIDLKNQMVLLQGGEALPFSHLILATGSTGPFPGKFNEVSSQQAAIQAYEDMVRQVQRSRFIVVVGGGSAGVEMAAEIKTEYPEKEVTLIHSQVALADKELLPSVRQEVKEILLRKGVQLLLSERVSNLEELPLNEYREYIKVQTDKGTEVATNLVILCTGIKINSSAYRKAFESRLASSGALRVNEHLQVEGHSNVYAIGDCADVRTPKMAYLAGLHANIAVANIVNSVKQRPLQAYKPGALTFLLSMGRNDGVGQISGFYVGRLMVRLTKSRDLFVSTSWKTMRQSPP

SEQ ID NO: 4401 - protein, 476 aa, Homo sapiens
MMERIRKEMILMERGLHSPTAGKRFSNLSNSAGNAVLEALENSQHPARLSPRLPSAPLHSALGELPAKGKFEIDTLFNLQHTGSESTVSSEISSAAESRKKPGHYSEAAAEADMSSDVEVGCSALRSPGGLGAAQLKENNGKGYAESGSAAGTTTSASGSGLGSLHGGSGGSGGSAALGGSGSGADQVRRYRTAFTREQIARLEKEFYRENYVSRPRRCELAAALNLPETTIKVWFQNRRMKDKRQRLAMSWPHPADPSFYTYMMTHAAATGSLPYPFHSHVPLHYYPHVGVTAAAAAAAASGAAAAASSPFATSIRPLDTFRALSHPYSRPELLCSFRHPGLYQAPAAAAGLNSAASAAAAAAAAAAAASSAAAAGAPPSGGSAPCSCLSCHSSQSAAAAAAAAAAALGSRGGGGGGGGGGGGGGGGAGAGGGSDFGCSAAAPRSESGFLPYSAAVLSKTAVSPPDQRDEAPLTR

SEQ ID NO: 4402 - protein, 563 aa, Homo sapiens
MSVLKKNRRKDSDTPQEPSEKAKEQQAEAELRKLRQQFRKMVESRKSFKFRNQQKIASQYKEIKTLKTEQDEITLLLSLMKSSRNMNRSEKNYMELRLLLQTKEDYEALIKSLKVLLAELDEKILQMEKKIANQKQIFAKMQEANNPRKLQKQIHILETRLNLVTVHFDKMLTTNAKLRKEIEDLRFEKAAYDNVYQQLQHCLLMEKKTMNLAIEQSSQAYEQRVEAMARMAAMKDRQKKDTSQYNLEIRELERLYAHESKLKSFLLVKLNDRNEFEEQAKREEALKAKKHVKKNRGESFESYEVAHLRLLKLAESGNLNQLIEDFLAKEEKNFARFTYVTELNNDMEMMHKRTQRIQDEIILLRSQQKLSHDDNHSVLRQLEDKLRKTTEEADMYESKYGEVSKTLDLLKNSVEKLFKKINCDATKILVQLGETGKVTDINLPQYFAIIEKKTNDLLLLETYRRILEVEGAEAEIPPPFINPFWGGSALLKPPEPIKVIPPVLGADPFSDRLDDVEQPLDHSSLRQLVLDNYILKENRSKEVRGDSLPEKVDDFRSRKKVTM

SEQ ID NO: 4403 - protein, 901 aa, Homo sapiens
MEANQCPLVVEPSYPDLVINVGEVTLGEENRKKLQKIQRDQEKERVMRAACALLNSGGGVIRMAKKVEHPVEMGLDLEQSLRELIQSSDLQAFFETKQQGRCFYIFVKSWSSGPFPEDRSVKPRLCSLSSSLYRRSETSVRSMDSREAFCFLKTKRKPKILEEGPFHKIHKGVYQELPNSDPADPNSDPADLIFQKDYLEYGEILPFPESQLVEFKQFSTKHFQEYVKRTIPEYVPAFANTGGGYLFIGVDDKSREVLGCAKENVDPDSLRRKIEQAIYKLPCVHFCQPQRPITFTLKIVNVLKRGELYGYACMIRVNPFCCAVFSEAPNSWIVEDKYVCSLTTEKWVGMMTDTDPDLLQLSEDFECQLSLSSGPPLSRPVYSKKGLEHKKELQQLLFSVPPGYLRYTPESLWRDLISEHRGLEELINKQMQPFFRGILIFSRSWAVDLNLQEKPGVICDALLIAQNSTPILYTILREQDAEGQDYCTRTAFTLKQKLVNMGGYTGKVCVRAKVLCLSPESSAEALEAAVSPMDYPASYSLAGTQHMEALLQSLVIVLLGFRSLLSDQLGCEVLNLLTAQQYEIFSRSLRKNRELFVHGLPGSGKTIMAMKIMEKIRNVFHCEAHRILYVCENQPLRNFISDRNICRAETRKTFLRENFEHIQHIVIDEAQNFRTEDGDWYGKAKSITRRAKGGPGILWIFLDYFQTSHLDCSGLPPLSDQYPREELTRIVRNADPIAKYLQKEMQVIRSNPSFNIPTGCLEVFPEAEWSQGVQGTLRIKKYLTVEQIMTCVADTCRRFFDRGYSPKDVAVLVSTAKEVEHYKYELLKAMRKKRVVQLSDACDMLGDHIVLDSVRRFSGLERSIVFGIHPRTADPAILPNVLICLASRAKQHLYIFPWGGH

SEQ ID NO: 4404 - protein, 311 aa, Homo sapiens
MGSFNTSFEDGFILVGFSDWPQLEPILFVFIFIFYSLTLFGNTIIIALSWLDLRLHTPMYFFLSHLSLLDLCFTTSTVPQLLINLCGVDRTITRGGCVAQLFIYLALGSTECVLLVVMAFDRYAAVCRPLHYMAIMHPHLCQTLAIASWGAGFVNSLIQTGLAMAMPLCGHRLNHFFCEMPVFLKLACADTEGTEAKMFVARVIVVAVPAALILGSYVHIAHAVLRVKSTAGRRKAFGTCGSHLLVVFLFYGSAIYTYLQSIHNYSEREGKFVALFYTIITPILNPLIYTLRNKDVKGALWKVLWRGRDSG

SEQ ID NO: 4405 - protein, 755 aa, Homo sapiens
MAGCIPEEKTYRRFLELFLGEFRGPCGGGEPEPEPEPEPEPEPESEPEPEPELVEAEAAEASVEEPGEEAATVAATEEGDQEQDPEPEEEAAVEGEEEEEGAATAAAAPGHSAVPPPPPQLPPLPPLPRPLSERITREEVEGESLDLCLQQLYKYNCPSFLAAALARATSDEVLQSDLSAHYIPKETDGTEGTVEIETVKLARSVFSKLHEICCSWVKDFPLRRRPQLYYETSIHAIKNMRRKMEDKHVCIPDFNMLFNLEDQEEQAYFAVFDGHGGVDAAIYASIHLHVNLVRQEMFPHDPAEALCRAFRVTDERFVQKAARESLRCGTTGVVTFIRGNMLHVAWVGDSQVMLVRKGQAVELMKPHKPDREDEKQRIEALGGCVVWFGAWRVNGSLSVSRAIGDAEHKPYICGDADSASTVLDGTEDYLILACDGFYDTVNPDEAVKVVSDHLKENNGDSSMVAHKLVASARDAGSSDNITVIVVFLRDMNKAVNVSEESDWTENSFQGGQEDGGDDKENHGECKRPWPQHQCSAPADLGYDGRVDSFTDRTSLSPGSQINVLEDPGYLDLTQIEASKPHSAQFLLPVEMFGPGAPKKANLINELMMEKKSVQSSLPEWSGAGEFPTAFNLGSTGEQIYRMQSLSPVCSGLENEQFKSPGNRVSRLSHLRHHYSKKWHRFRFNPKFYSFLSAQEPSHKIGTSLSSLTGSGKRNRIRSSLPWRQNSWKGYSENMRKLRKTHDIPCPDLPWSYKIE

SEQ ID NO: 4406 - protein, 433 aa, Homo sapiens
MEAVYLVVNGLGLVLDVLTLVLDLNFLLVSSLLASLAWLLAFVYNLPHTVLTSLLHLGRGVLLSLLALIEAVVRFTCGGLQALCTLLYSCCSGLESLKLLGHLASHGALRSREILHRGVLNVVSSGHALLRQACDICAIAMSLVAYVINSLVNICLIGTQNLFSLVLALWDAVTGPLWRMTDVVAAFLAHISSSAVAMAILLWTPCQLALELLASAARLLASFVLVNLTGLVLLACVLAVTVTVLHPDFTLRLATQALSQLHARPSYHRLREDVMRLSRLALGSEAWRRVWSRSLQLASWPNRGGAPGAPQGDPMRVFSVRTRRQDTLPEAGRRSEAEEEEARTIRVTPVRGRERLNEEEPPGGQDPWKLLKEQEERKKCVICQDQSKTVLLLPCRHLCLCQACTEILMRHPVYHRNCPLCRRGILQTLNVYL

SEQ ID NO: 4407 - protein, 785 aa, Homo sapiens
MVVPSLKLQDLIEEIRGAKTQAQEREVIQKECAHIRASFRDGDPVHRHRQLAKLLYVHMLGYPAHFGQMECLKLIASSRFTDKRVGYLGAMLLLDERHDAHLLITNSIKNDLSQGIQPVQGLALCTLSTMGSAEMCRDLAPEVEKLLLQPSPYVRKKAILTAVHMIRKVPELSSVFLPPCAQLLHERHHGILLGTITLITELCERSPAALRHFRKVVPQLVHILRTLVTMGYSTEHSISGVSDPFLQVQILRLLRILGRNHEESSETMNDLLAQVATNTDTSRNAGNAVLFETVLTIMDIRSAAGLRVLAVNILGRFLLNSDRNIRYVALTSLLRLVQSDHSAVQRHRPTVVECLRETDASLSRRALELSLALVNSSNVRAMMQELQAFLESCPPDLRADCASGILLAAERFAPTKRWHIDTILHVLTTAGTHVRDDAVANLTQLIGGAQELHAYSVRRLYNALAEDISQQPLVQVAAWCIGEYGDLLLAGNCEEIEPLQVDEEEVLALLEKVLQSHMSLPATRGYALTALMKLSTRLCGDNNRIRQVVSIYGSCLDVELQQRAVEYDTLFRKYDHMRAAILEKMPLVERDGPQADEEAKESKEAAQLSEAAPVPTEPQASQLLDLLDLLDGASGDVQHPPHLDPSPGGALVHLLDLPCVPPPPAPIPDLKVFEREGVQLNLSFIRPPENPALLLITITATNFSEGDVTHFICQAAVPKSLQLQLQAPSGNTVPARGGLPITQLFRILNPNKAPLRLKLRLTYDHFHQSVQEIFEVNNLPVESWQ

SEQ ID NO: 4408 - protein, 271 aa, Homo sapiens
MGNGGRSGLQQGKGNVDGVAATPTAASASCQYRCIECNQEAKELYRDYNHGVLKITICKSCQKPVDKYIEYDPVIILINAILCKAQAYRHILFNTQINIHGKLCIFCLLCEAYLRWWQLQDSNQNTAPDDLIRYAKEWDFYRMFAIAALEQTAYFIGIFTFLWVERPMTAKKKPNFILLLKALLLSSYGKLLLIPAVIWEHDYTSVCLKLIKVFVLTSNFQAIRVTLNINRKLSFLAVLSGLLLESIMVYFFQSMEWDVGSDYAIFKSQDF

SEQ ID NO: 4409 - protein, 1324 aa, Homo sapiens
MADSLYNIRLLREFSNEYLNKCFYLTLEDMLYAPLVLKPNVMVFIAELFWWFENVKPDFVQPRDVQELKDAKTVLHQKSSRPPVPISNATKRSFLGSPAAGTLAELQPPVQLPAEGCHRHYLHPEEPEYLGKGTAAFSPSHPLLPLRQKQQKSIQGEDIPDQRHRSNSLTRVDGQPRGAAIAWPEKKTRPASQPTPFALHHAASCEVDPSSGDSISLARSISKDSLASNIVNLTPQNQPHPTATKSHGKSLLSNVSIEDEEEELVAIVRADVVPQQADPEFPRASPRALGLTANARSPQGQLDTSESKPDSFFLEPLMPAVLKPAKEKQVITKEDERGEGRPRSIVSRRPSEGPQPLVRRKMTGSRDLNRTFTPIPCSEFPMGIDPTETGPLSVETAGEVCGGPLALGGFDPFPQGPSTDGFFLHVGRADEDTEGRLYVSCSKSPNSHDSEPWTLLRQDSDSDVVDIEEAEHDFMGEAHPVVFSRYIGEEESAKLQEDMKVKEHEDKDDASGRSSPCLSTASQMSSVSMASGSVKMTSFAERKLQRLNSCETKSSTSSSQKTTPDASESCPAPLTTWRQKREQSPSQHGKDPASLLASELVQLHMQLEEKRRAIEAQKKKMEALSARQRLKLGKAAFLHVVKKGKAEAAPPLRPEHFAKEYSQHNGEDCGDAVSKTEDFLVKEEQREELLHEPQDVDKESLAFAQQHKAKDPVALHELERNKVISAALLEDTVGEVVDVNECDLSIEKLNETISTLQQAILKISQQQEQLLMKSPTVPVPGSKNNSQDHKVKAPVHFVEPLSPTGVAGHRKAPRLGQGRNSRSGRPAELKVPKDRPQGSSRSKTPTPSVETLPHLRPFPASSHPRTPTDPGLDSALEPSGDPHGKCLFDSYRLHDESNQRTLTLSSSKDANILSEQMSLKEVLDASVKEVGSSSSDVSGKESVPVEEPLRSRASLIEVDLSDLKAPDEDGELVSLDGSADLVSEGDQKPGVGFFFKDEQKAEDELAKKRAAFLLKQQRKAEEARVRKQQLEAEVELKRDEARRKAEEDRVRKEEEKARRELIKQEYLRRKQQQILEEQGLGKPKSKPKKPRPKSVHREESCSDSGTKCSSTPDNLSRTQSGSSLSLASAATTEPESVHSGGTPSQRVESMEALPILSRNPSRSTDRDWETASAASSLASVAEYTGPKLFKEPSSKSNKPIIHNAISHCCLAGKVNEPHKNSILEELEKCDANHYIILFRDAGCQFRALYCYYPDTEEIYKLTGTGPKNITKKMIDKLYKYSSDRKQFNLIPAKTMSVSVDALTIHNHLWQPKRPAVPKKAQTRK

SEQ ID NO: 4410 - protein, 2322 aa, Homo sapiens
MQSGPRPPLPAPGLALALTLTMLARLASAASFFGENHLEVPVATALTDIDLQLQFSTSQPEALLLLAAGPADHLLLQLYSGRLQVRLVLGQEELRLQTPAETLLSDSIPHTVVLTVVEGWATLSVDGFLNASSAVPGAPLEVPYGLFVGGTGTLGLPYLRGTSRPLRGCLHAATLNGRSLLRPLTPDVHEGCAEEFSASDDVALGFSGPHSLAAFPAWGTQDEGTLEFTLTTQSRQAPLAFQAGGRRGDFIYVDIFEGHLRAVVEKGQGTVLLHNSVPVADGQPHEVSVHINAHRLEISVDQYPTHTSNRGVLSYLEPRGSLLLGGLDAEASRHLQEHRLGLTPEATNASLLGCMEDLSVNGQRRGLREALLTRNMAAGCRLEEEEYEDDAYGHYEAFSTLAPEAWPAMELPEPCVPEPGLPPVFANFTQLLTISPLVVAEGGTAWLEWRHVQPTLDLMEAELRKSQVLFSVTRGARHGELELDIPGAQARKMFTLLDVVNRKARFIHDGSEDTSDQLVLEVSVTARVPMPSCLRRGQTYLLPIQVNPVNDPPHIIFPHGSLMVILEHTQKPLGPEVFQAYDPDSACEGLTFQVLGTSSGLPVERRDQPGEPATEFSCRELEAGSLVYVHRGGPAQDLTFRVSDGLQASPPATLKVVAIRPAIQIHRSTGLRLAQGSAMPILPANLSVETNAVGQDVSVLFRVTGALQFGELQKQGAGGVEGAEWWATQAFHQRDVEQGRVRYLSTDPQHHAYDTVENLALEVQVGQEILSNLSFPVTIQRATVWMLRLEPLHTQNTQQETLTTAHLEATLEEAGPSPPTFHYEVVQAPRKGNLQLQGTRLSDGQGFTQDDIQAGRVTYGATARASEAVEDTFRFRVTAPPYFSPLYTFPIHIGGDPDAPVLTNVLLVVPEGGEGVLSADHLFVKSLNSASYLYEVMERPRHGRLAWRGTQDKTTMVTSFTNEDLLRGRLVYQHDDSETTEDDIPFVATRQGESSGDMAWEEVRGVFRVAIQPVNDHAPVQTISRIFHVARGGRRLLTTDDVAFSDADSGFADAQLVLTRKDLLFGSIVAVDEPTRPIYRFTQEDLRKRRVLFVHSGADRGWIQLQVSDGQHQATALLEVQASEPYLRVANGSSLVVPQGGQGTIDTAVLHLDTNLDIRSGDEVHYHVTAGPRWGQLVRAGQPATAFSQQDLLDGAVLYSHNGSLSPRDTMAFSVEAGPVHTDATLQVTIALEGPLAPLKLVRHKKIYVFQGEAAEIRRDQLEAAQEAVPPADIVFSVKSPPSAGYLVMVSRGALADEPPSLDPVQSFSQEAVDTGRVLYLHSRPEAWSDAFSLDVASGLGAPLEGVLVELEVLPAAIPLEAQNFSVPEGGSLTLAPPLLRVSGPYFPTLLGLSLQVLEPPQHGALQKEDGPQARTLSAFSWRMVEEQLIRYVHDGSETLTDSFVLMANASEMDRQSHPVAFTVTVLPVNDQPPILTTNTGLQMWEGATAPIPAEALRSTDGDSGSEDLVYTIEQPSNGRVVLRGAPGTEVRSFTQAQLDGGLVLFSHRGTLDGGFRFRLSDGEHTSPGHFFRVTAQKQVLLSLKGSQTLTVCPGSVQPLSSQTLRASSSAGTDPQLLLYRVVRGPQLGRLFHAQQDSTGEALVNFTQAEVYAGNILYEHEMPPEPFWEAHDTLELQLSSPPARDVAATLAVAVSFEAACPQRPSHLWKNKGLWVPEGQRARITVAALDASNLLASVPSPQRSEHDVLFQVTQFPSRGQLLVSEEPLHAGQPHFLQSQLAAGQLVYAHGGGGTQQDGFHFRAHLQGPAGASVAGPQTSEAFAITVRDVNERPPQPQASVPLRLTRGSRAPISRAQLSVVDPDSAPGEIEYEVQRAPHNGFLSLVGGGLGPVTRFTQADVDSGRLAFVANGSSVAGIFQLSMSDGASPPLPMSLAVDILPSAIEVQLRAPLEVPQALGRSSLSQQQLRVVSDREEPEAAYRLIQGPQYGHLLVGGRPTSAFSQFQIDQGEVVFAFTNFSSSHDHFRVLALARGVNASAVVNVTVRALLHVWAGGPWPQGATLRLDPTVLDAGELANRTGSVPRFRLLEGPRHGRVVRVPRARTEPGGSQLVEQFTQQDLEDGRLGLEVGRPEGRAPGPAGDSLTLELWAQGVPPAVASLDFATEPYNAARPYSVALLSVPEAARTEAGKPESSTPTGEPGPMASSPEPAVAKGGFLSFLEANMFSVIIPMCLVLLLLALILPLLFYLRKRNKTGKHDVQVLTAKPRNGLAGDTETFRKVEPGQAIPLTAVPGQGPPPGGQPDPELLQFCRTPNPALKNGQYWV

SEQ ID NO: 4411 - protein, 348 aa, Homo sapiens
MGKDYYKILGIPSGANEDEIKKAYRKMALKYHPDKNKEPNAEEKFKEIAEAYDVLSDPKKRGLYDQYGEEGLKTGGGTSGGSSGSFHYTFHGDPHATFASFFGGSNPFDIFFASSRSTRPFSGFDPDDMDVDEDEDPFGAFGRFGFNGLSRGPRRAPEPLYPRRKVQDPPVVHELRVSLEEIYHGSTKRMKITRRRLNPDGRTVRTEDKILHIVIKRGWKEGTKITFPKEGDATPDNIPADIVFVLKDKPHAHFRRDGTNVLYSALISLKEALCGCTVNIPTIDGRVIPLPCNDVIKPGTVKRLRGEGLPFPKVPTQRGDLIVEFKVRFPDRLTPQTRQILKQHLPCS

SEQ ID NO: 4412 - protein, 686 aa, Homo sapiens
MNPTETKAVKTEPEKKSQSTKLSVVHEKKSQEGKPKEHTEPKSLPKQASDTGSNDAHNKKAVSRSAEQQPSEKSTEPKTKPQDMISAGGESVAGITAISGKPGDKKKEKKSLTPAVPVESKPDKPSGKSGMDAALDDLIDTLGGPEETEEENTTYTGPEVSDPMSSTYIEELGKREVTIPPKYRELLAKKEGITGPPADSSKPIGPDDAIDALSSDFTCGSPTAAGKKTEKEESTEVLKAQSAGTVRSAAPPQEKKRKVEKDTMSDQALEALSASLGTRQAEPELDLRSIKEVDEAKAKEEKLEKCGEDDETIPSEYRLKPATDKDGKPLLPEPEEKPKPRSESELIDELSEDFDRSECKEKPSKPTEKTEESKAAAPAPVSEAVCRTSMCSIQSAPPEPATLKGTVPDDAVEALADSLGKKEADPEDGKPVMDKVKEKAKEEDREKLGEKEETIPPDYRLEEVKDKDGKPLLPKESKEQLPPMSEDFLLDALSEDFSGPQNASSLKFEDAKLAAAISEVVSQTPASTTQAGAPPRDTSQSDKDLDDALDKLSDSLGQRQPDPDENKPMEDKVKEKAKAEHRDKLGERDDTIPPEYRHLLDDNGQDKPVKPPTKKSEDSKKPADDQDPIDALSGDLDSCPSTTETSQNTAKDKCKKAASSSKAPKNGGKAKDSAKTTEETSKPKDD

SEQ ID NO: 4413 - protein, 828 aa, Homo sapiens
MLQGTCSVLLLWGILGAIQAQQQEVISPDTTERNNNCPEKTDCPIHVYFVLDTSESVTMQSPTDILLFHMKQFVPQFISQLQNEFYLDQVALSWRYGGLHFSDQVEVFSPPGSDRASFIKNLQGISSFRRGTFTDCALANMTEQIRQDRSKGTVHFAVVITDGHVTGSPCGGIKLQAERAREEGIRLFAVAPNQNLKEQGLRDIASTPHELYRNDYATMLPDSTEIDQDTINRIIKVMKHEAYGECYKVSCLEIPGPSGPKGYRGQKGAKGNMGEPGEPGQKGRQGDPGIEGPIGFPGPKGVPGFKGEKGEFGADGRKGAPGLAGKNGTDGQKGKLGRIGPPGCKGDPGNRGPDGYPGEAGSPGERGDQGGKGDPGRPGRRGPPGEIGAKGSKGYQGNSGAPGSPGVKGAKGGPGPRGPKGEPGRRGDPGTKGSPGSDGPKGEKGDPGPEGPRGLAGEVGNKGAKGDRGLPGPRGPQGALGEPGKQGSRGDPGDAGPRGDSGQPGPKGDPGRPGFSYPGPRGAPGEKGEPGPRGPEGGRGDFGLKGEPGRKGEKGEPADPGPPGEPGPRGPRGVPGPEGEPGPPGDPGLTECDVMTYVRETCGCCDCEKRCGALDVVFVIDSSESIGYTNFTLEKNFVINVVNRLGAIAKDPKSETGTRVGVVQYSHEGTFEAIQLDDERIDSLSSFKEAVKNLEWIAGGTWTPSALKFAYDRLIKESRRQKTRVFAVVITDGRHDPRDDDLNLRALCDRDVTVTAIGIGDMFHEKHESENLYSIACDKPQQVRNMTLFSDLVAEKFIDDMEDVLCPDPQIVCPDLPCQTGLDGAVLC

SEQ ID NO: 4414 - protein, 635 aa, Homo sapiens
MAPPLLLLLLASGAAACPLPCVCQNLSESLSTLCAHRGLLFVPPNVDRRTVELRLADNFIQALGPPDFRNMTGLVDLTLSRNAITRIGARAFGDLESLRSLHLDGNRLVELGTGSLRGPVNLQHLILSGNQLGRIAPGAFDDFLESLEDLDLSYNNLRQVPWAGIGAMPALHTLNLDHNLIDALPPGAFAQLGQLSRLDLTSNRLATLAPDPLFSRGRDAEASPAPLVLSFSGNPLHCNCELLWLRRLARPDDLETCASPPGLAGRYFWAVPEGEFSCEPPLIARHTQRLWVLEGQRATLRCRALGDPAPTMHWVGPDDRLVGNSSRARAFPNGTLEIGVTGAGDAGGYTCIATNPAGEATARVELRVLALPHGGNSSAEGGRPGPSDIAASARTAAEGEGTLESEPAVQVTEVTATSGLVSWGPGRPADPVWMFQIQYNSSEDETLIYRIVPASSHHFLLKHLVPGADYDLCLLALSPAAGPSDLTATRLLGCAHFSTLPASPLCHALQAHVLGGTLTVAVGGVLVAALLVFTVALLVRGRGAGNGRLPLKLSHVQSQTNGGPSPTPKAHPPRSPPPRPQRSCSLDLGDAGCYGYARRLGGAWARRSHSVHGGLLGAGCRGVGGSAERLEESVV

SEQ ID NO: 4415 - protein, 457 aa, Homo sapiens
MSDANKAAIAAEKEALNLKLPPIVHLPENIGVDTPTQSKLLKYRRSKEQQQKINQLVIDGAKRNLDRTLGKRTPLLPPPDYPQTMTSEMKKKGFNYIYMKQCVESSPLVPIQQEWLDHMLRLIPESLKEGKEREELLESLINEVSSDFENSMKRYLVQSVLVKPPVKSLEDEGGPLPESPVGLDYSNPWHSSYVQARNQIFSNLHIIHPTMKMLLDLGYTTFADTVLLDFTGIRAKGPIDCESLKTDLSIQTRNAEEKIMNTWYPKVINLFTKKEALEGVKPEKLDAFYSCVSTLMSNQLKDLLRRTVEGFVKLFDPKDQQRLPIFKIELTFDDDKMEFYPTFQDLEDNVLSLVERIAEALQNVQTIPSWLSGTSTPVNLDTELPEHVLHWAVDTLKAAVHRNLEGARKHYETYVEKYNWLLDGTAVENIETFQTEDHTFDEYTEELDCWVVWEVYF

SEQ ID NO: 4416 - protein, 587 aa, Homo sapiens
MLLCTARLVGLQLLISCCWAFACHSTESSPDFTLPGDYLLAGLFPLHSGCLQVRHRPEVTLCDRSCSFNEHGYHLFQAMRLGVEEINNSTALLPNITLGYQLYDVCSDSANVYATLRVLSLPGQHHIELQGDLLHYSPTVLAVIGPDSTNRAATTAALLSPFLVPMLLEQIHKVHFLLHKDTVAFNDNRDPLSSYNIIAWDWNGPKWTFTVLGSSTWSPVQLNINETKIQWHGKDNQVPKSVCSSDCLEGHQRVVTGFHHCCFECVPCGAGTFLNKSDLYRCQPCGKEEWAPEGSQTCFPRTVVFLALREHTSWVLLAANTLLLLLLLGTAGLFAWHLDTPVVRSAGGRLCFLMLGSLAAGSGSLYGFFGEPTRPACLLRQALFALGFTIFLSCLTVRSFQLIIIFKFSTKVPTFYHAWVQNHGAGLFVMISSAAQLLICLTWLVVWTPLPAREYQRFPHLVMLECTETNSLGFILAFLYNGLLSISAFACSYLGKDLPENYNEAKCVTFSLLFNFVSWIAFFTTASVYDGKYLPAANMMAGLSSLSSGFGGYFLPKCYVILCRPDLNSTEHFQASIQDYTRRCGST

SEQ ID NO: 4417 - protein, 1029 aa, Homo sapiens
MEAAHLLPAADVLRHFSVTAEGGLSPAQVTGARERYGPNELPSEEGKSLWELVLEQFEDLLVRILLLAALVSFVLAWFEEGEETTTAFVEPLVIMLILVANAIVGVWQERNAESAIEALKEYEPEMGKVIRSDRKGVQRIRARDIVPGDIVEVAVGDKVPADLRLIEIKSTTLRVDQSILTGESVSVTKHTEAIPDPRAVNQDKKNMLFSGTNITSGKAVGVAVATGLHTELGKIRSQMAAVEPERTPLQRKLDEFGRQLSHAISVICVAVWVINIGHFADPAHGGSWLRGAVYYFKIAVALAVAAIPEGLPAVITTCLALGTRRMARKNAIVRSLPSVETLGCTSVICSDKTGTLTTNQMSVCRMFVVAEADAGSCLLHEFTISGTTYTPEGEVRQGDQPVRCGQFDGLVELATICALCNDSALDYNEAKGVYEKVGEATETALTCLVEKMNVFDTDLQALSRVERAGACNTVIKQLMRKEFTLEFSRDRKSMSVYCTPTRPHPTGQGSKMFVKGAPESVIERCSSVRVGSRTAPLTPTSREQILAKIRDWGSGSDTLRCLALATRDAPPRKEDMELDDCSKFVQYETDLTFVGCVGMLDPPRPEVAACITRCYQAGIRVVMITGDNKGTAVAICRRLGIFGDTEDVAGKAYTGREFDDLSPEQQRQACRTARCFARVEPAHKSRIVENLQSFNEITAMTGDGVNDAPALKKAEIGIAMGSGTAVAKSAAEMVLSDDNFASIVAAVEEGRAIYSNMKQFIRYLISSNVGEVVCIFLTAILGLPEALIPVQLLWVNLVTDGLPATALGFNPPDLDIMEKLPRSPREALISGWLFFRYLAIGVYVGLATVAAATWWFVYDAEGPHINFYQLRNFLKCSEDNPLFAGIDCEVFESRFPTTMALSVLVTIEMCNALNSVSENQSLLRMPPWMNPWLLVAVAMSMALHFLILLVPPLPLIFQVTPLSGRQWVVVLQISLPVILLDEALKYLSRNHMHACLYPGLLRTVSQAWSRQPLTTSWTPDHTGLASLKK

SEQ ID NO: 4418 - protein, 403 aa, Homo sapiens
MFSVFEEITRIVVKEMDAGGDMIAVRSLVDADRFRCFHLVGEKRTFFGCRHYTTGLTLMDILDTDGDKWLDELDSGLQGQKAEFQILDNVDSTGELIVRLPKEITISGSFQGFHHQKIKISENRISQQYLATLENRKLKRELPFSFRSINTRENLYLVTETLETVKEETLKSDRQYKFWSQISQGHLSYKHKGQREVTIPPNRVLSYRVKQLVFPNKETMKKDGASSCLGKSLGSEDSRNMKEKLEDMESVLKDLTEEKRKDVLNSLAKCLGKEDIRQDLEQRVSEVLISGELHMEDPDKPLLSSLFNAAGVLVEARAKAILDFLDALLELSEEQQFVAEALEKGTLPLLKDQVKSVMEQNWDELASSPPDMDYDPEARILCALYVVVSILLELAEGPTSVSS

SEQ ID NO: 4419 - protein, 553 aa, Homo sapiens
MATDTSQGELVHPKALPLIVGAQLIHADKLGEKVEDSTMPIRRTVNSTRETPPKSKLAEGEEEKPEPDISSEESVSTVEEQENETPPATSSEAEQPKGEPENEEKEENKSSEETKKDEKDQSKEKEKKVKKTIPSWATLSASQLARAQKQTPMASSPRPKMDAILTEAIKACFQKSGASVVAIRKYIIHKYPSLELERRGYLLKQALKRELNRGVIKQVKGKGASGSFVVVQKSRKTPQKSRNRKNRSSAVDPEPQVKLEDVLPLAFTRLCEPKEASYSLIRKYVSQYYPKLRVDIRPQLLKNALQRAVERGQLEQITGKGASGTFQLKKSGEKPLLGGSLMEYAILSAIAAMNEPKTCSTTALKKYVLENHPGTNSNYQMHLLKKTLQKCEKNGWMEQISGKGFSGTFQLCFPYYPSPGVLFPKKEPDDSRDEDEDEDESSEEDSEDEEPPPKRRLQKKTPAKSPGKAASVKQRGSKPAPKVSAAQRGKARPLPKKAPPKAKTPAKKTRPSSTVIKKPSGGSSKKPATSARKEVKLPGKGKSTMKKSFRVKK

SEQ ID NO: 4420 - protein, 602 aa, Homo sapiens
MRGGRARPAWESFMGLPPRSSAKWGAGQSLDRLCCAPGSRGLAGAPGRMRAPPAGRSQPAGGPGDSLPHPPGGLGPGGSAWARRAEAAASRARGGGRGGPGITWAEAGPGAPGGLSPESGRRQRERWRLPAFPPSRAWAPSRTGERQPGERAHLRLSARPALPGAGLLSAPLSARNPGLVRGPAPWSLASAGAPPRAALSPAGALLLQPPARRVLCPRSEGGSRTGRAGPSGWAPPRGARSAESTDRLKGMALTVDVAGPAPWGFRITGGRDFHTPIMVTKVAERGKAKDADLRPGDIIVAINGESAEGMLHAEAQSKIRQSPSPLRLQLDRSQATSPGQTNGDSSLEVLATRFQGSVRTYTESQSSLRSSYSSPTSLSPRAGSPFSPPPSSSSLTGEAAISRSFQSLACSPGLPAADRLSYSGRPGSRQAGLGRAGDSAVLVLPPSPGPRSSRPSMDSEGGSLLLDEDSEVFKMLQENREGRAAPRQSSSFRLLQEALEAEERGGTPAFLPSSLSPQSSLPASRALATPPKLHTCEKCSTSIANQAVRIQEGRYRHPGCYTCADCGLNLKMRGHFWVGDELYCEKHARQRYSAPATLSSRA

SEQ ID NO: 4421 - protein, 1023 aa, Homo sapiens
MAGNDCGALLDEELSSFFLNYLADTQGGGSGEEQLYADFPELDLSQLDASDFDSATCFGELQWCPENSETEPNQYSPDDSELFQIDSENEALLAELTKTLDDIPEDDVGLAAFPALDGGDALSCTSASPAPSSAPPSPAPEKPSAPAPEVDELSLLQKLLLATSYPTSSSDTQKEGTAWRQAGLRSKSQRPCVKADSTQDKKAPMMQSQSRSCTELHKHLTSAQCCLQDRGLQPPCLQSPRLPAKEDKEPGEDCPSPQPAPASPRDSLALGRADPGAPVSQEDMQAMVQLIRYMHTYCLPQRKLPPQTPEPLPKACSNPSQQVRSRPWSRHHSKASWAEFSILRELLAQDVLCDVSKPYRLATPVYASLTPRSRPRPPKDSQASPGRPSSVEEVRIAASPKSTGPRPSLRPLRLEVKREVRRPARLQQQEEEDEEEEEEEEEEEKEEEEEWGRKRPGRGLPWTKLGRKLESSVCPVRRSRRLNPELGPWLTFADEPLVPSEPQGALPSLCLAPKAYDVERELGSPTDEDSGQDQQLLRGPQIPALESPCESGCGDMDEDPSCPQLPPRDSPRCLMLALSQSDPTFGKKSFEQTLTVELCGTAGLTPPTTPPYKPTEEDPFKPDIKHSLGKEIALSLPSPEGLSLKATPGAAHKLPKKHPERSELLSHLRHATAQPASQAGQKRPFSCSFGDHDYCQVLRPEGVLQRKVLRSWEPSGVHLEDWPQQGAPWAEAQAPGREEDRSCDAGAPPKDSTLLRDHEIRASLTKHFGLLETALEEEDLASCKSPEYDTVFEDSSSSSGESSFLPEEEEEEGEEEEEDDEEEDSGVSPTCSDHCPYQSPPSKANRQLCSRSRSSSGSSPCHSWSPATRRNFRCESRGPCSDRTPSIRHARKRREKAIGEGRVVYIQNLSSDMSSRELKRRFEVFGEIEECEVLTRNRRGEKYGFITYRCSEHAALSLTKGAALRKRNEPSFQLSYGGLRHFCWPRYTDYDSNSEEALPASGKSKYEAMDFDSLLKEAQQSLH

SEQ ID NO: 4422 - protein, 479 aa, Homo sapiens
MNWSHSCISFCWIYFAASRLRAAETADGKYAQKLFNDLFEDYSNALRPVEDTDKVLNVTLQITLSQIKDMDERNQILTAYLWIRQIWHDAYLTWDRDQYDGLDSIRIPSDLVWRPDIVLYNKADDESSEPVNTNVVLRYDGLITWDAPAITKSSCVVDVTYFPFDNQQCNLTFGSWTYNGNQVDIFNALDSGDLSDFIEDVEWEVHGMPAVKNVISYGCCSEPYPDVTFTLLLKRRSSFYIVNLLIPCVLISFLAPLSFYLPAASGEKVSLGVTILLAMTVFQLMVAEIMPASENVPLIGKYYIATMALITASTALTIMVMNIHFCGAEARPVPHWARVVILKYMSRVLFVYDVGESCLSPHHSRERDHLTKVYSKLPESNLKAARNKDLSRKKDMNKRLKNDLGCQGKNPQEAESYCAQYKVLTRNIEYIAKCLKDHKATNSKGSEWKKVAKVIDRFFMWIFFIMVFVMTILIIARAD

SEQ ID NO: 4423 - protein, 1523 aa, Homo sapiens
MTSVWKRLQRVGKRAAKFQFVACYHELVLECTKKWQPDKLVVVWTRRNRRICSKAHSWQPGIQNPYRGTVVWMVPENVDISVTLYRDPHVDQYEAKEWTFIIENESKGQRKVLATAEVDLARHAGPVPVQVPVRLRLKPKSVKVVQAELSLTLSGVLLREGRATDDDMQSLASLMSVKPSDVGNLDDFAESDEDEAHGPGAPEARARVPQPDPSRELKTLCEEEEEGQGRPQQAVASPSNAEDTSPAPVSAPAPPARTSRGQGSERANEAGGQVGPEAPRPPETSPEMRSSRQPAQDTAPTPAPRLRKGSDALRPPVPQGEDEVPKASGAPPAGLGSARETQAQACPQEGTEAHGARLGPSIEDKGSGDPFGRQRLKAEEMDTEDRPEASGVDTEPRSGGREANTKRSGVRAGEAEESSAVCQVDAEQRSKVRHVDTKGPEATGVMPEARCRGTPEAPPRGSQGRLGVRTRDEAPSGLSLPPAEPAGHSGQLGDLEGARAAAGQEREGAEVRGGAPGIEGTGLEQGPSVGAISTRPQVSSWQGALLSTAQGAISRGLGGWEAEAGGSGDLETETEVVGLEVLGTQEKEVEGSGFPETRTLEIEILGALEKEAARSRVLESEVAGTAQCEGLETQETEVGVIETPGTETEVLGTQKTEAGGSGVLQTRTTIAETEVLVTQEISGDLGPLKIEDTIQSEMLGTQETEVEASRVPESEAEGTEAKILGTQEITARDSGVREIEAEIAESDILVAQEIEVGLLGVLGIETGAAEGAILGTQEIASRDSGVPGLEADTTGIQVKEVGGSEVPEIATGTAETEILGTQEIASRSSGVPGLESEVAGAQETEVGGSGISGPEAGMAEARVLMTRKTEIIVPEAEKEEAQTSGVQEAETRVGSALKYEALRAPVTQPRVLGSQEAKAEISGVQGSETQVLRVQEAEAGVWGMSEGKSGAWGAQEAEMKVLESPENKSGTFKAQEAEAGVLGNEKGKEAEGSLTEASLPEAQVASGAGAGAPRASSPEKAEEDRRLPGSQAPPALVSSSQSLLEWCQEVTTGYRGVRITNFTTSWRNGLAFCAILHRFYPDKIDYASLDPLNIKQNNKQAFDGFAALGVSRLLEPADMVLLSVPDKLIVMTYLCQIRAFCTGQELQLVQLEGGGGAGTYRVGSAQPSPPDDLDAGGLAQRLRGHGAEGPQEPKEAADRADGAAPGVASRNAVAGRASKDGGAEAPRESRPAEVPAEGLVNGAGAPGGGGVRLRRPSVNGEPGSVPPPRAHGSFSHVRDADLLKKRRSRLRNSSSFSMDDPDAGAMGAAAAEGQAPDPSPAPGPPTAADSQQPPGGSSPSEEPPPSPGEEAGLQRFQDTSQYVCAELQALEQEQRQIDGRAAEVEMQLRSLMESGANKLQEEVLIQEWFTLVNKKNALIRRQDQLQLLMEEQDLERRFELLSRELRAMLAIEDWQKTSAQQHREQLLLEELVSLVNQRDELVRDLDHKERIALEEDERLERGLEQRRRKLSRQLSRRERCVLS

SEQ ID NO: 4424 - protein, 477 aa, Homo sapiens
MSAAPGLLHQELSCPLCLQLFDAPVTAECGHSFCRACLGRVAGEPAADGTVLCPCCQAPTRPQALSTNLQLARLVEGLAQVPQGHCEEHLDPLSIYCEQDRALVCGVCASLGSHRGHRLLPAAEAHARLKTQLPQQKLQLQEACMRKEKSVAVLEHQLVEVEETVRQFRGAVGEQLGKMRVFLAALEGSLDREAERVRGEAGVALRRELGSLNSYLEQLRQMEKVLEEVADKPQTEFLMKYCLVTSRLQKILAESPPPARLDIQLPIISDDFKFQVWRKMFRALMPALEELTFDPSSAHPSLVVSSSGRRVECSEQKAPPAGEDPRQFDKAVAVVAHQQLSEGEHYWEVDVGDKPRWALGVIAAEAPRRGRLHAVPSQGLWLLGLREGKILEAHVEAKEPRALRSPERRPTRIGLYLSFGDGVLSFYDASDADALVPLFAFHERLPRPVYPFFDVCWHDKGKNAQPLLLVGPEGAEA

SEQ ID NO: 4425 - protein, 667 aa, Homo sapiens
METLESELTCPICLELFEDPLLLPCAHSLCFNCAHRILVSHCATNESVESITAFQCPTCRHVITLSQRGLDGLKRNVTLQNIIDRFQKASVSGPNSPSETRRERAFDANTMTSAEKVLCQFCDQDPAQDAVKTCVTCEVSYCDECLKATHPNKKPFTGHRLIEPIPDSHIRGLMCLEHEDEKVNMYCVTDDQLICALCKLVGRHRDHQVAALSERYDKLKQNLESNLTNLIKRNTELETLLAKLIQTCQHVEVNASRQEAKLTEECDLLIEIIQQRRQIIGTKIKEGKVMRLRKLAQQIANCKQCIERSASLISQAEHSLKENDHARFLQTAKNITERVSMATASSQVLIPEINLNDTFDTFALDFSREKKLLECLDYLTAPNPPTIREELCTASYDTITVHWTSDDEFSVVSYELQYTIFTGQANVVSLCNSADSWMIVPNIKQNHYTVHGLQSGTKYIFMVKAINQAGSRSSEPGKLKTNSQPFKLDPKSAHRKLKVSHDNLTVERDESSSKKSHTPERFTSQGSYGVAGNVFIDSGRHYWEVVISGSTWYAIGLAYKSAPKHEWIGKNSASWALCRCNNNWVVRHNSKEIPIEPAPHLRRVGILLDYDNGSIAFYDALNSIHLYTFDVAFAQPVCPTFTVWNKCLTIITGLPIPDHLDCTEQLP

SEQ ID NO: 4426 - protein, 521 aa, Homo sapiens
MEASVLSPTSWEKRRAWLRQSRNWQTQVLEEEAAAALQDVPDPEPSSLDDVFQEGNPINKIEDWLQDCGYSEEGFSEEAGQFIYNGFCSHGTSFEDDLTLGAEATLLAANGKLFSRSFLETARPCQLLDLGCSLASSSMTGGTNKTSSSISEILDKVQEDAEDVLFSLGFGQEDHKDTSRIPARFFTTPSQAKGIDFQLFLKSQVRRIEMEDPCLMLASRFKQVQTLAVTADAFFCLYSYVSKTPVQKFTPSHMFWNCNHPTDVPSIRILSREPEPQSPRDRLRKAISKMCLYTCPRDRPPPPHNTPKRNSLDQVVLEVMDKVKEEKQFLQQDSDLGQFSQEDPVPPAEGKKLPTSPYPCVFCCEEETQQRMSTVLAPSQTLDSNPKVPCCTHSLPIEDPQWSTDPAQIRRELCSLPATNTETHPAKDETFWKRKSRARKSLFQKNLMGRKVKSLDLSITQQKWKQSVDRPELRRSLSQQPQDTFDLEEVQSNSEEEQSQSRWPSRPRHPHHHQTFAGKDS

SEQ ID NO: 4427 - protein, 467 aa, Homo sapiens
MATGADVRDILELGGPEGDAASGTISKKDIINPDKKKSKKSSETLTFKRPEGMHREVYALLYSDKKDAPPLLPSDTGQGYRTVKAKLGSKKVRPWKWMPFTNPARKDGAMFFHWRRAAEEGKDYPFARFNKTVQVPVYSEQEYQLYLHDDAWTKAETDHLFDLSRRFDLRFVVIHDRYDHQQFKKRSVEDLKERYYHICAKLANVRAVPGTDLKIPVFDAGHERRRKEQLERLYNRTPEQVAEEEYLLQELRKIEARKKEREKRSQDLQKLITAADTTAEQRRTERKAPKKKLPQKKEAEKPAVPETAGIKFPDFKSAGVTLRSQRMKLPSSVGQKKIKALEQMLLELGVELSPTPTEELVHMFNELRSDLVLLYELKQACANCEYELQMLRHRHEALARAGVLGGPATPASGPGPASAEPAVTEPGLGPDPKDTIIDVVGAPLTPNSRKRRESASSSSSVKKAKKP

SEQ ID NO: 4428 - protein, 970 aa, Homo sapiens
MQSTDLGNKESGKIWHRKPSPATRDGIIVNIIHNTSDYHPKVLRFLNVAFDGTGDCLIAGDHQGNIYVFDLHGNRFNLVQRTAQACTALAFNLRRKSEFLVALADYSIKCFDTVTKELVSWMRGHESSVFSISVHASGKYAITTSSDTAQLWDLDTFQRKRKLNIRQSVGIQKVFFLPLSNTILSCFKDNSIFAWECDTLFCKYQLPAPPESSSILYKVFAVTRDGRILAAGGKSNHLHLWCLEARQLFRIIQMPTKVRAIRHLEFLPDSFDAGSNQVLGVLSQDGIMRFINMQTCKLLFEIGSLDEGISSSAISPHGRYIASIMENGSLNIYSVQALTQEINKPPPPLVKVIEDLPKNKLSSSDLKMKVTSGRVQQPAKSRESKMQTRILKQDLTGDFESKKNELPDGLNKKRLQILLKGYGEYPTKYRMFIWRSLLQLPENHTAFSTLIDKGTHVAFLNLQKKYPIKSRKLLRVLQRTLSALAHWSVIFSDTPYLPLLAFPFVKLFQNNQLICFEVIATLIINWCQHWFEYFPNPPINILSMIENVLAFHDKELLQHFIDHDITSQLYAWPLLETVFSEVLTREEWLKLFDNIFSNHPSFLLMTVVAYNICSRTPLLSCNLKDDFEFFFHHRNNLDINVVIRQVYHLMETTPTDIHPDSMLNVFVALTKGQYPVFNQYPKFIVDYQTQERERIRNDELDYLRERQTVEDMQAKVDQQRVEDEAWYQKQELLRKAEETRREMLLQEEEKMIQQRQRLAAVKRELKVKEMHLQDAARRRFLKLQQDQQEMELRRLDDEIGRKNLTENQEALAKEMRADADAYRRKVDLEEHMFHKLIEAGETQSQKTQKWKEAEGKEFRLRSAKKASALSDASRKWFLKQEINAAVEHAENPCHKEEPRFQNEQDSSCLPRTSQLNDSSEMDPSTQISLNRRAVEWDTTGQNLIKKVRNLRQRLTARARHRCQTPHLLAA

SEQ ID NO: 4429 - protein, 69 aa, Homo sapiens
MRIFYYLHFLCYVTFILPATCTLVNADRCTKRYGRCKRDCLESEKQIDICSLPRKICCTEKLYEEDDMF

SEQ ID NO: 4430 - protein, 1174 aa, Homo sapiens
MYDADEDMQYDEDDDEITPDLWQEACWIVISSYFDEKGLVRQQLDSFDEFIQMSVQRIVEDAPPIDLQAEAQHASGEVEEPPRYLLKFEQIYLSKPTHWERDGAPSPMMPNEARLRNLTYSAPLYVDITKTVIKEGEEQLQTQHQKTFIGKIPIMLRSTYCLLNGLTDRDLCELNECPLDPGGYFIINGSEKVLIAQEKMATNTVYVFAKKDSKYAYTGECRSCLENSSRPTSTIWVSMLARGGQGAKKSAIGQRIVATLPYIKQEVPIIIVFRALGFVSDRDILEHIIYDFEDPEMMEMVKPSLDEAFVIQEQNVALNFIGSRGAKPGVTKEKRIKYAKEVLQKEMLPHVGVSDFCETKKAYFLGYMVHRLLLAALGRRELDDRDHYGNKRLDLAGPLLAFLFRGMFKNLLKEVRIYAQKFIDRGKDFNLELAIKTRIISDGLKYSLATGNWGDQKKAHQARAGVSQVLNRLTFASTLSHLRRLNSPIGRDGKLAKPRQLHNTLWGMVCPAETPEGHAVGLVKNLALMAYISVGSQPSPILEFLEEWSMENLEEISPAAIADATKIFVNGCWVGIHKDPEQLMNTLRKLRRQMDIIVSEVSMIRDIREREIRIYTDAGRICRPLLIVEKQKLLLKKRHIDQLKEREYNNYSWQDLVASGVVEYIDTLEEETVMLAMTPDDLQEKEVAYCSTYTHCEIHPSMILGVCASIIPFPDHNQSPRNTYQSAMGKQAMGVYITNFHVRMDTLAHVLYYPQKPLVTTRSMEYLRFRELPAGINSIVAIASYTGYNQEDSVIMNRSAVDRGFFRSVFYRSYKEQESKKGFDQEEVFEKPTRETCQGMRHAIYDKLDDDGLIAPGVRVSGDDVIIGKTVTLPENEDELESTNRRYTKRDCSTFLRTSETGIVDQVMVTLNQEGYKFCKIRVRSVRIPQIGDKFASRHGQKGTCGIQYRQEDMPFTCEGITPDIIINPHAIPSRMTIGHLIECLQGKVSANKGEIGDATPFNDAVNVQKISNLLSDYGYHLRGNEVLYNGFTGRKITSQIFIGPTYYQRLKHMVDDKIHSRARGPIQILNRQPMEGRSRDGGLRFGEMERDCQIAHGAAQFLRERLFEASDPYQVHVCNLCGIMAIANTRTHTYECRGCRNKTQISLVRMPYACKLLFQELMSMSIAPRMMSV

SEQ ID NO: 4431 - protein, 588 aa, Homo sapiens
MSSCVSSQPSSNRAAPQDELGGRGSSSSESQKPCEALRGLSSLSIHLGMESFIVVTECEPGCAVDLGLARDRPLEADGQEVPLDTSGSQARPHLSGRKLSLQERSQGGLAAGGSLDMNGRCICPSLPYSPVSSPQSSPRLPRRPTVESHHVSITGMQDCVQLNQYTLKDEIGKGSYGVVKLAYNENDNTYYAMKVLSKKKLIRQAGFPRRPPPRGTRPAPGGCIQPRGPIEQVYQEIAILKKLDHPNVVKLVEVLDDPNEDHLYMVFELVNQGPVMEVPTLKPLSEDQARFYFQDLIKGIEYLHYQKIIHRDIKPSNLLVGEDGHIKIADFGVSNEFKGSDALLSNTVGTPAFMAPESLSETRKIFSGKALDVWAMGVTLYCFVFGQCPFMDERIMCLHSKIKSQALEFPDQPDIAEDLKDLITRMLDKNPESRIVVPEIKLHPWVTRHGAEPLPSEDENCTLVEVTEEEVENSVKHIPSLATVILVKTMIRKRSFGNPFEGSRREERSLSAPGNLLTKKPTRECESLSELKEARQRRQPPGHRPAPRGGGGSALVRGSPCVESCWAPAPGSPARMHPLRPEEAMEPE

SEQ ID NO: 4432 - protein, 621 aa, Homo sapiens
MCSGWSSSVIWRHTQFAVERCGFCGSSGPGAPLEPSTLGSKHLPWEAVSAGFADRNRNMDGAMWLSLCPDNEDLLWRKKHKLLQARGKGDLALQRRADAKLWKNYQLQRLAEELRRGYQEAQHLHVGGLDRLQSARLLGWGGGRARENEPDSQGPIQRRSARPPRAKEKHRAALSEERSCREELGQQHPRHSRPRKTAASPEKPQTTKATGRMNSHLAPPEKRKGRPEPSTKSGGGRCAIHPRRSKGADLERSNPLVAAVGEIGLVEEKEKGTARAGRRQLGKGAVCFVPALTSRSQGQSLEGKLRDLGQLWPADSSCRREAVSPASQCTLREKNKWQKELELAFEELFNINRKLKKHLCLYLALKPRMDQRPGEGHAFSEMQECGAGTPRGKKMADPEMLPAGEPRSPAEEEAQQAASKTDLKTFMGKAQNQKYQGTVKPTFRNGSQTLSPEAGIFINKEDSLLYSTESGQETPKLGTLAEGSLQLHLQDQADRVGSTASRQRQKAEMEQRRQKQLESLEQMEHPDMSLEIHYKAELEKERREQRRARLAHLKSSSTRAQERERGSELSTTSPSGTSLADDDRHSQMIRDQQQQILQQNRLHKQFLEEARKCLREFQNIC

SEQ ID NO: 4433 - protein, 736 aa, Homo sapiens
MATEGMILTNHDHQIRVGVLTVSDSCFRNLAEDRSGINLKDLVQDPSLLGGTISAYKIVPDEIEEIKETLIDWCDEKELNLILTTGGTGFAPRDVTPEATKEVIEREAPGMALAMLMGSLNVTPLGMLSRPVCGIRGKTLIINLPGSKKGSQECFQFILPALPHAIDLLRDAIVKVKEVHDELEDLPSPPPPLSPPPTTSPHKQTEDKGVQCEEEEEEKKDSGVASTEDSSSSHITAAAIAAKIPDSIISRGVQVLPRDTASLSTTPSESPRAQATSRLSTASCPTPKVQSRCSSKENILRASHSAVDITKVARRHRMSPFPLTSMDKAFITVLEMTPVLGTEIINYRDGMGRVLAQDVYAKDNLPPFPASVKDGYAVRAADGPGDRFIIGESQAGEQPTQTVMPGQVMRVTTGAPIPCGADAVVQVEDTELIRESDDGTEELEVRILVQARPGQDIRPIGHDIKRGECVLAKGTHMGPSEIGLLATVGVTEVEVNKFPVVAVMSTGNELLNPEDDLLPGKIRDSNRSTLLATIQEHGYPTINLGIVGDNPDDLLNALNEGISRADVIITSGGVSMGEKDYLKQVLDIDLHAQIHFGRVFMKPGLPTTFATLDIDGVRKIIFALPGNPVSAVVTCNLFVVPALRKMQGILDPRPTIIKARLSCDVKLDPRPEYHRCILTWHHQEPLPWAQSTGNQMSSRLMSMRSANGLLMLPPKTEQYVELHKGEVVDVMVIGRL

SEQ ID NO: 4434 - protein, 777 aa, Homo sapiens
MRLKISLLKEPKHQELVSCVGWTTAEELYSCSDDHQIVKWNLLTSETTQIVKLPDDIYPIDFHWFPKSLGVKKQTQAESFVLTSSDGKFHLISKLGRVEKSVEAHCGAVLAGRWNYEGTALVTVGEDGQIKIWSKTGMLRSTLAQQGTPVYSVAWGPDSEKVLYTAGKQLIIKPLQPNAKVLQWKAHDGIILKVDWNSVNDLILSAGEDCKYKVWDSYGRPLYNSQPHEHPITSVAWAPDGELFAVGSFHTLRLCDKTGWSYALEKPNTGSIFNIAWSIDGTQIAGACGNGHVVFAHVVEQHWEWKNFQVTLTKRRAMQVRNVLNDAVDLLEFRDRVIKASLNYAHLVVSTSLQCYVFSTKNWNTPIIFDLKEGTVSLILQAERHFLLVDGSSIYLYSYEGRFISSPKFPGMRTDILNAQTVSLSNDTIAIRDKADEKIIFLFEASTGKPLGDGKFLSHKNEILEIALDQKGLTNDRKIAFIDKNRDLCITSVKRFGKEEQIIKLGTMVHTLAWNDTCNILCGLQDTRFIVWYYPNTVYVDRDILPKTLYERDASEFSKNPHIVSFVGNQVTIRRADGSLVHISITPYPAILHEYVSSSKWEDAVRLCRFVKEQTMWACLAAMAVANRDMTTAEIAYAAIGEIDKVQYINSIKNLPSKESKMAHILLFSGNIQEAEIVLLQAGLVYQAIQININLYNWERALELAVKYKTHVDTVLAYRQKFLETFGKQETNKRYLHYAEGLQIDWEKIKAKIEMEITKEREQSSSSQSSKSIGLKP

SEQ ID NO: 4435 - protein, 630 aa, Homo sapiens
MSISALGGRTKGKPLPPGEEERNNVLKQMKVRTTLKGDKSWITKQDESEGRTIELPSGRSRATSFSSAGEVPKPRPPSTRAPTGYIIRGVFTKPIDSSSQPQQQFPKANGTPKSAASLVRTANAGPPRPSSSGYKMTTEDYKKLAPYNIRRSSTSGDTEEEEEEEVVPFSSDEQKRRSEAASGVLRRTAPREHSYVLSAAKKSTGPTQETQAPFIAKRVEVVEEDGPSEKSQDPPALARSTPGSNRSSPGNKDKEAPCSRELQRDLAGEEAFRAPNTDAARSSAQLSDGNVGSGATGSRPEGLAAVDIGSERGSSSATSVSAVPADRKSNSTAAQEDAKADPKGALADYEGKDVATRVGEAWQERPGAPRGGQGDPAVPAQQPADPSTPERQSSPSGSEQLVRRESCGSSVLTDFEGKDVATKVGEAWQDRPGAPRGGQGDPAVPTQQPADPSTPEQQNSPSGSEQFVRRESCTSRVRSPSSCMVTVTVTATSEQPHIYIPAPASELDSSSTTKGILFVKEYVNASEVSSGKPVSARYSNVSSIEDSFAMEKKPPCGSTPYSERTTGGICTYCNREIRDCPKITLEHLGICCHEYCFKCGICSKPMGDLLDQIFIHRDTIHCGKCYEKLF

SEQ ID NO: 4436 - protein, 629 aa, Homo sapiens
MAVPPGHGPFSGFPGPQEHTQVLPDVRLLPRRLPLAFRDATSAPLRKLSVDLIKTYKHINEVYYAKKKRRAQQAPPQDSSNKKEKKVLNHGYDDDNHDYIVRSGERWLERYEIDSLIGKGSFGQVVKAYDHQTQELVAIKIIKNKKAFLNQAQIELRLLELMNQHDTEMKYYIVHLKRHFMFRNHLCLVFELLSYNLYDLLRNTHFRGVSLNLTRKLAQQLCTALLFLATPELSIIHCDLKPENILLCNPKRSAIKIVDFGSSCQLGQRIYQYIQSRFYRSPEVLLGTPYDLAIDMWSLGCILVEMHTGEPLFSGSNEVDQMNRIVEVLGIPPAAMLDQAPKARKYFERLPGGGWTLRRTKELRKDYQGPGTRRLQEVLGVQTGGPGGRRAGEPGHSPADYLRFQDLVLRMLEYEPAARISPLGALQHGFFRRTADEATNTGPAGSSASTSPAPLDTCPSSSTASSISSSGGSSGSSSDNRTYRYSNRYCGGPGPPITDCEMNSPQVPPSQPLRPWAGGDVPHKTHQAPASASSLPGTGAQLPPQPRYLGRPPSPTSPPPPELMDVSLVGGPADCSPPHPAPAPQHPAASALRTRMTGGRPPLPPPDDPATLGPHLGLRGVPQSTAASS

SEQ ID NO: 4437 - protein, 543 aa, Homo sapiens
MKFPIETPRKQVNWDPKVAVPAAAPVCQPKSATNGQPPAPAPTPTPRLSISSRATVVARMEGTSQGGLQTVMKWKTVVAIFVVVVVYLVTGGLVFRALEQPFESSQKNTIALEKAEFLRDHVCVSPQELETLIQHALDADNAGVSPIGNSSNNSSHWDLGSAFFFAGTVITTIGYGNIAPSTEGGKIFCILYAIFGIPLFGFLLAGIGDQLGTIFGKSIARVEKVFRKKQVSQTKIRVISTILFILAGCIVFVTIPAVIFKYIEGWTALESIYFVVVTLTTVGFGDFVAGGNAGINYREWYKPLVWFWILVGLAYFAAVLSMIGDWLRVLSKKTKEEVGEIKAHAAEWKANVTAEFRETRRRLSVEIHDKLQRAATIRSMERRRLGLDQRAHSLDMLSPEKRSVFAALDTGRFKASSQESINNRPNNLRLKGPEQLNKHGQGASEDNIINKFGSTSRLTKRKNKDLKKTLPEDVQKIYKTFRNYSLDEEKKEEETEKMCNSDNSSTAMLTDCIQQHAELENGMIPTDTKDREPENNSLLEDRN

SEQ ID NO: 4438 - protein, 263 aa, Homo sapiens
MAELQLDPAMAGLGGGGGSGVGDGGGPVRGPPSPRPAGPTPRGHGRPAAAVAQPLEPGPGPPERAGGGGAARWVRLNVGGTYFVTTRQTLGREPKSFLCRLCCQEDPELDSDKDETGAYLIDRDPTYFGPILNYLRHGKLIITKELAEEGVLEEAEFYNIASLVRLVKERIRDNENRTSQGPVKHVYRVLQCQEEELTQMVSTMSDGWKFEQLISIGSSYNYGNEDQAEFLCVVSRELNNSTNGIVIEPSEKAKILQERGSRM

SEQ ID NO: 4439 - protein, 919 aa, Homo sapiens
MAADVFMCSPRRPRSRGRQVLLKPQVSEDDDDSDTDEPSPPPASGAATPARAHASAAPPPPRAGPGREEPPRRQQIIHSGHFMVSSPHREHPPKKGYDFDTVNKQTCQTYSFGKTSSCHLSIDASLTKLFECMTLAYSGKLVSPKWKNFKGLKLQWRDKIRLNNAIWRAWYMQYLEKRKNPVCHFVTPLDGSVDVDEHRRPEAITTEGKYWKSRIEIVIREYHKWRTYFKKRLQQHKDEDLSSLVQDDDMLYWHKHGDGWKTPVPMEEDPLLDTDMLMSEFSDTLFSTLSSHQPVAWPNPREIAHLGNADMIQPGLIPLQPNLDFMDTFEPFQDLFSSSRSIFGSMLPASASAPVPDPNNPPAQESILPTTALPTVSLPDSLIAPPTAPSLAHMDEQGCEHTSRTEDPFIQPTDFGPSEPPLSVPQPFLPVFTMPLLSPSPAPPPISPVLPLVPPPATALNPPAPPTFHQPQKFAGVNKAPSVITHTASATLTHDAPATTFSQSQGLVITTHHPAPSAAPCGLALSPVTRPPQPRLTFVHPKPVSLTGGRPKQPHKIVPAPKPEPVSLVLKNARIAPAAFSGQPQAVIMTSGPLKREGMLASTVSQSNVVIAPAAIARAPGVPEFHSSILVTDLGHGTSSPPAPVSRLFPSTAQDPLGKGEQVPLHGGSPQVTVTGPSRDCPNSGQASPCASEQSPSPQSPQNNCSGKSDPKNVAALKNRQMKHISAEQKRRFNIKMCFDMLNSLISNNSKLTSHAITLQKTVEYITKLQQERGQMQEEARRLREEIEELNATIISCQQLLPATGVPVTRRQFDHMKDMFDEYVKTRTLQNWKFWIFSIIIKPLFESFKGMVSTSSLEELHRTALSWLDQHCSLPILRPMVLSTLRQLSTSTSILTDPAQLPEQASKAVTRIGKRLGES

SEQ ID NO: 4440 - protein, 391 aa, Homo sapiens
MNSDQVTLVGQVFESYVSEYHKNDILLILKERDEDAHYPVVVNAMTLFETNMEIGEYFNMFPSEVLTIFDSALRRSALTILQSLSQPEAVSMKQNLHARISGLPVCPELVREHIPKTKDVGHFLSVTGTVIRTSLVKVLEFERDYMCNKCKHVFVIKADFEQYYTFCRPSSCPSLESCDSSKFTCLSGLSSSPTRCRDYQEIKIQEQVQRLSVGSIPRSMKVILEDDLVDSCKSGDDLTIYGIVMQRWKPFQQDVRCEVEIVLKANYIQVNNEQSSGIIMDEEVQKEFEDFWEYYKSDPFAGRNVILASLCPQVFGMYLVKLAVAMVLAGGIQRTDATGTRVRGESHLLLVGDPGTGKSQFLKYAAKITPRSVLTTGIGSTSAGIVCDNFK

SEQ ID NO: 4441 - protein, 350 aa, Homo sapiens
MASPPPFHSQKLPGEYFRYKGVPFPVGLYSLESISLAENTQDVRDDDIFIITYPKSGTTWMIEIICLILKEGDPSWIRSVPIWERAPWCETIVGAFSLPDQYSPRLMSSHLPIQIFTKAFFSSKAKVIYMGRNPRDVVVSLYHYSKIAGQLKDPGTPDQFLRDFLKGEVQFGSWFDHIKGWLRMKGKDNFLFITYEELQQDLQGSVERICGFLGRPLGKEALGSVVAHSTFSAMKANTMSNYTLLPPSLLDHRRGAFLRKGVCGDWKNHFTVAQSEAFDRAYRKQMRGMPTFPWDEDPEEDGSPDPEPSPEPEPKPSLEPNTSLEREPRPNSSPSPSPGQASETPHPRPS

SEQ ID NO: 4442 - protein, 361 aa, Homo sapiens
MAAPRAGRGAGWSLRAWRALGGIRWGRRPRLTPDLRALLTSGTSDPRARVTYGTPSLWARLSVGVTEPRACLTSGTPGPRAQLTAVTPDTRTREASENSGTRSRAWLAVALGAGGAVLLLLWGGGRGPPAVLAAVPSPPPASPRSQYNFIADVVEKTAPAVVYIEILDRHPFLGREVPISNGSGFVVAADGLIVTNAHVVADRRRVRVRLLSGDTYEAVVTAVDPVADIATLRIQTKFGNSGGPLVNLDGEVIGVNTMKVTAGISFAIPSDRLREFLHRGEKKNSSSGISGSQRRYIGVMMLTLSPRAGLRPGDVILAIGEQMVQNAEDVYEAVRTQSQLAVQIRRGRETLTLYVTPEVTE

SEQ ID NO: 4443 - protein, 994 aa, Homo sapiens
MRPVALLLLPSLLALLAHGLSLEAPTVGKGQAPGIEETDGELTAAPTPEQPERGVHFVTTAPTLKLLNHHPLLEEFLQEGLEKGDEELRPALPFQPDPPAPFTPSPLPRLANQDSRPVFTSPTPAMAAVPTQPQSKEGPWSPESESPMLRITAPLPPGPSMAVPTLGPGEIASTTPPSRAWTPTQEGPGDMGRPWVAEVVSQGAGIGIQGTITSSTASGDDEETTTTTTIITTTITTVQTPGPCSWNFSGPEGSLDSPTDLSSPTDVGLDCFFYISVYPGYGVEIKVQNISLREGETVTVEGLGGPDPLPLANQSFLLRGQVIRSPTHQAALRFQSLPPPAGPGTFHFHYQAYLLSCHFPRRPAYGDVTVTSLHPGGSARFHCATGYQLKGARHLTCLNATQPFWDSKEPVCIAACGGVIRNATTGRIVSPGFPGNYSNNLTCHWLLEAPEGQRLHLHFEKVSLAEDDDRLIIRNGDNVEAPPVYDSYEVEYLPIEGLLSSGKHFFVELSTDSSGAAAGMALRYEAFQQGHCYEPFVKYGNFSSSTPTYPVGTTVEFSCDPGYTLEQGSIIIECVDPHDPQWNETEPACRAVCSGEITDSAGVVLSPNWPEPYGRGQDCIWGVHVEEDKRIMLDIRVLRIGPGDVLTFYDGDDLTARVLGQYSGPRSHFKLFTSMADVTIQFQSDPGTSVLGYQQGFVIHFFEVPRNDTCPELPEIPNGWKSPSQPELVHGTVVTYQCYPGYQVVGSSVLMCQWDLTWSEDLPSCQRVTSCHDPGDVEHSRRLISSPKFPVGATVQYICDQGFVLMGSSILTCHDRQAGSPKWSDRAPKCLLEQLKPCHGLSAPENGARSPEKQLHPAGATIHFSCAPGYVLKGQASIKCVPGHPSHWSDPPPICRAASLDGFYNSRSLDVAKAPAASSTLDAAHIAAAIFLPLVAMVLLVGGVYFYFSRLQGKSSLQLPRPRPRPYNRITIESAFDNPTYETGSLSFAGDERI

SEQ ID NO: 4444 - protein, 2570 aa, Homo sapiens
MAGPRGLLPLCLLAFCLAGFSFVRGQVLFKGCDVKTTFVTHVPCTSCAAIKKQTCPSGWLRELPDQITQDCRYEVQLGGSMVSMSGCRRKCRKQVVQKACCPGYWGSRCHECPGGAETPCNGHGTCLDGMDRNGTCVCQENFRGSACQECQDPNRFGPDCQSVCSCVHGVCNHGPRGDGSCLCFAGYTGPHCDQELPVCQELRCPQNTQCSAEAPSCRCLPGYTQQGSECRAPNPCWPSPCSLLAQCSVSPKGQAQCHCPENYHGDGMVCLPKDPCTDNLGGCPSNSTLCVYQKPGQAFCTCRPGLVSINSNASAGCFAFCSPFSCDRSATCQVTADGKTSCVCRESEVGDGRACYGHLLHEVQKATQTGRVFLQLRVAVAMMDQGCREILTTAGPFTVLVPSVSSFSSRTMNASLAQQLCRQHIIAGQHILEDTRTQQTRRWWTLAGQEITVTFNQFTKYSYKYKDQPQQTFNIYKANNIAANGVFHVVTGLRWQAPSGTPGDPKRTIGQILASTEAFSRFETILENCGLPSILDGPGPFTVFAPSNEAVDSLRDGRLIYLFTAGLSKLQELVRYHIYNHGQLTVEKLISKGRILTMANQVLAVNISEEGRILLGPEGVPLQRVDVMAANGVIHMLDGILLPPTILPILPKHCSEEQHKIVAGSCVDCQALNTSTCPPNSVKLDIFPKECVYIHDPTGLNVLKKGCASYCNQTIMEQGCCKGFFGPDCTQCPGGFSNPCYGKGNCSDGIQGNGACLCFPDYKGIACHICSNPNKHGEQCQEDCGCVHGLCDNRPGSGGVCQQGTCAPGFSGRFCNESMGDCGPTGLAQHCHLHARCVSQEGVARCRCLDGFEGDGFSCTPSNPCSHPDRGGCSENAECVPGSLGTHHCTCHKGWSGDGRVCVAIDECELDMRGGCHTDALCSYVGPGQSRCTCKLGFAGDGYQCSPIDPCRAGNGGCHGLATCRAVGGGQRVCTCPPGFGGDGFSCYGDIFRELEANAHFSIFYQWLKSAGITLPADRRVTALVPSEAAVRQLSPEDRAFWLQPRTLPNLVRAHFLQGALFEEELARLGGQEVATLNPTTRWEIRNISGRVWVQNASVDVADLLATNGVLHILSQVLLPPRGDVPGGQGLLQQLDLVPAFSLFRELLQHHGLVPQIEAATAYTIFVPTNRSLEAQGNSSHLDADTVRHHVVLGEALSMETLRKGGHRNSLLGPAHWIVFYNHSGQPEVNHVPLEGPMLEAPGRSLIGLSGVLTVGSSRCLHSHAEALREKCVNCTRRFRCTQGFQLQDTPRKSCVYRSGFSFSRGCSYTCAKKIQVPDCCPGFFGTLCEPCPGGLGGVCSGHGQCQDRFLGSGECHCHEGFHGTACEVCELGRYGPNCTGVCDCAHGLCQEGLQGDGSCVCNVGWQGLRCDQKITSPQCPRKCDPNANCVQDSAGASTCACAAGYSGNGIFCSEVDPCAHGHGGCSPHANCTKVAPGQRTCTCQDGYMGDGELCQEINSCLIHHGGCHIHAECIPTGPQQVSCSCREGYSGDGIRTCELLDPCSKNNGGCSPYATCKSTGDGQRTCTCDTAHTVGDGLTCRARVGLELLRDKHASFFSLRLLEYKELKGDGPFTIFVPHADLMSNLSQDELARIRAHRQLVFRYHVVGCRRLRSEDLLEQGYATALSGHPLRFSEREGSIYLNDFARVVSSDHEAVNGILHFIDRVLLPPEALHWEPDDAPIPRRNVTAAAQGFGYKIFSGLLKVAGLLPLLREASHRPFTMLWPTDAAFRALPPDRQAWLYHEDHRDKLAAILRGHMIRNVEALASDLPNLGPLRTMHGTPISFSCSRTRAGELMVGEDDARIVQRHLPFEGGLAYGIDQLLEPPGLGARCDHFETRPLRLNTCSICGLEPPCPEGSQEQGSPEACWRFYPKFWTSPPLHSLGLRSVWVHPSLWGRPQGLGRGCHRNCVTTTWKPSCCPGHYGSECQACPGGPSSPCSDRGVCMDGMSGSGQCLCRSGFAGTACELCAPGAFGPHCQACRCTVHGRCDEGLGGSGSCFCDEGWTGPRCEVQLELQPVCTPPCAPEAVCRAGNSCECSLGYEGDGRVCTVADLCQDGHGGCSEHANCSQVGTMVTCTCLPDYEGDGWSCRARNPCTDGHRGGCSEHANCLSTGLNTRRCECHAGYVGDGLQCLEESEPPVDRCLGQPPPCHSDAMCTDLHFQEKRAGVFHLQATSGPYGLNFSEAEAACEAQGAVLASFPQLSAAQQLGFHLCLMGWLANGSTAHPVVFPVADCGNGRVGIVSLGARKNLSERWDAYCFRVQDVACRCRNGFVGDGISTCNGKLLDVLAATANFSTFYGMLLGYANATQRGLDFLDFLDDELTYKTLFVPVNEGFVDNMTLSGPDLELHASNATLLSANASQGKLLPAHSGLSLIISDAGPDNSSWAPVAPGTVVVSRIIVWDIMAFNGIIHALASPLLAPPQPQAVLAPEAPPVAAGVGAVLAAGALLGLVAGALYLRARGKPMGFGFSAFQAEDDADDDFSPWQEGTNPTLVSVPNPVFGSDTFCEPFDDSLLEEDFPDTQRILTVK

SEQ ID NO: 4445 - protein, 474 aa, Homo sapiens
MRLSKTLVDMDMADYSAALDPAYTTLEFENVQVLTMGNDTSPSEGTNLNAPNSLGVSALCAICGDRATGKHYGASSCDGCKGFFRRSVRKNHMYSCRFSRQCVVDKDKRNQCRYCRLKKCFRAGMKKEAVQNERDRISTRRSSYEDSSLPSINALLQAEVLSRQITSPVSGINGDIRAKKIASIADVCESMKEQLLVLVEWAKYIPAFCELPLDDQVALLRAHAGEHLLLGATKRSMVFKDVLLLGNDYIVPRHCPELAEMSRVSIRILDELVLPFQELQIDDNEYAYLKAIIFFDPDAKGLSDPGKIKRLRSQVQVSLEDYINDRQYDSRGRFGELLLLLPTLQSITWQMIEQIQFIKLFGMAKIDNLLQEMLLGGSPSDAPHAHHPLHPHLMQEHMGTNVIVANTMPTHLSNGQMCEWPRPRGQAATPETPQPSPPGGSGSEPYKLLPGAVATIVKPLSAIPQPTITKQEVI

SEQ ID NO: 4446 - protein, 356 aa, Homo sapiens
MAGVACLGKAADADEWCDSGLGSLGPDAAAPGGPGLGAELGPGLSWAPLVFGYVTEDGDTALHLAVIHQHEPFLDFLLGFSAGTEYMDLQNDLGQTALHLAAILGETSTVEKLYAAGAGLCVAERRGHTALHLACRVGAHACARALLQPRPRRPREAPDTYLAQGPDRTPDTNHTPVALYPDSDLEKEEEESEEDWKLQLEAENYEGHTPLHVAVIHKDVEMVRLLRDAGADLDKPEPTCGRSPLHLAVEAQAADVLELLLRAGANPAARMYGGRTPLGSAMLRPNPILARLLRAHGAPEPEGEDEKSGPCSSSSDSDSGDEGDEYDDIVVHSSRSQTRLPPTPASKPLPDDPRPV

SEQ ID NO: 4447 - protein, 1339 aa, Homo sapiens
MTGEVGSEVHLEINDPNVISQEEADSPSDSGQGSYETIGPLSEGDSDEEIFVSKKLKNRKVLQDSDSETEDTNASPEKTTYDSAEEENKENLYAGKNTKIKRIYKTVADSDESYMEKSLYQENLEAQVKPCLELSLQSGNSTDFTTDRKSSKKHIHDKEGTAGKAKVKSKRRLEKEERKMEKIRQLKKKETKNQEDDVEQPFNDSGCLLVDKDLFETGLEDENNSPLEDEESLESIRAAVKNKVKKHKKKEPSLESGVHSFEEGSELSKGTTRKERKAARLSKEALKQLHSETQRLIRESALNLPYHMPENKTIHDFFKRKPRPTCHGNAMALLKSSKYQSSHHKEIIDTANTTEMNSDHHSKGSEQTTGAENEVETNALPVVSKETQIITGSDESCRKDLVKNEELEIQEKQKQSDIRPSPGDSSVLQQESNFLGNNHSEECQVGGLVAFEPHALEGEGPQNPEETDEKVEEPEQQNKSSAVGPPEKVRRFTLDRLKQLGVDVSIKPRLGADEDSFVILEPETNRELEALKQRFWKHANPAAKPRAGQTVNVNVIVKDMGTDGKEELKADVVPVTLAPKKLDGASHTKPGEKLQVLKAKLQEAMKLRRFEERQKRQALFKLDNEDGFEEEEEEEEEMTDESEEDGEEKVEKEEKEEELEEEEEKEEEEEEEGNQETAEFLLSSEEIETKDEKEMDKENNDGSSEIGKAVGFLSVPKSLSSDSTLLLFKDSSSKMGYFPTEEKSETDENSGKQPSKLDEDDSCSLLTKESSHNSSFELIGSTIPSYQPCNRQTGRGTSFFPTAGGFRSPSPGLFRASLVSSASKSSGKLSEPSLPIEDSQDLYNASPEPKTLFLGAGDFQFCLEDDTQSQLLDADGFLNVRNHRNQYQALKPRLPLASMDENAMDANMDELLDLCTGKFTSQAEKHLPRKSDKKENMEELLNLCSGKFTSQDASTPASSELNKQEKESSMGDPMEEALALCSGSFPTDKEEEDEEEEFGDFRLVSNDNEFDSDEDEHSDSGNDLALEDHEDDDEEELLKRSEKLKRQMRLRKYLEDEAEVSGSDVGSEDEYDGEEIDEYEEDVIDEVLPSDEELQSQIKKIHMKTMLDDDKRQLRLYQERYLADGDLHSDGPGRMRKFRWKNIDDASQMDLFHRDSDDDQTEEQLDESEARWRKERIEREQWLRDMAQQGKITAEEEEEIGEDSQFMILAKKVTAKALQKNASRPMVIQESKSLLRNPFEAIRPGSAQQVKTGSLLNQPKAVLQKLAALSDHNPSAPRNSRNFVFHTLSPVKAEAAKESSKSQVKKRGPSFMTSPSPKHLKTDDSTSGLTRSIFKYLES

SEQ ID NO: 4448 - protein, 355 aa, Homo sapiens
MGCTVSAEDKAAAERSKMIDKNLREDGEKAAREVKLLLLGAGESGKSTIVKQMKIIHEDGYSEEECRQYRAVVYSNTIQSIMAIVKAMGNLQIDFADPSRADDARQLFALSCTAEEQGVLPDDLSGVIRRLWADHGVQACFGRSREYQLNDSAAYYLNDLERIAQSDYIPTQQDVLRTRVKTTGIVETHFTFKDLHFKMFDVGGQRSERKKWIHCFEGVTAIIFCVALSAYDLVLAEDEEMNRMHESMKLFDSICNNKWFTDTSIILFLNKKDLFEEKITHSPLTICFPEYTGANKYDEAASYIQSKFEDLNKRKDTKEIYTHFTCATDTKNVQFVFDAVTDVIIKNNLKDCGLF

SEQ ID NO: 4449 - protein, 727 aa, Homo sapiens
MPPQYGQQGVSGYCQQGQQPYYSQQPQPPHLPPQAQYLPSQSQQRYQPQQDMSQEGYGTRSQPPLAPGKPNHEDLNLIQQERPSSLPDLSGSIDDLPTGTEATLSSAVSASGSTSSQGDQSNPAQSPFSPHASPHLSSIPGGPSPSPVGSPVGSNQSRSGPISPASIPGSQMPPQPPGSQSESSSHPALSQSPMPQERGFMAGTQRNPQMAQYGPQQTGPSMSPHPSPGGQMHAGISSFQQSNSSGTYGPQMSQYGPQGNYSRPPAYSGVPSASYSGPGPGMGISANNQMHGQGPSQPCGAVPLGRMPSAGMQNRPFPGNMSSMTPSSPGMSQQGGPGMGPPMPTVNRKAQEAAAAVMQAAANSAQSRQGSFPGMNQSGLMASSSPYSQPMNNSSSLMNTQAPPYSMAPAMVNSSAASVGLADMMSPGESKLPLPLKADGKEEGTPQPESKSKDSYSSQGISQPPTPGNLPVPSPMSPSSASISSFHGDESDSISSPGWPKTPSSPKSSSSTTTGEKITKVYELGNEPERKLWVDRYLTFMEERGSPVSSLPAVGKKPLDLFRLYVCVKEIGGLAQVNKNKKWRELATNLNVGTSSSAASSLKKQYIQYLFAFECKIERGEEPPPEVFSTGDTKKQPKLQPPSPVVQMEPRACDTGGSGRKASWSRPAPRARAGGSRHTQASGGRRQRHPGLQKPLDSLPPTQQVASPIPVPSLGKVSGNIFVVKGK

SEQ ID NO: 4450 - protein, 636 aa, Homo sapiens
MNPSAPSYPMASLYVGDLHPDVTEAMLYEKFSPAGPILSIRVCRDMITRRSLGYAYVNFQQPADAERALDTMNFDVIKGKPVRIMWSQRDPSLRKSGVGNIFIKNLDKSIDNKALYDTFSAFGNILSCKVVCDENGSKGYGFVHFETQEAAERAIEKMNGMLLNDRKVFVGRFKSRKEREAELGARAKEFTNVYIKNFGEDMDDERLKDLFGKFGPALSVKVMTDESGKSKGFGFVSFERHEDAQKAVDEMNGKELNGKQIYVGRAQKKVERQTELKRKFEQMKQDRITRYQGVNLYVKNLDDGIDDERLRKEFSPFGTITSAKVMMEGGRSKGFGFVCFSSPEEATKAVTEMNGRIVATKPLYVALAQRKEERQAHLTNQYMQRMASVRAVPNPVINPYQPAPPSGYFMAAIPQTQNRAAYYPPSQIAQLRPSPRWTAQGARPHPFQNMPGAIRPAAPRPPFSTMRPASSQVPRVMSTQRVANTSTQTMGPRPAAAAAAATPAVRTVPQYKYAAGVRNPQQHLNAQPQVTMQQPAVHVQGQEPLTASMLASAPPQEQKQMLGERLFPLIQAMHPTLAGKITGMLLEIDNSELLHMLESPESLRSKVDEAVAVLQAHQAKEAAQKAVNSATGVPTV

SEQ ID NO: 4451 - protein, 623 aa, Homo sapiens
MNRYTTMRQLGDGTYGSVLMGKSNESGELVAIKRMKRKFYSWDECMNLREVKSLKKLNHANVIKLKEVIRENDHLYFIFEYMKENLYQLMKDRNKLFPESVIRNIMYQILQGLAFIHKHGFFHRDMKPENLLCMGPELVKIADFGLARELRSQPPYTDYVSTRWYRAPEVLLRSSVYSSPIDVWAVGSIMAELYMLRPLFPGTSEVDEIFKICQVLGTPKKSDWPEGYQLASSMNFRFPQCVPINLKTLIPNASNEAIQLMTEMLNWDPKKRPTASQALKHPYFQVGQVLGPSSNHLESKQSLNKQLQPLESKPSLVEVEPKPLPDIIDQVVGQPQPKTSQQPLQPIQPPQNLSVQQPPKQQSQEKPPQTLFPSIVKNMPTKPNGTLSHKSGRRRWGQTIFKSGDSWEELEDYDFGASHSKKPSMGVFKEKRKKDSPFRLPEPVPSGSNHSTGENKSLPAVTSLKSDSELSTAPTSKQYYLKQSRYLPGVNPKKVSLIASGKEINPHTWSNQLFPKSLGPVGAELAFKRSNAGNLGSYATYNQSGYIPSFLKKEVQSAGQRIHLAPLNATASEYTWNTKTGRGQFSGRTYNPTAKNLNIVNRAQPIPSVHGRTDWVAKYGGHR

SEQ ID NO: 4452 - protein, 1584 aa, Homo sapiens
MRGQAAAPGPVWILAPLLLLLLLLGRRARAAAGADAGPGPEPCATLVQGKFFGYFSAAAVFPANASRCSWTLRNPDPRRYTLYMKVAKAPVPCSGPGRVRTYQFDSFLESTRTYLGVESFDEVLRLCDPSAPLAFLQASKQFLQMRRQQPPQHDGLRPRAGPPGPTDDFSVEYLVVGNRNPSRAACQMLCRWLDACLAGSRSSHPCGIMQTPCACLGGEAGGPAAGPLAPRGDVCLRDAVAGGPENCLTSLTQDRGGHGATGGWKLWSLWGECTRDCGGGLQTRTRTCLPAPGVEGGGCEGVLEEGRQCNREACGPAGRTSSRSQSLRSTDARRREELGDELQQFGFPAPQTGDPAAEEWSPWSVCSSTCGEGWQTRTRFCVSSSYSTQCSGPLREQRLCNNSAVCPVHGAWDEWSPWSLCSSTCGRGFRDRTRTCRPPQFGGNPCEGPEKQTKFCNIALCPGRAVDGNWNEWSSWSACSASCSQGRQQRTRECNGPSYGGAECQGHWVETRDCFLQQCPVDGKWQAWASWGSCSVTCGAGSQRRERVCSGPFFGGAACQGPQDEYRQCGTQRCPEPHEICDEDNFGAVIWKETPAGEVAAVRCPRNATGLILRRCELDEEGIAYWEPPTYIRCVSIDYRNIQMMTREHLAKAQRGLPGEGVSEVIQTLVEISQDGTSYSGDLLSTIDVLRNMTEIFRRAYYSPTPGDVQNFVQILSNLLAEENRDKWEEAQLAGPNAKELFRLVEDFVDVIGFRMKDLRDAYQVTDNLVLSIHKLPASGATDISFPMKGWRATGDWAKVPEDRVTVSKSVFSTGLTEADEASVFVVGTVLYRNLGSFLALQRNTTVLNSKVISVTVKPPPRSLRTPLEIEFAHMYNGTTNQTCILWDETDVPSSSAPPQLGPWSWRGCRTVPLDALRTRCLCDRLSTFAILAQLSADANMEKATLPSVTLIVGCGVSSLTLLMLVIIYVSVWRYIRSERSVILINFCLSIISSNALILIGQTQTRNKVVCTLVAAFLHFFFLSSFCWVLTEAWQSYMAVTGHLRNRLIRKRFLCLGWGLPALVVAISVGFTKAKGYSTMNYCWLSLEGGLLYAFVGPAAAVVLVNMVIGILVFNKLVSKDGITDKKLKERAGASLWSSCVVLPLLALTWMSAVLAVTDRRSALFQILFAVFDSLEGFVIVMVHCILRREVQDAVKCRVVDRQEEGNGDSGGSFQNGHAQLMTDFEKDVDLACRSVLNKDIAACRTATITGTLKRPSLPEEEKLKLAHAKGPPTNFNSLPANVSKLHLHGSPRYPGGPLPDFPNHSLTLKRDKAPKSSFVGDGDIFKKLDSELSRAQEKALDTSYVILPTATATLRPKPKEEPKYSIHIDQMPQTRLIHLSTAPEASLPARSPPSRQPPSGGPPEAPPAQPPPPPPPPPPPPQQPLPPPPNLEPAPPSLGDPGEPAAHPGPSTGPSTKNENVATLSVSSLERRKSRYAELDFEKIMHTRKRHQDMFQDLNRKLQHAAEKDKEVLGPDSKPEKQQTPNKRPWESLRKAHGTPTWVKKELEPLQPSPLELRSVEWERSGATIPLVGQDIIDLQTEV

SEQ ID NO: 4453 - protein, 2382 aa, Homo sapiens
MSGGAAEKQSSTPGSLFLSPPAPAPKNGSSSDSSVGEKLGAAAADAVTGRTEEYRRRRHTMDKDSRGAAATTTTTEHRFFRRSVICDSNATALELPGLPLSLPQPSIPAAVPQSAPPEPHREETVTATATSQVAQQPPAAAAPGEQAVAGPAPSTVPSSTSKDRPVSQPSLVGSKEEPPPARSGSGGGSAKEPQEERSQQQDDIEELETKAVGMSNDGRFLKFDIEIGRGSFKTVYKGLDTETTVEVAWCELQDRKLTKSERQRFKEEAEMLKGLQHPNIVRFYDSWESTVKGKKCIVLVTELMTSGTLKTYLKRFKVMKIKVLRSWCRQILKGLQFLHTRTPPIIHRDLKCDNIFITGPTGSVKIGDLGLATLKRASFAKSVIGTPEFMAPEMYEEKYDESVDVYAFGMCMLEMATSEYPYSECQNAAQIYRRVTSGVKPASFDKVAIPEVKEIIEGCIRQNKDERYSIKDLLNHAFFQEETGVRVELAEEDDGEKIAIKLWLRIEDIKKLKGKYKDNEAIEFSFDLERDVPEDVAQEMVESGYVCEGDHKTMAKAIKDRVSLIKRKREQRQLVREEQEKKKQEESSLKQQVEQSSASQTGIKQLPSASTGIPTASTTSASVSTQVEPEEPEADQHQQLQYQQPSISVLSDGTVDSGQGSSVFTESRVSSQQTVSYGSQHEQAHSTGTVPGHIPSTVQAQSQPHGVYPPSSVAQGQSQGQPSSSSLTGVSSSQPIQHPQQQQGIQQTAPPQQTVQYSLSQTSTSSEATTAQPVSQPQAPQVLPQVSAGKQLPVSQPVPTIQGEPQIPVATQPSVVPVHSGAHFLPVGQPLPTPLLPQYPVSQIPISTPHVSTAQTGFSSLPITMAAGITQPLLTLASSATTAAIPGVSTVVPSQLPTLLQPVTQLPSQVHPQLLQPAVQSMGIPANLGQAAEVPLSSGDVLYQGFPPRLPPQYPGDSNIAPSSNVASVCIHSTVLSPPMPTEVLATPGYFPTVVQPYVESNLLVPMGGVGGQVQVSQPGGSLAQAPTTSSQQAVLESTQGVSQVAPAEPVAVAQTQATQPTTLASSVDSAHSDVASGMSDGNENVPSSSGRHEGRTTKRHYRKSVRSRSRHEKTSRPKLRILNVSNKGDRVVECQLETHNRKMVTFKFDLDGDNPEEIATIMVNNDFILAIERESFVDQVREIIEKADEMLSEDVSVEPEGDQGLESLQGKDDYGFSGSQKLEGEFKQPIPASSMPQQIGIPTSSLTQVVHSAGRRFIVSPVPESRLRESKVFPSEITDTVAASTAQSPGMNLSHSASSLSLQQAFSELRRAQMTEGPNTAPPNFSHTGPTFPVVPPFLSSIAGVPTTAAATAPVPATSSPPNDISTSVIQSEVTVPTEEGIAGVATSTGVVTSGGLPIPPVSESPVLSSVVSSITIPAVVSISTTSPSLQVPTSTSEIVVSSTALYPSVTVSATSASAGGSTATPGPKPPAVVSQQAAGSTTVGATLTSVSTTTSFPSTASQLCIQLSSSTSTPTLAETVVVSAHSLDKTSHSSTTGLAFSLSAPSSSSSPGAGVSSYISQPGGLHPLVIPSVIASTPILPQAAGPTSTPLLPQVPSIPPLVQPVANVPAVQQTLIHSQPQPALLPNQPHTHCPEVDSDTQPKAPGIDDIKTLEEKLRSLFSEHSSSGAQHASVSLETSLVIESTVTPGIPTTAVAPSKLLTSTTSTCLPPTNLPLGTVALPVTPVVTPGQVSTPVSTTTSGVKPGTAPSKPPLTKAPVLPVGTELPAGTLPSEQLPPFPGPSLTQSQQPLEDLDAQLRRTLSPEMITVTSAVGPVSMAAPTAITEAGTQPQKGVSQVKEGPVLATSSGAGVFKMGRFQVSVAADGAQKEGKNKSEDAKSVHFESSTSESSVLSSSSPESTLVKPEPNGITIPGISSDVPESAHKTTASEAKSDTGQPTKVGRFQVTTTANKVGRFSVSKTEDKITDTKKEGPVASPPFMDLEQAVLPAVIPKKEKPELSEPSHLNGPSSDPEAAFLSRDVDDGSGSPHSPHQLSSKSLPSQNLSQSLSNSFNSSYMSSDNESDIEDEDLKLELRRLRDKHLKEIQDLQSRQKHEIESLYTKLGKVPPAVIIPPAAPLSGRRRRPTKSKGSKSSRSSSLGNKSPQLSGNLSGQSAASVLHPQQTLHPPGNIPESGQNQLLQPLKPSPSSDNLYSAFTSDGAISVPSLSAPGQGTSSTNTVGATVNSQAAQAQPPAMTSSRKGTFTDDLHKLVDNWARDAMNLSGRRGSKGHMNYEGPGMARKFSAPGQLCISMTSNLGGSAPISAASATSLGHFTKSMCPPQQYGFPATPFGAQWSGTGGPAPQPLGQFQPVGTASLQNFNISNLQKSISNPPGSNLRTT

SEQ ID NO: 4454 - protein, 305 aa, Homo sapiens
MSALLRLLRTGAPAAACLRLGTSAGTGSRRAMALYHTEERGQPCSQNYRLFFKNVTGHYISPFHDIPLKVNSKEENGIPMKKARNDEYENLFNMIVEIPRWTNAKMEIATKEPMNPIKQYVKDGKLRYVANIFPYKGYIWNYGTLPQILSCGEVIHVKILGILALIDEGETDWKLIAINANDPEASKFHDIDDVKKFKPGYLEATLNWFRLYKVPDGKPENQFAFNGEFKNKAFALEVIKSTHQCWKALLMKKCNGGAINCTNVQISDSPFRCTQEEARSLVESVSSSPNKESNEEEQVWHFLGK

SEQ ID NO: 4455 - protein, 896 aa, Homo sapiens
MMAQKSQGSDNLQEGQEKSKREILKCTKSAWAPLDEWLPPDPEEESQSLTIPMLEDSKQESIQQWLDSGFFVSANENFQQVIDRTVSLYEQGMVQMTVKDYMRSLHQFSETPILSRGTSFNSCYSTASVPQSIPEWLEFWEIDPVEILLDLGFGADEPDICMQIPARFLGCGSAARGINIRVFLEAQKQRMDIENPNLYGRFRQLEILDHVTNAFSSLLSDVSILPNRAEEKAGGESVQRTSVQSFEEETGNPLDMTSGTVGARVDRANSCQSDSSGFLEEPLEPLPLQMPSLPNSQSPAENGGRKPRDQSHSLVSSQDCQLESDGPDSKSRASMSFSSQEANALEQRASVSVMEEEFLLEAMEGPPELYIPDMACAKTTTRGECPRKDSHLWQLLPMPHAEYEVTRPTATSKYDHPLGFMVTHVTEMQDSFVRPEGAGKVQSHHNESQRSPGNDHTQDKFLHVDSEAPREEESSGFCPHTNHSLLVPESSSQCIPKHSEITPYATDLAQTSEKLIPHLHKLPGDPAQVKSRSGTLGQILPGTEAEMENLPLNTGSSRSVMTQMSSSLVSAAQRAVALGTGPRGTSLECTVCDPVTATETRLGTKARQLNDASIQTSALSNKTLTHGPQPLTKSVSLDSGFSSICPMGTCHAIPAHCCICCHHHPHCHGERQSPGPEPSVCRHCLCSLTGHQEAQFMTTLKALQDTTVRELCSCTVHEMEAMKTICQSFREYLEEIEQHLMGQQALFSRDMSEEEREEAEQLQTLREALRQQVAELEFQLGDRAQQIREGILLQLEVLTAEPPEHYSNLHQYNWIEESNGQTSCSKIHPGMAPRTVFPPDDGQEAPCSGGTQLAAFTPPTLENSTRMSPSSSAWAKLGPTPLSNCPVGEKDADVFL

SEQ ID NO: 4456 - protein, 1222 aa, Homo sapiens
MSEAPRFFVGPEDTEINPGNYRHFFHHADEDDEEEDDSPPERQIVVGICSMAKKSKSKPMKEILERISLFKYITVVVFEEEVILNEPVENWPLCDCLISFHSKGFPLDKAVAYAKLRNPFVINDLNMQYLIQDRREVYSILQAEGILLPRYAILNRDPNNPKECNLIEGEDHVEVNGEVFQKPFVEKPVSAEDHNVYIYYPTSAGGGSQRLFRKIGSRSSVYSPESNVRKTGSYIYEEFMPTDGTDVKVYTVGPDYAHAEARKSPALDGKVERDSEGKEVRYPVILNAREKLIAWKVCLAFKQTVCGFDLLRANGQSYVCDVNGFSFVKNSMKYYDDCAKILGNIVMRELAPQFHIPWSIPLEAEDIPIVPTTSGTMMELRCVIAVIRHGDRTPKQKMKMEVRHQKFFDLFEKCDGYKSGKLKLKKPKQLQEVLDIARQLLMELGQNNDSEIEENKPKLEQLKTVLEMYGHFSGINRKVQLTYLPHGCPKTSSEEEDSRREEPSLLLVLKWGGELTPAGRVQAEELGRAFRCMYPGGQGDYAGFPGCGLLRLHSTYRHDLKIYASDEGRVQMTAAAFAKGLLALEGELTPILVQMVKSANMNGLLDSDSDSLSSCQQRVKARLHEILQKDRDFTAEDYEKLTPSGSISLIKSMHLIKNPVKTCDKVYSLIQSLTSQIRHRMEDPKSSDIQLYHSETLELMLRRWSKLEKDFKTKNGRYDISKIPDIYDCIKYDVQHNGSLKLENTMELYRLSKALADIVIPQEYGITKAEKLEIAKGYCTPLVRKIRSDLQRTQDDDTVNKLHPVYSRGVLSPERHVRTRLYFTSESHVHSLLSILRYGALCNESKDEQWKRAMDYLNVVNELNYMTQIVIMLYEDPNKDLSSEERFHVELHFSPGAKGCEEDKNLPSGYGYRPASRENEGRRPFKIDNDDEPHTSKRDEVDRAVILFKPMVSEPIHIHRKSPLPRSRKTATNDEESPLSVSSPEGTGTWLHYTSGVGTGRRRRRSGEQITSSPVSPKSLAFTSSIFGSWQQVVSENANYLRTPRTLVEQKQNPTVGSHCAGLFSTSVLGGSSSAPNLQDYARTHRKKLTSSGCIDGFELYSMVPSICPLETLHNALSLKQVDEFLASIASPSSDVPRKTAEISSTALRSSPIMRKKVSLNTYTPAKILPTPPATLKSTKASSKPATSGPSSAVVPNTSSRKKNITSKTETHEHKKNTGKKK

SEQ ID NO: 4457 - protein, 295 aa, Homo sapiens
MWGARRSSVSSSWNAASLLQLLLAALLAAGARASGEYCHGWLDAQGVWRIGFQCPERFDGGDATICCGSCALRYCCSSAEARLDQGGCDNDRQQGAGEPGRADKDGPDGSAVPIYVPFLIVGSVFVAFIILGSLVAACCCRCLRPKQDPQQSRAPGGNRLMETIPMIPSASTSRGSSSRQSSTAASSSSSANSGARAPPTRSQTNCCLPEGTMNNVYVNMPTNFSVLNCQQATQIVPHQGQYLHPPYVGYTVQHDSVPMTAVPPFMDGLQPGYRQIQSPFPHTNSEQKMYPAVTV

SEQ ID NO: 4458 - protein, 1009 aa, Homo sapiens
MDLIRGVLLRLLLLASSLGPGAVSLRAAIRKPGKVGPPLDIKLGALNCTAFSIQWKMPRHPGSPILGYTVFYSEVGADKSLQEQLHSVPLSRDIPTTEEVIGDLKPGTEYRVSIAAYSQAGKGRLSSPRHVTTLSQDSCLPPAAPQQPHVIVVSDSEVALSWKPGASEGSAPIQYYSVEFIRPDFDKKWTSIHERIQMDSMVIKGLDPDTNYQFAVRAMNSHGPSPRSWPSDIIRTLCPEEAGSGRYGPRYITDMGAGEDDEGFEDDLDLDISFEEVKPLPATKGGNKKFLVESKKMSISNPKTISRLIPPTSASLPVTTVAPQPIPIQRKGKNGVAIMSRLFDMPCDETLCSADSFCVNDYTWGGSRCQCTLGKGGESCSEDIVIQYPQFFGHSYVTFEPLKNSYQAFQITLEFRAEAEDGLLLYCGENEHGRGDFMSLAIIRRSLQFRFNCGTGVAIIVSETKIKLGGWHTVMLYRDGLNGLLQLNNGTPVTGQSQGQYSKITFRTPLYLGGAPSAYWLVRATGTNRGFQGCVQSLAVNGRRIDMRPWPLGKALSGADVGECSSGICDEASCIHGGTCTAIKADSYICLCPLGFKGRHCEDAFTLTIPQFRESLRSYAATPWPLEPQHYLSFMEFEITFRPDSGDGVLLYSYDTGSKDFLSINLAGGHVEFRFDCGSGTGVLRSEDPLTLGNWHELRVSRTAKNGILQVDKQKIVEGMAEGGFTQIKCNTDIFIGGVPNYDDVKKNSGVLKPFSGSIQKIILNDRTIHVKHDFTSGVNVENAAHPCVRAPCAHGGSCRPRKEGYDCDCPLGFEGLHCQKAIIEAIEIPQFIGRSYLTYDNPDILKRVSGSRSNVFMRFKTTAKDGLLLWRGDSPMRPNSDFISLGLRDGALVFSYNLGSGVASIMVNGSFNDGRWHRVKAVRDGQSGKITVDDYGARTGKSPGMMRQLNINGALYVGGMKEIALHTNRQYMRGLVGCISHFTLSTDYHISLVEDAVDGKNINTCGAK

SEQ ID NO: 4459 - protein, 533 aa, Homo sapiens
MIHGRSVLHIVASLIILHLSGATKKGTEKQTTSETQKSVQCGTWTKHAEGGIFTSPNYPSKYPPDRECIYIIEAAPRQCIELYFDEKYSIEPSWECKFDHIEVRDGPFGFSPIIGRFCGQQNPPVIKSSGRFLWIKFFADGELESMGFSARYNFTPDPDFKDLGALKPLPACEFEMGGSEGIVESIQIMKEGKATASEAVDCKWYIRAPPRSKIYLRFLDYEMQNSNECKRNFVAVYDGSSSVEDLKAKFCSTVANDVMLRTGLGVIRMWADEGSRNSRFQMLFTSFQEPPCEGNTFFCHSNMCINNTLVCNGLQNCVYPWDENHCKEKRKTSLLDQLTNTSGTVIGVTSCIVIILIIISVIVQIKQPRKKYVQRKSDFDQTVFQEVFEPPHYELCTLRGTGATADFADVADDFENYHKLRRSSSKCIHDHHCGSQLSSTKGSRSNLSTRDASILTEMPTQPGKPLIPPMNRRNILVMKHSYSQDAADACDIDEIEEVPTTSHRLSRHDKAVQRFCLIGSLSKHESEYNTTRV

SEQ ID NO: 4460 - protein, 444 aa, Homo sapiens
MNRTKGDEEEYWNSSKFKAFTFDDEDDELSQLKESKRAVNSLRDFVDDDDDDDLERVSWSGEPVGSRTRPGSFQSLSDALSDTPAKSYAPELGRPKGEYRDYSNDWSPSDTVRRLRKGKVCSLERFRSLQDKLQLLEEAVSMHDGNVITAVLIFLKRTLSKEILFRELEVRQVALRHLIHFLKEIGDQKLLLDLFRFLDRTEELALSHYREHLNIQDPDKRKEFLKTCVGLPFSAEDSAHIQDHYTLLERQIIIEANDRHLESAGQTEIFRKHPRKASILNMPLVTTLFYSCFYHYTEAEGTFSSPVNLKKTFKIPDKQYVLTALAARAKLRAWNDVDALFTTKNWLGYTKKRAPIGFHRVVEILHKNNAPVQILQEYVNLVEDVDTKLNLATKFKCHDVVIDTYRDLKDRQQLLAYRSKVDKGSAEEEKIDALLSSSQIRWKN

SEQ ID NO: 4461 - protein, 946 aa, Homo sapiens
MVPWVRTMGQKLKQRLRLDVGREICRQYPLFCFLLLCLSAASLLLNRYIHILMIFWSFVAGVVTFYCSLGPDSLLPNIFFTIKYKPKQLGLQELFPQGHSCAVCGKVKCKRHRPSLLLENYQPWLDLKISSKVDASLSEVLELVLENFVYPWYRDVTDDESFVDELRITLRFFASVLIRRIHKVDIPSIITKKLLKAAMKHIEVIVKARQKVKNTEFLQQAALEEYGPELHVALRSRRDELHYLRKLTELLFPYILPPKATDCRSLTLLIREILSGSVFLPSLDFLADPDTVNHLLIIFIDDSPPEKATEPASPLVPFLQKFAEPRNKKPSVLKLELKQIREQQDLLFRFMNFLKQEGAVHVLQFCLTVEEFNDRILRPELSNDEMLSLHEELQKIYKTYCLDESIDKIRFDPFIVEEIQRIAEGPYIDVVKLQTMRCLFEAYEHVLSLLENVFTPMFCHSDEYFRQLLRGAESPTRNSKLNRGSLSLDDFRNTQKRGESFGISRIGSKIKGVFKSTTMEGAMLPNYGVAEGEDDFIEEGIVVMEDDSPVEAVSTPNTPRNLAAWKISIPYVDFFEDPSSERKEKKERIPVFCIDVERNDRRAVGHEPEHWSVYRRYLEFYVLESKLTEFHGAFPDAQLPSKRIIGPKNYEFLKSKREEFQEYLQKLLQHPELSNSQLLADFLSPNGGETQFLDKILPDVNLGKIIKSVPGKLMKEKGQHLEPFIMNFINSCESPKPKPSRPELTILSPTSENNKKLFNDLFKNNANRAENTERKQNQNYFMEVMTVEGVYDYLMYVGRVVFQVPDWLHHLLMGTRILFKNTLEMYTDYYLQCKLEQLFQEHRLVSLITLLRDAIFCENTEPRSLQDKQKGAKQTFEEMMNYIPDLLVKCIGEETKYESIRLLFDGLQQPVLNKQLTYVLLDIVIQELFPELNKVQKEVTSVTSWM

SEQ ID NO: 4462 - protein, 847 aa, Homo sapiens
MSLFKARDWWSTILGDKEEFDQGCLCLANVDNSGNGQDKIIVGSFMGYLRIFSPHPAKTGDGAQAEDLLLEVDLRDPVLQVEVGKFVSGTEMLHLAVLHSRKLCVYSVSGTLGNVEHGNQCQMKLMYEHNLQRTACNMTYGSFGGVKGRDLICIQSMDGMLMVFEQESYAFGRFLPGFLLPGPLAYSSRTDSFLTVSSCQQVESYKYQVLAFATDADKRQETEQQKLGSGKRLVVDWTLNIGEQALDICIVSFNQSASSVFVLGERNFFCLKDNGQIRFMKKLDWSPSCFLPYCSVSEGTINTLIGNHNNMLHIYQDVTLKWATQLPHIPVAVRVGCLHDLKGVIVTLSDDGHLQCSYLGTDPSLFQAPNVQSRELNYDELDVEMKELQKIIKDVNKSQGVWPMTEREDDLNVSVVVSPNFDSVSQATDVEVGTDLVPSVTVKVTLQNRVILQKAKLSVYVQPPLELTCDQFTFEFMSIPRVIQCKFRLPLKLICLPGQPSKTASHKITIDTNKSPVSLLSLFPGFASQSDDDQVNVMGFHFLGGARITVLASKTSQRYRIQSEQFEDLWLITNELILRLQEYFEKQGVKDFACSFSGSIPLQEYFELIDHHFELRINGEKLEELLSERAVQFRAIQRRLLARFKDKTPAPLQHLDTLLDGTYKQVIALADAVEENQGNLFQSFTRLKSATHLVILLIALWQKLSADQVAILEAAFLPLQEDTQELGWEETVDAAISHLLKTCLSKSSKEQALNLNSQLNIPKDTSQLKKHITLLCDRLSKGGRLCLSTDAAAPQTMVMPGGCTTIPESDLEERSVEQDSTELFTNHRHLTAETPRPEVSPLQGVSE

SEQ ID NO: 4463 - protein, 621 aa, Homo sapiens
MSRQNLVALTVTTLLGVAVGGFVLWKGIQRRRRSKTSPVTQQPQQKVLGSRELPPPEDDQLHSSAPRSSWKERILKAKVVTVSQEAEWDQIEPLLRSELEDFPVLGIDCEWVNLEGKASPLSLLQMASPSGLCVLVRLPKLICGGKTLPRTLLDILADGTILKVGVGCSEDASKLLQDYGLVVRGCLDLRYLAMRQRNNLLCNGLSLKSLAETVLNFPLDKSLLLRCSNWDAETLTEDQVIYAARDAQISVALFLHLLGYPFSRNSPGEKNDDHSSWRKVLEKCQGVVDIPFRSKGMSRLGEEVNGEATESQQKPRNKKSKMDGMVPGNHQGRDPRKHKRKPLGVGYSARKSPLYDNCFLHAPDGQPLCTCDRRKAQWYLDKGIGELVSEEPFVVKLRFEPAGRPESPGDYYLMVKENLCVVCGKRDSYIRKNVIPHEYRKHFPIEMKDHNSHDVLLLCTSCHAISNYYDNHLKQQLAKEFQAPIGSEEGLRLLEDPERRQVRSGARALLNAESLPTQRKEELLQALREFYNTDVVTEEMLQEAASLETRISNENYVPHGLKVVQCHSQGGLRSLMQLESRWRQHFLDSMQPKHLPQQWSVDHNHQKLLRKFGEDLPIQLS

SEQ ID NO: 4464 - protein, 716 aa, Homo sapiens
MSGSKKKKVTKAERLKLLQEEEERRLKEEEEARLKYEKEEMERLEIQRIEKEKWHRLEAKDLERRNEELEELYLLERCFPEAEKLKQETKLLSQWKHYIQCDGSPDPSVAQEMNTFISLWKEKTNETFEEVIEKSKVVLNLIEKLKFILLETPPCDLQDKNIIQYQESILQLQELLHLKFGVATEILLKQASTLADLDSGNMEKVIKDENVTLYVWANLKKNPRHRSVRFSETQIGFEIPRILATSDIAVRLLHTHYDHVSALHPVSTPSKEYTSAVTELVKDDVKNVEKAISKEVEEESKQQERGSHLIQEEEIKVEEEQGDIEVKMSSAEEESEAIKCEREMKVLSETVSAAQLLLVENSSEKPDFFEDNVVDLCQFTTLGGVYHLDILELPPQCKPVKGWMIVEILKEGLQKYTYPPETTEEFETENAFPPIEVTLEVHENVIFFEDPVVVRWDAEGKHWRTDGISNVSYKPKERLVTFSLDTFGPVTLIQDAHINMPYQSWELRPLDVNKVLLTVTTVFTEIQIQIKENLCMLSSIKLKDKKHISILEGTWMTPIPFIIALKEAGLNIFPTRHSHFYVIINNKVPLVEVKAYRQMALLSSAFAFGWSKWNLLCNSTKVVFKVREHLTEACTENPNWALLMFSGDRAQRLKIKEESEAFSEALKEETEFHSTLYHMVKDFASEEAMEKVRSSNCQFVNSVCHMLLSTRLLSYS

SEQ ID NO: 4465 - protein, 744 aa, Homo sapiens
MQKEMKMIKDEDVHFDLAVKKTPSFPHCLQPVASRGKAPQRHPFPEALRGPFSQFRYEPPPGDLDGFPGVFEGAGSRKRKSMPTKMPYNHPAEEVTLALHSEENKNHGLPNLPLLFPQPPRPKYDSQMIDLCNVGFQFYRSLEHFGGKPVKQEPIKPSAVWPQPTPTPFLPTPYPYYPKVHPGLMFPFFVPSSSPFPFSRHTFLPKQPPEPLLPRKAEPQESEETKQKVERVDVNVQIDDSYYVDVGGSQKRWQCPTCEKSYTSKYNLVTHILGHSGIKPHACTHCGKLFKQLSHLHTHMLTHQGTRPHKCQVCHKAFTQTSHLKRHMMQHSEVKPHNCRVCGRGFAYPSELKAHEAKHASGRENICVECGLDFPTLAQLKRHLTTHRGPIQYNCSECDKTFQYPSQLQNHMMKHKDIRPYICSECGMEFVQPHHLKQHSLTHKGVKEHKCGICGREFTLLANMKRHVLIHTNIRAYQCHLCYKSFVQKQTLKAHMIVHSDVKPFKCKLCGKEFNRMHNLMGHMHLHSDSKPFKCLYCPSKFTLKGNLTRHMKVKHGVMERGLHSQGLGRGRIALAQTAGVLRSLEQEEPFDLSQKRRAKVPVFQSDGESAQGSHCHEEEEEDNCYEVEPYSPGLAPQSQQLCTPEDLSTKSEHAPEVLEEACKEEKEDASKGEWEKRSKGDLGAEGGQERDCAGRDECLSLRAFQSTRRGPSFSDYLYFKHRDESLKELLERKMEKQAVLLGI

SEQ ID NO: 4466 - protein, 711 aa, Homo sapiens
MHLKPYWKLQKKEHPPEVSRETQRTPMNHQKAVNDETCKASHITSSVFPSASLGKASSRKPFGILSPNVLCSMSGKSPVESSLNVKTKKNAPSATIHQGEEEGPLDIWAVVKPGNTKEKIAFFASHQCSNRIGSMKIKSSWDIDGRATKRRKKSGDLKKAKVQVERMREVNSRCYQPEPFACGIEHCSVHYVSDSGDGVYAGRPLSVIQMVAFLEQRASALLASCSKNCTNSPAIVRFSGQSRGVPAVSESYSAPGACEEPTERGNLEVGEPQSEPVRVLDMVAKLESECLKRQGQREPGSLSRNNSFRRNVGRVLLANSTQADEGKTKKGVLEAPDTQVNPVGSVSVDCGPSRADRCSPKEDQAWDGASQDCPPLPAGVSFHIDSAELEPGSQTAVKNSNRYDVEMTDELVGLPFSSHTYSQASELPTDAVDCMSRELVSLTSRNPDQRKESLCISITVSKVDKDQPSILNSCEDPVPGMLFFLPPGQHLSDYSQLNESTTKESSEASQLEDAAGGDSASEEKSGSAEPFVLPASSVESTLPVLEASSWKKQVSHDFLETRFKIQQLLEPQQYMAFLPHHIMVKIFRLLPTKSLVALKCTCCYFKFIIEYYNIRPADSRWVRDPRYREDPCKQCKKKYVKGDVSLCRWHPKPYCQALPYGPGYWMCCHRSQKGFPGCKLGLHDNHWVPACHSFNRAIHKKAKGTEAEEEY

SEQ ID NO: 4467 - protein, 733 aa, Homo sapiens
MLARRQRDPLQALRRRNQELKQQVDSLLSESQLKEALEPNKRQHIYQRCIQLKQAIDENKNALQKLSKADESAPVANYNQRKEEEHTLLDKLTQQLQGLAVTISRENITEVGAPTEEEEESESEDSEDSGGEEEDAEEEEEEKEENESHKWSTGEEYIAVGDFTAQQVGDLTFKKGEILLVIEKKPDGWWIAKDAKGNEGLVPRTYLEPYSEEEEGQESSEEGSEEDVEAVDETADGAEVKQRTDPHWSAVQKAISEAGIFCLVNHVSFCYLIVLMRNRMETVEDTNGSETGFRAWNVQSRGRIFLVSKPVLQQINTVDVLTTMGAIPAGFRPSTLSQLLEEGNQFRANYFLQPELMPSQLAFRDLMWDATEGTIRSRPSRISLILTLWSCKMIPLPGMSIQVLSRHVRLCLFDGNKVLSNIHTVRATWQPKKPKTWTFSPQVTRILPCLLDGDCFIRSNSASPDLGILFELGISYIRNSTGERGELSCGWVFLKLFDASGVPIPAKTYELFLNGGTPYEKGIEVDPSISRRAHGSVFYQIMTMRRQPQLLVKLRSLNRRSRNVLSLLPETLIGNMCSIHLLIFYRQILGDVLLKDRMSLQSTDLISHPMLATFPMLLEQPDVMDALRSSWAGKESTLKRSEKRDKEFLKSTFLLVYHDCVLPLLHSTRLPPFRWAEEETETARWKVITDFLKQNQENQGALQALLSPDGVHEPFDLSEQTYDFLGEMRKNAV

SEQ ID NO: 4468 - protein, 1844 aa, Homo sapiens
MVGVLAMAAAAAPPPVKDCEIEPCKKRKKDDDTSTCKTITKYLSPLGKTRDRVFAPPKPSNILDYFRKTSPTNEKTQLGKECKIKSPESVPVDSNKDCTTPLEMFSNVEFKKKRKRVNLSHQLNNIKTENEAPIEISSDDSKEDYSLNNDFVESSTSVLRYKKQVEVLAENIQDTKSQPNTMTSLQNSKKVNPKQGTTKNDFKKLRKRKCRDVVDLSESLPLAEELNLLKKDGKDTKQMENTTSHANSRDNVTEAAQLNDSIITVSYEEFLKSHKENKVEEIPDSTMSICVPSETVDEIVKSGYISESENSEISQQVRFKTVTVLAQVHPIPPKKTGKIPRIFLKQKQFEMENSLSDPENEQTVQKRKSNVVIQEEELELAVLEAGSSEAVKPKCTLEERQQFMKAFRQPASDALKNGVKKSSDKQKDLNEKCLYEVGRDDNSKKIMENSGIQMVSKNGNLQLHTDKGSFLKEKNKKLKKKNKKTLDTGAIPGKNREGNTQKKETTFFLKEKQYQNRMSLRQRKTEFFKSSTLFNNESLVYEDIANDDLLKVSSLCNNNKLSRKTSIPVKDIKLTQSKAESEASLLNVSTPKSTRRSGRISSTPTTETIRGIDSDDVQDNSQLKASTQKAANLSEKHSLYTAELITVPFDSESPIRMKFTRISTPKKSKKKSNKRSEKSEATDGGFTSQIRKASNTSKNISKAKQLIEKAKALHISRSKVTEEIAIPLRRSSRHQTLPERKKLSETEDSVIIIDSSPTALKHPEKNQKKLQCLNDVLGKKLNTSTKNVPGKMKVAPLFLVRKAQKAADPVPSFDESSQDTSEKSQDCDVQCKAKRDFLMSGLPDLLKRQIAKKAAALDVYNAVSTSFQRVVHVQQKDDGCCLWHLKPPSCPLLTKFKELNTKVIDLSKCGIALGEFSTLNSKLKSGNSAAVFMRTRKEFTEEVRNLLLEEIRWSNPEFSLKKYFPLLLKKQIEHQVLSSECHSKQELEADVSHKETKRKLVEAENSKSKRKKPNEYSKNLEKTNRKSEELSKRNNSSGIKLDSSKDSGTEDMLWTEKYQPQTASELIGNELAIKKLHSWLKDWKRRAELEERQNLKGKRDEKHEDFSGGIDFKGSSDDEEESRLCNTVLITGPTGVGKTAAVYACAQELGFKIFEVNASSQRSGRQILSQLKEATQSHQVDKQGVNSQKPCFFNSYYIGKSPKKISSPKKVVTSPRKVPPPSPKSSGPKRALPPKTLANYFKVSPKPKNNEEIGMLLENNKGIKNSFEQKQITQTKSTNATNSNVKDVGAEEPSRKNATSLILFEEVDVIFDEDAGFLNAIKTFMATTKRPVILTTSDPTFSLMFDGCFEEIKFSTPSLLNVASYLQMICLTENFRTDVKDFVTLLTANTCDIRKSILYLQFWIRSGGGVLEERPLTLYRGNSRNVQLVCSEHGLDNKIYPKNTKKKRVDLPKCDSGCAETLFGLKNIFSPSEDLFSFLKHKITMKEEWHKFIQLLTEFQMRNVDFLYSNLEFILPLPVDTIPETKNFCGPSVTVDASAATKSMNCLARKHSEREQPLKKSQKKKQKKTLVILDDSDLFDTDLDFPDQSISLSSVSSSSNAEESKTGDEESKARDKGNNPETKKSIPCPPKTTAGKKCSALVSHCLNSLSEFMDNMSFLDALLTDVREQNKYGRNDFSWTNGKVTSGLCDEFSLESNDGWTSQSSGELKAAAEALSFTKCSSAISKALETLNSCKKLGRDPTNDLTFYVSQKRNNVYFSQSAANLDNAWKRISVIKSVFSSRSLLYVGNRQASIIEYLPTLRNICKTEKLKEQGKSKRRFLHYFEGIHLDIPKETVNTLAADFP

SEQ ID NO: 4469 - protein, 355 aa, Homo sapiens
MSEEQFGGDGAAAAATAAVGGSAGEQEGAMVAATQGAAAAAGSGAGTGGGTASGGTEGGSAESEGAKIDASKNEEDEGHSNSSPRHSEAATAQREEWKMFIGGLSWDTTKKDLKDYFSKFGEVVDCTLKLDPITGRSRGFGFVLFKESESVDKVMDQKEHKLNGKVIDPKRAKAMKTKEPVKKIFVGGLSPDTPEEKIREYFGGFGEVESIELPMDNKTNKRRGFCFITFKEEEPVKKIMEKKYHNVGLSKCEIKVAMSKEQYQQQQQWGSRGGFAGRARGRGGGPSQNWNQGYSNYWNQGYGNYGYNSQGYGGYGGYDYTGYNNYYGYGDYSNQQSGYGKVSRRGGHQNSYKPY

SEQ ID NO: 4470 - protein, 1365 aa, Homo sapiens
MDQYSLGDEGALPSEMHLPSFSESQGLNCSDTLNRDLGPNTRGFLYAGLSGLDPDPSLPTPDMSSEVLEDNLDTLSLYSGKDSDSVKLLEEYADSESQASLQDLGLGVLKAKEADEGGRATSGSARKGKRQHSSPQNPLLDCSLCGKVFSSASSLSKHYLTHSQERKHVCKICSKAFKRQDHLTGHMLTHQKTKPFVCIEQGCSKSYCDYRSLRRHYEVHHGLCILKEAPPEEEACGDSPHAHESAGQPPPSSLRSLVPPEARSPGSLLPHRDLLRRIVSSIVHQKTPSPGPAPAGASDSEGRNTACPCPASSGSSSCTPAGPHAAPAALDTELPEEPCLPQKEPATDVFTAPNSRAAENGAPDPPEPEPDTALLQARSTAECWPEGGSVPACLPLFRGQTVPASSQPSSHSFQWLRNLPGCPKSKGNNVFVVHKPSAVPSREGSESGPGPSSGSPSEESPPGPGGGLEDALPFPAALLRVPAEAPSDPRSASGEDDPCAPKKVKVDCDSFLCQNPGEPGLQEAQKAGGLPADASPLFRQLFLKSQEPLVSHEQMQVFQMITKSQRIFSHAQVAAVSSQLPAPEGKPAALRPLQGPWPQQPPPLAPAVDSLHAGPGNPEAEGSPARRRKTTPGVPREASPGSTRRDAKGGLKVAAVPTPLAAPSLDPSRNPDISSLAKQLRSSKGTLDLEDIFPSTGQRQTQLGGEEPPGASLPGKQAPAENGAASRITKGEKGPACSRGGGYRLLGNPRAPRFSGFRKEKAKMDMCCAASPSQVAMASFSSAGPPADPSKSKLTIFSRIQGGNIYRLPHPVKEENVAGRGNQQNGSPTDWTKPRSTFVCKNCSQMFYTEKGLSSHMCFHSDQWPSPRGKQEPQVFGTEFCKPLRQVLRPEGDRHSPPGTKKPLDPTAAAPLVVPQSIPVVPVTRHIGSMAMMEWCSRWLQATTCGSKLLQGQEKDGEERDSKESSQQRKRKKRPPPSTAGEPGPAGCHQSRLRSPMFLVDCLLKGLFQCSPYTPPPMLSPIREGSGVYFNTLCSTSTQASPDQLISSMLDQVDGSFGICVVKDDTKISIEPHINIGSRFQAEIPELQERSLAGTDEHVASLVWKPWGDMMISSETQDRVTELCNVACSSVMPGGGTNLELALHCLHEAQGNVQVALETLLLRGPHKPRTHLLADYRYTGSDVWTPIEKRLFKKAFYAHKKDFYLIHKMIQTKTVAQCVEYYYIWKKMIKFDCGRAPGLEKRVKREPEEVERTEEKVPCSPRERPSHHPTPKLKTKSYRRESILSSSPNAGSKRTPELLGSAESQGIFPCRECERVFDKIKSRNAHMKRHRLQDHVEPIIRVKWPVKPFQLKEEELGADIGPLQW

SEQ ID NO: 4471 - protein, 854 aa, Homo sapiens
GGIFEYVESGPMGAEELAFRFAVNTINRNRTLLPNTTLTYDTQKINLYDSFEASKKACDQLSLGVAAIFGPSHSSSANAVQSICNALGVPHIQTRWKHQVSDNKDSFYVSLYPDFSSLSRAILDLVQFFKWKTVTVVYDDSTGLIRLQELIKAPSRYNLRLKIRQLPADTKDAKPLLKEMKRGKEFHVIFDCSHEMAAGILKQALAMGMMTEYYHYIFTTLDLFALDVEPYRYSGVNMTGFRILNTENTQVSSIIEKWSMERLQAPPKPDSGLLDGFMTTDAALMYDAVHVVSVAVQQFPQMTVSSLQCNRHKPWRFGTRFMSLIKEAHWEGLTGRITFNKTNGLRTDFDLDVISLKEEGLEKIGTWDPASGLNMTESQKGKPANITDSLSNRSLIVTTILEEPYVLFKKSDKPLYGNDRFEGYCIDLLRELSTILGFTYEIRLVEDGKYGAQDDANGQWNGMVRELIDHKADLAVAPLAITYVREKVIDFSKPFMTLGISILYRKPNGTNPGVFSFLNPLSPDIWMYILLAYLGVSCVLFVIARFSPYEWYNPHPCNPDSDVVENNFTLLNSFWFGVGALMQQGSELMPKALSTRIVGGIWWFFTLIIISSYTANLAAFLTVERMESPIDSADDLAKQTKIEYGAVEDGATMTFFKKSKISTYDKMWAFMSSRRQSVLVKSNEEGIQRVLTSDYAFLMESTTIEFVTQRNCNLTQIGGLIDSKGYGVGTPMGSPYRDKITIAILQLQEEGKLHMMKEKWWRGNGCPEEESKEASALGVQNIGGIFIVLAAGLVLSVFVAVGEFLYKSKKNAQLEKRAKTKLPQDYVFLPILESVSISTVLSSSPSSSSLSSCS

SEQ ID NO: 4472 - protein, 306 aa, Homo sapiens
MSEEQFGGDGAAAAATAAVGGSAGEQEGAMVAATQGAAAAAGSGAGTGGGTASGGTEGGSAESEGAKIDASKNEEDEGHSNSSPRHSEAATAQREEWKMFIGGLSWDTTKKDLKDYFSKFGEVVDCTLKLDPITGRSRGFGFVLFKESESVDKVMDQKEHKLNGKVIDPKRAKAMKTKEPVKKIFVGGLSPDTPEEKIREYFGGFGEVESIELPMDNKTNKRRGFCFITFKEEEPVKKIMEKKYHNVGLSKCEIKVAMSKEQYQQQQQWGSRGGFAGRARGRGGDQQSGYGKVSRRGGHQNSYKPY

SEQ ID NO: 4473 - protein, 570 aa, Homo sapiens
MRRLGPFHPRVHWAAPPSLSSGLHRLLFLRGTRIPSSTTLSPPRHDSLSLDGGTVNPPRVREPTGREAFGPSPASSDWLPARWRNGRGGRPRARLCSGWTAAEEARRNPTLGGLLGRQRLLLRMGGGRLGAPMERHGRASATSVSSAGEQAAGDPEGRRQEPLRRRASSASVPAVGASAEGTRRDRLGSYSGPTSVSRQRVESLRKKRPLFPWFGLDIGGTLVKLVYFEPKDITAEEEEEEVESLKSIRKYLTSNVAYGSTGIRDVHLELKDLTLCGRKGNLHFIRFPTHDMPAFIQMGRDKNFSSLHTVFCATGGGAYKFEQDFLTIGDLQLCKLDELDCLIKGILYIDSVGFNGRSQCYYFENPADSEKCQKLPFDLKNPYPLLLVNIGSGVSILAVYSKDNYKRVTGTSLGGGTFFGLCCLLTGCTTFEEALEMASRGDSTKVDKLVRDIYGGDYERFGLPGWAVASSFGNMMSKEKREAVSKEDLARATLITITNNIGSIARMCALNENINQVVFVGNFLRINTIAMRLLAYALDYWSKGQLKALFSEHEGYFGAVGALLELLKIP

SEQ ID NO: 4474 - protein, 770 aa, Homo sapiens
MSNEVETSATNGQPDQQAAPKAPSKKEKKKGPEKTDEYLLARFKGDGVKYKAKLIGIDDVPDARGDKMSQDSMMKLKGMAAAGRSQGQHKQRIWVNISLSGIKIIDEKTGVIEHEHPVNKISFIARDVTDNRAFGYVCGGEGQHQFFAIKTGQQAEPLVVDLKDLFQVIYNVKKKEEEKKKIEEASKAVENGSEALMILDDQTNKLKSGVDQMDLFGDMSTPPDLNSPTESKDILLVDLNSEIDTNQNSLRENPFLTNGITSCSLPRPTPQASFLPENAFSANLNFFPTPNPDPFRDDPFTQPDQSTPSSFDSLKSPDQKKENSSSSSTPLSNGPLNGDVDYFGQQFDQISNRTGKQEAQAGPWPFSSSQTQPAVRTQNGVSEREQNGFSVKSSPNPFVGSPPKGLSIQNGVKQDLESSVQSSPHDSIAIIPPPQSTKPGRGRRTAKSSANDLLASDIFAPPVSEPSGQASPTGQPTALQPNPLDLFKTSAPAPVGPLVGLGGVTVTLPQAGPWNTASLVFNQSPSMAPGAMMGGQPSGFSQPVIFGTSPAVSGWNQPSPFAASTPPPVPVVWGPSASVAPNAWSTTSPLGNPFQSNIFPAPAVSTQPPSMHSSLLVTPPQPPPRAGPPKDISSDAFTALDPLGDKEIKDVKEMFKDFQLRQPPAVPARKGEQTSSGTLSAFASYFNSKVGIPQENADHDDFDANQLLNKINEPPKPAPRQVSLPVTKSTDNAFENPFFKDSFGSSQASVASSQPVSSEMYRDPFGNPFA

SEQ ID NO: 4475 - protein, 833 aa, Homo sapiens
MKGDTRHLNGEEDAGGREDSILVNGACSDQSSDSPPILEAIRTPEIRGRRSSSRLSKREVSSLLSYTQDLTGDGDGEDGDGSDTPVMPKLFRETRTRSESPAVRTRNNNSVSSRERHRPSPRSTRGRQGRNHVDESPVEFPATRSLRRRATASAGTPWPSPPSSYLTIDLTDDTEDTHGTPQSSSTPYARLAQDSQQGGMESPQVEADSGDGDSSEYQDGKEFGIGDLVWGKIKGFSWWPAMVVSWKATSKRQAMSGMRWVQWFGDGKFSEVSADKLVALGLFSQHFNLATFNKLVSYRKAMYHALEKARVRAGKTFPSSPGDSLEDQLKPMLEWAHGGFKPTGIEGLKPNNTQPENKTRRRTADDSATSDYCPAPKRLKTNCYNNGKDRGDEDQSREQMASDVANNKSSLEDGCLSCGRKNPVSFHPLFEGGLCQTCRDRFLELFYMYDDDGYQSYCTVCCEGRELLLCSNTSCCRCFCVECLEVLVGTGTAAEAKLQEPWSCYMCLPQRCHGVLRRRKDWNVRLQAFFTSDTGLEYEAPKLYPAIPAARRRPIRVLSLFDGIATGYLVLKELGIKVGKYVASEVCEESIAVGTVKHEGNIKYVNDVRNITKKNIEEWGPFDLVIGGSPCNDLSNVNPARKGLYEGTGRLFFEFYHLLNYSRPKEGDDRPFFWMFENVVAMKVGDKRDISRFLECNPVMIDAIKVSAAHRARYFWGNLPGMNRPVIASKNDKLELQDCLEYNRIAKLKKVQTITTKSNSIKQGKNQLFPVVMNGKEDVLWCTELERIFGFPVHYTDVSNMGRGARQKLLGRSWSVPVIRHLFAPLKDYFACE

SEQ ID NO: 4476 - protein, 645 aa, Homo sapiens
MDFSFSFMQGIMGNTIQQPPQLIDSANIRQEDAFDNNSDIAEDGGQTPYEATLQQGFQYPATTEDLPPLTNGYPSSISVYETQTKYQSYNQYPNGSANGFGAVRNFSPTDYYHSEIPNTRPHEILEKPSPPQPPPPPSVPQTVIPKKTGSPEIKLKITKTIQNGRELFESSLCGDLLNEVQASEHTKSKHESRKEKRKKSNKHDSSRSEERKSHKIPKLEPEEQNRPNERVDTVSEKPREEPVLKEEAPVQPILSSVPTTEVSTGVKFQVGDLVWSKVGTYPWWPCMVSSDPQLEVHTKINTRGAREYHVQFFSNQPERAWVHEKRVREYKGHKQYEELLAEATKQASNHSEKQKIRKPRPQRERAQWDIGIAHAEKALKMTREERIEQYTFIYIDKQPEEALSQAKKSVASKTEVKKTRRPRSVLNTQPEQTNAGEVASSLSSTEIRRHSQRRHTSAEEEEPPPVKIAWKTAAARKSLPASITMHKGSLDLQKCNMSPVVKIEQVFALQNATGDGKFIDQFVYSTKGIGNKTEISVRGQDRLIISTPNQRNEKPTQSVSSPEATSGSTGSVEKKQQRRSIRTRSESEKSTEVVPKKKIKKEQVETVPQATVKTGLQKGSADRGVQGSVRFSDSSVSAAIEETVD

SEQ ID NO: 4477 - protein, 557 aa, Homo sapiens
MPPPRLLFFLLFLTPMEVRPEEPLVVKVEEGDNAVLQCLKGTSDGPTQQLTWSRESPLKPFLKLSLGLPGLGIHMRPLAIWLFIFNVSQQMGGFYLCQPGPPSEKAWQPGWTVNVEGSGELFRWNVSDLGGLGCGLKNRSSEGPSSPSGKLMSPKLYVWAKDRPEIWEGEPPCLPPRDSLNQSLSQDLTMAPGSTLWLSCGVPPDSVSRGPLSWTHVHPKGPKSLLSLELKDDRPARDMWVMETGLLLPRATAQDAGKYYCHRGNLTMSFHLEITARPVLWHWLLRTGGWKVSAVTLAYLIFCLCSLVGILHLQRALVLRRKRKRMTDPTRRFFKVTPPPGSGPQNQYGNVLSLPTPTSGLGRAQRWAAGLGGTAPSYGNPSSDVQADGALGSRSPPGVGPEEEEGEGYEEPDSEEDSEFYENDSNLGQDQLSQDGSGYENPEDEPLGPEDEDSFSNAESYENEDEELTQPVARTMDFLSPHGSAWDPSREATSLAGSQSYEDMRGILYAAPQLRSIRGQPGPNHEEDADSYENMDNPDGPDPAWGGGGRMGTWSTR

SEQ ID NO: 4478 - protein, 4128 aa, Homo sapiens [sequence omitted]

SEQ ID NO: 4479 - protein, 508 aa, Homo sapiens
MNCQQLWLGFLLPMTVSGRVLGLAEVAPVDYLSQYGYLQKPLEGSNNFKPEDITEALRAFQEASELPVSGQLDDATRARMRQPRCGLEDPFNQKTLKYLLLGRWRKKHLTFRILNLPSTLPPHTARAALRQAFQDWSNVAPLTFQEVQAGAADIRLSFHGRQSSYCSNTFDGPGRVLAHADIPELGSVHFDEDEFWTEGTYRGVNLRIIAAHEVGHALGLGHSRYSQALMAPVYEGYRPHFKLHPDDVAGIQALYGKKSPVIRDEEEEETELPTVPPVPTEPSPMPDPCSSELDAMMLGPRGKTYAFKGDYVWTVSDSGPGPLFRVSALWEGLPGNLDAAVYSPRTQWIHFFKGDKVWRYINFKMSPGFPKKLNRVEPNLDAALYWPLNQKVFLFKGSGYWQWDELARTDFSSYPKPIKGLFTGVPNQPSAAMSWQDGRVYFFKGKVYWRLNQQLRVEKGYPRNISHNWMHCRPRTIDTTPSGGNTTPSGTGITLDTTLSATETTFEY

SEQ ID NO: 4480 - protein, 437 aa, Homo sapiens
MGERLFESAEGSQCGETFTQVPEDMLNKKTLPGVKSCESGTCGEIFMGYSSFNRNIRTDTGHQPHKCQKFLEKPYKHKQRRKALSHSHCFRTHERPHTREKPFDCKECEKSFISPASIRRYMVTHSGDGPYKCKFCGKALDCLSLYLTHERTHTGEKRYECKQCGKAFSWHSSVRIHERTHTGEKPYECKECGKSFNFSSSFRRHERTHTGEKPYKCKECGKAFNCPSSFHRHERTHTGEKPYECKLYGKALSRLISFRRHMRMHTGERPHKCKICGKAFYSPSSFQRHERSHTGEKPYKCKQCGKAFTCSTSFQYHERTHTGEKPDGCKQCGKAFRSAKYIRIHGRTHTGEKPYECKQCGKAFHCVSSFHRHERTHAGEKPYECKHCGKAFTCSIYIRIHERIHTGEKPYQCKECGKAFIRSSYCRKHERTHTINI

SEQ ID NO: 4481 - protein, 1052 aa, Homo sapiens
MEGSEPVAAHQGEEASCSSWGTGSTNKNLPIMSTASVEIDDALYSRQRYVLGDTAMQKMAKSHVFLSGMGGLGLEIAKNLVLAGIKAVTIHDTEKCQAWDLGTNFFLSEDDVVNKRNRAEAVLKHIAELNPYVHVTSSSVPFNETTDLSFLDKYQCVVLTEMKLPLQKKINDFCRSQCPPIKFISADVHGIWSRLFCDFGDEFEVLDTTGEEPKEIFISNITQANPGIVTCLENHPHKLETGQFLTFREINGMTGLNGSIQQITVISPFSFSIGDTTELEPYLHGGIAVQVKTPKTVFFESLERQLKHPKCLIVDFSNPEAPLEIHTAMLALDQFQEKYSRKPNVGCQQDSEELLKLATSISETLEEKPDVNADIVHWLSWTAQGFLSPLAAAVGGVASQEVLKAVTGKFSPLCQWLYLEAADIVESLGKPECEEFLPRGDRYDALRACIGDTLCQKLQNLNIFLVGCGAIGCEMLKNFALLGVGTSKEKGMITVTDPDLIEKSNLNRQFLFRPHHIQKPKSYTAADATLKINSQIKIDAHLNKVCPTTETIYNDEFYTKQDVIITALDNVEARRYVDSRCLANLRPLLDSGTMGTKGHTEVIVPHLTESYNSHRDPPEEEIPFCTLKSFPAAIEHTIQWARDKFESSFSHKPSLFNKFWQTYSSAEEVLQKIQSGHSLEGCFQVIKLLSRRPRNWSQCVELARLKFEKYFNHKALQLLHCFPLDIRLKDGSLFWQSPKRPPSPIKFDLNEPLHLSFLQNAAKLYATVYCIPFAEEDLSADALLNILSEVKIQEFKPSNKVVQTDETARKPDHVPISSEDERNAIFQLEKAILSNEATKSDLQMAVLSFEKDDDHNGHIDFITAASNLRAKMYSIEPADRFKTKRIAGKIIPAIATTTATVSGLVALEMIKVTGGYPFEAYKNCFLNLAIPIVVFTETTEVRKTKIRNGISFTIWDRWTVHGKEDFTLLDFINAVKEKYGIEPTMVVQGVKMLYVPVMPGHAKRLKLTMHKLVKPTTEKKYVDLTVSFAPDIDGDEDLPGPPVRYYFSHDTD

SEQ ID NO: 4482 - protein, 1338 aa, Homo sapiens
MSPVLHFYVRPSGHEGAAPGHTRRKLQGKLPELQGVETELCYNVNWTAEALPSAEETKKLMWLFGCPLLLDDVARESWLLPGSNDLLLEVGPRLNFSTPTSTNIVSVCRATGLGPVDRVETTRRYRLSFAHPPSAEVEAIALATLHDRMTEQHFPHPIQSFSPESMPEPLNGPINILGEGRLALEKANQELGLALDSWDLDFYTKRFQELQRNPSTVEAFDLAQSNSEHSRHWFFKGQLHVDGQKLVHSLFESIMSTQESSNPNNVLKFCDNSSAIQGKEVRFLRPEDPTRPSRFQQQQGLRHVVFTAETHNFPTGVCPFSGATTGTGGRIRDVQCTGRGAHVVAGTAGYCFGNLHIPGYNLPWEDPSFQYPGNFARPLEVAIEASNGASDYGNKFGEPVLAGFARSLGLQLPDGQRREWIKPIMFSGGIGSMEADHISKEAPEPGMEVVKVGGPVYRIGVGGGAASSVQVQGDNTSDLDFGAVQRGDPEMEQKMNRVIRACVEAPKGNPICSLHDQGAGGNGNVLKELSDPAGAIIYTSRFQLGDPTLNALEIWGAEYQESNALLLRSPNRDFLTHVSARERCPACFVGTITGDRRIVLVDDRECPVRRNGQGDAPPTPLPTPVDLELEWVLGKMPRKEFFLQRKPPMLQPLALPPGLSVHQALERVLRLPAVASKRYLTNKVDRSVGGLVAQQQCVGPLQTPLADVAVVALSHEELIGAATALGEQPVKSLLDPKVAARLAVAEALTNLVFALVTDLRDVKCSGNWMWAAKLPGEGAALADACEAMVAVMAALGVAVDGGKDSLSMAARVGTETVRAPGSLVISAYAVCPDITATVTPDLKHPEGRGHLLYVALSPGQHRLGGTALAQCFSQLGEHPPDLDLPENLVRAFSITQGLLKDRLLCSGHDVSDGGLVTCLLEMAFAGNCGLQVDVPVPRVDVLSVLFAEEPGLVLEVQEPDLAQVLKRYRDAGLHCLELGHTGEAGPHAMVRVSVNGAVVLEEPVGELRALWEETSFQLDRLQAEPRCVAEEERGLRERMGPSYCLPPTFPKASVPREPGGPSPRVAILREEGSNGDREMADAFHLAGFEVWDVTMQDLCSGAIGLDTFRGVAFVGGFSYADVLGSAKGWAAAVTFHPRAGAELRRFRKRPDTFSLGVCNGCQLLALLGWVGGDPNEDAAEMGPDSQPARPGLLLRHNLSGRYESRWASVRVGPGPALMLRGMEGAVLPVWSAHGEGYVAFSSPELQAQIEARGLAPLHWADDDGNPTEQYPLNPNGSPGGVAGICSCDGRHLAVMPHPERAVRPWQWAWRPPPFDTLTTSPWLQLFINARNWTLEGSC

SEQ ID NO: 4483 - protein, 647 aa, Homo sapiens
MACSLQKLFAVEEEFEDEDFLSAVEDAENRFTGSLPVNAGRLRPVSSRPQETVQAQSSRLLLLHPTAPSEALGLPDLDLCLPASSTPSADSRPSCIGAAPLRPVSTSSSWIGNQRRVTVTEVLRETARPQSSALHPLLTFESQQQQVGGFEGPEQDEFDKVLASMELEEPGMELECGVSSEAIPILPAQQREGSVLAKKARVVDLSGSCQKGPVPAIHKAGIMSAQDESLDPVIQCRTPRPPLRPGAVGHLPVPTALTVPTQQLHWEVCPQRSPVQALQPLQAARGTIQSSPQNRFPCQPFQSPSSWLSGKAHLPRPRTPNSSCSTPSRTSSGLFPRIPLQPQAPVSSIGSPVGTPKGPQGALQTPIVTNHLVQLVTAASRTPQQPTHPSTRAKTRRFPGPAGILPHQQSGRSLEDIMVSAPQTPTHGALAKFQTEIVASSQASVEEDFGRGPWLTMKSTLGLDERDPSCFLCTYSIVMVLRKQAALKQLPRNKVPNMAVMIKSLTRSTMDASVVFKDPTGEMQGTVHRLLLETCQNELKPGSVLLLKQIGVFSPSLRNHYLNVTPNNLVHIYSPDSGDGSFLKPSQPFPKDSGSFQHDVAAKPEEGFRTAQNLEAEASPEEELPEADDLDGLLSELPEDFFCGTSS

SEQ ID NO: 4484 - protein, 1093 aa, Homo sapiens
MAGAAGLTAEVSWKVLERRARTKRSGSVYEPLKSINLPRPDNETLWDKLDHYYRIVKSTLLLYQSPTTGLFPTKTCGGDQKAKIQDSLYCAAGAWALALAYRRIDDDKGRTHELEHSAIKCMRGILYCYMRQADKVQQFKQDPRPTTCLHSVFNVHTGDELLSYEEYGHLQINAVSLYLLYLVEMISSGLQIIYNTDEVSFIQNLVFCVERVYRVPDFGVWERGSKYNNGSTELHSSSVGLAKAALEAINGFNLFGNQGCSWSVIFVDLDAHNRNRQTLCSLLPRESRSHNTDAALLPCISYPAFALDDEVLFSQTLDKVVRKLKGKYGFKRFLRDGYRTSLEDPNRCYYKPAEIKLFDGIECEFPIFFLYMMIDGVFRGNPKQVQEYQDLLTPVLHHTTEGYPVVPKYYYVPADFVEYEKNNPGSQKRFPSNCGRDGKLFLWGQALYIIAKLLADELISPKDIDPVQRYVPLKDQRNVSMRFSNQGPLENDLVVHVALIAESQRLQVFLNTYGIQTQTPQQVEPIQIWPQQELVKAYLQLGINEKLGLSGRPDRPIGCLGTSKIYRILGKTVVCYPIIFDLSDFYMSQDVFLLIDDIKNALQFIKQYWKMHGRPLFLVLIREDNIRGSRFNPILDMLAALKKGIIGGVKVHVDRLQTLISGAVVEQLDFLRISDTEELPEFKSFEELEPPKHSKVKRQSSTPSAPELGQQPDVNISEWKDKPTHEILQKLNDCSCLASQAILLGILLKREGPNFITKEGTVSDHIERVYRRAGSQKLWLAVRYGAAFTQKFSSSIAPHITTFLVHGKQVTLGAFGHEEEVISNPLSPRVIQNIIYYKCNTHDEREAVIQQELVIHIGWIISNNPELFSGMLKIRIGWIIHAMEYELQIRGGDKPALDLYQLSPSEVKQLLLDILQPQQNGRCWLNRRQIDGSLNRTPTGFYDRVWQILERTPNGIIVAGKHLPQQPTLSDMTMYEMNFSLLVEDTLGNIDQPQYRQIVVELLMVVSIVLERNPELEFQDKVDLDRLVKEAFNEFQKDQSRLKEIEKQDDMTSFYNTPPLGKRGTCSYLTKAVMNLLLEGEVKPNNDDPCLIS

SEQ ID NO: 4485 - protein, 570 aa, Homo sapiens
MRKKDKQSIRDVRDIFGVSESPPRDTCGNHTNQLDGTKEERELPRVIKTSGSMPDDASLNSTTLSDASQDKEGSFAVPRSDSVAILETIPVLPVHSNGSPEPGQPVQNAISDDDFLEKNIPPEAEELSFEVSYSEMVTEALKRNKLKKSEIKKEDYVLTKFNVQKTRFGLTEAGDLSAEDMKKIRHLSLIELTAFFDAFGIQLKRNKTEKVKGRDNGIFGVPLTVLLDGDRKKDPGVKVPLVLQKFFEKVEESGLESEGIFRLSGCTAKVKQYREELDAKFNADKFKWDKMCHREAAVMLKAFFRELPTSLFPVEYIPAFISLMERGPHVKVQFQALHLMVMALPDANRDAAQALMTFFNKVIANESKNRMSLWNISTVMAPNLFFSRSKHSDYEELLLANTAAHIIRLMLKYQKILWKVPSFLITQVRRMNEATMLLKKQLPSVRKLLRRKTLERETASPKTSKVLQKSPSARRMSDVPEGVIRVHAPLLSKVSMAIQLNNQTKAKDILAKFQYENSHGSSECIKIQNQRLYEIGGNIGEHCLDPDAYILDVYRINPQAEWVIKPQQSS

SEQ ID NO: 4486 - protein, 1434 aa, Homo sapiens
MLRLPKKGLPRFEQVQDEDTYLENLAIQRNASAFFEKYDRSEIQELLTTALVSWLSAKEDVRSQVDLPCGIMSQMNNVGFSTAILLTPVDPTALLDYREVHQMIRELAIGIYCLNQIPSISLEANYDQSSSCQLPPAYYDTRIGQILINIDYMLKALWHGIYMPKEKRARFSELWRAIMDIDPDGKPQTNKDIFSEFSSAGLTDITKDPDFNEIYDEDVNEDPTYDPNSPEETAVFMKYAENIMLKLTFSTTQIQQYENVFIFETGYWLTNAIKYNQDYLDICTYQRLQQRLYLQKKIIQKHFEKKKDIRRGIGYLKLICFLIPFLLSLKKKMKVPYLSSLLQPFSDDKVKTERELPPFIYGRDFKCQNFHYKENQYFHVHGGIEFDISTPSIENALEDFQKNLEKIRDCAANTFIEDSGYKEYYSIPVMEFHGKSYYVIYFELETFYQQLYKTQWWGAINEIVNNLRLKRLPLTDAQLHEQFKKKLGFKRAMKCKSIPFGMKSAVERGLSAVFHTFSRKTSSSTINVSDEAGYTIFHHAALHNRVSIICQLCNANFKVNQRRFVTFSQGPTPLHLAAQACSLETTVCLLCSKADYTLSEKRGWMPIHFAAFYDNVCIIIALCRKDPSLLEAEATAENQCTPLLLAATSGALDTIQYLFSIGANWRKTDIKGNNIIHLSVLTFHTEVLKYIIKLNIPELPVWKTLVEMLQCESYKRRMMAVMSLEVICLANDQYWRCILDAGTIPALINLLKSSKIKLQCKTVGLLSNISTHKSAVHALVEAGGIPSLINLLVCDEPEVHSRCAVILYDIAQCENKDVIAKYNGIPSLINLLNLNIENVLVNVMNCIRVLCIGNENNQRAVREHKGLPYLIRFLSSDSDVLKAVSSAAIAEVGRDNKEIQDAIAMEGAIPPLVALFKGKQISVQMKGAMAVESLASHNALIQKAFLEKSLTKYLLKLLKAFQIDVKEQGAVALWALAGQTLKQQKYMAEQIGYSFIINMLLSPSAKMQYVGGEAVIALSKDSRMHQNQICEGNGIAPLVRLLRISTIAEGTLLSVIRAVGSICIGVAHTSNPVSQQLVVDENAFPVLIQLLRNHPSPNIKVEVAFSLACIVLGNDVLQKDLHENEGFEYADVLYLLHSTEKDICLRAGYALTLFAFNNRFQQYLILESGIMTISIFERFLESTVETEKAMAAFQIVVLAKVIRDMDHITLSARGVTILVDSLYSVQTSTIVLTGNLIASLAHSRAGIPEAFTTLGTIQRLCYHLYSGIEEVRAACSSALGYLTYNANAFRILLKECRNKPNQFIRIKNNISRDASINPAFLKEFQMQQTLVGLPSLSLEKNGGPSIIPIFKRGKEHRRKLKPKIQPKDSLTLLPPVTNFMGLFKATKKTKDSHNIFSFSSTITSDITNVSRPRIVCLNQLGKHVQKANPEPAEG

SEQ ID NO: 4487 - protein, 696 aa, Homo sapiens
MHFDPGFEEQLFWGSQQAMNSGKTKSHFQLDPESQCSFGSFVSFRPDQGITLGSPQRHDARAPPPLACGPSESTLKEGIPGPRNLDLPGLWDVPAWESTQHPWPVCGESCWENNHLVMHQRGHSKDRTRRAWEKFNKRAETQMPWSSPRVQRHFRCGVCGKSFRRKLCLLRHLAAHTGRGPFRNADGEMCFRHELTHPSHRLPQQGEKPAQCTPCGKRSLPVDSTQARRCQHSREGPASWREGRGASSSVHSGQKPGSRLPQEGNSHQEGDTEALQHGAEGPCSCSECGERSPMSARLASPCRAHTGEKPFQCAHCTKRFRLRRLLQVHQHAHGGERPFSCRKCGKGFAKQCKLTEHIRVHSGEKPFRCAKCGRNFRQRGQLLRHQRLHTDEKPFQCPECGLSFRLESMLRAHRLRHGGERPFSCSECGRGFTHQCKLREHLRVHSGERPFQCLKCDKRFRLKGILKAHQHTHSKERPFSCGECGKGFTRQSKLTEHLRVHSGERPFQCPECNRSFRLKGQLLSHQRLHTGERPFQCPECDKRYRVKADMKAHQLLHSGEMPFSCECGKGFVKHSKLIEHIRTHTGEKPFQCPKCDKSFRLKAQLLSHQGLHTGERPFHCPECDKNFRERGHMLRHQRIHRPERPFACGDCGKGFIYKSKLAEHIRVHTKSCPAPNELDIKKRLSQLFAMIEADWS

SEQ ID NO: 4488 - protein, 757 aa, Homo sapiens
MAGLTAAAPRPGVLLLLLSILHPSRPGGVPGAIPGGVPGGVFYPGAGLGALGGGALGPGGKPLKPVPGGLAGAGLGAGLGAFPAVTFPGALVPGGVADAAAAYKAAKAGAGLGGVPGVGGLGVSAGAVVPQPGAGVKPGKVPGVGLPGVYPGGVLPGARFPGVGVLPGVPTGAGVKPKAPGVGGAFAGIPGVGPFGGPQPGVPLGYPIKAPKLPGGYGLPYTTGKLPYGYGPGGVAGAAGKAGYPTGTGVGPQAAAAAAAKAAAKFGAGAAGVLPGVGGAGVPGVPGAIPGIGGIAGVGTPAAAAAAAAAAKAAKYGAAAGLVPGGPGFGPGVVGVPGAGVPGVGVPGAGIPVVPGAGIPGAAVPGVVSPEAAAKAAAKAAKYGARPGVGVGGIPTYGVGAGGFPGFGVGVGGIPGVAGVPGVGGVPGVGGVPGVGISPEAQAAAAAKAAKYGVGTPAAAAAKAAAKAAQFGLVPGVGVAPGVGVAPGVGVAPGVGLAPGVGVAPGVGVAPGVGVAPGIGPGGVAAAAKSAAKVAAKAQLRAAAGLGAGIPGLGVGVGVPGLGVGAGVPGLGVGAGVPGFGAGADEGVRRSLSPELREGDPSSSQHLPSTPSSPRVPGALAAAKAAKYGAAVPGVLGGLGALGGVGIPGGVVGAGPAAAAAAAKAAAKAAQFGLVGAAGLGGLGVGGLGVPGVGGLGGIPPAAAAKAAKYGAAGLGGVLGGAGQFPLGGVAARPGFGLSPIFPGGACLGKACGRKRK

SEQ ID NO: 4489 - protein, 471 aa, Homo sapiens
MQIDVDPQEDPQNAPDVNYVVENPSLDLEQYAASYSGLMRIERLQFIADHCPTLRVEALKMALSFVQRTFNVDMYEEIHRKLSEATRELQNAPDAIPESGVEPPALDTAWVEATRKKALLKLEKLDTDLKNYKGNSIKESIRRGHDDLGDHYLDCGDLSNALKCYSRARDYCTSAKHVINMCLNVIKVSVYLQNWSHVLSYVSKAESTPEIAEQRGERDSQTQAILTKLKCAAGLAELAARKYKQAAKCLLLASFDHCDFPELLSPSNVAIYGGLCALATFDRQELQRNVISSSSFKLFLELEPQVRDIIFKFYESKYASCLKMLDEMKDNLLLDMYLAPHVRTLYTQIRNRALIQYFSPYVSADMHRMAAAFNTTVAALEDELTQLILEGLISARVDSHSKILYARDVDQRSTTFEKSLLMGKEFQRRAKAMMLRAAVLRNQIHVKSPPREGSQGELTPANSQSRMSTNM

SEQ ID NO: 4490 - protein, 436 aa, Homo sapiens
MTAVYMNGGGLVNPHYARWDRRDSVESGCQTESSKEGEEGQPRQLTPFEKLTQDMSQDEKVVREITLGKRIGFYRIRGEIGSGNFSQVKLGIHSLTKEKVAIKILDKTKLDQKTQRLLSREISSMEKLHHPNIIRLYEVVETLSKLHLVMEYAGGGELFGKISTEGKLSEPESKLIFSQIVSAVKHMHENQIIHRDLKAENVFYTSNTCVKVGDFGFSTVSKKGEMLNTFCGSPPYAAPELFRDEHYIGIYVDIWALGVLLYFMVTGTMPFRAETVAKLKKSILEGTYSVPPHVSEPCHRLIRGVLQQIPTERYGIDCIMNDEWMQGVPYPTPLEPFQLDPKHLSETSTLKEEENEVKSTLEHLGITEEHIRNNQGRDARSSITGVYRIILHRVQRKKALESVPVMMLPDPKERDLKKGSRVYRGIRHTSKFCSIL

SEQ ID NO: 4491 - protein, 1461 aa, Homo sapiens
MALSVDSSWHRWQWRVRDGFPHCPSETTPLLSPEKGRQSYNLTQQRVVFPNNSIFHQDWEEVSRRYPGNRTCTTKYTLFTFLPRNLFEQFHRWANLYFLFLVILNWMPSMEVFHREITMLPLAIVLFVIMIKDGMEDFKRHRFDKAINCSNIRIYERKEQTYVQKCWKDVRVGDFIQMKCNEIVPADILLLFSSDPNGICHLETASLDGETNLKQRCVVKGFSQQEVQFEPELFHNTIVCEKPNNHLNKFKGYMEHPDQTRTGFGCESLLLRGCTIRNTEMAVGIVIYAGHETKAMLNNSGPRYKRSKIERRMNIDIFFCIGILILMCLIGAVGHSIWNGTFEEHPPFDVPDANGSFLPSALGGFYMFLTMIILLQVLIPISLYVSIELVKLGQVFFLSNDLDLYDEETDLSIQCRALNIAEDLGQIQYIFSDKTGTLTENKMVFRRCTIMGSEYSHQENAKRLETPKELDSDGEEWTQYQCLSFSARWAQDPATMRSQKGAQPLRRSQSARVPIQGHYRQRSMGHRESSQPPVAFSSSIEKDVTPDKNLLTKVRDAALWLETLSDSRPAKASLSTTSSIADFFLALTICNSVMVSTTTEPRQRVTIKPSSKALGTSLEKIQQLFQKLKLLSLSQSFSSTAPSDTDLGESLGANVATTDSDERDDASVCSGGDSTDDGGYRSSMWDQGDILESGSGTSLEEALEAPATDLARPEFCYEAESPDEAALVHAAHAYSFTLVSRTPEQVTVRLPQGTCLTFSLLCTLGFDSVRKRMSVVVRHPLTGEIVVYTKGADSVIMDLLEDPACVPDINMEKKLRKIRARTQKHLDLYARDGLRTLCIAKKVVSEEDFRRWASFRREAEASLDNRDELLMETAQHLENQLTLLGATGIEDRLQEGVPDTIATLREAGIQLWVLTGDKQETAVNIAHSCRLLNQTDTVYTINTENQETCESILNCALEELKQFRELQKPDRKLFGFRLPSKTPSITSEAVVPEAGLVIDGKTLNAIFQGKLEKKFLELTQYCRSVLCCRSTPLQKSMIVKLVRDKLRVMTLSIGDGANDVSMIQAADIGIGISGQEGMQAVMSSDFAITRFKHLKKLLLVHGHWCYSRLARMVVYYLYKNVCYVNLLFWYQFFCGFSSSTMIDYWQMIFFNLFFTSLPPLVFGVLDKDISAETLLALPELYKSGQNSECYNLSTFWISMVDAFYQSLICFFIPYLAYKGSDIDVFTFGTPINTISLTTILLHQAMEMKTWTIFHGVVLLGSFLMYFLVSLLYNATCVICNSPTNPYWVMEGQLSNPTFYLVCFLTPVVALLPRYFFLSLQGTCGKSLISKAQKIDKLPPDKRNLEIQSWRSRQRPAPVPEVARPTHHPVSSITGQDFSASTPKSSNPPKRKHVEESVLHEQRCGTECMRDDSCSGDSSAQLSSGEHLLGPNRIMAYSRGQTDMCRCSKRSSHRRSQSSLTI

SEQ ID NO: 4492 - protein, 951 aa, Homo sapiens
MHKRKGPPGPPGRGAAAARQLGLLVDLSPDGLMIPEDGANDEELEAEFLALVGGQPPALEKLKGKGPLPMEAIEKMASLCMRDPDEDEEEGTDEDDLEADDDLLAELNEVLGEEQKASETPPPVAQPKPEAPHPGLETTLQERLALYQTAIESARQAGDSAKMRRYDRGLKTLENLLASIRKGNAIDEADIPPPVAIGKGPASTPTYSPAPTQPAPRIASAPEPRVTLEGPSATAPASSPGLAKPQMPPGPCSPGPLAQLQSRQRDYKLAALHAKQQGDTTAAARHFRVAKSFDAVLEALSRGEPVDLSCLPPPPDQLPPDPPSPPSQPPTPATAPSTTEVPPPPRTLLEALEQRMERYQVAAAQAKSKGDQRKARMHERIVKQYQDAIRAHKAGRAVDVAELPVPPGFPPIQGLEATKPTQQSLVGVLETAMKLANQDEGPEDEEDEVPKKQNSPVAPTAQPKAPPSRTPQSGSAPTAKAPPKATSTRAQQQLAFLEGRKKQLLQAALRAKQKNDVEGAKMHLRQAKGLEPMLEASRNGLPVDITKVPPAPVNKDDFALVQRPGPGLSQEAARRYGELTKLIRQQHEMCLNHSNQFTQLGNITETTKFEKLAEDCKRSMDILKQAFVRGLPTPTARFEQRTFSVIKIFPDLSSNDMLLFIVKGINLPTPPGLSPGDLDVFVRFDFPYPNVEEAQKDKTSVIKNTDSPEFKEQFKLCINRSHRGFRRAIQTKGIKFEVVHKGGLFKTDRVLGTAQLKLDALEIACEVREILEVLDGRRPTGGRLEVMVRIREPLTAQQLETTTERWLVIDPVPAAVPTQVAGPKGKAPPVPAPARESGNRSARPLHSLSVLAFDQERLERKILALRQARRPVPPEVAQQYQDIMQRSQWQRAQLEQGGVGIRREYAAQLERQLQFYTEAARRLGNDGSRDAAKEALYRRNLVESELQRLRR

SEQ ID NO: 4493 - protein, 984 aa, Homo sapiens
MDKRKLGRRPSSSEIITEGKRKKSSSDLSEIRKMLNAKPEDVHVQSPLSKFRSSERWTLPLQWERSLRNKVISLDHKNKKHIRGCPVTSKSSPERIPRVILTNVLGTELGRKYIRTPPVTEGSLSDTDNLQSEQLSSSSDGSLESYQNLNPHKSCYLSERGSQRSKTVDDNSAKQTAHNKEKRRKDDGISLLISDTQPEDLNSGSRGCDHLEQESRNKDVKYSDSKVELTLISRKTKRRLRNNLPDSQYCTSLDKSTEQTKKQEDDSTISTEFEKPSENYHQDPKLPEEITTKPTKSDFTKLSSLNSQELTLSNATKSASAGSTTETVENSNSIDIVGISSLVEKDENELNTIEKPILRGHNEGNQSLISAEPIVVSSDEEGPVEHKSSEILKLQSKQDRETTNENESTSESALLELPLITCESVQMSSELCPYNPVMENISSIMPSNEMDLQLDFIFTSVYIGKIKGASKGCVTITKKYIKIPFQVSLNEISLLVDTTHLKRFGLWKSKDDNHSKRSHAILFFWVSSDYLQEIQTQLEHSVLSQQSKSSEFIFLELHNPVSQREELKLKDIMTEISIISGELELSYPLSWVQAFPLFQNLSSKESSFIHYYCVSTCSFPAGVAVAEEMKLKSVSQPSNTDAAKPTYTFLQKQSSGCYSLSITSNPDEEWREVRHTGLVQKLIVYPPPPTKGGLGVTNEDLECLEEGEFLNDVIIDFYLKYLILEKASDELVERSHIFSSFFYKCLTRKENNLTEDNPNLSMAQRRHKRVRTWTRHINIFNKDYIFVPVNESSHWYLAVICFPWLEEAVYEDFPQTVSQQSQAQQSQNDNKTIDNDLRTTSTLSLSAEDSQSTESNMSVPKKMCKRPCILILDSLKAASVQNTVQNLREYLEVEWEVKLKTHRQFSKTNMVDLCPKVPKQDNSSDCGVYLLQYVESFFKDPIVNFELPIHLEKWFPRHVIKTKREDIRELILKLHLQQQKGSSS

SEQ ID NO: 4494 - protein, 1235 aa, Homo sapiens
MANDSPAKSLVDIDLSSLRDPAGIFELVEVVGNGTYGQVYKGRHVKTGQLAAIKVMDVTEDEEEEIKLEINMLKKYSHHRNIATYYGAFIKKSPPGHDDQLWLVMEFCGAGSITDLVKNTKGNTLKEDWIAYISREILRGLAHLHIHHVIHRDIKGQNVLLTENAEVKLVDFGVSAQLDRTVGRRNTFIGTPYWMAPEVIACDENPDATYDYRSDLWSCGITAIEMAEGAPPLCDMHPMRALFLIPRNPPPRLKSKKWSKKFFSFIEGCLVKNYMQRPSTEQLLKHPFIRDQPNERQVRIQLKDHIDRTRKKRGEKDETEYEYSGSEEEEEEVPEQEGEPSSIVNVPGESTLRRDFLRLQQENKERSEALRRQQLLQEQQLREQEEYKRQLLAERQKRIEQQKEQRRRLEEQQRREREARRQQEREQRRREQEEKRRLEELERRRKEEEERRRAEEEKRRVEREQEYIRRQLEEEQRHLEVLQQQLLQEQAMLLHDHRRPHPQHSQQPPPPQQERSKPSFHAPEPKAHYEPADRAREVQWSHLASLKNNVSPVSRSHSFSDPSPKFAHHHLRSQDPCPPSRSEVLSQSSDSKSEAPDPTQKAWSRSDSDEVPPRVPVRTTSRSPVLSRRDSPLQGSGQQNSQAGQRNSTSSIEPRLLWERVEKLVPRPGSGSSSGSSNSGSQPGSHPGSQSGSGERFRVRSSSKSEGSPSQRLENAVKKPEDKKEVFRPLKPAVRIDLTALAKELRAVEDVRPPHKVTDYSSSSEESGTTDEEDDDVEQEGADESTSGPEDTRAASSLNLSNGETESVKTMIVHDDVESEPAMTPSKEGTLIVRQTQSASSTLQKHKSSSSFTPFIDPRLLQISPSSGTTVTSVVGFSCDGMRPEAIRQDPTRKGSVVNVNPTNTRPQSDTPEIRKYKKRFNSEILCAALWGVNLLVGTESGLMLLDRSGQGKVYPLINRRRFQQMDVLEGLNVLVTISGKKDKLRVYYLSWLRNKILHNDPEVEKKQGWTTVGDLEGCVHYKVVKYERIKFLVIALKSSVEVYAWAPKPYHKFMAFKSFGELVHKPLLVDLTVEEGQRLKVIYGSCAGFHAVDVDSGSVYDIYLPTHIQCSIKPHAIIILPNTDGMELLVCYEDEGVYVNTYGRITKDVVLQWGEMPTSVAYIRSNQTMGWGEKAIEIRSVETGHLDGVFMHKRAQRLKFLCERNDKVFFASVRSGGSSQVYFMTLGRTSLLSW

SEQ ID NO: 4495 - protein, 953 aa, Homo sapiens
MCNPEEAALLRLEEVFSATLAHVNSLVLQPLLPAAPDPSDPWGRECLRLLQQLHKSSQQLWEVTEESLHSLQERLRYPDSTGLESLLLLRGADRVLQAHIEYIESYTSCMVVQAFQKAAKRRSEYWRGQRKALRQLLSGVSSEGSVGASLGQALHQPLAHHVQQYVLLLLSLGDTIGEHHPTRELVVNAVTLFGNLQSFMKQELDQAVATQALWHTLRGRLRDVLCTPAHRLLQDSQDVPVTVAPLRAERVLLFDDALVLLQGHNVHTFDLKLVWVDPGQDGCTFHLLTPEEEFSFCAKDSQGQAVWQWKVTWAVHQALHGKKDFPVLGAGLEPSQPPDCRCAEYTFQAEGRLCQATYEGEWCRGRPHGKGTLKWPDGRNHVGNFCQGLEHGFGIRLLPQASEDKFDCYKCHWREGSMCGYGICEYSTDEVYKGYFQEGLRHGFGVLESGPQAPQPFRYTGHWERGQRSGYGIEEDGDRGERYIGMWQAGQRHGPGVMVTQAGVCYQGTFQADKTVGPGILLSEDDSLYEGTFTRDLTLMGKGKVTFPNGFTLEGSFGSGAGRGLHTQGVLDTAALPPDPSSTCKRQLGVGAFPVESRWQGVYSPFRDFVCAGCPRDLQEALLGFDVQSSRELRRSQDYLSCERTHPEDSVGSMEDILEELLQHREPKALQLYLRKALSNSLHPLGKLLRTLMLTFQATYAGVGANKHLQELAQEEVKQHAQELWAAYRGLLRVALERKGQALEEDEDTETRDLQVHGLVLPLMLPSFYSELFTLYLLLHEREDSFYSQGIANLSLFPDTQLLEFLDVQKHLWPLKDLTLTSNQRYSLVRDKCFLSATECLQKIMTTVDPREKLEVLERTYGEIEGTVSRVLGREYKLPMDDLLPLLIYVVSRARIQHLGAEIHLIRDMMDPNHTGGLYDFLLTALESCYEHIQKEDMRLHRLPGHWHSRELW

SEQ ID NO: 4496 - protein, 470 aa, Homo sapiens
MSAQVLGFLRSWTPLPLAAPRGPAAAGNDAGAPAATAPGGEGEPHSRPCDARLGSTDKELKAGAAATGSAPTAPGTPWQREPRVEVMDPAGGPRGVLPRPCRVLVLLNPRGGKGKALQLFRSHVQPLLAEAEISFTLMLTERRNHARELVRSEELGRWDALVVMSGDGLMHEVVNGLMERPDWETAIQKPLCSLPAGSGNALAASLNHYAGYEQVTNEDLLTNCTLLLCRRLLSPMNLLSLHTASGLRLFSVLSLAWGFIADVDLESEKYRRLGEMRFTLGTFLRLAALRTYRGRLAYLPVGRVGSKTPASPVVVQQGPVDAHLVPLEEPVPSHWTVVPDEDFVLVLALLHSHLGSEMFAAPMGRCAAGVMHLFYVRAGVSRAMLLRLFLAMEKGRHMEYECPYLVYVPVVAFRLEPKDGKGVFAVDGELMVSEAVQGQVHPNYFWMVSGCVEPPPSWKPQQMPPPEEPL

SEQ ID NO: 4497 - protein, 242 aa, Homo sapiens [sequence omitted]

SEQ ID NO: 4498 - protein, 1159 aa, Homo sapiens
MPRKQPAGCIFLLTFLGLSGLVGTVTRTYYIGIVEEYWNYVPQGKNVITGKSFTEDKLATLFLERGPNRIGSIYKKAVYRRFTDGTYSIEIPKPPWLGFLGPILRAEVGDVIVIHLKNFASRPYSLHPHGVFYNKDSEGALYPDGTSGRNKNDDMVPPGKNYTYVWPVREEYAPTPADANCLTWVYHSHIDAPKDICSGLIGPLLVCKEGILNRYSGTRNDVDREFVIMFTLVDENQSWYLNENIKHFCTNPDSVDKKDAVFQRSNKMHALNGYLFGNFPEPDMCVGESVSWHLFGMGNEIDIHSIYFYGNTFISRGHRTDVVNLFPATFLTTEMIAENPGKWMITCQVSDHLQAGMLGQYNVDNCKSDIFYPKMKGQQRRYFIAAEKILWDYAPQGYNKFSGLPLNASGSDSDLYFTQGDNRIGGKYWKVRYTEFVDATFTKRKRLSAEEAHLGILGPVIKAEVGDTLLVTFANKADKVYSILPHGVIYDKASDAAPNLDGFVKPGAHVKPGETFTYKWTVPESVSPTAGDPPCLTYLYFSAVDPIKDTSSGLVGPLLVCKKGVLNADGTQKGIDKEFYLLFTVFDENLSRYFDENIQKFIWHPFSIDKEDKEFVKSNRMHAVNGYMYGNQPGLNMCKRDRVSWHLIGLGTDTDMHGIVFQGNTIHLRGTHRDSLALFPHMATTAFMQPDHAGIFRVFCATMPHLSRGMGQIYEVSSCDNRDPSEQRYGMIRTFYIAAEEVEWDYAPNKNWEFEKQHVDARGERHGDIFMNRTENWIGSQYKKVVYREYTDGEFVEIKARPPREEHLELLGPMIHAEVGNTVLIIFKNKASRPYSISAQGVEEMDSGKQFQVPMTKPGEVKTYRWNIPKRSGPGPSDPNCIPWVYYSTVNFVKDTYSGLMGPLITCRKGVLNEKGRRSDVDYEFALLFLVFNENESWYLDDNIKKYLNKDPRDFKRTDDFEESNRMHAINGKIFGNLHGLIMNEDTMTNWYLLGIGSEVDIHTIHYHAESFLFKIDKSYREDVYDLFPGTFQTIELFADHPGTWLLHCHVSDHIHAGMETTYTVLRNIDNRIPYSTTSPGVASHPATVPSNERPGKEQLYFFGKNLGPTGAKAALVILFIIGLLLLITTVILSLRLCSAMKQTDYQQVQSCALPTDAL

SEQ ID NO: 4499 - protein, 1026 aa, Homo sapiens
MAEFTSYKETASSRHLRFKLQSLSRRLDELEEATKNLQKAEDELLDLQDKVIQAEGSNSSMLAEIEVLRQRVLRIEGKDEEIKRAEDLCRLMKEKLEEEENLTRELKSEIERLQKRMAELEKLEEAFSRSKNDCTQLCLSLNEERNLTKKISSELEMLRVKVKELESSEDRLDKTEQSLASELEKLKSLTLSFVSERKYLNEKEKENEKLIKELTQKLEQNKKMNRDYTRNASNLERNDLRIEDGISSTLPSKESRRKGGLDYLKQVENETRNKSENEKNRNQEDNKVKDLNQEIEKLKTQIKHFESLEEELKKMKSKNNDLQDNYLSEQNKNKLLASQLEEIKLQIKKQKELENGEVEGEDAFLSSKGRHERTKFRGHGSEASVSKHTARELSPQHKRERLRNREFALNNENYSLSNRQVSSPSFTNRRAAKASHMGVSTDSGTQETKKTEDRFVPGSSQSEGKKSREQPSVLSRYPPAAQEHSKAWKGTSKPGTESGLKGKVEKTTRTFSDTTHGSVPSDPLGRADKASDTSSETVFGKRGHVLGNGSQVTQAANSGCSKAIGALASSRRSSSEGLSKGKKAANGLEADNSCPNSKAPVLSKYPYSCRSQENILQGFSTSHKEGVNQPAAVVMEDSSPHEALRCRVIKSSGREKPDSDDDLDIASLVTAKLVNTTITPEPEPKPQPNSREKAKTRGAPRTSLFENDKDAGMENESVKSVRASTNTMELPDTNGAGVKSQRPFSPREALRSRAIIKPVIVDKDVKKIMGGSGTETTLEKQKPVSKPGPNKVTSSITIYPSDSSSPRAAPGEALRERHTSTSNIQVGLAELTSVSNHVSSPFELSIHKHDITLQLAEAERMADGPLKDRPETVVSRSSIIIKPSDPVERNSHAPPAETIRWKSHSAPSEVGFSDARHVTVRNAWKSRRDLKSLEDPPTRIGKNVESTNSNAYTQRSSTDFSELEQPRSCLFEQGTRRVGPSSGDAPEPSSRRTQSSLTVSEVLTRRNRVGDTITVAAWNHSASMSS

SEQ ID NO: 4500 - protein, 256 aa, Homo sapiens
MGPRARPALLLLMLLQTAVLQGRLLRSHSLHYLFMGASEQDLGLSLFEALGYVDDQLFVFYDHESRRVEPRTPWVSSRISSQMWLQLSQSLKGWDHMFTVDFWTIMENHNHSKVPPLVKVTHHVTSSVTTLRCRALNYYPQNITMKWLKDKQPMDAKEFEPKDVLPNGDGTYQGWITLAVPPGEEQRYTCQVEHPGLDQPLIVIWEPSPSGTLVIGVISGIAVFVVILFIGILFIILRKRQGSRGAMGHYVLAERE

SEQ ID NO: 4501 - protein, 447 aa, Homo sapiens
MSASKIPLFKMKDLILILCLLEMSFAVPFFPQQSGTPGMASLSLETMRQLGSLQRLNTLSQYSRYGFGKSFNSLWMHGLLPPHSSLPWMRPREHETQQYEYSLPVHPPPLPSQPSLKPQQPGLKPFLQSAAATTNQATALKEALQPPIHLGHLPLQEGELPLVQQQVAPSDKPPKPELPGVDFADPQGPSLPGMDFPDPQGPSLPGLDFADPQGSTIFQIARLISHGPMPQNKQSPLYPGMLYVPFGANQLNAPARLGIMSSEEVAGGREDPMAYGAMFPGFGGMRPGFEGMPHNPAMGGDFTLEFDSPVAATKGPENEEGGAQGSPMPEANPDNLENPAFLTELEPAPHAGLLALPKDDIPGLPRSPSGKMKGLPSVTPAAADPLMTPELADVYRTYDADMTTSVDFQEEATMDTTMAPNSLQTSMPGNKAQEPEMMHDAWHFQEP

SEQ ID NO: 4502 - protein, 914 aa, Homo sapiens
MGDSRDLCPHLDSIGEVTKEDLLLKSKGTCQSCGVTGPNLWACLQVACPYVGCGESFADHSTIHAQAKKHNLTVNLTTFRLWCYACEKEVFLEQRLAAPLLGSSSKFSEQDSPPPSHPLKAVPIAVADEGESESEDDDLKPRGLTGMKNLGNSCYMNAALQALSNCPPLTQFFLECGGLVRTDKKPALCKSYQKLVSEVWHKKRPSYVVPTSLSHGIKLVNPMFRGYAQQDTQEFLRCLMDQLHEELKEPVVATVALTEARDSDSSDTDEKREGDRSPSEDEFLSCDSSSDRGEGDGQGRGGGSSQAETELLIPDEAGRAISEKERMKDRKFSWGQQRTNSEQVDEDADVDTAMAALDDQPAEAQPPSPRSSSPCRTPEPDNDAHLRSSSRPCSPVHHHEGHAKLSSSPPRASPVRMAPSYVLKKAQVLSAGSRRRKEQRYRSVISDIFDGSILSLVQCLTCDRVSTTVETFQDLSLPIPGKEDLAKLHSAIYQNVPAKPGACGDSYAAQGWLAFIVEYIRRFVVSCTPSWFWGPVVTLEDCLAAFFAADELKGDNMYSCERCKKLRNGVKYCKVLRLPEILCIHLKRFRHEVMYSFKINSHVSFPLEGLDLRPFLAKECTSQITTYDLLSVICHHGTAGSGHYIAYCQNVINGQWYEFDDQYVTEVHETVVQNAEGYVLFYRKSSEEAMRERQQVVSLAAMREPSLLRFYVSREWLNKFNTFAEPGPITNQTFLCSHGGIPPHKYHYIDDLVVILPQNVWEHLYNRFGGGPAVNHLYVCSICQVEIEALAKRRRIEIDTFIKLNKAFQAEESPGVIYCISMQWFREWEAFVKGKDNEPPGPIDNSRIAQVKGSGHVQLKQGADYGQISEETWTYLNSLYGGGPEIAIRQSVAQPLGPENLHGEQKIEAETRAV

SEQ ID NO: 4503 - protein, 370 aa, Homo sapiens
MSRRKQTNPNKVHCDSEGDEEETTQDEVSSHTSEEDGGVVKVEKELENTEQPVGGNEVVEHEVTGNLNSDPLLELCQCPLCQLDCGSREQLIAHVYQHTAAVVSAKSYMCPVCGRALSSPGSLGRHLLIHSEDQRSNCAVCGARFTSHATFNSEKLPEVLNMESLPTVHNEGPSSAEGKDIAFSPPVYPAGILLVCNNCAAYRKLLEAQTPSVRKWALRRQNEPLEVRLQRLERERTAKKSRRDNETPEEREVRRMRDREAKRLQRMQETDEQRARRLQRDREAMRLKRANETPEKRQARLIREREAKRLKRRLEKMDMMLRAQFGQDPSAMAALAAEMNFFQLPVSGVELDSQLLGKMAFEEQNSSSLH

SEQ ID NO: 4504 - protein, 1447 aa, Homo sapiens
MAHSKTRTNDGKITYPPGVKEISDKISKEEMVRRLKMVVKTFMDMDQDSEEEKELYLNLALHLASDFFLKHPDKDVRLLVACCLADIFRIYAPEAPYTSPDKLKDIFMFITRQLKGLEDTKSPQFNRYFYLLENIAWVKSYNICFELEDSNEIFTQLYRTLFSVINNGHNQKVHMHMVDLMSSIICEGDTVSQELLDTVLVNLVPAHKNLNKQAYDLAKALLKRTAQAIEPYITNFFNQVLMLGKTSISDLSEHVFDLILELYNIDSHLLLSVLPQLEFKLKSNDNEERLQVVKLLAKMFGAKDSELASQNKPLWQCYLGRFNDIHVPIRLECVKFASHCLMNHPDLAKDLTEYLKVRSHDPEEAIRHDVIVSIVTAAKKDILLVNDHLLNFVRERTLDKRWRVRKEAMMGLAQIYKKYALQSAAGKDAAKQIAWIKDKLLHIYYQNSIDDRLLVERIFAQYMVPHNLETTERMKCLYYLYATLDLNAVKALNEMWKCQNLLRHQVKDLLDLIKQPKTDASVKAIFSKVMVITRNLPDPGKAQDFMKKFTQVLEDDEKIRKQLEVLVSPTCSCKQAEGCVREITKKLGNPKQPTNPFLEMIKFLLERIAPVHIDTESISALIKQVNKSIDGTADDEDEGVPTDQAIRAGLELLKVLSFTHPISFHSAETFESLLACLKMDDEKVAEAALQIFKNTGSKIEEDFPHIRSALLPVLHHKSKKGPPRQAKYAIHCIHAIFSSKETQFAQIFEPLHKSLDPSNLEHLITPLVTIGHIALLAPDQFAAPLKSLVATFIVKDLLMNDRLPGKKTTKLWVPDEEVSPETMVKIQAIKMMVRWLLGMKNNHSKSGTSTLRLLTTILHSDGDLTEQGKISKPDMSRLRLAAGSAIVKLAQEPCYHEIITLEQYQLCALAINDECYQVRQVFAQKLHKGLSRLRLPLEYMAICALCAKDPVKERRAHARQCLVKNINVRREYLKQHAAVSEKLLSLLPEYVVPYTIHLLAHDPDYVKVQDIEQLKDVKECLWFVLEILMAKNENNSHAFIRKMVENIKQTKDAQGPDDAKMNEKLYTVCDVAMNIIMSKSTTYSLESPKDPVLPARFFTQPDKNFSNTKNYLPPEMKSFFTPGKPKTTNVLGAVNKPLSSAGKQSQTKSSRMETVSNASSSSNPSSPGRIKGRLDSSEMDHSENEDYTMSSPLPGKKSDKRDDSDLVRSELEKPRGRKKTPVTEQEEKLGMDDLTKLVQEQKPKGSQRSRKRGHTASESDEQQWPEEKRLKEDILENEDEQNSPPKKGKRGRPPKPLGGGTPKEEPTMKTSKKGSKKKSGPPAPEEEEEEERQSGNTEQKSKSKQHRVSRRAQQRAESPESSAIESTQSTPQKGRGRPSKTPSPSQPKKNVRVGRSKQAATKENDSSEEVDVFQGSSPVDDIPQEETEEEEVSTVNVRRRSAKRERR

SEQ ID NO: 4505 - protein, 440 aa, Homo sapiens
MGLGVSAEQPAGGAEGFHLHGVQENSPAQQAGLEPYFDFIITIGHSRLNKENDTLKALLKANVEKPVKLEVFNMKTMRVREVEVVPSNMWGGQGLLGASVRFCSFRRASEQVWHVLDVEPSSPAALAGLRPYTDYVVGSDQILQESEDFFTLIESHEGKPLKLMVYNSKSDSCREVTVTPNAAWGGEGSLGCGIGYGYLHRIPTQPPSYHKKPPGTPPPSALPLGAPPPDALPPGPTPEDSPSLETGSRQSDYMEALLQAPGSSMEDPLPGPGSPSHSAPDPDGLPHFMETPLQPPPPVQRVMDPGFLDVSGISLLDNSNASVWPSLPSSTELTTTAVSTSGPEDICSSSSSHERGGEATWSGSEFEVSFLDSPGAQAQADHLPQLTLPDSLTSAASPEDGLSAELLEAQAEEEPASTEGLDTGTEAEGLDSQAQISTTE

SEQ ID NO: 4506 - protein, 507 aa, Homo sapiens
MEEPAAPSEAHEAAGAQAGAEAAREGVSGPDLPVCEPSGESAAPDSALPHAARGWAPFPVAPVPAHLRRGGLRPAPASGGGAWPSPLPSRSSGIWTKQIICRYYIHGQCKEGENCRYSHDLSGRKMATEGGVSPPGASAGGGPSTAAHIEPPTQEVAEAPPAASSLSLPVIGSAAERGFFEAERDNADRGAAGGAGVESWADAIEFVPGQPYRGRWVASAPEAPLQSSETERKQMAVGSGLRFCYYASRGVCFRGESCMYLHGDICDMCGLQTLHPMDAAQREEHMRACIEAHEKDMELSFAVQRGMDKVCGICMEVVYEKANPNDRRFGILSNCNHSFCIRCIRRWRSARQFENRIVKSCPQCRVTSELVIPSEFWVEEEEEKQKLIQQYKEAMSNKACRYFAEGRGNCPFGDTCFYKHEYPEGWGDEPPGPGGGSFSAYWHQLVEPVRMGEGNMLYKSIKKELVVLRLASLLFKRFLSLRDELPFSEDQWDLLHYELEEYFNLIL

SEQ ID NO: 4507 - protein, 1356 aa, Homo sapiens
MDLKEKHLGEPPSALGLSTRKALSVLKEQLEAVLEGHLRERKKCLTWKEVWRSSFLHHSNRCSCFHWPGASLMLLAVLLLLGCCGGQPAGSRGVGLVNASALFLLLLLNLVLIGRQDRLKRREVERRLRGIIDQIQDALRDGREIQWPSAMYPDLHMPFAPSWSLHWAYRDGHLVNLPVSLLVEGDIIALRPGQESFASLRGIKDDEHIVLEPGDLFPPFSPPPSPRGEVERGPQSPQQHRLFRVLETPVIDNIRWCLDMALSRPVTALDNERFTVQSVMLHYAVPVVLAGFLITNALRFIFSAPGVTSWQYTLLQLQVNGVLPILPLLFPVLWVLATACGEARVLAQMSKASPSSLLAKFSEDTLSSYTEAVSSQEMLRCIWGHFLRVLGGTSPTLSHSSSLLHSLGSVTVLCCVDKQGILSWPNPSPETVLFFSGKVEPPHSSHEDLTDGLSTRSFCHPEPHERDALLAGSLNNTLHLSNEQERGDWPGEAPKPPEPYSHHKAHGRSKHPSGSNVSFSRDTEGGEEEPSKTQPGMESDPYEAEDFVCDYHLEMLSLSQDQQNPSCIQFDDSNWQLHLTSLKPLGLNVLLNLCDASVTERLCRFSDHLCNIALQESHSAVLPVHVPWGLCELARLIGFTPGAKELFKQENHLALYRLPSAETMKETSLGRLSCVTKRRPPLSHMISLFIKDTTTSTEQMLSHGTADVVLEACTDFWDGADIYPLSGSDRKKVLDFYQRACLSGYCSAFAYKPMNCALSSQLNGKCIELVQVPGQSSIFTMCELPSTIPIKQNARRSSWSSDEGIGEVLEKEDCMQALSGQIFMGMVSSQYQARLDIVRLIDGLVNACIRFVYFSLEDELKSKVFAEKMGLETGWNCHISLTPNGDMPGSEIPPSSPSHAGSLHDDLNQVSRDDAEGLLLMEEEGHSDLISFQPTDSDIPSFLEDSNRAKLPRGIHQVRPHLQNIDNVPLLVPLFTDCTPETMCEMIKIMQEYGEVTCCLGSSANLRNSCLFLQSDISIALDPLYPSRCSWETFGYATSISMAQASDGLSPLQLSGQLNSLPCSLTFRQEETISIIRLIEQARHATYGIRKCFLFLLQCQLTLVVIQFLSCLVQLPPLLSTTDILWLSCFCYPLLSISLLGKPPHSSIMSMATGKNLQSIPKKTQHYFLLCFLLKFSLTISSCLICFGFTLQSFCDSSRDRNLTNCSSVMLPSNDDRAPAWFEDFANGLLSAQKLTAALIVLHTVFISITHVHRTKPLWRKSPLTNLWWAVTVPVVLLGQVVQTAVDLQLWTHRDSHVHFGLEDVPLLTWLLGCLSLVLVVVTNEIVKLHEIRVRVRYQKRQKLQFETKLGMNSPF

SEQ ID NO: 4508 - protein, 468 aa, Homo sapiens
MTTEDYKKLAPYNIRRSSTSGDTEEEEEEEVVPFSSDEQKRSSPTQETQAPFIAKRVEVVEEDGPSEKSQDPPALARSTPGSNRSSPGNKDKEAPCSRELQRDLAGEEAFRAPNTDAARSSAQLSDGNVGSGATGSRPEGLAAVDIGSERGSSSATSVSAVPADRKSNSTAAQEDAKADPKGALADYEGKDVATRVGEAWQERPGAPRGGQGDPAVPAQQPADPSTPERQSSPSGSEQLVRRESCGSSVLTDFEGKDVATKVGEAWQDRPGAPRGGQGDPAVPTQQPADPSTPEQQNSPSGSEQFVRRESCTSRVRSPSSCMVTVTVTATSEQPHIYIPAPASELDSSSTTKGILFVKEYVNASEVSSGKPVSARYSNVSSIEDSFAMEKKPPCGSTPYSERTTGGICTYCNREIRDCPKITLEHLGICCHEYCFKCGICSKPMGDLLDQIFIHRDTIHCGKCYEKLF

SEQ ID NO: 4509 - protein, 1079 aa, Homo sapiens
MDDDDDSCLLDLIGDPQALNYFLHGPSNKSSNDDLTNAGYSAANSNSIFANSSNADPKSSLKGVSNQLGEGPSDGLPLSSSLQFLEDELESSPLPDLTEDQPFDILQKSLQEANITEQTLAEEAYLDASIGSSQQFAQAQLHPSSSASFTQASNVSNYSGQTLQPIGVTHVPVGASFASNTVGVQHGFMQHVGISVPSQHLSNSSQISGSGQIQLIGSFGNHPSMMTINNLDGSQIILKGSGQQAPSNVSGGLLVHRQTPNGNSLFGNSSSSPVAQPVTVPFNSTNFQTSLPVHNIIIQRGLAPNSNKVPINIQPKPIQMGQQNTYNVNNLGIQQHHVQQGISFASASSPQGSVVGPHMSVNIVNQQNTRKPVTSQAVSSTGGSIVIHSPMGQPHAPQSQFLIPTSLSVSSNSVHHVQTINGQLLQTQPSQLISGQVASEHVMLNRNSSNMLRTNQPYTGPMLNNQNTAVHLVSGQTFAASGSPVIANHASPQLVGGQMPLQQASPTVLHLSPGQSSVSQGRPGFATMPSVTSMSGPSRFPAVSSASTAHPSLGSAVQSGSSGSNFTGDQLTQPNRTPVPVSVSHRLPVSSSKSTSTFSNTPGTGTQQQFFCQAQKKCLNQTSPISAPKTTDGLRQAQIPGLLSTTLPGQDSGSKVISASLGTAQPQQEKVVGSSPGHPAVQVESHSGGQKRPAAKQLTKGAFILQQLQRDQAHTVTPDKSHFRSLSDAVQRLLSYHVCQGSMPTEEDLRKVDNEFETVATQLLKRTQAMLNKYRCLLLEDAMRINPSAEMVMIDRMFNQEERASLSRDKRLALVDPEGFQADFCCSFKLDKAAHETQFGRSDQHGSKASSSLQPPAKAQGRDRAKTGVTEPMNHDQFHLVPNHIVVSAEGNISKKTECLGRALKFDKVGLVQYQSTSEEKASRREPLKASQCSPGPEGHRKTSSRSDHGTESKLSSILADSHLEMTCNNSFQDKSLRNSPKNEVLHTDIMKGSGEPQPDLQLTKSLETTFKNILELKKAGRQPQSDPTVSGSVELDFPNFSPMASQENCLEKFIPDHSEGVVETDSILEAAVNSILEC

SEQ ID NO: 4510 - protein, 323 aa, Homo sapiens
MWQKNQTSLADFILEGLFDDSLTHLFLFSLTMVVFLIAVSGNTLTILLICIDPQLHTPMYFLLSQLSLMDLMHVSTIILKMATNYLSGKKSISFVGCATQHFLYLCLGGAECFLLAVMSYDRYVAICHPLRYAVLMNKKVGLMMAVMSWLGASVNSLIHMAILMHFPFCGPRKVYHFYCEFPAVVKLVCGDITVYETTVYISSILLLLPIFLISTSYVFILQSVIQMRSSGSKRNAFATCGSHLTVVSLWFGACIFSYMRPRSQCTLLQNKVGSVFYSIITPTLNSLIYTLRNKDVAKALRRVLRRDVITQCIQRLQLWLPRV

SEQ ID NO: 4511 - protein, 843 aa, Homo sapiens
MWTPELAILRGFPTEAERQQWKQEGVVGSESGSFLQLLLEGNYEAIFLNSMTQNIFNSTTTAEEKIDSYLEKQVVTFLDYSTDLDTTERQQLIFLLGVSSLQLFVQSNWTGPPVDLHPQDFLSSVLFQQFSEVKGLDAFVLSLLTLDGESIYSLTSKPILLLLARIILVNVRHKLTAIQSLPWWTLRCVNIHQHLLEERSPLLFTLAENCIDQVMKLQNLFVDDSGRYLAIQFHLECAYVFLYYYEYRKAKDQLDIAKDISQLQIDLTGALGKRTRFQENYVAQLILDVRREGDVLSNCEFTPAPTPQEHLTKNLELNDDTILNDIKLADCEQFQMPDLCAEEIAIILGICTNFQKNNPVHTLTEVELLAFTSCLLSQPKFWAIQTSALILRTKLEKGSTRRVERAMRQTQALADQFEDKTTSVLERLKIFYCCQVPPHWAIQRQLASLLFELGCTSSALQIFEKLEMWEDVVICYERAGQHGKAEEILRQELEKKETPSLYCLLGDVLGDHSCYDKAWELSRYRSARAQRSKALLHLRNKEFQECVECFERSVKINPMQLGVWFSLGCAYLALEDYQGSAKAFQRCVTLEPDNAEAWNNLSTSYIRLKQKVKAFRTLQEALKCNYEHWQIWENYILTSTDVGEFSEAIKAYHRLLDLRDKYKDVQVLKILVRAVIDGMTDRSGDVATGLKGKLQELFGRVTSRVTNDGEIWRLYAHVYGNGQSEKPDENEKAFQCLSKAYKCDTQSNCWEKDITSFKEVVQRALGLAHVAIKCSKNKSSSQEAVQMLSSVRLNLRGLLSKAKQLFTDVATGEMSRELADDITAMDTLVTELQDLSNQFRNQY

SEQ ID NO: 4512 - protein, 1437 aa, Homo sapiens
MDFSFSFMQGIMGNTIQQPPQLIDSANIRQEDAFDNNSDIAEDGGQTPYEATLQQGFQYPATTEDLPPLTNGYPSSISVYETQTKYQSYNQYPNGSANGFGAVRNFSPTDYYHSEIPNTRPHEILEKPSPPQPPPPPSVPQTVIPKKTGSPEIKLKITKTIQNGRELFESSLCGDLLNEVQASEHTKSKHESRKEKRKKSNKHDSSRSEERKSHKIPKLEPEEQNRPNERVDTVSEKPREEPVLKEEAPVQPILSSVPTTEVSTGVKFQVGDLVWSKVGTYPWWPCMVSSDPQLEVHTKINTRGAREYHVQFFSNQPERAWVHEKRVREYKGHKQYEELLAEATKQASNHSEKQKIRKPRPQRERAQWDIGIAHAEKALKMTREERIEQYTFIYIDKQPEEALSQAKKSVASKTEVKKTRRPRSVLNTQPEQTNAGEVASSLSSTEIRRHSQRRHTSAEEEEPPPVKIAWKTAAARKSLPASITMHKGSLDLQKCNMSPVVKIEQVFALQNATGDGKFIDQFVYSTKGIGNKTEISVRGQDRLIISTPNQRNEKPTQSVSSPEATSGSTGSVEKKQQRRSIRTRSESEKSTEVVPKKKIKKEQVETVPQATVKTGLQKGASEISDSCKPLKKRSRASTDVEMTSSAYRDTSDSDSRGLSDLQVGFGKQVDSPSATADADVSDVQSMDSSLSRRGTGMSKKDTVCQICESSGDSLIPCEGECCKHFHLECLGLASLPDSKFICMECKTGQHPCFSCKVSGKDVKRCSVGACGKFYHEACVRKFPTAIFESKGFRCPQHCCSACSMEKDIHKASKGRMMRCLRCPVAYHSGDACIAAGSMLVSSYILICSNHSKRSSNSSAVNVGFCFVCARGLIVQDHSDPMFSSYAYKSHYLLNESNRAELMKLPMIPSSSASKKKCEKGGRLLCCESCPASFHPECLSIEMPEGCWNCNDCKAGKKLHYKQIVWVKLGNYRWWPAEICNPRSVPLNIQGLKHDLGDFPVFFFGSHDYYWVHQGRVFPYVEGDKSFAEGQTSINKTFKKALEEAAKRFQELKAQRESKEALEIEKNSRKPPPYKHIKANKVIGKVQIQVADLSEIPRCNCKPADENPCGLESECLNRMLQYECHPQVCPAGDRCQNQCFTKRLYPDAEIIKTERRGWGLRTKRSIKKGEFVNEYVGELIDEEECRLRIKRAHENSVTNFYMLTVTKDRIIDAGPKGNYSRFMNHSCNPNCETQKWTVNGDVRVGLFALCDIPAGMELTFNYNLDCLGNGRTECHCGADNCSGFLGVRPKSACASTNEEKAKNAKLKQKRRKIKTEPKQMHEDYCFQCGDGGELVMCDKKDCPKAYHLLCLNLTQPPYGKWECPWHQCDECSSAAVSFCEFCPHSFCKDHEKGALVPSALEGRLCCSEHDPMAPVSPEYWSKIKCKWESQDHGEEVKE

SEQ ID NO: 4513 - protein, 1232 aa, Homo sapiens
MANGVIPPPGGASPLPQVRVPLEEPPLSPDVEEEDDDLGKTLAVSRFGDLISKPPAWDPEKPSRSYSERDFEFHRHTSHHTHHPLSARLPPPHKLRRLPPTSARHTRRKRKKEKTSAPPSEGTPPIQEEGGAGVDEEEEEEEEEEGESEAEPVEPPHSGTPQKAKFSIGSDEDDSPGLPGRAAVTKPLPSVGPHTDKSPQHSSSSPSPRARASRLAGEKSRPWSPSASYDLRERLCPGSALGNPGGPEQQVPTDEAEAQMLGSADLDDMKSHRLEDNPGVRRHLVKKPSRTQGGRGSPSGLAPILRRKKKKKKLDRRPHEVFVELNELMLDRSQEPHWRETARWIKFEEDVEEETERWGKPHVASLSFRSLLELRRTIAHGAALLDLEQTTLPGIAHLVVETMIVSDQIRPEDRASVLRTLLLKHSHPNDDKDSGFFPRNPSSSSMNSVLGNHHPTPSHGPDGAVPTMADDLGEPAPLWPHDPDAKEKPLHMPGGDGHRGKSLKLLEKIPEDAEATVVLVGCVPFLEQPAAAFVRLNEAVLLESVLEVPVPVRFLFVMLGPSHTSTDYHELGRSIATLMSDKLFHEAAYQADDRQDLLSAISEFLDGSIVIPPSEVEGRDLLRSVAAFQRELLRKRREREQTKVEMTTRGGYTAPGKELSLELGGSEATPEDDPLLRTGSVFGGLVRDVRRRYPHYPSDLRDALHSQCVAAVLFIYFAALSPAITFGGLLGEKTEGLMGVSELIVSTAVLGVLFSLLGAQPLLVVGFSGPLLVFEEAFFKFCRAQDLEYLTGRVWVGLWLVVFVLALVAAEGSFLVRYISPFTQEIFAFLISLIFIYETFYKLYKVFTEHPLLPFYPPEGALEGSLDAGLEPNGSALPPTEGPPSPRNQPNTALLSLILMLGTFFIAFFLRKFRNSRFLGGKARRIIGDFGIPISILVMVLVDYSITDTYTQKLTVPTGLSVTSPDKRSWFIPPLGSARPFPPWMMVAAAVPALLVLILIFMETQITALIVSQKARRLLKGSGFHLDLLLIGSLGGLCGLFGLPWLTAATVRSVTHVNALTVMRTAIAPGDKPQIQEVREQRVTGVLIASLVGLSIVMGAVLRRIPLAVLFGIFLYMGVTSLSGIQLSQRLLLILMPAKHHPEQPYVTKVKTWRMHLFTCIQLGCIALLWVVKSTAASLAFPFLLLLTVPLRHCLLPRLFQDRELQALDSEDAEPNFDEDGQDEYNELHMPV

SEQ ID NO: 4514 - protein, 832 aa, Homo sapiens
MFALGLPFLVLLVASVESHLGVLGPKNVSQKDAEFERTYVDEVNSELVNIYTFNHTVTRNRTEGVRVSVNVLNKQKGAPLLFVVRQKEAVVSFQVPLILRGMFQRKYLYQKVERTLCQPPTKNESEIQFFYVDVSTLSPVNTTYQLRVSRMDDFVLRTGEQFSFNTTAAQPQYFKYEFPEGVDSVIVKVTSNKAFPCSVISIQDVLCPVYDLDNNVAFIGMYQTMTKKAAITVQRKDFPSNSFYVVVVVKTEDQACGGSLPFYPFAEDEPVDQGHRQKTLSVLVSQAVTSEAYVSGMLFCLGIFLSFYLLTVLLACWENWRQKKKTLLVAIDRACPESGHPRVLADSFPGSSPYEGYNYGSFENVSGSTDGLVDSAGTGDLSYGYQGRSFEPVGTRPRVDSMSSVEEDDYDTLTDIDSDKNVIRTKQYLYVADLARKDKRVLRKKYQIYFWNIATIAVFYALPVVQLVITYQTVVNVTGNQDICYYNFLCAHPLGNLSAFNNILSNLGYILLGLLFLLIILQREINHNRALLRNDLCALECGIPKHFGLFYAMGTALMMEGLLSACYHVCPNYTNFQFDTSFMYMIAGLCMLKLYQKRHPDINASAYSAYACLAIVIFFSVLGVVFGKGNTAFWIVFSIIHIIATLLLSTQLYYMGRWKLDSGIFRRILHVLYTDCIRQCSGPLYVDRMVLLVMGNVINWSLAAYGLIMRPNDFASYLLAIGICNLLLYFAFYIIMKLRSGERIKLIPLLCIVCTSVVWGFALFFFFQGLSTWQKTPAESREHNRDCILLDFFDDHDIWHFLSSIAMFGSFLVLLTLDDDLDTVQRDKIYVF

SEQ ID NO: 4515 - protein, 378 aa, Homo sapiens
MDLAGLLKSQFLCHLVFCYVFIASGLIINTIQLFTLLLWPINKQLFRKINCRLSYCISSQLVMLLEWWSGTECTIFTDPRAYLKYGKENAIVVLNHKFEIDFLCGWSLSERFGLLGGSKVLAKKELAYVPIIGWMWYFTEMVFCSRKWEQDRKTVATSLQHLRDYPEKYFFLIHCEGTRFTEKKHEISMQVARAKGLPRLKHHLLPRTKGFAITVRSLRNVVSAVYDCTLNFRNNENPTLLGVLNGKKYHADLYVRRIPLEDIPEDDDECSAWLHKLYQEKDAFQEEYYRTGTFPETPMVPPRRPWTLVNWLFWASLVLYPFFQFLVSMIRSGSSLTLASFILVFFVASVGVRWMIGVTEIDKGSAYGNSDSKQKLND

SEQ ID NO: 4516 - protein, 1339 aa, Homo sapiens
MAAAGARLSPGPGSGLRGRPRLCFHPGPPPLLPLLLLFLLLLPPPPLLAGATAAASREPDSPCRLKTVTVSTLPALRESDIGWSGARAGAGAGTGAGAAAAAASPGSPGSAGTAAESRLLLFVRNELPGRIAVQDDLDNTELPFFTLEMSGTAADISLVHWRQQWLENGTLYFHVSMSSSGQLAQATAPTLQEPSEIVEEQMHILHISVMGGLIALLLLLLVFTVALYAQRRWQKRRRIPQKSASTEATHEIHYIPSVLLGPQARESFRSSRLQTHNSVIGVPIRETPILDDYDCEEDEEPPRRANHVSREDEFGSQVTHTLDSLGHPGEEKVDFEKKAAAEATQETVESLMQKFKESFRANTPIEIGQLQPPLRSTSAGKRKRRSKSRGGISFGRAKGTSGSEADDETQLTFYTEQYRSRRRSKGLLKSPVNKTALTLIAVSSCILAMVCGSQMSCPLTVKVTLHVPEHFIADGSSFVVSEGSYLDISDWLNPAKLSLYYQINATSPWVRDLCGQRTTDACEQLCDPETGECSCHEGYAPDPVHRHLCVRSDWGQSEGPWPYTTLERGYDLVTGEQAPEKILRSTFSLGQGLWLPVSKSFVVPPVELSINPLASCKTDVLVTEDPADVREEAMLSTYFETINDLLSSFGPVRDCSRNNGGCTRNFKCVSDRQVDSSGCVCPEELKPMKDGSGCYDHSKGIDCSDGFNGGCEQLCLQQTLPLPYDATSSTIFMFCGCVEEYKLAPDGKSCLMLSDVCEGPKCLKPDSKFNDTLFGEMLHGYNNRTQHVNQGQVFQMTFRENNFIKDFPQLADGLLVIPLPVEEQCRGVLSEPLPDLQLLTGDIRYDEAMGYPMVQQWRVRSNLYRVKLSTITLAAGFTNVLKILTKESSREELLSFIQHYGSHYIAEALYGSELTCIIHFPSKKVQQQLWLQYQKETTELGSKKELKSMPFITYLSGLLTAQMLSDDQLISGVEIRCEEKGRCPSTCHLCRRPGKEQLSPTPVLLEINRVVPLYTLIQDNGTKEAFKSALMSSYWCSGKGDVIDDWCRCDLSAFDANGLPNCSPLLQPVLRLSPTVEPSSTVVSLEWVDVQPAIGTKVSDYILQHKKVDEYTDTDLYTGEFLSFADDLLSGLGTSCVAAGRSHGEVPEVSIYSVIFKCLEPDGLYKFTLYAVDTRGRHSELSTVTLRTACPLVDDNKAEEIADKIYNLYNGYTSGKEQQMAYNTLMEVSASMLFRVQHHYNSHYEKFGDFVWRSEDELGPRKAHLILRRLERVSSHCSSLLRSAYIQSRVETVPYLFCRSEEVRPAGMVWYSILKDTKITCEEKMVSMARNTYGESKGR

SEQ ID NO: 4517 - protein, 999 aa, Homo sapiens
MPEDIPLLPGSPRRLSPQAGSRGGQGPKHGQQCLKMPGPRAPGLQGGSNRDPGQPCGGESTRSSSVINNYLDANEPVSLEARLSRMHFHDSQRKVDYVLAYHYRKRGVHLAQGFPGHSLAIVSNGETGKEPHAGGPGDIELGPLDALEEERKEQREEFEHNLMEAGLELEKDLENKSQGSIFVRIHAPWQVLAREAEFLKIKVPTKKEMYEIKAGGSIAKKFSAALQKLSSHLQPRVPEHSNNKMKNLSYPFSREKMYLYNIQEKDTFFDNATRSRIVHEILKRTACSRANNTMGINSLIANNIYEAAYPLHDGEYDSPEDDMNDRKLLYQEWARYGVFYKFQPIDLIRKYFGEKIGLYFAWLGLYTSFLIPSSVIGVIVFLYGCATIEEDIPSREMCDQQNAFTMCPLCDKSCDYWNLSSACGTAQASHLFDNPATVFFSIFMALWATMFLENWKRLQMRLGYFWDLTGIEEEEERAQEHSRPEYETKVREKMLKESNQSAVQKLETNTTECGDEDDEDKLTWKDRFPGYLMNFASILFMIALTFSIVFGVIVYRITTAAALSLNKATRSNVRVTVTATAVIINLVVILILDEIYGAVAKWLTKIEVPKTEQTFEERLILKAFLLKFVNAYSPIFYVAFFKGRFVGRPGSYVYVFDGYRMEECAPGGCLMELCIQLSIIMLGKQLIQNNIFEIGVPKLKKLFRKLKDETEAGETDSAHSKHPEQWDLDYSLEPYTGLTPEYMEMIIQFGFVTLFVASFPLAPVFALLNNVIEVRLDAKKFVTELRRPDAVRTKDIGIWFDILSGIGKFSVISNAFVIAITSDFIPRLVYQYSYSHNGTLHGFVNHTLSFFNVSQLKEGTQPENSQFDQEVQFCRFKDYREPPWAPNPYEFSKQYWFILSARLAFVIIFQNLVMFLSVLVDWMIPDIPTDISDQIKKEKSLLVDFFLKEEHEKLKLMDEPALRSPGGGDRSRSRAASSAPSGQSQLGSMMSSGSQHTNV

SEQ ID NO: 4518 - protein, 253 aa, Homo sapiens
MNFSGGGRQEAAGSRGRRAPRPREQDRDVQLSKALSYALRHGALKLGLPMGADGFVPLGTLLQLPQFRGFSAEDVQRVVDTNRKQRFALQLGDPSTGLLIRANQGHSLQVPKLELMPLETPQALPPMLVHGTFWKHWPSILLKGLSCQGRTHIHLAPGLPGDPGIISGMRSHCEIAVFIDGPLALADGIPFFRSANGVILTPGNTDGFLLPKYFKEALQLRPTRKPLSLAGDEETECQSSPKHSSRERRRIQQ

SEQ ID NO: 4519 - protein, 733 aa, Homo sapiens
MTFPEADILLKSGECAGQTMLDTMEAPGHSRQLLLQLNNQRTKGFLCDVIIVVQNALFRAHKNVLAASSAYLKSLVVHDNLLNLDHDMVSPAVFRLVLDFIYTGRLADGAEAAAAAAVAPGAEPSLGAVLAAASYLQIPDLVALCKKRLKRHGKYCHLRGGGGGGGGYAPYGRPGRGLRAATPVIQACYPSPVGPPPPPAAEPPSGPEAAVNTHCAELYASGPGPAAALCASERRCSPLCGLDLSKKSPPGSAAPERPLAERELPPRPDSPPSAGPAAYKEPPLALPSLPPLPFQKLEEAAPPSDPFRGGSGSPGPEPPGRPDGPSLLYRWMKHEPGLGSYGDELGRERGSPSERCEERGGDAAVSPGGPPLGLAPPPRYPGSLDGPGAGGDGDDYKSSSEETGSSEDPSPPGGHLEGYPCPHLAYGEPESFGDNLYVCIPCGKGFPSSEQLNAHVEAHVEEEEALYGRAEAAEVAAGAAGLGPPFGGGGDKVAGAPGGLGELLRPYRCASCDKSYKDPATLRQHEKTHWLTRPYPCTICGKKFTQRGTMTRHMRSHLGLKPFACDACGMRFTRQYRLTEHMRIHSGEKPYECQVCGGKFAQQRNLISHMKMHAVGGAAGAAGALAGLGGLPGVPGPDGKGKLDFPEGVFAVARLTAEQLSLKQQDKAAAAELLAQTTHFLHDPKVALESLYPLAKFTAELGLSPDKAAEVLSQGAHLAAGPDGRTIDRFSPT

SEQ ID NO: 4520 - protein, 223 aa, Homo sapiens
MLGVTTVRSRMRRALVFGMVVPSVLVPWLLLGASWLIPQTSFLSNVCGLSIGLAYGLTYCYSIDLSERVALKLDQTFPFSLMRRISVFKYVSGSSAERRAAQSRKLNPVPGSYPTQSCHPHLSPSHPVSQTQHASGQKLASWPSCTPGHMPTLPPYQPASGLCYVQNHFGPNPTSSSVYPASAGTSLGIQPPTPVNSPGTVYSGALGTPGAAGSKESSRVPMP

SEQ ID NO: 4521 - protein, 261 aa, Homo sapiens
MWVPVVFLTLSVTWIGAAPLILSRIVGGWECEKHSQPWQVLVASRGRAVCGGVLVHPQWVLTAAHCIRNKSVILLGRHSLFHPEDTGQVFQVSHSFPHPLYDMSLLKNRFLRPGDDSSHDLMLLRLSEPAELTDAVKVMDLPTQEPALGTTCYASGWGSIEPEEFLTPKKLQCVDLHVISNDVCAQVHPQKVTKFMLCAGRWTGGKSTCSGDSGGPLVCNGVLQGITSWGSEPCALPERPSLYTKVVHYRKWIKDTIVANP

SEQ ID NO: 4522 - protein, 672 aa, Homo sapiens
MESRKLISATDIQYSGSLLNSLNEQRGHGLFCDVTVIVEDRKFRAHKNILSASSTYFHQLFSVAGQVVELSFIRAEIFAEILNYIYSSKIVRVRSDLLDELIKSGQLLGVKFIAELGVPLSQVKSISGTAQDGNTEPLPPDSGDKNLVIQKSKDEAQDNGATIMPIITESFSLSAEDYEMKKIIVTDSDDDDDDVIFCSEILPTKETLPSNNTVAQVQSNPGPVAISDVAPSASNNSPPLTNITPTQKLPTPVNQATLSQTQGSEKLLVSSAPTHLTPNIILLNQTPLSTPPNVSSSLPNHMPSSINLLVQNQQTPNSAILTGNKANEEEEEEIIDDDDDTISSSPDSAVSNTSLVPQADTSQNTSFDGSLIQKMQIPTLLQEPLSNSLKISDIITRNTNDPGVGSKHLMEGQKIITLDTATEIEGLSTGCKVYANIGEDTYDIVIPVKDDPDEGEARLENEIPKTSGSEMANKRMKVKHDDHYELIVDGRVYYICIVCKRSYVCLTSLRRHFNIHSWEKKYPCRYCEKVFPLAEYRTKHEIHHTGERRYQCLACGKSFINYQFMSSHIKSVHSQDPSGDSKLYRLHPCRSLQIRQYAYLSDRSSTIPAMKDDGIGYKVDTGKEPPVGTTTSTQNKPMTWEDIFIQQENDSIFKQNVTDGSTEFEFIIPESY

SEQ ID NO: 4523 - protein, 830 aa, Homo sapiens
MVEEENIRVVRCGGSELNFRRAVFSADSKYIFCVSGDFVKVYSTVTEECVHILHGHRNLVTGIQLNPNNHLQLYSCSLDGTIKLWDYIDGILIKTFIVGCKLHALFTLAQAEDSVFVIVNKEKPDIFQLVSVKLPKSSSQEVEAKELSFVLDYINQSPKCIAFGNEGVYVAAVREFYLSVYFFKKKTTSRFTLSSSRNKKHAKNNFTCVACHPTEDCIASGHMDGKIRLWRNFYDDKKYTYTCLHWHHDMVMDLAFSVTGTSLLSGGRESVLVEWRDATEKNKEFLPRLGATIEHISVSPAGDLFCTSHSDNKIIIIHRNLEASAVIQGLVKDRSIFTGLMIDPRTKALVLNGKPGHLQFYSLQSDKQLYNLDIIQQEYINDYGLIQIELTKAAFGCFGNWLATVEQRQEKETELELQMKLWMYNKKTQGFILNTKINMPHEDCITALCFCNAEKSEQPTLVTASKDGYFKVWILTDDSDIYKKAVGWTCDFVGSYHKYQATNCCFSEDGSLLAVSFEEIVTIWDSVTWELKCTFCQRAGKIRHLCFGRLTCSKYLLGATENGILCCWNLLSCALEWNAKLNVRVMEPDPNSENIAAISQSSVGSDLFVFKPSEPRPLYIQKGISREKVQWGVFVPRDVPESFTSEAYQWLNRSQFYFLTKSQSLLTFSTKSPEEKLTPTSKQLLAEESLPTTPFYFILGKHRQQQDEKLNETLENELVQLPLTENIPAISELLHTPAHVLPSAAFLCSMFVNSLLLSKETKSAKEIPEDVDMEEEKESEDSDEENDFTEKVQDTSNTGLGEDIIHQLSKSEEKELRKFRKIDYSWIAAL

SEQ ID NO: 4524 - protein, 255 aa, Homo sapiens
MASPGAGRAPPELPERNCGYREVEYWDQRYQGAADSAPYDWFGDFSSFRALLEPELRPEDRILVLGCGNSALSYELFLGGFPNVTSVDYSSVVVAAMQARHAHVPQLRWETMDVRKLDFPSASFDVVLEKGTLDALLAGERDPWTVSSEGVHTVDQVLSEVSRVLVPGGRFISMTSAAPHFRTRHYAQAYYGWSLRHATYGSGFHFHLYLMHKGGKLSVAQLALGAQILSPPRPPTSPCFLQDSDHEDFLSAIQL

SEQ ID NO: 4525 - protein, 330 aa, Homo sapiens
MWLLVSVILISRISSVGGEATFCDFPKINHGILYDEEKYKPFSQVPTGEVFYYSCEYNFVSPSKSFWTRITCTEEGWSPTPKCLRLCFFPFVENGHSESSGQTHLEGDTVQIICNTGYRLQNNENNISCVERGWSTPPKCRSTDTSCVNPPTVQNAHILSRQMSKYPSGERVRYECRSPYEMFGDEEVMCLNGNWTEPPQCKDSTGKCGPPPPIDNGDITSFPLSVYAPASSVEYQCQNLYQLEGNKRITCRNGQWSEPPKCLHPCVISREIMENYNIALRWTAKQKLYLRTGESAEFVCKRGYRLSSRSHTLRTTCWDGKLEYPTCAKR

SEQ ID NO: 4526 - protein, 339 aa, Homo sapiens
MVAMAEAEAGVAVEVRGLPPAVPDELLTLYFENRRRSGGGPVLSWQRLGCGGVLTFREPADVRVLEEQAQNLGLEGTLVSLARVPQARAVRVVGDGASVDLLLLELYLENERRSGGGPLEDLQRLPGPLGTVASFQQWQVAERVLQQEHRLQGSELSLVPHYDILEPEELAENTSGGDHPSTQGPRATKHALLRTGGLVTALQGAGTVTMGSGEEPGQSGASLRTGPMVQGRGIMTTGSGQEPGQSGTSLRTGPMGSLGQAEQVSSMPMGSLEHEGLVSLRPVGLQEQEGPMSLGPVGSAGPVETSKGLLGQEGLVEIAMDSPEQEGLVGPMEITMGSL

SEQ ID NO: 4527 - protein, 319 aa, Homo sapiens
MPVGKLVFNQSEPTEFVFRAFTTATEFQVLLFLLFLLLYLMILCGNTAIIWVVCTHSTLRTPMYFFLSNLSFLELCYTTVVVPLMLSNILGAQKPISLAGCGAQMFFFVTLGSTDCFLLAIMAYDRYVAICHPLHYTLIMTRELCTQMLGGALGLALFPSLQLTALIFTLPFCGHHQEINHFLCDVPPVLRLACADIRVHQAVLYVVSILVLTIPFLLICVSYVFITCAILSIRSAEGRRRAFSTCSFHLTVVLLQYGCCSLVYLRPRSSTSEDEDSQIALVYTFVTPLLNPLLYSLRNKDVKGALRSAIIRKAASDAN

SEQ ID NO: 4528 - protein, 875 aa, Homo sapiens
MGKTANSPGSGARPDPVRSFNRWKKKHSHRQNKKKQLRKQLKKPEWQVERESISRLMQNYEKINVNEITRFSDFPLSKKTLKGLQEAQYRLVTEIQKQTIGLALQGKDVLGAAKTGSGKTLAFLVPVLEALYRLQWTSTDGLGVLIISPTRELAYQTFEVLRKVGKNHDFSAGLIIGGKDLKHEAERINNINILVCTPGRLLQHMDETVSFHATDLQMLVLDEADRILDMGFADTMNAVIENLPKKRQTLLFSATQTKSVKDLARLSLKNPEYVWVHEKAKYSTPATLEQNYIVCELQQKISVLYSFLRSHLKKKSIVFFSSCKEVQYLYRVFCRLRPGVSILALHGRQQQMRRMEVYNEFVRKRAAVLFATDIAARGLDFPAVNWVLQFDCPEDANTYIHRAGRTARYKEDGEALLILLPSEKAMVQQLLQKKVPVKEIKINPEKLIDVQKKLESILAQDQDLKERAQRCFVSYVRSVYLMKDKEVFDVSKLPIPEYALSLGLAVAPRVRFLQKMQKQPTKELVRSQADKVIEPRAPSLTNDEVEEFRAYFNEKMSILQKGGKRLEGTEHRQDNDTGNEEQEEEEDDEEEMEEKLAKAKGSQAPSLPNTSEAQKIKEVPTQFLDRDEEEEDADFLKVKRHNVFGLDLKDEKTLQKKEPSKSSIKKKMTKVAEAKKVMKRNFKVNKKITFTDEGELVQQWPQMQKSAIKDAEEDDDTGGINLHKAKERLQEEDKFDKEEYRKKIKAKHREKRLKEREARREANKRQAKAKDEEEAFLDWSDDDDDDDDGFDPSTLPDPDKYRSSEDSDSEDMENKISDTKKKQGMKKRSNSEVEDVGPTSHNRKKARWDTLEPLDTGLSLAEDEELVLHLLRSQS

SEQ ID NO: 4529 - protein, 1239 aa, Homo sapiens
MANDSPAKSLVDIDLSSLRDPAGIFELVEVVGNGTYGQVYKGRHVKTGQLAAIKVMDVTEDEEEEIKLEINMLKKYSHHRNIATYYGAFIKKSPPGHDDQLWLVMEFCGAGSITDLVKNTKGNTLKEDWIAYISREILRGLAHLHIHHVIHRDIKGQNVLLTENAEVKLVDFGVSAQLDRTVGRRNTFIGTPYWMAPEVIACDENPDATYDYRSDLWSCGITAIEMAEGAPPLCDMHPMRALFLIPRNPPPRLKSKKWSKKFFSFIEGCLVKNYMQRPSTEQLLKHPFIRDQPNERQVRIQLKDHIDRTRKKRGEKDETEYEYSGSEEEEEEVPEQEGEPSSIVNVPGESTLRRDFLRLQQENKERSEALRRQQLLQEQQLREQEEYKRQLLAERQKRIEQQKEQRRRLEEQQRREREARRQQEREQRRREQEEKRRLEELERRRKEEEERRRAEEEKRRVEREQEYIRRQLEEEQRHLEVLQQQLLQEQAMLLECRWREMEEHRQAERLQRQLQQEQAYLLSLQHDHRRPHPQHSQQPPPPQQERSKPSFHAPEPKAHYEPADRAREVEDRFRKTNHSSPEAQSKQTGRVLEPPVPSRSESFSNGNSESVHPALQRPAEPQVPVRTTSRSPVLSRRDSPLQGSGQQNSQAGQRNSTSIEPRLLWERVEKLVPRPGSGSSSGSSNSGSQPGSHPGSQSGSGERFRVRSSSKSEGSPSQRLENAVKKPEDKKEVFRPLKPADLTALAKELRAVEDVRPPHKVTDYSSSSEESGTTDEEDDDVEQEGADESTSGPEDTRAASSLNLSNGETESVKTMIVHDDVESEPAMTPSKEGTLIVRQTQSASSTLQKHKSSSSFTPFIDPRLLQISPSSGTTVTSVVGFSCDGMRPEAIRQDPTRKGSVVNVNPTNTRPQSDTPEIRKYKKRFNSEILCAALWGVNLLVGTESGLMLLDRSGQGKVYPLINRRRFQQMDVLEGLNVLVTISGKKDKLRVYYLSWLRNKILHNDPEVEKKQGWTTVGDLEGCVHYKVVKYERIKFLVIALKSSVEVYAWAPKPYHKFMAFKSFGELVHKPLLVDLTVEEGQRLKVIYGSCAGFHAVDVDSGSVYDIYLPTHIQCSIKPHAIIILPNTDGMELLVCYEDEGVYVNTYGRITKDVVLQWGEMPTSVAYIRSNQTMGWGEKAIEIRSVETGHLDGVFMHKRAQRLKFLCERNDKVFFASVRSGGSSQVYFMTLGRTSLLSW

SEQ ID NO: 4530 - protein, 371 aa, Homo sapiens
MSHEKSFLVSGDNYPPPNPGYPGGPQPPMPPYAQPPYPGAPYPQPPFQPSPYGQPGYPHGPSPYPQGGYPQGPYPQGGYPQGPYPQEGYPQGPYPQGGYPQGPYPQSPFPPNPYGQPQVFPGQDPDSPQHGNYQEEGPPSYYDNQDFPATNWDDKSIRQAFIRKVFLVLTLQLSVTLSTVSVFTFVAEVKGFVRENVWTYYVSYAVFFISLIVLSCCGDFRRKHPWNLVALSVLTASLSYMVGMIASFYNTEAVIMAVGITTAVCFTVVIFSMQTRYDFTSCMGVLLVSMVVLFIFAILCIFIRNRILEIVYASLGALLFTCFLAVDTQLLLGNKQLSLSPEEYVFAALNLYTDIINIFLYILTIIGRAKE

SEQ ID NO: 4531 - protein, 845 aa, Homo sapiens
MSNSRPRSRRDAGGGAGAAGRDELVSRSLQSAEHCLGVQDFGTAYAHYLLVLSLAPELKHDVKETFQYTLFRWAEELDALSRIQDLLGCYEQALELFPDDEVICNSMGEHLFRMGFRDEAAGYFHKAVKLNPDFSDAKENFYRVANWLVERWHFIMLNDTKRNTIYNAAIQKAVCLGSKSVLDIGAGTGILSMFAKKAGAHSVYACELSKTMYELACDVVAANKMEAGIKLLHTKSLDIEIPKHIPERVSLVVTETVDAGLFGEGIVESLIHAWEHLLLQPKTKGESANCEKYGKVIPASAVIFGMAVECAEIRRHHRVGIKDIAGIHLPTNVKFQSPAYSSVDTEETIEPYTTEKMSRVPGGYLALTECFEIMTVDFNNLQELKSLATKKPDKIGIPVIKEGILDAIMVWFVLQLDDEHSLSTSPSEETCWEQAVYPVQDLADYWIKPGDHVMMEVSCQDCYLRIQSISVLGLECEMDVAKSFTQNKDLLSLGNEAELCSALANLQTSKPDAVEQTCILESTEIALLNNIPYHEGFKMAMSKVLSSLTPEKLYQTMDTHCQNEMSSGTGQSNTVQNILEPFYVLDVSEGFSVLPVIAGTLGQVKPYSSVEKDQHRIALDLISEANHFPKETLEFWLRHVEDESAMLQRPKSDKLWSIIILDVIEPSGLIQQEIMEKAAISRCLLQSGGKIFPQYVLMFGLLVESQTLLEENAVQGTERTLGLNIAPFINQFQVPIRVFLDLSSLPCIPLSKPVELLRLDLMTPYLNTSNREVKVYVCKSGRLTAIPFWYHMYLDEEIRLDTSSEASHWKQAAVVLDNPIQVEMGEELVLSIQHHKSNVSITVKQ

SEQ ID NO: 4532 - protein, 1279 aa, Homo sapiens
MMNRTTPDQELAPASEPVWERPWSVEEIRRSSQSWSLAADAGLLQFLQEFSQQTISRTHEIKKQVDGLIRETKATDCRLHNVFNDFLMLSNTQFIENRVYDEEVEEPVLKAEAEKTEQEKTREQKEVDLIPKVQEAVNYGLQVLDSAFEQLDIKAGNSDSEEDDANGRVELILEPKDLYIDRPLPYLIGSKLFMEQEDVGLGELSSEEGSVGSDRGSIVDTEEEKEEEESDEDFAHHSDNEQNRHTTQMSDEEEDDDGCDLFADSEKEEEDIEDIEENTRPKRSRPTSFADELAARIKGDAVGRVDEEPTTLPSGEAKPRKTLKEKKERRTPSDDEEDNLFAPPKLTDEDFSPFGSGGGLFSGGKGLFDDEDEESDLFTEAPQDRQAGASVKEESSSSKPGKKIPAGAVSVFLGDTDVFGAASVPSMKEPQKPEQPTPRKSPYGPPPTGLFDDDDGDDDDDFFSAPHSKPSKTGKVQSTADIFGDEEGDLFKEKAVASPEATVSQTDENKARAEKKVTLSSSKNLKPSSETKTQKGLFSDEEDSEDLFSSQSASKLKGASLLPGKLPTLVSLFDDEDEEDNLFGGTAAKKQTLCLQAQREEKAKASELSKKKASALLFSSDEEDQWNIPASQTHLASDSRSKGEPRDSGTLQSQEAKAVKKTSLFEEDEEDDLFAIAKDSQKKTQRVSLLFEDDVDSGGSLFGSPPTSVPPATKKKETVSEAPPLLFSDEEEKEAQLGVKSVDKKVESAKESLKFGRTDVAESEKEGLLTRSAQETVKHSDLFSSSSPWDKGTKPRTKTVLSLFDEEEDKMEDQNIIQAPQKEVGKGRDPDAHPKSTGVFQDEELLFSHKLQKDNDPDVDLFAGTKKTKLLEPSVGSLFGDDEDDDLFSSAKSQPLANLAINPAALLPTAASQISEVKPVLPELAFPSSEHRRSHGLESVPVLPGSGEAGVSFDLPAQADTLHSANKSRVKMRGKRRPQTRAARRLAAQESSETEDMSVPRGPIAQWADGAISPNGHRPQLRAASGEDSTEEALAAAAAPWEGGPVPGVDRSPFAKSLGHSRGEADLFDSGDIFSTGTGSQSVERTKPKAKIAENPANPPVGGKAKSPMFPALGEASSDDDLFQSAKPKPAKKTNPFPLLEDEDDLFTDQKVKKNETKSNSQQDVILTTQDIFEDDIFATEAIKPSQKTREKEKTLESNLFDDNIDIFADLTVKPKEKSKKKVEAKSIFDDDMDDIFSSGIQAKTTKPKSRSAQAAPEPRFEHKVSNIFDDPLNAFGGQ

SEQ ID NO: 4533 - protein, 1290 aa, Homo sapiens
MSGPLEGADGGGDPRPGESFCPGGVPSPGPPQHRPCPGPSLADDTDANSNGSSGNESNGHESRGASQRSSHSSSSGNGKDSALLETTESSKSTNSQSPSPPSSSIAYSLLSASSEQDNPSTSGCSSEQSARARTQKELMTALRELKLRLPPERRGKGRSGTLATLQYALACVKQVQANQEYYQQWSLEEGEPCSMDMSTYTLEELEHITSEYTLQNQDTFSVAVSFLTGRIVYISEQAAVLLRCKRDVFRGTRFSELLAPQDVGVFYGSTAPSRLPTWGTGASAGSGLRDFTQEKSVFCRIRGGPDRDPGPRYQPFRLTPYVTKIRVSDGAPAQPCCLLIAERIHSGYEAPRIPPDKRIFTTRHTPSCLFQDVDERAAPLLGYLPQDLLGAPVLLFLHPEDRPLMLAIHKKILQLAGQPFDHSPIRFCARNGEYVTMDTSWAGFVHPWSRKVAFVLGRHKVRTAPLNEDVFTPPAPSPAPSLDTDIQELSEQIHRLLLQPVHSPSPTGLCGVGAVTSPGPLHSPGSSSDSNGGDAEGPGPPAPVTFQQICKDVHLVKHQGQQLFIESRARPQSRPRLPATGTFKAKALPCQSPDPELEAGSAPVQAPLALVPEEAERKEASSCSYQQINCLDSILRYLESCNLPSTTKRKCASSSSYTTSSASDDDRQRTGPVSVGTKKDPPSAALSGEGATPRKEPVVGGTLSPLALANKAESVVSVTSQCSFSSTIVHVGDKKPPESDIIMMEDLPGLAPGPAPSPAPSPTVAPDPAPDAYRPVGLTKAVLSLHTQKEEQAFLSRFRDLGRLRGLDSSSTAPSALGERGCHHGPAPPSRRHHCRSKAKRSRHHQNPRAEAPCYVSHPSPVPPSTPWPTPPATTPFPAVVQPYPLPVFSPRGGPQPLPPAPTSVPPAAFPAPLVTPMVALVLPNYLFPTPSSYPYGALQTPAEGPPTPASHSPSPSLPALAPSPPHRPDSPLFNSRCSSPLQLNLLQLEELPRAEGAAVAGGPGSSAGPPPPSAEAAEPEARLAEVTESSNQDALSGSSDLLELLLQEDSRSGTGSAASGSLGSGLGSGSGSGSHEGGSTSASITRSSQSSHTSKYFGSIDSSEAEAGAARGGAEPGDQVIKYVLQDPIWLLMANADQRVMMTYQVPSRDMTSVLKQDRERLRAMQKQQPRFSEDQRRELGAVHSWVRKGQLPRALDVMACVDCGSSTQDPGHPDDPLFSELDGLGLEPMEEGGGEQGSSGGGSGEGEGCEEAQGGAKASSSQDLAMEEEEEGRSSSSPALPTAGNCTS

SEQ ID NO: 4534 - protein, 276 aa, Homo sapiens
MAAETRNVAGAEAPPPQKRYYRQRAHSNPMADHTLRYPVKPEEMDWSELYPEFFAPLTQNQSHDDPKDKKEKRAQAQVEFADIGCGYGGLLVELSPLFPDTLILGLEIRVKVSDYVQDRIRALRAAPAGGFQNIACLRSNAMKHLPNFFYKGQLTKMFFLFPDPHFKRTKHKWRIISPTLLAEYAYVLRVGGLVYTITDVLELHDWMCTHFEEHPLFERVPLEDLSEDPVVGHLGTSTEEGKKVLRNGGKNFPAIFRRIQDPVLQAVTSQTSLPGH

SEQ ID NO: 4535 - protein, 1181 aa, Homo sapiens
MFFYLSKKISIPNNVKLQCVSWNKEQGFIACGGEDGLLKVLKLETQTDDAKLRGLAAPSNLSMNQTLEGHSGSVQVVTWNEQYQKLTTSDENGLIIVWMLYKGSWIEEMINNRNKSVVRSMSWNADGQKICIVYEDGAVIVGSVDGNRIWGKDLKGIQLSHVTWSADSKVLLFGMANGEIHIYDNQGNFMIKMKLSCLVNVTGAISIAGIHWYHGTEGYVEPDCPCLAVCFDNGRCQIMRHENDQNPVLIDTGMYVVGIQWNHMGSVLAVAGFQKAAMQDKDVNIVQFYTPFGEHLGTLKVPGKEISALSWEGGGLKIALAVDSFIYFANIRPNYKWGYCSNTVVYAYTRPDRPEYCVVFWDTKNNEKYVKYVKGLISITTCGDFCILATKADENHPQEENEMETFGATFVLVLCNSIGTPLDPKYIDIVPLFVAMTKTHVIAASKEAFYTWQYRVAKKLTALEINQITRSRKEGRERIYHVDDTPSGSMDGVLDYSKTIQGTRDPICAITASDKILIVGRESGTIQRYSLPNVGLIQKYSLNCRAYQLSLNCNSSRLAIIDISGVLTFFDLDARVTDSTGQQVVGELLKLERRDVWDMKWAKDNPDLFAMMEKTRMYVFRNLDPEEPIQTSGYICNFEDLEIKSVLLDEILKDPEHPNKDYLINFEIRSLRDSRALIEKVGIKDASQFIEDNPHPRLWRLLAEAALQKLDLYTAEQAFVRCKDYQGIKFVKRLGKLLSESMKQAEVVGYFGRFEEAERTYLEMDRRDLAIGLRLKLGDWFRVLQLLKTGSGDADDSLLEQANNAIGDYFADRQKWLNAVQYYVQGRNQERLAECYYMLEDYEGLENLAISLPENHKLLPEIAQMFVRVGMCEQAVTAFLKCSQPKAAVDTCVHLNQWNKAVELAKNHSMKEIGSLLARYASHLLEKNKTLDAIELYRKANYFFDAAKLMFKIADEEAKKGSKPLRVKKLYVLSALLIEQYHEQMKNAQRGKVKGKSSEATSALAGLLEEEVLSTTDRFTDNAWRGAEAYHFFILAQRQLYEGCVDTALKTALHLKDYEDIIPPVEIYSLLALCACASRAFGTCSKAFIKLKSLETLSSEQKQQYEDLALEIFTKHTSKDNRKPELDSLMEGGEGKLPTCVATGSPITEYQFWMCSVCKHGVLAQEISHYSFCPLCHSPVG

SEQ ID NO: 4536 - protein, 234 aa, Homo sapiens
MPASSPFLLAPKGPPGNMGGPVREPALSVALWLSWGAALGAVACAMALLTQQTELQSLRREVSRLQGTGGPSQNGEGYPWQSLPEQSSDALEAWENGERSRKRRAVLTQKQKNDSDVTEVMWQPALRRGRGLQAQGYGVRIQDAGVYLLYSQVLFQDVTFTMGQVVSREGQGRQETLFRCIRSMPSHPDRAYNSCYSAGVFHLHQGDILSVIIPRARAKLNLSPHGTFLGFVKL

SEQ ID NO: 4537 - protein, 471 aa, Homo sapiens
MANSFAARIFTTLSDLQTNMANLKVIGIVIGKTDVKGFPDRKNIGSERYTFSFTIRDSPAHFVNAASWGNEDYIKSLSDSFRVGDCVIIENPLIQRKEIEREEKFSPATPSNCKLLLSENHSTVKVCSSYEVDTKLLSLIHLPVKESHDYYSLGDIVANGHSLNGRIINVLAAVKSVGEPKYFTTSDRRKGQRCEVRLYDETESSFAMTCWDNESILLAQSWMPRETVIFASDVRINFDKFRNCMTATVISKTIITTNPDIPEANILLNFIRENKETNVLDDEIDSYFKESINLSTIVDVYTVEQLKGKALKNEGKADPSYGILYAYISTLNIDDETTKVVRNRCSSCGYIVNEASNMCTTCNKNSLDFKSVFLSFHVLIDLTDHTGTLHSCSLTGSVAEETLGCTVHEFLAMTDEQKTALKWQFLLERSKIYLKFVLSHRARSGLKISVLSCKLADPTEASRNLSGQKHV

SEQ ID NO: 4538 - protein, 985 aa, Homo sapiens
MAVWSLLSARAVTAFLLLFLPRFLQAQTFSFPFQQPEKCDNNQYFDISALSCVPCGANQRQDARGTSCVCLPGFQMISNNGGPAIICKKCPENMKGVTEDGWNCISCPSDLTAEGKCHCPIGHILVERDINGTLLSQATCELCDGNENSFMVVNALGDRCVRCEPTFVNTSRSCACSEPNILTGGLCFSSTGNFPLRRISAARYGEVGMSLTSEWFAKYLQSSAAACWVYANLTSCQALGNMCVMNMNSYDFATFDACGLFQFIFENTAGLSTVHSISFWRQNLPWLFYGDQLGLAPQVLSSTSLPTNFSFKGENQNTKLKFVAASYDIRGNFLKWQTLEGGVLQLCPDTETRLNAAYSFGTTYQQNCEIPISKILIDFPTPIFYDVYLEYTDENQHQYILAVPVLNLNLQHNKIFVNQDSNSGKWLLTRRIFLVDAVSGRENDLGTQPRVIRVATQISLSVHLVPNTINGNIYPPLITIAYSDIDIKDANSQSVKVSFSVTYEMDHGEAHVQTDIALGVLGGLAVLASLLKTAGWKRRIGSPMIDLQTVVKFLVYYAGDLANVFFIITVGTGLYWLIFFKAQKSVSVLLPMPIQEERFVTYVGCAFALKALQFLHKLISQITIDVFFIDWERPKGKVLKAVEGEGGVRSATVPVSIWRTYFVANEWNEIQTVRKINSLFQVLTVLFFLEVVGFKNLALMDSSSSLSRNPPSYIAPYSCILRYAVSAALWLAIGIIQVVFFAVFYERFIEDKIRQFVDLCSMSNISVFLLSHKCFGYYIHGRSVHGHADTNMEEMNMNLKREAENLCSQRGLVPNTDGQTFEIAISNQMRQHYDRIHETLIRKNGPARLLSSSASTFEQSIKAYHMMNKFLGSFIDHVHKEMDYFIKDKLLLERILGMEFMEPMEKSIFYNDEGYSFSSVLYYGNEATLLIFDLLFFCVVDLACQNFILASFLTYLQQEIFRYIRNTVGQKNLASKTLVDQRFLI

SEQ ID NO: 4539 - protein, 1311 aa, Homo sapiens
MSLLQSALDFLAGPGSLGGASGRDQSDFVGQTVELGELRLRVRRVLAEGGFAFVYEAQDVGSGREYALKRLLSNEEEKNRAIIQEVCFMKKLSGHPNIVQFCSAASIGKEESDTGQAEFLLLTELCKGQLVEFLKKMESRGPLSCDTVLKIFYQTCRAVQHMHRQKPPIIHRDLKVENLLLSNQGTIKLCDFGSATTISHYPDYSWSAQRRALVEEEITRNTTPMYRTPEIIDLYSNFPIGEKQDIWALGCILYLLCFRQHPFEDGAKLRIVNGKYSIPPHDTQYTVFHSLIRAMLQVNPEERLSIAEVVHQLQEIAAARNVNPKSPITELLEQNGGYGSATLSRGPPPPVGPAGSGYSGGLALAEYDQPYGGFLDILRGGTERLFTNLKDTSSKVIQSVANYAKGDLDISYITSRIAVMSFPAEGVESALKNNIEDVRLFLDSKHPGHYAVYNLSPRTYRPSRFHNRVSECGWAARRAPHLHTLYNICRNMHAWLRQDHKNVCVVHCMDGRAASAVAVCSFLCFCRLFSTAEAAVYMFSMKRCPPGIWPSHKRYIEYMCDMVAEEPITPHSKPILVRAVVMTPVPLFSKQRSGCRPFCEVYVGDERVASTSQEYDKMRDFKIEDGKAVIPLGVTVQGDVLIVIYHARSTLGGRLQAKMASMKMFQIQFHTGFVPRNATTVKFAKYDLDACDIQEKYPDLFQVNLEVEVEPRDRPSREAPPWENSSMRGLNPKILFSSREEQQDILSKFGKPELPRQPGSTAQYDAGAGSPEAEPTDSDSPPSSSADASRFLHTLDWQEEKEAETGAENASSKESESALMEDRDESEVSDEGGSPISSEGQEPRADPEPPGLAAGLVQQDLVFEVETPAVLPEPVPQEDGVDLLGLHSEVGAGPAVPPQACKAPSSNTDLLSCLLGPPEAASQGPPEDLLSEDPLLLASPAPPLSVQSTPRGGPPAAADPFGPLLPSSGNNSQPCSNPDLFGEFLNSDSVTVPPSFPSAHSAPPPSCSADFLHLGDLPGEPSKMTASSSNPDLLGGWAAWTETAASAVAPTPATEGPLFSPGGQPAPCGSQASWTKSQNPDPFADLGDLSSGLQGSPAGFPPGGFIPKTATTPKGSSSWQTSRPPAQGASWPPQAKPPPKACTQPRPNYASNFSVIGAREERGVRAPSFAQKPKVSENDFEDLLSNQGFSSRSDKKGPKTIAEMRKQDLAKDTDPLKLKLLDWIEGKERNIRALLSTLHTVLWDGESRWTPVGMADLVAPEQVKKHYRRAVLAVHPDKAAGQPYEQHAKMIFMELNDAWSEFENQGSRPLF

SEQ ID NO: 4540 - protein, 557 aa, Homo sapiens
MRRLTRRLVLPVFGVLWITVLLFFWVTKRKLEVPTGPEVQTPKVWSLFFKVAGMSPWAPQVPVSPTPPYQRGHLPTGGHLAVCHFPCLLQEAQFHLQTQVFLQVRCTLLVYCTDLPPTSIIITFHNEARSTLLRTIRSVLNRTPTHLIREIILVDDFSNDPDDCKQLIKLPKVKCLRNNERQGLVRSRIRGADIAQGTTLTFLDSHCEVNRDWLQPLLHRVKEDYTRVVCPVIDIINLDTFTYIESASELRGGFDWSLHFQWEQLSPEQKARRLDPTEPIRTPIIAGGLFVIDKAWFDYLGKYDMDMDIWGGENFEISFRVWMCGGSLEIVPCSRVGHVFRKKHPYVFPDGNANTYIKNTKRTAEVWMDEYKQYYYAARPFALERPFGNVESRLDLRKNLRCQSFKWYLENIYPELSIPKESSIQKGNIRQRQKCLESQRQNNQETPNLKLSPCAKVKGEDAKSQVWAFTYTQQILQEELCLSVITLFPGAPVVLVLCKNGDDRQQWTKTGSHIEHIASHLCLDTDMFGDGTENGKEIVVNPCESSLMSQHWDMVSS

SEQ ID NO: 4541 - protein, 1143 aa, Homo sapiens
MNSDQVTLVGQVFESYVSEYHKNDILLILKERDEDAHYPVVVNAMTLFETNMEIGEYFNMFPSEVLTIFDSALRRSALTILQSLSQPEAVSMKQNLHARISGLPVCPELVREHIPKTKDVGHFLSVTGTVIRTSLVKVLEFERDYMCNKCKHVFVIKADFEQYYTFCRPSSCPSLESCDSSKFTCLSGLSSSPTRCRDYQEIKIQEQVQRLSVGSIPRSMKVILEDDLVDSCKSGDDLTIYGIVMQRWKPFQQDVRCEVEIVLKANYIQVNNEQSSGIIMDEEVQKEFEDFWEYYKSDPFAGRNVILASLCPQVFGMYLVKLAVAMVLAGGIQRTDATGTRVRGESHLLLVGDPGTGKSQFLKYAAKITPRSVLTTGIGSTSAGLTVTAVKDSGEWNLEAGALVLADAGLCCIDEFNSLKEHDRTSIHEAMEQQTISVAKAGLVCKLNTRTTILAATNPKGQYDPQESVSVNIALGSPLLSRFDLILVLLDTKNEDWDRIISSFILENKGYPSKSEKLWSMEKMKTYFCLIRNLQPTLSDVGNQVLLRYYQMQRQSDCRNAARTTIRLLESLIRLAEAHARLMFRDTVTLEDAITVVSVMESSMQGGALLGGVNALHTSFPENPGEQYQRQCELILEKLELQSLLSEELRRLERLQNQSVHQSQPRVLEVETTPGSLRNGPGEESNFRTSSQQEINYSTHIFSPGGSPEGSPVLDPPPHLEPNRSTSRKHSAQHKNNRDDSLDWFDFMATHQSEPKNTVVVSPHPKTSGENMASKISNSTSQGKEKSEPGQRSKVDIGLLPSPGETGVPWRADNVESNKKKRLALDSEAAVSADKPDSVLTHHVPRNLQKLCKERAQKLCRNSTRVPAQCTVPSHPQSTPVHSPDRMLDSPKRKRPKSLAQVEEPAIENVKPPGSPVAKLAKFTFKQKSKLIHSFEDHSHVSPGATKIAVHSPKISQRRTRRDAALPVKRPGKLTSTPGNQISSQPQGETKEVSQQPPEKHGPREKVMCAPEKRIIQPELELGNETGCAHLTCEGDKKEEVSGSNKSGKVHACTLARLANFCFTPPSESKSKSPPPERKNRGERGPSSPPTTTAPMRVSKRKSFQLRGSTEKLIVSKESLFTLPELGDEAFDCDWDEEMRKKS

SEQ ID NO: 4542 - protein, 536 aa, Homo sapiens
MEFSSPSREECPKPLSRVSIMAGSLTGLLLLQAVSWASGARPCIPKSFGYSSVVCVCNATYCDSFDPPTFPALGTFSRYESTRSGRRMELSMGPIQANHTGTGLLLTLQPEQKFQKVKGFGGAMTDAAALNILALSPPAQNLLLKSYFSEEGIGYNIIRVPMASCDFSIRTYTYADTPDDFQLHNFSLPEEDTKLKIPLIHRALQLAQRPVSLLASPWTSPTWLKTNGAVNGKGSLKGQPGDIYHQTWARYFVKFLDAYAEHKLQFWAVTAENEPSAGLLSGYPFQCLGFTPEHQRDFIARDLGPTLANSTHHNVRLLMLDDQRLLLPHWAKVVLTDPEAAKYVHGIAVHWYLDFLAPAKATLGETHRLFPNTMLFASEACVGSKFWEQSVRLGSWDRGMQYSHSIITNLLYHVVGWTDWNLALNPEGGPNWVRNFVDSPIIVDITKDTFYKQPMFYHLGHFSKFIPEGSQRVGLVASQKNDLDAVALMHPDGSAVVVVLNRSSKDVPLTIKDPAVGFLETISPGYSIHTYLWRRQ

SEQ ID NO: 4543 - protein, 499 aa, Homo sapiens
MTVATGDPADEAAALPGHPQDTYDPEADHECCERVVINISGLRFETQLKTLAQFPETLLGDPKKRMRYFDPLRNEYFFDRNRPSFDAILYYYQSGGRLRRPVNVPLDIFSEEIRFYELGEEAMEMFREDEGYIKEEERPLPENEFQRQVWLLFEYPESSGPARIIAIVSVMVILISIVSFCLETLPIFRDENEDMHGSGVTFHTYSNSTIGYQQSTSFTDPFFIVETLCIIWFSFEFLVRFFACPSKAGFFTNIMNIIDIVAIIPYFITLGTELAEKPEDAQQGQQAMSLAILRVIRLVRVFRIFKLSRHSKGLQILGQTLKASMRELGLLIFFLFIGVILFSSAVYFAEADERESQFPSIPDAFWWAVVSMTTVGYGDMVPTTIGGKIVGSLCAIAGVLTIALPVPVIVSNFNYFYHRETEGEEQAQYLQVTSCPKIPSSPDLKKSRSASTISKSDYMEIQEGVNNSNEDFREENLKTANCTLANTNYVNITKMLTDV

SEQ ID NO: 4544 - protein, 304 aa, Homo sapiens
MRLPLGIYRQRGRFRHFSPGLRQDYASTSASVSRHSSSVSLSSGKKGTCSDQEYDQYSLEDEEEFDHLPPPQPRLPRCSPFQRGIPHSQTFSSIRECRRSPSSQYFPSNNYQQQQYYSPQAQTPDQQPNRTNGDKLRRSMPNLARMPSTTAISSNISSPVTVRNSQSFDSSLHGAGNGISRIQSCIPSPGQLQHRVHSVGHFPVSIRQPLKATAYVSPTVQGSSNMPLSNGLQLYSNTGIPTPNKAAASGIMGRSALPRPSLAINGSNLPRSKIAQPVRSFLQPPKPLSSLSTLRDGNWRDGCY

SEQ ID NO: 4545 - protein, 1416 aa, Homo sapiens
MKSLKSRLRRQDVPGPASSGAAAASAHAADWNKYDDRLMKAAERGDVEKVTSILAKKGVNPGKLDVEGRSVFHVVTSKGNLECLNAILIHGVDITTSDTAGRNALHLAAKYGHALCLQKLLQYNCPTEHADLQGRTALHDAAMADCPSSIQLLCDHGASVNAKDVDGRTPLVLATQMSRPTICQLLIDRGADVNSRDKQNRTALMLGCEYGCRDAVEVLIKNGADISLLDALGHDSSYYARIGDNLDILTLLKTASENTNKGRELWKKGPSLQQRNLTHMQDEVNVKSHQREHQNIQDLEIENEDLKERLRKIQQEQRILLDKVNGLQLQLNEEVMVADDLESEREKLKSLLAAKEKQHEESLRTIEALKNRFKYFESDHLGSGSHFSNRKEDMLLKQGQMYMADSQCTSPGIPAHMQSRSMLRPLELSLPSQTSYSENEILKKELEAMRTFCESAKQDRLKLQNELAHKVAECKALALECERVKEDSDEQIKQLEDALKDVQKRMYESEGKVKQMQTHFLALKEHLTSEAASGNHRLTEELKDQLKDLKVKYEGASAEVGKLRNQIKQNEMIVEEFKRDEGKLIEENKRLQKELSMCEMEREKKGRKVTEMEGQAKELSAKLALSIPAEKFENMKSSLSNEVNEKAKKLVEMEREHEKSLSEIRQLKRELENVKAKLAQHVKPEEHEQVKSRLEQKSGELGKKITELTLKNQTLQKEIEKVYLDNKLLKEQAHNLTIEMKNHYVPLKVSEDMKKSHDAIIDDLNRKLLDVTQKYTEKKLEMEKLLLENDSLSKDVSRLETVFVPPEKHEKEIIALKSNIVELKKQLSELKKKCGEDQEKIHALTSENTNLKKMMSNQYVPVKTHEEVKMTLNDTLAKTNRELLDVKKKFEDINQEFVKIKDKNEILKRNLENTQNQIKAEYISLAEHEAKMSSLSQSMRKVQDSNAEILANYRKGQEEIVTLHAEIKAQKKELDTIQECIKVKYAPIVSFEECERKFKATEKELKDQLSEQTQKYSVSEEEVKKNKQENDKLKKEIFTLQKDLRDKTVLIEKSHEMERALSRKTDELNKQLKDLSQKYTEVKNVKEKLVEENAKQTSEILAVQNLLQKQHVPLEQVEALKKSLNGTIENLKEELKSMQRCYEKEQQTVTKLHQLLENQKNSSVPLAEHLQIKEAFEKEVGIIKASLREKEEESQNKMEEVSKLQSEVQNTKQALKKLETREVVDLSKYKATKSDLETQISSLNEKLANLNRKYEEVCEEVLHAKKKEISAKDEKELLHFSIEQEIKDQKERCDKSLTTITELQRRIQESAKQIEAKDNKITELLNDVERLKQALNGLSQLTYTSGNPTKRQSQLIDTLQHQVKSLEQQLADADRQHQEVIAIYRTHLLSAAQGHMDEDVQEALLQIIQMRQGLVC

SEQ ID NO: 4546 - protein, 455 aa, Homo sapiens
MKSQGQHWYSSSDKNCKVSFREKLLIIDSNLGVQDVENLKFLCIGLVPNKKLEKSSSASDVFEHLLAEDLLSEEDPFFLAELLYIIRQKKLLQHLNCTKEEVERLLPTRQRVSLFRNLLYELSEGIDSENLKDMIFLLKDSLPKTEMTSLSFLAFLEKQGKIDEDNLTCLEDLCKTVVPKLLRNIEKYKREKAIQIVTPPVDKEAESYQGEEELVSQTDVKTFLEALPQESWQNKHAGSNEILSHVFQWLGFTVHIHNNVTKVEMEMVLQKQKCNPAHADGDCFVFCILTHGRFGAVYSSDEALIPIREIMSHFTALQCPRLAEKPKLFFIQACQGEEIQPSVSIEADALNPEQAPTSLQDSIPAEADFLLGLATVPGYVSFRHVEEGSWYIQSLCNHLKKLVPRHEDILSILTAVNDDVSRRVDKQGTKKQMPQPAFTLRKKLVFPVPLDALSL

SEQ ID NO: 4547 - protein, 502 aa, Homo sapiens
MSCPVPACCALLLVLGLCRARPRNALLLLADDGGFESGAYNNSAIATPHLDALARRSLLFRNAFTSVSSCSPSRASLLTGLPQHQNGMYGLHQDVHHFNSFDKVRSLPLLLSQAGVRTGIIGKKHVGPETVYPFDFAYTEENGSVLQVGRNITRIKLLVRKFLQTQDDRPFFLYVAFHDPHRCGHSQPQYGTFCEKFGNGESGMGRIPDWTPQAYDPLDVLVPYFVPNTPAARADLAAQYTTVGRMDQGVGLVLQELRDAGVLNDTLVIFTSDNGIPFPSGRTNLYWPGTAEPLLVSSPEHPKRWGQVSEAYVSLLDLTPTILDWFSIPYPSYAIFGSKTIHLTGRSLLPALEAEPLWATVFGSQSHHEVTMSYPMRSVQHRHFRLVHNLNFKMPFPIDQDFYVSPTFQDLLNRTTAGQPTGWYKDLRHYYYRARWELYDRSRDPHETQNLATDPRFAQLLEMLRDQLAKWQWETHDPWVCAPDGVLEEKLSPQCQPLHNEL

SEQ ID NO: 4548 - protein, 708 aa, Homo sapiens
MAAAAVAAAAAAAAAASLQVLEMESMETAAAGSAGLAAEVRGSGTVDFGPGPGISAMEASGGDPGPEAEDFECSSHCSELSWRQNEQRRQGLFCDITLCFGGAGGREFRAHRSVLAAATEYFTPLLSGQFSESRSGRVEMRKWSSEPGPEPDTVEAVIEYMYTGRIRVSTGSVHEVLELADRFLLIRLKEFCGEFLKKKLHLSNCVAIHSLAHMYTLSQLALKAADMIRRNFHKVIQDEEFYTLPFHLIRDWLSDLEITVDSEEVLFETVLKWVQRNAEERERYFEELFKLLRLSQMKPTYLTRHVKPERLVANNEVCVKLVADAVERHALRAENIQSGTCQHPTSHVSLLPRYGQNMDVIMVIGGVSEGGDYLSECVGYFVDEDRWVNLPHIHNHLDGHAVAVTESYVYVAGSMEPGFAKTVERYNPNLNTWEHVCSLMTRKHSFGLTEVKGKLYSIGGHGNFSPGFKDVTVYNPELDKWHNLESAPKILRDVKALAIEDRFVYIAARTPVDRDTEDGLKAVITCYDTETRQWQDVESLPLIDNYCFFQMSVVNSNFYQTASCCPKSYCLENEEAVRKIASQVSDEILESLPPEVLSIEGAAICYYKDDVFIIGGWKNSDDIDKQYRKEAYRYCAERKRWMLLPPMPQPRCRATACHVRIPYRYLHGTQRYPMPQNLMWQKDRIRQMQEIHRHALNMRRVPSSQIEC

SEQ ID NO: 4549 - protein, 606 aa, Homo sapiens
MADMEDLFGSDADSEAERKDSDSGSDSDSDQENAASGSNASGSESDQDERGDSGQPSNKELFGDDSEDEGASHHSGSDNHSERSDNRSEASERSDHEDNDPSDVDQHSGSEAPNDDEDEGHRSDGGSHHSEAEGSEKAHSDDEKWGREDKSDQSDDEKIQNSDDEERAQGSDEDKLQNSDDDEKMQNTDDEERPQLSDDERQQLSEEEKANSDDERPVASDNDDEKQNSDDEEQPQLSDEEKMQNSDDERPQASDEEHRHSDDEEEQDHKSESARGSDSEDEVLRMKRKNAIASDSEADSDTEVPKDNSGTMDLFGGADDISSGSDGEDKPPTPGQPVDENGLPQDQQEEEPIPETRIEVEIPKVNTDLGNDLYFVKLPNFLSVEPSMSLHLGNEVFDVYKAPLQGDHNHLFIRQGTGLQGQAVFKTKLTFRPHSTDSATHRKMTLSLADRCSKTQKIRILPMAGRDPECQRTEMIKKEEERLRASIRRESQQRRMREKQHQRGLSASYLEPDRYDEEEEGEESISLAAIKNRYKGGIREERARIYSSDSDEGSEEDKAQRLLKAKKLTSDEEGEPSGKRKAEDDDKANKKHKKYVISDEEEEDDD

SEQ ID NO: 4550 - protein, 866 aa, Homo sapiens
MAGRVPSLLVLLVFPSSCLAFRSPLSVFKRFKETTRPFSNECLGTTRPVVPIDSSDFALDIRMPGVTPKQSDTYFCMSMRIPVDEEAFVIDFKPRASMDTVHHMLLFGCNMPSSTGSYWFCDEGTCTDKANILYAWARNAPPTRLPKGVGFRVGGETGSKYFVLQVHYGDISAFRDNNKDCSGVSLHLTRLPQPLIAGMYLMMSVDTVIPAGEKVVNSDISCHYKNYPMHVFAYRVHTHHLGKVVSGYRVRNGQWTLIGRQSPQLPQAFYPVGHPVDVSFGDLLAARCVFTGEGRTEATHIGGTSSDEMCNLYIMYYMEAKHAVSFMTCTQNVAPDMFRTIPPEANIPIPVKSDMVMMHEHHKETEYKDKIPLLQQPKREEEEVLDQDFHMEEALDWPGVYLLPGQVSGVALDPKNNLVIFHRGDHVWDGNSFDSKFVYQQIGLGPIEEDTILVIDPNNAAVLQSSGKNLFYLPHGLSIDKDGNYWVTDVALHQVFKLDPNNKEGPVLILGRSMQPGSDQNHFCQPTDVAVDPGTGAIYVSDGYCNSRIVQFSPSGKFITQWGEESSGSSPLPGQFTVPHSLALVPLLGQLCVADRENGRIQCFKTDTKEFVREIKHSSFGRNVFAISYIPGLLFAVNGKPHFGDQEPVQGFVMNFSNGEIIDIFKPVRKHFDMPHDIVASEDGTVYIGDAHTNTVWKFTLTEKLEHRSVKKAGIEVQEIKEAEAVVETKMENKPTSSELQKMQEKQKLIKEPGSGVPVVLITTLLVIPVVVLLAIAIFIRWKKSRAFGDSEHKLETSSGRVLGRFRGKGSGGLNLGNFFASRKGYSRKGFDRLSTEGSDQEKEDDGSESEEEYSAPLPALAPSSS

SEQ ID NO: 4551 - protein, 548 aa, Homo sapiens
MATCIWLRSCGARRLGSTFPGCRLRPRAGGLVPASGPAPGPAQLRCYAGRLAGLSAALLRTDSFVGGRWLPAAATFPVQDPASGAALGMVADCGVREARAAVRAAYEAFCRWREVSAKERSSLLRKWYNLMIQNKDDLARIITAESGKPLKEAHGEILYSAFFLEWFSEEARRVYGDIIHTPAKDRRALVLKQPIGVAAVITPWNFPSAMITRKVGAALAAGCTVVVKPAEDTPFSALALAEVNQGFLLDLDPLLLASQAGIPSGVYNVIPCSRKNAKEVGEAICTDPLVSKISFTGSTTTGKILLHHAANSVKRVSMELGGLAPFIVFDSANVDQAVAGAMASKFRNTGQTCVCSNQFLVQRGIHDAFVKAFAEAMKKNLRVGNGFEEGTTQGPLINEKAVEKVEKQVNDAVSKGATVVTGGKRHQLGKNFFEPTLLCNVTQDMLCTHEETFGPLAPVIKFDTEEEAIAIANAADVGLAGYFYSQDPAQIWRVAEQLEVGMVGVNEGLISSVECPFGGVKQSGLGREGSKYGIDEYLELKYVCYGGL

SEQ ID NO: 4552 - protein, 1251 aa, Homo sapiens
MKHLYGLFHYNPMMLGLESLPDPTDTWEIIETIGKGTYGKVYKVTNKRDGSLAAVKILDPVSDMDEEIEAEYNILQFLPNHPNVVKFYGMFYKADHCVGGQLWLVLELCNGGSVTELVKGLLRCGQRLDEAMISYILYGALLGLQHLHNNRIIHRDVKGNNILLTTEGGVKLVDFGVSAQLTSTRLRRNTSVGTPFWMAPEVIACEQQYDSSYDARCDVWSLGITAIELGDGDPPLFDMHPVKTLFKIPRNPPPTLLHPEKWCEEFNHFISQCLIKDFERRPSVTHLLDHPFIKGVHGKVLFLQKQLAKVLQDQKHQNPVAKTRHERMHTRRPYHVEDAEKYCLEDDLVNLEVLDEDTIIHQLQKRYADLLIYTYVGDILIALNPFQNLSIYSPQFSRLYHGVKRASNPPHIFASADAAYQCMVTLSKDQCIVISGESGSGKTESAHLIVQHLTFLGKANNQTLREKILQVNSLVEAFGNSCTAINDNSSRFGKYLEMMFTPTGVVMGARISEYLLEKSRVIKQAAREKNFHIFYYIYAGLHHQKKLSDFRLPEEKPPRYIADETGRVMHDITSKESYRRQFEAIQHCFRIIGFTDKEVHSVYRILAGILNIGNIEFAAISSQHQTDKSEVPNAEALQNAASVLCISPEELQEALTSHCVVTRGETIIRANTVDRAADVRDAMSKALYGRLFSWIVNRINTLLQPDENICSAGGGMNVGILDIFGFENFQRNSFEQLCINIANEQIQYYFNQHVFALEQMEYQNEGIDAVPVEYEDNRPLLDMFLQKPLGLLALLDEESRFPQATDQTLVDKFEDNLRCKYFWRPKGVELCFGIQHYAGKVLYDASGVLEKNRDTLPADVVVVLRTSENKLLQQLFSIPLTKTGNLAQTRARITVASSSLPPHFSAGKAKVDTLEVIRHPEETTNMKRQTVASYFRYSLMDLLSKMVVGQPHFVRCIKPNDDREALQFSRERVLAQLRSTGILETVSIRRQGYSHRILFEEFVKRYYYLAFTAHQTPLASKESCVAILEKSRLDHWVLGKTKVFLKYYHVEQLNLLLREVIGRVVVLQAYTKGWLGARRYKRVREKREKGAIAIQSGDTSNQSSGPHSPVAAGTRGSAEVQDCSEPGDHKVLRGSVHRRSHSQAESNNGRTQTSSNSPAVTEKNGHSQAQSSPKGCDIFAGHANKHSVSGTDLLSSRICHPAPDQQGLSLWGAPQKPAFPHYGCNFYGFRKWSCTEASNTSPTMSAAQNAE

SEQ ID NO: 4553 - protein, 1256 aa, Homo sapiens
MDRPLSSSAEAEEELEWQVASRRRKAWAKCRSSWQASETEDLSTEATTQDEEEDEEEDLPGAQLPAAGGRGNVPNEKIAIWLKDCRTPLGASLDEQSSSTLKGVLVRNGGSFEDDLSLGAEANHLHESDAQIENCNNILAKERRLQFHQKGRSMNSTGSGKSSGTVSSVSELLELYEEDPEEILYNLGFGRDEPDIASKIPSRFFNSSSFAKGIDIKVFLSAQMQRMEVENPNYALTSRFRQIEVLTTVANAFSSLYSQVSGTPLQRIGSMSSVTSNKETDPPPPLTRSNTANRLMKTLSKLNLCVDKTEKGESSSPSPSAEKGKILNVSVIEESGNKNDQKSQKIMKKKESSSMLATVKEEVSGSSAAVTENADSDRISDEANSNFNQGTENEQSKETQSHESKLGEESGIVESKLDSDFNISSHSELENSSELKSVHISTPEKEPCAPLTIPSIRNIMTQQKDSFEMEEVQSTEGEAPHVPATYQLGLTKSKRDHLLRTASQHSDSSGFAEDSTDCLSLNHLQVQESLQAMGSSADSCDSETTVTSLGEDLATPTAQDQPYFNESEEESLVPLQKGLEKAAAVADKRKSGSQDFPQCNTIENTGTKQSTCSPGDHIIEITEVEEDLFPAETVELLREASAESDVGKSSESEFTQYTTHHILKSLASIEAKCSDMSSENTTGPPSSMDRVNTALQRAQMKVCSLSNQRMGRSLLKSKDLLKQRYLFAKAGYPLRRSQSLPTTLLSPVRVVSSVNVRLSPGKETRCSPPSFTYKYTPEEEQELEKRVMEHDGQSLVKSTIFISPSSVKKEEAPQSEAPRVEECHHGRTPTCSRLAPPPMSQSTCSLHSIHSEWQERPLCEHTRTLSTHSVPNISGATCSAFASPFGCPYSHRHATYPYRVCSVNPPSAIEMQLRRVLHDIRNSLQNLSQYPMMRGPDPAAAPYSTQKSSVLPLYENTFQELQVMRRSLNLFRTQMMDLELAMLRQQTMVYHHMTEEERFEVDQLQGLRNSVRMELQDLELQLEERLLGLEEQLRAVRMPSPFRSSALMGMCGSRSADNLSCPSPLNVMEPVTELMQEQSYLKSELGLGLGEMGFEIPPGESSESVFSQATSESSSVCSGPSHANRRTGVPSTASVGKSKTPLVARKKVFRASVALTPTAPSRTGSVQTPPDLESSEEVDAAEGAPEVVGPKSEVEEGHGKLPSMPAAEEMHKNVEQDELQQVIREVGMDPISCVILELSMICTGGGVICALEDTCC

SEQ ID NO: 4554 - protein, 837 aa, Homo sapiens
MASKRKSTTPCMVRTSQVVEQDVPEEVDRAKEKGIGTPQPDVAKDSWAAELENSSKENEVIEVKSMGESQSKKLQGGYECKYCPYSTQNLNEFTEHVDMQHPNVILNPLYVCAECNFTTKKYDSLSDHNSKFHPGEANFKLKLIKRNNQTVLEQSIETTNHVVSITTSGPGTGDSDSGISVSKTPIMKPGKPKADAKKVPKKPEEITPENHVEGTARLVTDTAEILSRLGGVELLQDTLGHVMPSVQLPPNINLVPKVPVPLNTTKYNSALDTNATMINSFNKFPYPTQAELSWLTAASKHPEEHIRIWFATQRLKHGISWSPEEVEEARKKMFNGTIQSVPPTITVLPAQLAPTKVTQPILQTALPCQILGQTSLVLTQVTSGSTTVSCSPITLAVAGVTNHGQKRPLVTPQAAPEPKRPHIAQVPEPPPKVANPPLTPASDRKKTKEQIAHLKASFLQSQFPDDAEVYRLIEVTGLARSEIKKWFSDHRYRCQRGIVHITSESLAKDQLAIAASRHGRTYHAYPDFAPQKFKEKTQGQVKILEDSFLKSSFPTQAELDRLRVETKLSRREIDSWFSERRKLRDSMEQAVLDSMGSGKKGQDVGAPNGALSRLDQLSGAQLTSSLPSPSPAIAKSQEQVHLLRSTFARTQWPTPQEYDQLAAKTGLVRTEIVRWFKENRCLLKTGTVKWMEQYQHQPMADDHGYDAVARKATKPMAESPKNGGDVVPQYYKDPKKLCEEDLEKLVTRVKVGSEPAKDCLPAKPSEATSDRSEGSSRDGQGSDENEESSVVDYVEVTVGEEDAISDRSDSWSQAAAEGVSELAESDSDCVPAEAGQA

SEQ ID NO: 4555 - protein, 1011 aa, Homo sapiens
MMSDASDMLAAALEQMDGIIAGSKALEYSNGIFDCQSPTSPFMGSLRALHLVEDLRGLLEMMETDEKEGLRCQIPDSTAETLVEWLQSQMTNGHLPGNGDVYQERLARLENDKESLVLQVSVLTDQVEAQGEKIRDLEFCLEEHREKVNATEEMLQQELLSRTSLETQKLDLMAEISNLKLKLTAVEKDRLDYEDKFRDTEGLIQEINDLRLKVSEMDSERLQYEKKLKSTKSLMAKLSSMKIKVGQMQYEKQRMEQKWESLKDELASLKEQLEEKESEVKRLQEKLVCKMKGEGVEIVDRDIEVQKMKKAVESLMAANEEKDRKIEDLRQCLNRYKKMQDTVVLAQGKDGEYEELLNSSSISSLLDAQGFSDLEKSPSPTPVMGSPSCDPFNTSVPEEFHTTILQVSIPSLLPATVSMETSEKSKLTPKPETSFEENDGNIILGATVDTQLCDKLLTSSLQKSSSLGNLKKETSDGEKETIQKTSEDRAPAESRPFGTLPPRPPGQDTSMDDNPFGTRKVRSSFGRGFFKIKSNKRTASAPNLAETEKETAEHLDLAGASSRPKDSQRNSPFQIPPPSPDSKKKSRGIMKLFGKLRRSQSTTFNPDDMSEPEFKRGGTRATAGPRLGWSRDLGQSNSDLDMPFAKWTKEQVCNWLMEQGLGSYLNSGKHWIASGQTLLQASQQDLEKELGIKHSLHRKKLQLALQALGSEEETNHGKLDFNWVTRWLDDIGLPQYKTQFDEGRVDGRMLHYMTVDDLLSLKVVSVLHHLSIKRAIQVLRINNFEPNCLRRRPSDENTIAPSEVQKWTNHRVMEWLRSVDLAEYAPNLRGSGVHGGLMVLEPRFNVETMAQLLNIPPNKTLLRRHLATHFNLLIGAEAQHQKRDAMELPDYVLLTATAKVKPKKLAFSNFGNLRKKKQEDGEEYVCPMELGQASGSASKKGFKPGLDMRLYEEDDLDRLEQMEDSEGTVRQIGAFSEGINNLTHMLKEDDMFKDFAARSPSASITDEDSNV

SEQ ID NO: 4556 - protein, 274 aa, Homo sapiens
MATTVSTQRGPVYIGELPQDFLRITPTQQQRQVQLDAQAAQQLQYGGAVGTVGRLNITVVQAKLAKNYGMTRMDPYCRLRLGYAVYETPTAHNGAKNPRWNKVIHCTVPPGVDSFYLEIFDERAFSMDDRIAWTHITIPESLRQGKVEDKWYSLSGRQGDDKEGMINLVMSYALLPAAMVMPPQPVVLMPTVYQQGVGYVPITGMPAVCSPGMVPVALPPAAVNAQPRCSEEDLKAIQDMFPNMDQEVIRSVLEAQRGNKDAAINSLLQMGEEP

SEQ ID NO: 4557 - protein, 1017 aa, Homo sapiens
MTSRRLEESMGAVQMGLVNMFKGFQSKVLPPLSPKVVTEEEVNRMLTPSEFLKEMSLTTEQRLAKTRLMCRPQIIELLDMGETTHQKFSGIDLDQALFQPFPSEIIFQNYTPCEVYEVPLILRNNDKIPRLVKVVEESSPYFKVISPKDIGHKVAPGVPSIFRILFTPEENKDYAHTLTCVTEREKFIVPIKARGARAILDFPDKLNFSTCPVKYSTQKILLVRNIGNKNAVFHIKTCRPFSIEPAIGTLNVGESMQLEVEFEPQSVGDHSGRLIVCYDTGEKVFVSLYGAAIDMNIRLDKNSLTIEKTYISLANQRTITIHNRSNIIAHFLWKVFATQQEEDREKYRACDDLIKEEKDETDEFFEECITDPLLREHLSVLSRTFANQRRLVQGDSKLFFNNVFTVEPLEGDVWPNSSAEITVYFNPLEAKLYQQTIYCDILGREIRLPLRIKGEGMGPKIHFNFELLDIGKVFTGSAHCYEAILYNKGSIDALFNMTPPTSALGACFVFSPKEGIIEPSGVQAIQISFSSTILGNFEEEFLVNVNGSPEPVKLTIRGCVIGPTFHFNVPALHFGDVSFGFPHTLICSLNNTSLIPMTYKLRIPGDGLGHKSISYCEQHVDYKRPSWTKEEISSMKPKEFTISPDCGTIRPQGFAAIRVTLCSNTVQKYELALVVDVEGIGEEVLALLITARCVVPALHLVNTEVDFGHCFLKYPYEKTLQLANQDDLPGFYEVQPQVCEEVPTVLFSSPTPSGVISPSSTIHIPLVLETQVTGEHRSTVYISIFGSQDPPLVCHLKSAGEGPVIYVHPNQVDFGNIYVLKDSSRILNLCNQSFIPAFFQAHMAHKKSLWTIEPNEGMVPPETDVQLALTANLNDTLTFKDCVILDIENSSTYRIPVQASGTGSTIVSDKPFAPELNLGAHFSLDTHYYHFKLINKGRRIQQLFWMNDSFRPQAKLSKKGRVKKGHAHVQPQPSGSQEPRDPQSPVFHLHPASMELYPGQAIDVILEGYSATPRVRG

SEQ ID NO: 4558 - protein, 255 aa, Homo sapiens
MWLLLTLSFLLASTAQDGDKLLEGDECAPHSQPWQVALYERGRFNCGASLISPHWVLSAAHCQSRFMRVRLGEHNLRKRDGPEQLRTTSRVIPHPRYEARSHRNDIMLLRLVQPARLNPQVRPAVLPTRCPHPGEACVVSGWGLVSHNEPGTAGSPRSQVSLPDTLHCANISIISDTSCDKSYPGRLTNTMVCAGAEGRGAESCEGDSGGPLVCGGILQGIVSWGDVPCDNTTKPGVYTKVCHYLEWIRETMKRN

SEQ ID NO: 4559 - protein, 985 aa, Homo sapiens
MSRIESLTRARIDRSRELASKTREKEKMKEAKDARYTNGHLFTTISVSGMTMCYACNKSITAKEALICPTCNVTIHNRCKDTLANCTKVKQKQQKAALLKNNTALQSVSLRSKTTIRERPSSAIYPSDSFRQSLLGSRRGRSSLSLAKSVSTTNIAGHFNDESPLGLRRILSQSTDSLNMRNRTLSVESLIDEEVIYSELMSDFEMDEKDFAADSWSLAVDSSFLQQHKKEVMKQQDVIYELIQTELHHVRTLKIMTRLFRTGMLEELHLEPGVVQGLFPCVDELSDIHTRFLSQLLERRRQALCPGSTRNFVIHRLGDLLISQFSGPSAEQMCKTYSEFCSRHSKALKLYKELYARDKRFQQFIRKVTRPAVLKRHGVQECILLVTQRITKYPLLISRILQHSHGIEEERQDLTTALGLVKELLSNVDEGIYQLEKGARLQEIYNRMDPRAQTPVPGKGPFGREELLRRKLIHDGCLLWKTATGRFKDVLVLLMTDVLVFLQEKDQKYIFPTLDKPSVVSLQNLIVRDIANQEKGMFLISAAPPEMYEVHTASRDDRSTWIRVIQQSVRTCPSREDFPLIETEDEAYLRRIKMELQQKDRALVELLREKVGLFAEMTHFQAEEDGGSGMALPTLPRGLFRSESLESPRGERLLQDAIREVEGLKDLLVGPGVELLLTPREPALPLEPDSGGNTSPGVTANGEARTFNGSIELCRADSDSSQRDRNGNQLRSPQEEALQRLVNLYGLLHGLQAAVAQQDTLMEARFPEGPERREKLCRANSRDGEAGRAGAAPVAPEKQATELALLQRQHALLQEELRRCRRLGEERATEAGSLEARLRESEQARALLEREAEEARRQLAALGQTEPLPAEAPWARRPVDPRRRSLPAGDALYLSFNPPQPSRGTDRLDLPVTTRSVHRNFEDRERQELGSPEERLQDSSDPDTGSEEEGSSRLSPPHSPRDFTRMQDIPEETESRDGEAVASES

SEQ ID NO: 4560 - protein, 292 aa, Homo sapiens
MGNELFLAFTTSHLPLAEQKLARYKLRIVKPPKLPLEKKPNPDKDGPDYEPNLWMWVNPNIVYPPGKLEVSGRRKREDLTSTLPSSQPPQKEEDASCSEAAGVESLSQSSSKRSPPRKRFAFSPSTWELTEEEEAEDQEDSSSMALPSPHKRAPLQSRRLRQASSQAGRLWSRPPLNYFHLIALALRNSSPCGLNVQQIYSFTRKHFPFFRTAPEGWKNTVRHNLCFRDSFEKVPVSMQGGASTRPRSCLWKLTEEGHRRFAEEARALASTRLESIQQCMSQPDVMPFLFDL

SEQ ID NO: 4561 - protein, 622 aa, Homo sapiens
MAMMVFPREEKLSQDEIVLGTKAVIQGLETLRGEHRALLAPLVAPEAGEAEPGSQERCILLRRSLEAIELGLGEAQVILALSSHLGAVESEKQKLRAQVRRLVQENQWLREELAGTQQKLQRSEQAVAQLEEEKQHLLFMSQIRKLDEDASPNEEKGDVPKDTLDDLFPNEDEQSPAPSPGGGDVSGQHGGYEIPARLRTLHNLVIQYASQGRYEVAVPLCKQALEDLEKTSGHDHPDVATMLNILALVYRDQNKYKEAAHLLNDALAIREKTLGKDHPAVAATLNNLAVLYGKRGKYKEAEPLCKRALEIREKVLGKFHPDVAKQLSNLALLCQNQGKAEEVEYYYRRALEIYATRLGPDDPNVAKTKNNLASCYLKQGKYQDAETLYKEILTRAHEKEFGSVNGDNKPIWMHAEEREESKDKRRDSAPYGEYGSWYKACKVDSPTVNTTLRSLGALYRRQGKLEAAHTLEDCASRNRKQGLDPASQTKVVELLKDGSGRRGDRRSSRDMAGGAGPRSESDLEDVGPTAEWNGDGSGSLRRSGSFGKLRDALRRSSEMLVKKLQGGTPQEPPNPRMKRASSLNFLNKSVEEPTQPGGTGLSDSRTLSSSSMDLSRRSSLVG

SEQ ID NO: 4562 - protein, 843 aa, Homo sapiens
MPRGAFRPCLPALYFAFLTCPTPEQRMSGTQAPDIHLGEPARGTGCVRGKQTSIRVQDCGRREEARAASRELRREKAQEHPRESWAHPQPYPAPQPLALRPETQPCPACRSSPPGRLLLRPALPGHPFLLPIMAVYRLCVTTGPYLRAGTLDNISVTLVGTCGESPKQRLDRMGRDFAPGSVQKYKVRCTAELGELLLLRVHKERYAFFRKDSWYCSRICVTEPDGSVSHFPCYQWIEGYCTVELRPGTARTICQDSLPLLLDHRTRELRARQECYRWKIYAPGFPCMVDVNSFQEMESDKKFALTKTTTCVDQGDSSGNRYLPGFPMKIDIPSLMYMEPNVRYSATKTISLLFNAIPASLGMKLRGLLDRKGSWKKLDDMQNIFWCHKTFTTKYVTEHWCEDHFFGYQYLNGVNPVMLHCISSLPSKLPVTNDMVAPLLGQDTCLQTELERGNIFLADYWILAEAPTHCLNGRQQYVAAPLCLLWLSPQGALVPLAIQLSQTPGPDSPIFLPTDSEWDWLLAKTWVRNSEFLVHENNTHFLCTHLLCEAFAMATLRQLPLCHPIYKLLLPHTRYTLQVNTIARATLLNPEGLVDQVTSIGRQGLIYLMSTGLAHFTYTNFCLPDSLRARGVLAIPNYHYRDDGLKIWAAIESFVSEIVGYYYPSDASVQQDSELQAWTGEIFAQAFLGRESSGFPSRLCTPGEMVKFLTAIIFNCSAQHAAVNSGQHDFGAWMPNAPSSMRQPPPQTKGTTTLKTYLDTLPEVNISCNNLLLFWLVSQEPKDQRPLGTYPDEHFTEEAPRRSIAAFQSRLAQISRDIQERNQGLALPYTYLDPPLIENSVSI

SEQ ID NO: 4563 - protein, 496 aa, Homo sapiens
MWQIVFFTLSCDLVLAAAYNNFRKSMDSIGKKQYQVQHGSCSYTFLLPEMDNCRSSSSPYVSNAVQRDAPLEYDDSVQRLQVLENIMENNTQWLMKLENYIQDNMKKEMVEIQQNAVQNQTAVMIEIGTNLLNQTAEQTRKLTDVEAQVLNQTTRLELQLLEHSLSTNKLEKQILDQTSEINKLQDKNSFLEKKVLAMEDKHIIQLQSIKEEKDQLQVLVSKQNSIIEELEKKIVTATVNNSVLQKQQHDLMETVNNLLTMMSTSNSAKDPTVAKEEQISFRDCAEVFKSGHTTNGIYTLTFPNSTEEIKAYCDMEAGGGGWTIIQRREDGSVDFQRTWKEYKVGFGNPSGEYWLGNEFVSQLTNQQRYVLKIHLKDWEGNEAYSLYEHFYLSSEELNYRIHLKGLTGTAGKISSISQPGNDFSTKDGDNDKCICKCSQMLTGGWWFDACGPSNLNGMYYPQRQNTNKFNGIKWYYWKGSGYSLKATTMMIRPADF

SEQ ID NO: 4564 - protein, 716 aa, Homo sapiens
MARMSFVIAACQLVLGLLMTSLTESSIQNSECPQLCVCEIRPWFTPQSTYREATTVDCNDLRLTRIPSNLSSDTQVLLLQSNNIAKTVDELQQLFNLTELDFSQNNFTNIKEVGLANLTQLTTLHLEENQITEMTDYCLQDLSNLQELYINHNQISTISAHAFAGLKNLLRLHLNSNKLKVIDSRWFDSTPNLEILMIGENPVIGILDMNFKPLANLRSLVLAGMYLTDIPGNALVGLDSLESLSFYDNKLVKVPQLALQKVPNLKFLDLNKNPIHKIQEGDFKNMLRLKELGINNMGELVSVDRYALDNLPELTKLEATNNPKLSYIHRLAFRSVPALESLMLNNNALNAIYQKTVESLPNLREISIHSNPLRCDCVIHWINSNKTNIRFMEPLSMFCAMPPEYKGHQVKEVLIQDSSEQCLPMISHDSFPNRLNVDIGTTVFLDCRAMAEPEPEIYWVTPIGNKITVETLSDKYKLSSEGTLEISNIQIEDSGRYTCVAQNVQGADTRVATIKVNGTLLDGTQVLKIYVKQTESHSILVSWKVNSNVMTSNLKWSSATMKIDNPHITYTARVPVDVHEYNLTHLQPSTDYEVCLTVSNIHQQTQKSCVNVTTKNAAFAVDISDQETSTALAAVMGSMFAVISLASIAVYFAKRFKRKNYHHSLKKYMQKTSSIPLNELYPPLINLWEGDSEKDKDGSADTKPTQVDTSRSYYMW

SEQ ID NO: 4565 - protein, 350 aa, Homo sapiens
MQRLGATLLCLLLAAAVPTAPAPAPTATSAPVKPGPALSYPQEEATLNEMFREVEELMEDTQHKLRSAVEEMEAEEAAAKASSEVNLANLPPSYHNETNTDTKVGNNTIHVHREIHKITNNQTGQMVFSETVITSVGDEEGRRSHECIIDEDCGPSMYCQFASFQYTCQPCRGQRMLCTRDSECCGDQLCVWGHCTKMATRGSNGTICDNQRDCQPGLCCAFQRGLLFPVCTPLPVEGELCHDPASRLLDLITWELEPDGALDRCPCASGLLCQPHSHSLVYVCKPTFVGSRDQDGEILLPREVPDEYEVGSFMEEVRQELEDLERSLTEEMALREPAAAAAALLGGEEI

SEQ ID NO: 4566 - protein, 861 aa, Homo sapiens
MELKRGKTFIKSSLQVSHEKPPDPAAVAAAREGTGPWSVLPGGQQRPHSEKGPQASPSAQEYDRCPNKGAQLDPKGGPAALCGATFKPVRKCKTHDSMSGAGRATAATGQLVGSASFPGSPGSRRMIDYRHFVPQMPFVPAVAKSIPRKRISLKRPKKCFRNLFHIRRNKTEDLASLAAEGKSLPSPGDPSDPGGRRSKAFLPPGEGPGLDGLCQDLLDSELLADASFGLCRALCEDVASLQSFDSLTGCGEVFADESSVPSLELNEGPESPTQAAQGLESKVPRGPLQGSVEQLASPAQNEASDFTRFWDSVNRSVRQQQRALLGPWLSGPQGTDRDQSRLDTAGLAELPLCPCRDPRSGSKASSIDTGTPKSEQPESVSTSDEGYYDSFSPGLEEDKKEAESPGTPAATFPRDSYSGDALYELFHDPSEGPLGPSPDDDLCVSESLSGPALGTPLSICSFRVGAEENLAPAPGPDLLSQGFLQSSWKGKECLLKLCDTELAITMGIVSWLRRGPTPRAPPTPGQPAAPPGSQGAPRAPTEKLGGREGLASDAGGATVCSAPSRQELWAHPGTTGLLAGESKALGGATQGTGTLSRDASREEETRGHSEGLFSSMESAATSTTDTSGKNKAPVPSTWPCSQKEPGPPGVLGCFRGPWRPGHGGDTLDAEPMLAGCVARVAALKISSNEQPPAAWPPRQDMGSGLFGQRWARGPDMLEQKQSSSSPSMTTIHGLPYSASTQDQRCRDRVQDLSWLRVEPTGLGVQAWASVEDQPLQLSTEAVEQVAHGSQLDSEPRSAPAARWSSQGHHPESLGLTLNSQQEGGVSASAPECRCSLLAREGLLCGQPEVGASGPAMAEPHL

SEQ ID NO: 4567 - protein, 109 aa, Homo sapiens
MNPALGNQTDVAGLFLANSSEALERAVRCCTQASVVTDDGFAEGGPDERSLYIMRVVQIAVMCVLSLTVVFGIFFLGCNLLIKSEGMINFLVKDRRPSKEVEAVVVGPY

SEQ ID NO: 4568 - protein, 553 aa, Homo sapiens
MRAPGRPALRPLPLPPLLLLLLAAPWGRAVPCVSGGLPKPANITFLSINMKNVLQWTPPEGLQGVKVTYTVQYFIYGQKKWLNKSECRNINRTYCDLSAETSDYEHQYYAKVKAIWGTKCSKWAESGRFYPFLETQIGPPEVALTTDEKSISVVLTAPEKWKRNPEDLPVSMQQIYSNLKYNVSVLNTKSNRTWSQCVTNHTLVLTWLEPNTLYCVHVESFVPGPPRRAQPSEKQCARTLKDQSSEFKAKIIFWYVLPVSITVFLFSVMGYSIYRYIHVGKEKHPANLILIYGNEFDKRFFVPAEKIVINFITLNISDDSKISHQDMSLLGKSSDVSSLNDPQPSGNLRPPQEEEEVKHLGYASHLMEIFCDSEENTEGTSLTQQESLSRTIPPDKTVIEYEYDVRTTDICAGPEEQELSLQEEVSTQGTLLESQAALAVLGPQTLQYSYTPQLQDLDPLAQEHTDSEEGPEEEPSTTLVDWDPQTGRLCIPSLSSFDQDSEGCEPSEGDGLGEEGLLSRLYEEPAPDRPPGENETYLMQFMEEWGLYVQMEN

SEQ ID NO: 4569 - protein, 781 aa, Homo sapiens
LWLLLWAAAWRLGASACPALCTCTGTTVDCHGTGLQAIPKNIPRNTERLELNGNNITRIHKNDFAGLKQLRVLQLMENQIGAVERGAFDDMKELERLRLNRNQLHMLPELLFQNNQALSRLDLSENAIQAIPRKAFRGATDLKNLQLDKNQISCIEEGAFRALRGLEVLTLNNNNITTIPVSSFNHMPKLRTFRLHSNHLFCDCHLAWLSQWLRQRPTIGLFTQCSGPASLRGLNVAEVQKSEFSCSGQGEAGRVPTCTLSSGSCPAMCTCSNGIVDCRGKGLTAIPANLPETMTEIRLELNGIKSIPPGAFSPYRKLRRICPLSFCSPCRDLSNNQIAEIAPDAFQGLRSLNSLVLYGNKITDLPRGVFGGLYTLQLLLLNANKINCIRPDAFQDLQNLSLLSLYDNKIQSLAKGTFTSLRAIQTLHLAQNPFICDCNLKWLADFLRTNPIETSGARCASPRRLANKRIGQIKSKKFRCSAKEQYFIPGTEDYQLNSECNSDVVCPHKCRCEANVVECSSLKLTKIPERIPQSTAELRLNNNEISILEATGMFKKLTHLKKINLSNNKVSEIEDGAFEGAASVSELHLTANQLESIRSGMFRGLDGLRTLMLRNNRISCIHNDSFTGLRNVRLLSLYDNQITTVSPGAFDTLQSLSTLNLLANPFNCNCQLAWLGGWLRKRKIVTGNPRCQNPDFLRQIPLQDVAFPDFRCEEGQEEGGCLPRPQCPQECACLDTVVRCSNKHLRALPKGIPKNVTELYLDGNQFTLVPGQLSTFKYLQL

SEQ ID NO: 4570 - protein, 658 aa, Homo sapiens
MEKASGRQSIALSTVETGTVNPGLELMEKEVEPEGSKRTDAQGHSLGDGLGPSTYQRRSRWPFSKARSFCKTHASLFKKILLGLLCLAYAAYLLAACILNFQRALALFVITCLVIFVLVHSFLKKLLGKKLTRCLKPFENSRLRLWTKWVFAGVSLVGLILWLALDTAQRPEQLIPFAGICMFILILFACSKHHSAVSWRTVFSGLGLQFVFGILVIRTDLGYTVFQWLGEQVQIFLNYTVAGSSFVFGDTLVKDVFAFQALPIIIFFGCVVSILYYLGLVQWVVQKVAWFLQITMGTTATETLAVAGNIFVGMTEAPLLIRPYLGDMTLSEIHAVMTGGFATISGTVLGAFIAFGVDASSLISASVMAAPCALASSKLAYPEVEESKFKSEEGVKLPRGKERNVLEAASNGAVDAIGLATNVAANLIAFLAVLAFINAALSWLGELVDIQGLTFQVICSYLLRPMVFMMGVEWTDCPMVAEMVGIKFFINEFVAYQQLSQYKNKRLSGMEEWIEGEKQWISVRAEIITTFSLCGFANLSSIGITLGGLTSIVPHRKSDLSKVVVRALFTGACVSLISACMAGILYVPRGAEADCVSFPNTSFTNRTYETYMCCRGLFQSTSLNGTNPPSFSGPWEDKEFSAMALTNCCGFYNNTVCA

SEQ ID NO: 4571 - protein, 427 aa, Homo sapiens
METLCLRASFWLALVGCVISDNPERYSTNLSNHVDDFTTFRGTELSFLVTTHQPTNLVLPSNGSMHNYCPQQTKITSAFKYINTVISCTIFIVGMVGNATLLRIIYQNKCMRNGPNALIASLALGDLIYVVIDLPINVFKLLAGRWPFDHNDFGVFLCKLFPFLQKSSVGITVLNLCALSVDRYRAVASWSRVQGIGIPLVTAIEIVSIWILSFILAIPEAIGFVMVPFEYRGEQHKTCMLNATSKFMEFYQDVKDWWLFGFYFCMPLVCTAIFYTLMTCEMLNRRNGSLRIALSEHLKQRREVAKTVFCLVVIFALCWFPLHLSRILKKTVYNEMDKNRCELLSFLLLMDYIGINLATMNSCINPIALYFVSKKFKNCFQSCLCCCCYQSKSLMTSVPMNGTSIQWKNHDQNNHNTDRSSHKDSMN

SEQ ID NO: 4572 - protein, 148 aa, Homo sapiens
MAESLRSPRRSLYKLVGSPPWKEAFRQRCLERMRNSRDRLLNRYRQAGSSGPGNSQNSFLVQEVMEEEWNALQSVENCPEDLAQLEELIDMAVLEEIQQELINQEQSIISEYEKSLQFDEKCLSIMLAEWEANPLICPVCTKPVILGL

SEQ ID NO: 4573 - protein, 370 aa, Homo sapiens
MEGVDLLGFLIITLNCNVTMVGKLWFVLTMLLRMLVIVLAGRPVYQDEQERFVCNTLQPGCANVCYDVFSPVSHLRFWLIQGVCVLLPSAVFSVYVLHRGATLAALGPRRCPDPREPASGQRRCPRPFGERGGLQVPDFSAGYIIHLLLRTLLEAAFGALHYFLFGFLAPKKFPCTRPPCTGVVDCYVSRPTEKSLLMLFLWAVSALSFLLGLADLVCSLRRRMRRRPGPPTSPSIRKQSGASGHAEGRRTDEEGGREEEGAPAPPGARAGGEGAGSPRRTSRVSGHTKIPDEDESEVTSSASEKLGRQPRGRPHREAAQDPRGSGSEEQPSAAPSRLAAPPSCSSLQPPDPPASSSGAPHLRARKSEWV

SEQ ID NO: 4574 - protein, 641 aa, Homo sapiens
MPPPLPLLLLTVLVVAAARPGCEFERNPAATCVDLQLRTCSDAAYNHTTFPNLLQHRSWEVVEASSEYILLSVLHQLLEGQCNPDLRLLGCAVLAPRCEGGWVRRPCRHICEGLREVCQPAFDAIDMAWPYFLDCHRYFTREDEGCYDPLEKLRGGLEADEALPSGLPPTFIRFSHHSYAQMVRVLRRTASRCAHVARTYSIGRSFDGRELLVIEFSSRPGQHELMEPEVKLIGNIHGNEVAGREMLIYLAQYLCSEYLLGNPRIQRLLNTTRIHLLPSMNPDGYEVAAAEGAGYNGWTSGRQNAQNLDLNRNFPDLTSEYYRLAETRGARSDHIPIPQHYWWGKVAPETKAIMKWMQTIPFVLSASLHGGDLVVSYPFDFSKHPQEEKMFSPTPDEKMFKLLSRAYADVHPMMMDRSENRCGGNFLKRGSIINGADWYSFTGGMSDFNYLHTNCFEITVELGCVKFPPEEALYILWQHNKESLLNFVETVHRGIKGVVTDKFGKPVKNARISVKGIRHDITTAPDGDYWRLLPPGIHIVIAQAPGYAKVIKKVIIPARMKRAGRVDFILQPLGMGPKNFIHGLRRTGPHDPLGGASSLGEATEPDPLRARRQPSADGSKPWWWSYFTSLSTHRPRWLLKY

SEQ ID NO: 4575 - protein, 1072 aa, Homo sapiens
MPGEEEERAFLVAREELASALRRDSGQAFSLEQLRPLLASSLPLAARYLQLDAARLVRCNAHGEPRNYLNTLSTALNILEKYGRNLLSPQRPRYWRGVKFNNPVFRSTVDAVQGGRDVLRLYGYTEEQPDGLSFPEGQEEPDEHQVATVTLEVLLLRTELSLLLQNTHPRQQALEQLLEDKVEDDMLQLSEFDPLLREIAPGPLTTPSVPGSTPGPCFLCGSAPGTLHCPSCKQALCPACDHLFHGHPSRAHHLRQTLPGVLQGTHLSPSLPASAQPRPQSTSLLALGDSSLSSPNPASAHLPWHCAACAMLNEPWAVLCVACDRPRGCKGLGLGTEGPQGTGGLEPDLARGRWACQSCTFENEAAAVLCSICERPRLAQPPSLVVDSRDAGICLQPLQQGDALLASAQSQVWYCIHCTFCNSSPGWVCVMCNRTSSPIPAQHAPRPYASSLEKGPPKPGPPRRLSAPLPSSCGDPEKQRQDKMREEGLQLVSMIREGEAAGACPEEIFSALQYSGTEVPLQWLRSELPYVLEMVAELAGQQDPGLGAFSCQEARRAWLDRHGNLDEAVEECVRTRRRKVQELQSLGFGPEEGSLQALFQHGGDVSRALTELQRQRLEPFRQRLWDSGPEPTPSWDGPDKQSLVRRLLAVYALPSWGRAELALSLLQETPRNYELGDVVEAVRHSQDRAFLRRLLAQECAVCGWALPHNRMQALTSCECTICPDCFRQHFTIALKEKHITDMVCPACGRPDLTDDTQLLSYFSTLDIQLRESLEPDAYALFHKKLTEGVLMRDPKFLWCAQCSFGFIYEREQLEATCPQCHQTFCVRCKRQWEEQHRGRSCEDFQNWKRMNDPEYQAQGLAMYLQENGIDCPKCKFSYALARGGCMHFHCTQCRHQFCSGCYNAFYAKNKCPEPNCRVKKSLHGHHPRDCLFYLRDWTALRLQKLLQDNNVMFNTEPPAGARAVPGGGCRVIEQKEVPNGLRDEACGKETPAGYAGLCQAHYKEYLVSLINAHSLDPATLYEVEELETATERYLHVRPQPLAGEDPPAYQARLLQKLTEEVPLGQSIPRRRK

SEQ ID NO: 4576 - protein, 335 aa, Homo sapiens
MAAPSGVHLLVRRGSHRIFSSPLNHIYLHKQSSSQQRRNFFFRRQRDISHSIVLPAAVSSAHPVPKHIKKPDYVTTGIVPDWGDSIEVKNEDQIQGLHQACQLARHVLLLAGKSLKVDMTTEEIDALVHREIISHNAYPSPLGYGGFPKSVCTSVNNVLCHGIPDSRPLQDGDIINIDVTVYYNGYHGDTSETFLVGNVDECGKKLVEVARRCRDEAIAACRAGAPFSVIGNTISHITHQNGFQVCPHFVGHGIGSYFHGHPEIWHHANDSDLPMEEGMAFTIEPIITEGSPEFKVLEDAWTVVSLDNQRSAQFEHTVLITSRGAQILTKLPHEA

SEQ ID NO: 4577 - protein, 732 aa, Homo sapiens
MDADKEKDLQKFLKNVDEISNLIQEMNSDDPVVQQKAVLETEKRLLLMEEDQEEDECRTTLNKTMISPPQTAMKSAEEINSEAFLASVEKDAKERAKRRRENKVLADALKEKGNEAFAEGNYETAILRYSEGLEKLKDMKVLYTNRAQAYMKLEDYEKALVDCEWALKCDEKCTKAYFHMGKANLALKNYSVSRECYKKILEINPKLQTQVKGYLNQVDLQEKADLQEKEAHELLDSGKNTAVTTKNLLETLSKPDQIPLFYAGGIEILTEMINECTEQTLFRMHNGFSIISDNEVIRRCFSTAGNDAVEEMVCVSVLKLWQAVCSRNEENQRVLVIHHDRARLLAALLSSKVLAIRQQSFALLLHLAQTESGRSLIINHLDLTRLLEALVSFLDFSDKEANTAMGLFTDLALEERFQVWFQANLPGVLPALTGVLKTDPKVSSSSALCQCIAIMGNLSAEPTTRRHMAACEEFGDGCLSLLARCEEDVDLFREVIYTLLGLMMNLCLQAPFVSEVWAVEVSRRCLSLLNSQDGGILTRAAGVLSRTLSSSLKIVEEALRAGVVKKMMKFLKTGGETASRYAIKILAICTNSYHEAREEVIRLDKKLSVMMKLLSSEDEVLVGNAALCLGNCMEVPNVASSLLKTDLLQVLLKLAGSDTQKTAVQVNAGIALGKLCTAEPRVPAESSHLQFGRESAAPEALSPRRWEEMFHMLVFSLSSVDPPPPPPQTCYP

SEQ ID NO: 4578 - protein, 779 aa, Homo sapiens
MAANGDSPPWSPALAAEGRGSSCEASVSFEDVTVDFSKEEWQHLDPAQRRLYWDVTLENYSHLLSVGYQIPKSEAAFKLEQGEGPWMLEGEAPHQSCSGEAIGKMQQQGIPGGIFFHCERFDQPIGEDSLCSILEELWQDNDQLEQRQENQNNLLSHVKVLIKERGYEHKNIEKIIHVTTKLVPSIKRLHNCDTILKHTLNSHNHNRNSATKNLGKIFGNGNNFPHSPSSTKNENAKTGANSCEHDHYEKHLSHKQAPTHHQKIHPEEKLYVCTECVMGFTQKSHLFEHQRIHAGEKSRECDKSNKVFPQKPQVDVHPSVYTGEKPYLCTQCGKVFTLKSNLITHQKIHTGQKPYKCSECGKAFFQRSDLFRHLRIHTGEKPYECSECGKGFSQNSDLSIHQKTHTGEKHYECNECGKAFTRKSALRMHQRIHTGEKPYVCADCGKAFIQKSHFNTHQRIHTGEKPYECSDCGKSFTKKSQLHVHQRIHTGEKPYICTECGKVFTHRTNLTTHQKTHTGEKPYMCAECGKAFTDQSNLIKHQKTHTGEKPYKCNGCGKAFIWKSRLKIHQKSHIGERHYECKDCGKAFIQKSTLSVHQRIHTGEKPYVCPECGKAFIQKSHFIAHHRIHTGEKPYECSDCGKCFTKKSQLRVHQKIHTGEKPNICAECGKAFTDRSNLITHQKIHTREKPYECGDCGKTFTWKSRLNIHQKSHTGERHYECSKCGKAFIQKATLSMHQIIHTGKKPYACTECQKAFTDRSNLIKHQKMHSGEKRYKASD

SEQ ID NO: 4579 - protein, 452 aa, Homo sapiens
MVSVNAPLGAPVESSYDTSPSEGTNLNAPNSLGVSALCAICGDRATGKHYGASSCDGCKGFFRRSVRKNHMYSCRFSRQCVVDKDKRNQCRYCRLKKCFRAGMKKEAVQNERDRISTRRSSYEDSSLPSINALLQAEVLSRQITSPVSGINGDIRAKKIASIADVCESMKEQLLVLVEWAKYIPAFCELPLDDQVALLRAHAGEHLLLGATKRSMVFKDVLLLGNDYIVPRHCPELAEMSRVSIRILDELVLPFQELQIDDNEYAYLKAIIFFDPDAKGLSDPGKIKRLRSQVQVSLEDYINDRQYDSRGRFGELLLLLPTLQSITWQMIEQIQFIKLFGMAKIDNLLQEMLLGGSPSDAPHAHHPLHPHLMQEHMGTNVIVANTMPTHLSNGQMCEWPRPRGQAATPETPQPSPPGGSGSEPYKLLPGAVATIVKPLSAIPQPTITKQEVI

SEQ ID NO: 4580 - protein, 577 aa, Homo sapiens
MLTPAFDLSQDPDFLTIAIRVPYARVSEFDVYFEGSDFKFYAKPYFLRLTLPGRIVENGSEQGSYDADKGIFTIRLPKETPGQHFEGLNMLTALLAPRKSRTAKPLVEEIGASEIPEEVVDDEEFDWEIEQTPCEEVSESALNPQCHYGFGNLRSGVLQRLQDELSDVIDIKDPDFTPAAERRQKRLAAELAKFDPDHYLADFFEDEAIEQILKYNPWWTDKYSKMMAFLEKSQEQENHATLVSFSEEEKYQLRKFVNKSYLLDKRACRQVCYSLIDILLAYCYETRVTEGEKNVESAWNIRKLSPTLCWFETWTNVHDIMVSFGRRVLCYPLYRHFKLVMKAYRDTIKILQLGKSAVLKCLLDIHKIFQENDPAYILNDLYISDYCVWIQKVKSKKLAALAEALKEVSLTKAQLGLELEELEAAALLVQEEETALKAAHSVSGQQTLCSSSEASDSEDSDSSVSSGNEDSGSDSEQDELKDSPSETVSSLQGPFLEESSAFLIVDGGVRRNTAIQESDASQGKPLASSWPLGVSGPLIEELGEQLKTTVQVSEPKGTTAVNRSNIQERDGCQTPNN

SEQ ID NO: 4581 - protein, 1051 aa, Homo sapiens
MGPGPSRAPRAPRLMLCALALMVAAGGCVVSAFNLDTRFLVVKEAGNPGSLFGYSVALHRQTERQQRYLLLAGAPRELAVPDGYTNRTGAVYLCPLTAHKDDCERMNITVKNDPGHHIIEDMWLGVTVASQGPAGRVLVCAHRYTQVLWSGSEDQRRMVGKCYVRGNDLELDSSDDWQTYHNEMCNSNTDYLETGMCQLGTSGGFTQNTVYFGAPGAYNWKGNSYMIQRKEWDLSEYSYKDPEDQGNLYIGYTMQVGSFILHPKNITIVTGAPRHRHMGAVFLLSQEAGGDLRRRQVLEGSQVGAYFGSAIALADLNNDGWQDLLVGAPYYFERKEEVGGAIYVFMNQAGTSFPAHPSLLLHGPSGSAFGLSVASIGDINQDGFQDIAVGAPFEGLGKVYIYHSSSKGLLRQPQQVIHGEKLGLPGLATFGYSLSGQMDVDENFYPDLLVGSLSDHIVLLRARPVINIVHKTLVPRPAVLDPALCTATSCVQVELCFAYNQSAGNPNYRRNITLAYTLEADRDRRPPRLRFAGSESAVFHGFFSMPEMRCQKLELLLMDNLRDKLRPIIISMNYSLPLRMPDRPRLGLRSLDAYPILNQAQALENHTEVQFQKECGPDNKCESNLQMRAAFVSEQQQKLSRLQYSRDVRKLLLSINVTNTRTSERSGEDAHEALLTLVVPPALLLSSVRPPGACQANETIFCELGNPFKRNQRMELLIAFEVIGVTLHTRDLQVQLQLSTSSHQDNLWPMILTLLVDYTLQTSLSMVNHRLQSFFGGTVMGESGMKTVEDVGSPLKYEFQVGPMGEGLVGLGTLVLGLEWPYEVSNGKWLLYPTEITVHGNGSWPCRPPGDLINPLNLTLSDPGDRPSSPQRRRRQLDPGGGQGPPPVTLAAAKKAKSETVLTCATGRAHCVWLECPIPDAPVVTNVTVKARVWNSTFIEDYRDFDRVRVNGWATLFLRTSIPTINMENKTTWFSVDIDSELVEELPAEIELWLVLVAVGAGLLLLGLIILLLWKCGFFKRARTRALYEAKRQKAEMKSQPSETERLTDDY

SEQ ID NO: 4582 - protein, 1163 aa, Homo sapiens
MMSFVQKGSWLLLALLHPTIILAQQEAVEGGCSHLGQSYADRDVWKPEPCQICVCDSGSVLCDDIICDDQELDCPNPEIPFGECCAVCPQPPTAPTRPPNGQGPQGPKGDPGPPGIPGRNGDPGIPGQPGSPGSPGPPGICESCPTGPQNYSPQYDSYDVKSGVAVGGLAGYPGPAGPPGPPGPPGTSGHPGSPGSPGYQGPPGEPGQAGPSGPPGPPGAIGPSGPAGKDGESGRPGRPGERGLPGPPGIKGPAGIPGFPGMKGHRGFDGRNGEKGETGAPGLKGENGLPGENGAPGPMGPRGAPGERGRPGLPGAAGARGNDGARGSDGQPGPPGPPGTAGFPGSPGAKGEVGPAGSPGSNGAPGQRGEPGPQGHAGAQGPPGPPGINGSPGGKGEMGPAGIPGAPGLMGARGPPGPAGANGAPGLRGGAGEPGKNGAKGEPGPRGERGEAGIPGVPGAKGEDGKDGSPGEPGANGLPGAAGERGAPGFRGPAGPNGIPGEKGPAGERGAPGPAGPRGAAGEPGRDGVPGGPGMRGMPGSPGGPGSDGKPGPPGSQGESGRPGPPGPSGPRGQPGVMGFPGPKGNDGAPGKNGERGGPGGPGPQGPPGKNGETGPQGPPGPTGPGGDKGDTGPPGPQGLQGLPGTGGPPGENGKPGEPGPKGDAGAPGAPGGKGDAGAPGERGPPGLAGAPGLRGGAGPPGPEGGKGAAGPPGPPGAAGTPGLQGMPGERGGLGSPGPKGDKGEPGGPGADGVPGKDGPRGPTGPIGPPGPAGQPGDKGEGGAPGLPGIAGPRGSPGERGETGPPGPAGFPGAPGQNGEPGGKGERGAPGEKGEGGPPGVAGPPGKDGTSGHPGPIGPPGPRGNRGERGSEGSPGHPGQPGPPGPPGAPGPCCGGVGAAAIAGIGGEKAGGFAPYYGDEPMDFKINTDEIMTSLKSVNGQIESLISPDGSRKNPARNCRDLKFCHPELKSGEYWVDPNQGCKLDAIKVFCNMETGETCISANPLNVPRKHWWTDSSAEKKHVWFGESMDGGFQFSYGNPELPEDVLDVHLAFLRLLSSRASQNITYHCKNSIAYMDQASGNVKKALKLMGSNEGEFKAEGNSKFTYTVLEDGCTKHTGEWSKTVFEYRTRKAVRLPIVDIAPYDIGGPDQEFGVDVGPVCFL

SEQ ID NO: 4583 - protein, 678 aa, Homo sapiens
MAWTARDRGALGLLLLGLCLCAAQRGPPGEQGPPGPPGPPGVPGIDGIDGDRGPKGPPGPPGPAGEPGKPGAPGKPGTPGADGLTGPDGSPGSIGSKGQKGEPGVPGSRGFPGRGIPGPPGPPGTAGLPGELGRVGPVGDPGRRGPPGPPGPPGPRGTIGFHDGDPLCPNACPPGRSGYPGLPGMRGHKGAKGEIGEPGRQGHKGEEGDQGELGEVGAQGPPGAQGLRGITGIVGDKGEKGARGLDGEPGPQGLPGAPGDQGQRGPPGEAGPKGDRGAEGARGIPGLPGPKGDTGLPGVDGRDGIPGMPGTKGEPGKPGPPGDAGLQGLPGVPGIPGAKGVAGEKGSTGAPGKPGQMGNSGKPGQQGPPGEVGPRGPQGLPGSRGELGPVGSPGLPGKLGSLGSPGLPGLPGPPGLPGMKGDRGVVGEPGPKGEQGASGEEGEAGERGELGDIGLPGPKGSAGNPGEPGLRGPEGSRGLPGVEGPRGPPGPRGVQGEQGATGLPGVQGPPGRAPTDQHIKQVCMRVIQEHFAEMAASLKRPDSGATGLPGRPGPPGPPGPPGENGFPGQMGIRGLPGIKGPPGALGLRGPKGDLGEKGERGPPGRGPNGLPGAIGLPGDPGPASYGRNGRDGERGPPGVAGIPGVPGPPGPPGLPGFCEPASCTMQAGQRAFNKGPDP

SEQ ID NO: 4584 - protein, 210 aa, Homo sapiens
MVADIKGNEQIEKYSWREACDTGSSRMDRKHGKYILNVEHSENQPPITHPNDQEAHSSICWCLPSNDITSDVSPNLTGVCVNPGILAHSRCLQSESCNTQVKEYCRNDWSMWKVFLACLLACVIMTAIGVLIICLVNNKGSANSSIVIQLSTNDGECVTVKPGTPSPACPPTMTTTSTVPASTATESTTSTATAATTSTEPITVAPTDHL

SEQ ID NO: 4585 - protein, 1849 aa, Homo sapiens
MDHTASQNAQDLIGIPHLGVSGSSTKWHSELSPTEGPHSAGSSTPGFLSPMAELSHPSPPPPALGSLLQLPDGSPSWSMLEVASGPASTQQIKAGVPGRVHNGVSLPTFKNTETATHEAEPPLFQTAESGAIEMTSRKLASATANDSANPLHLSAAPENSRGPALSAEHTSSLVPSLHITTLGQEQAILSGAVPASPSTGTADFPSILTFLQPTENHASPSPVPEMPTLPAEGSDGSPPATRDLLLSSKVPNLLSTSWTFPRWKKDSVTAILGKNEEANVTIPLQAFPRKEVLSLHTVNGFVSDFSTGSVSSPIITAPRTNPLPSGPPLPSILSIQATQTVFPSLGFSSTKPEAYAAAVDHSGLPASASKQVRASPSSMDVYDSLTIGDMKKPATTDVFWSSLSAETGSLSTESIISGLQQQTNYDLNGHTISTTSWETHLAPTAPPNGLTSAADAIKSQDFKDTAGHSVTAEGFSIQDLVLGTSIEQPVQQSDMTMVGSHIDLWPTSNNNHSRDFQTAEVAYYSPTTRHSVSHPQLQLPNQPAHPLLLTSPGPTSTGSLQEMLSDGTDTGSEISSDINSSPERNASTPFQNILGYHSAAESSISTSVFPRTSSRVLRASQHPKKWTADTVSSKVQPTAAAAVTLFLRKSSPPALSAALVAKGTSSSPLAVASGPAKSSSMTTLAKNVTNKAASGPKRTPGAVHTAFPFTPTYMYARTGHTTSTHTAMQGNMDTASGLLSTTYLPRKPQAMHTGLPNPTNLEMPRASTPRPLTVTAALTSITASVKATRLPPLRAENTDAVLPAASAAVVTTGKMASNLECQMSSKLLVKTVLFLTQRRVQISESLKFSIAKGLTQALRKAFHQNDVSAHVDILEYSHNVTVGYYATKGKLVYLPAVVIEMLGVYGVSNVTADLKQHTPHLQSVAVLASPWNPQPAGYFQLKTVLQFVSQADNIQSCKFAQTMEQRLQKAFQDAERKVLNTKSNLTIQIVSTSNASQAVTLVYVVGNQSTFLNGTVASSLLSQLSAELVGFYLTYPPLTIAEPLEYPNLDISETTRDYWVITVLQGVDNSLVGLHNQSFARVMEQRLAQLFMMSQQQGRRFKRATTLGSYTVQMVKMQRVPGPKDPAELTYYTLYNGKPLLGTAAAKILSTIDSQRMALTLHHVVLLQADPVVKNPPNNLWIIAAVLAPIAVVTVIIIIITAVLCRKNKNDFKPDTMINLPQRAKPVQGFDYAKQHLGQQGADEEVIPVTQETVVLPLPIRDAPQERDVAQDGSTIKTAKSTETRKSRSPSENGSVISNESGKPSSGRRSPQNVMAQQKVTKEEARKRNVPASDEEEGAVLFDNSSKVAAEPFDTSSGSVQLIAIKPTALPMVPPTSDRSQESSAVLNGEVNKALKQKSDIEHYRNKLRLKAKRKGYYDFPAVETSKGLTERKKMYEKAPKEMEHVLDPDSELCAPFTESKNRQQMKNSVYRSRQSLNSPSPGETEMDLLVTRERPRRGIRNSGYDTEPEIIEETNIDRVPEPRGYSRSRQVKGHSETSTLSSQPSIDEVRQQMHMLLEEAFSLASAGHAGQSRHQEAYGSAQHLPYSEVVTSAPGTMTRPRAGVQWVPTYRPEMYQYSLPRPAYRFSQLPEMVMGSPPPPVPPRTGPVAVASLRRSTSDIGSKTRMAESTGPEPAQLHDSASFTQMSRGPVSVTQLDQSALNYSGNTVPAVFAIPAANRPGFTGYFIPTPPSSYRNQAWMSYAGENELPSQWADSVPLPGYIEAYPRSRYPQSSPSRLPRQYSQPANLHPSLEQAPAPSTAASQQSLAENDPSDAPLTNISTAALVKAIREEVAKLAKKQTDMFEFQV

SEQ ID NO: 4586 - protein, 958 aa, Homo sapiens
MKEAKDARYTNGHLFTTISVSGMTMCYACNKSITAKEALICPTCNVTIHNRCKDTLANCTKVKQKQQKAALLKNNTALQSVSLRSKTTIRERPSSAIYPSDSFRQSLLGSRRGRSSLSLAKSVSTTNIAGHFNDESPLGLRRILSQSTDSLNMRNRTLSVESLIDEEVIYSELMSDFEMDEKDFAADSWSLAVDSSFLQQHKKEVMKQQDVIYELIQTELHHVRTLKIMTRLFRTGMLEELHLEPGVVQGLFPCVDELSDIHTRFLSQLLERRRQALCPGSTRNFVIHRLGDLLISQFSGPSAEQMCKTYSEFCSRHSKALKLYKELYARDKRFQQFIRKVTRPAVLKRHGVQECILLVTQRITKYPLLISRILQHSHGIEEERQDLTTALGLVKELLSNVDEGIYQLEKGARLQEIYNRMDPRAQTPVPGKGPFGREELLRRKLIHDGCLLWKTATGRFKDVLVLLMTDVLVFLQEKDQKYIFPTLDKPSVVSLQNLIVRDIANQEKGMFLISAAPPEMYEVHTASRDDRSTWIRVIQQSVRTCPSREDFPLIETEDEAYLRRIKMELQQKDRALVELLREKVGLFAEMTHFQAEEDGGSGMALPTLPRGLFRSESLESPRGERLLQDAIREVEGLKDLLVGPGVELLLTPREPALPLEPDSGGNTSPGVTANGEARTFNGSIELCRADSDSSQRDRNGNQLRSPQEEALQRLVNLYGLLHGLQAAVAQQDTLMEARFPEGPERREKLCRANSRDGEAGRAGAAPVAPEKQATELALLQRQHALLQEELRRCRRLGEERATEAGSLEARLRESEQARALLEREAEEARRQLAALGQTEPLPAEAPWARRPVDPRRRSLPAGDALYLSFNPPQPSRGTDRLDLPVTTRSVHRNFEDRERQELGSPEERLQDSSDPDTGSEEEGSSRLSPPHSPRDFTRMQDIPEETESRDGEAVASES

SEQ ID NO: 4587 - protein, 521 aa, Homo sapiens
MLPRRPLAWPAWLLRGAPGAAGSWGRPVGPLARRGCCSAPGTPEVPLTRERYPVRRLPFSTVSKQDLAAFERIVPGGVVTDPEALQAPNVDWLRTLRGCSKVLLRPRTSEEVSHILRHCHERNLAVNPQGGNTGMVGGSVPVFDEIILSTARMNRVLSFHSVSGILVCQAGCVLEELSRYVEERDFIMPLDLGAKGSCHIGGNVATNAGGLRFLRYGSLHGTVLGLEVVLADGTVLDCLTSLRKDNTGYDLKQLFIGSEGTLGIITTVSILCPPKPRAVNVAFLGCPGFAEVLQTFSTCKGMLGEILSAFEFMDAVCMQLVGRHLHLASPVQESPFYVLIETSGSNAGHDAEKLGHFLEHALGSGLVTDGTMATDQRKVKMLWALRERITEALSRDGYVYKYDLSLPVERLYDIVTDLRARLGPHAKHVVGYGHLGDGNLHLNVTAEAFSPSLLAALEPHVYEWTAGQQGSVSAEHGVGFRKRDVLGYSKPPGALQLMQQLKALLDPKGILNPYKTLPSQA

SEQ ID NO: 4588 - protein, 913 aa, Homo sapiens
MGDPDLLEVLAEEGEKVNKHIDYSFQMSEQSLSSRETSFLINEETMPAKRFNLFLRRRLMFQKNQQSKDSIFFRDGIRQIDFVLSYVDDVKKDAELKAERRKEFETNLRKTGLELEIEDKRDSEDGRTYFVKIHAPWEVLVTYAEVLGIKMPIKESDIPRPKHTPISYVLGPVRLPLSVKYPHPEYFTAQFSRHRQELFLIEDQATFFPSSSRNRIVYYILSRCPFGIEDGKKRFGIERLLNSNTYSSAYPLHDGQYWKPSEPPNPTNERYTLHQNWARFSYFYKEQPLDLIKNYYGEKIGIYFVFLGFYTEMLFFAAVVGLACFIYGLLSMEHNTSSTEICDPEIGGQMIMCPLCDQVCDYWRLNSTCLASKFSHLFDNESTVFFAIFMGIWVTLFLEFWKQRQARLEYEWDLVDFEEEQQQLQLRPEFEAMCKHRKLNAVTKEMEPYMPLYTRIPWYFLSGATVTLWMSLVVTSMVAVIVYRLSVFATFASFMESDASLKQVKSFLTPQITTSLTGSCLNFIVILILNFFYEKISAWITKMEIPRTYQEYESSLTLKMFLFQFVNFYSSCFYVAFFKGKFVGYPGKYTYLFNEWRSEECDPGGCLIELTTQLTIIMTGKQIFGNIKEAIYPLALNWWRRRKARTNSEKLYSRWEQDHDLESFGPLGLFYEYLETVTQFGFVTLFVASFPLAPLLALINNIVEIRVDAWKLTTQYRRTVASKAHSIGVWQDILYGMAVLSVATNAFIVAFTSDIIPRLVYYYAYSTNATQPMTGYVNNSLSVFLIADFPNHTAPSEKRDFITCRYRDYRYPPDDENKYFHNMQFWHVLAAKMTFIIVMEHVVFLVKFLLAWMIPDVPKDVVERIKREKLMTIKILHDFELNKLKENLGINSNEFAKHVMIEENKAQLAKSTL

SEQ ID NO: 4589 - protein, 507 aa, Homo sapiens
MRRLPRALLLQLRLALLVAAGAPEVLVSAPRSLVWGPGLQAAVVLPVRYFYLQAVNSEGQNLTRSPAGETPFKVVVKSLSPKELVRIHVPKPLDRNDGTFLMRYRMYETVDEGLKIEVLYGDEHVAQSPYILKGPVYHEYCECPEDPQAWQKTLSCPTKEPQIAKDFASFPSINLQQMLKEVPKRFGDERGAIVHYTILNNHVYRRSLGKYTDFKMFSDEILLSLTRKVLLPDLEFYVNLGDWPLEHRKVNGTPSPIPIISWCGSLDSRDVVLPTYDITHSMLEAMRGVTNDLLSIQGNTGPSWINKTERAFFRGRDSREERLQLVQLSKENPQLLDAGITGYFFFQEKEKELGKAKLMGFFDFFKYKYQVNVDGTVAAYRYPYLMLGDSLVLKQDSPYYEHFYMALEPWKHYVPIKRNLSDLLEKVKWAKENDEEAKKIAKEGQLMARDLLQPHRLYCYYYQVLQKYAERQSSKPEVRDGMELVPQPEDSTAICQCHRKKPSREEL

SEQ ID NO: 4590 - protein, 887 aa, Homo sapiens
MMSDEKNLGVSQKLVSPSRSTSSCSSKQGSRQDSWEVVEGLRGEMNYTQEPPVQKGFLLKKRKWPLKGWHKRFFYLDKGILKYAKSQTDIEREKLHGCIDVGLSVMSVKKSSKCIDLDTEEHIYHLKVKSEEVFDEWVSKLRHHRMYRQNEIAMFPHEVNHFFSGSTITDSSSGVFDSISSRKRSSISKQNLFQTGSNVSFSCGGETRVPLWLQSSEDMEKCSKDLAHCHAYLVEMSQLLQSMDVLHRTYSAPAINAIQGGSFESPKKEKRSHRRWRSRAIGKDAKGTLQVPKPFSGPVRLHSSNPNLSTLDFGEEKNYSDGSETSSEFSKMQEDLCHIAHKVYFTLRSAFNIMSAEREKLKQLMEQDASSSPSAQVIGLKNALSSALAQNTDLKERLRRIHAESLLLDSPAVAKSGDNLAEENSRDENRALVHQLSNESRLSITDSLSEFFDAQEVLLSPSSSENEISDDDSYVSDISDNLSLDNLSNDLDNERQTLGPVLDSGREAKSRRRTCLPAPCPSSSNISLWNILRNNIGKDLSKVAMPVELNEPLNTLQRLCEELEYSELLDKAAQIPSPLERMVYVAAFAISAYASSYYRAGSKPFNPVLGETYECIREDKGFQFFSEQVSHHPPISACHAESRNFVFWQDVRWKNKFWGKSMEIVPIGTTHVTLPVFGDHFEWNKVTSCIHNILSGQRWIEHYGEIVIKNLHDDSCYCKVNFIKAKYWSTNAHEIEGTVFDRSGKAVHRLFGKWHESIYCGGGSSSACVWRANPMPKGYEQYYSFTQFALELNEMDPSSKSLLPPTDTRFRPDQRFLEEGNLEEAEIQKQRIEQLQRERRRVLEENHVEHQPRFFRKSDDDSWVSNGTYLELRKDLGFSKLDHPVLW

SEQ ID NO: 4591 - protein, 326 aa, Homo sapiens
MEFLSEKFALKSPPSKNSDFYMGAGGPLEHVMETLDNESFYSKASAGKCVQAFGPLPRAEHHVRLERTSPCQDSSVNYGITKVEGQPLHTELNRAMDNCNSLRMSPVKGMQEKGELDELGDKCDSNVSSSKKRRHRTTFTSLQLEELEKVFQKTHYPDVYVREQLALRTELTEARVQVWFQNRRAKWRKRERYGQIQQAKSHFAATYDISVLPRTDSYPQIQNNLWAGNASGGSVVTSCMLPRDTSSCMTPYSHSPRTDSSYTGFSNHQNQFSHVPLNNFFTDSLLTGATNGHAFETKPEFERRSSSIAVLRMKAKEHTANISWAM

SEQ ID NO: 4592 - protein, 781 aa, Homo sapiens
MEPAPARSPRPQQDPARPQEPTMPPPETPSEGRQPSPSPSPTERAPASEEEFQFLRCQQCQAEAKCPKLLPCLHTLCSGCLEASGMQCPICQAPWPLGADTPALDNVFFESLQRRLSVYRQIVDAQAVCTRCKESADFWCFECEQLLCAKCFEAHQWFLKHEARPLAELRNQSVREFLDGTRKTNNIFCSNPNHRTPTLTSIYCRGCSKPLCCSCALLDSSHSELKCDISAEIQQRQEELDAMTQALQEQDSAFGAVHAQMHAAVGQLGRARAETEELIRERVRQVVAHVRAQERELLEAVDARYQRDYEEMASRLGRLDAVLQRIRTGSALVQRMKCYASDQEVLDMHGFLRQALCRLRQEEPQSLQAAVRTDGFDEFKVRLQDLSSCITQGKDAAVSKKASPEAASTPRDPIDVDLDVSNTTTAQKRKCSQTQCPRKVIKMESEEGKEARLARSSPEQPRPSTSKAVSPPHLDGPPSPRSPVIGSEVFLPNSNHVASGAGEAEERVVVISSSEDSDAENSCMEPMETAEPQSSPAHSSPAHSSPAHSSPVQSLLRAQGASSLPCGTYHPPAWPPHQPAEQAATPDAEPHSEPPDHQERPAVHRGIRYLLYRAQRAIRLRHALRLHPQLHRAPIRTWSPHVVQASTPAITGPLNHPANAQEHPAQLQRGISPPHRIRGAVRSRSRSLRGSSHLSQWLNNFFALPFSSMASQLDMSSVVGAGESRAQTLGAGVPPGDSVRGSMEASQVQVPLEASPITFPPPCAPERPPISPVPGARQAGL

SEQ ID NO: 4593 - protein, 3046 aa, Homo sapiens
MRGRRGRPPKQPAAPAAERCAPAPPPPPPPPTSGPIGGLRSRHRGSSRGRWAAAQAEVAPKTRLSSPRGGSSSRRKPPPPPPAPPSTSAPGRGGRGGGGGRTGGGGGGGHLARTTAARRAVNKVVYDDHESEEEEEEEDMVSEEEEEEDGDAEETQDSEDDEEDEMEEDDDDSDYPEEMEDDDDDASYCTESSFRSHSTYSSTPGRRKPRVHRPRSPILEEKDIPPLEFPKSSEDLMVPNEHIMNVIAIYEVLRNFGTVLRLSPFRFEDFCAALVSQEQCTLMAEMHVVLLKAVLREEDTSNTTFGPADLKDSVNSTLYFIDGMTWPEVLRVYCESDKEYHHVLPYQEAEDYPYGPVENKIKVLQFLVDQFLTTNIAREELMSEGVIQYDDHCRVCHKLGDLLCCETCSAVYHLECVKPPLEEVPEDEWQCEVCVAHKVPGVTDCVAEIQKNKPYIRHEPIGYDRSRRKYWFLNRRLIIEEDTENENEKKIWYYSTKVQLAELIDCLDKDYWEAELCKILEEMREEIHRHMDITEDLTNKARGSNKSFLAAANEEILESIRAKKGDIDNVKSPEETEKDKNETENDSKDAEKNREEFEDQSLEKDSDDKTPDDDPEQGKSEEPTEVGDKGNSVSANLGDNTTNATSEETSPSEGRSPVGCLSETPDSSNMAEKKVASELPQDVPEEPNKTCESSNTSATTTSIQPNLENSNSSSELNSSQSESAKAADDPENGERESHTPVSIQEEIVGDFKSEKSNGELSESPGAGKGASGSTRIITRLRNPDSKLSQLKSQQVAAAAHEANKLFKEGKEVLVVNSQGEISRLSTKKEVIMKGNINNYFKLGQEGKYRVYHNQYSTNSFALNKHQHREDHDKRRHLAHKFCLTPAGEFKWNGSVHGSKVLTISTLRLTITQLENNIPSSFLHPNWASHRANWIKAVQMCSKPREFALALAILECAVKPVVMLPIWRESLGHTRLHRMTSIEREEKEKVKKKEKKQEEEETMQQATWVKYTFPVKHQVWKQKGEEYRVTGYGGWSWISKTHVYRFVPKLPGNTNVNYRKSLEGTKNNMDENMDESDKRKCSRSPKKIKIEPDSEKDEVKGSDAAKGADQNEMDISKITEKKDQDVKELLDSDSDKPCKEEPMEVDDDMKTESHVNCQESSQVDVVNVSEGFHLRTSYKKKTKSSKLDGLLERRIKQFTLEEKQRLEKIKLEGGIKGIGKTSTNSSKNLSESPVITKAKEGCQSDSMRQEQSPNANNDQPEDLIQGCSESDSSVLRMSDPSHTTNKLYPKDRVLDDVSIRSPETKCPKQNSIENDIEEKVSDLASRGQEPSKSKTKGNDFFIDDSKLASADDIGTLICKNKKPLIQEESDTIVSSSKSALHSSVPKSTNDRDATPLSRAMDFEGKLGCDSESNSTLENSSDTVSIQDSSEEDMIVQNSNESISEQFRTREQDVEVLEPLKCELVSGESTGNCEDRLPVKGTEANGKKPSQQKKLEERPVNKCSDQIKLKNTTDKKNNENRESEKKGQRTSTFQINGKDNKPKIYLKGECLKEISESRVVSGNVEPKVNNINKIIPENDIKSLTVKESAIRPFINGDVIMEDFNERNSSETKSHLLSSSDAEGNYRDSLETLPSTKESDSTQTTTPSASCPESNSVNQVEDMEIETSEVKKVTSSPITSEEESNLSNDFIDENGLPINKNENVNGESKRKTVITEVTTMTSTVATESKTVIKVEKGDKQTVVSSTENCAKSTVTTTTTTVTKLSTPSTGGSVDIISVKEQSKTVVTTTVTDSLTTTGGTLVTSMTVSKEYSTRDKVKLMKFSRPKKTRSGTALPSYRKFVTKSSKKSIFVLPNDDLKKLARKGGIREVPYFNYNAKPALDIWPYPSPRPTFGITWRYRLQTVKSLAGVSLMLRLLWASLRWDDMAAKAPPGGGTTRTETSETEITTTEIIKRRDVGPYGIRSEYCIRKIICPIGVPETPKETPTPQRKGLRSSALRPKRPETPKQTGPVIIETWVAEEELELWEIRAFAERVEKEKAQAVEQQAKKRLEQQKPTVIATSTTSPTSSTTSTISPAQKVMVAPISGSVTTGTKMVLTTKVGSPATVTFQQNKNFHQTFATWVKQGQSNSGVVQVQQKVLGIIPSSTGTSQQTFTSFQPRTATVTIRPNTSGSGGTTSNSQVITGPQIRPGMTVIRTPLQQSTLGKAIIRTPVMVQPGAPQQVMTQIIRGQPVSTAVSAPNTVSSTPGQKSLTSATSTSNIQSSASQPPRPQQGQVKLTMAQLTQLTQGHGGNQGLTVVIQGQGQTTGQLQLIPQGVTVLPGPGQQLMQAAMPNGTVQRFLFTPLATTATTASTTTTTVSTTAAGTGEQRQSKLSPQMQVHQDKTLPPAQSSSVGPAEAQPQTAQPSAQPQPQTQPQSPAQPEVQTQPEVQTQTTVSSHVPSEAQPTHAQSSKPQVAAQSQPQSNVQGQSPVRVQSPSQTRIRPSTPSQLSPGQQSQVQTTTSQPIPIQPHTSLQIPSQGQPQSQPQVQSSTQTLSSGQTLNQVTVSSPSRPQLQIQQPQPQVIAVPQLQQQVQVLSQIQSQVVAQIQAQQSGVPQQIKLQLPIQIQQSSAVQTHQIQNVVTVQAASVQEQLQRVQQLRDQQQKKKQQQIEIKREHTLQASNQSEIIQKQVVMKHNAVIEHLKQKKSMTPAEREENQRMIVCNQVMKYILDKIDKEEKQAAKKRKREESVEQKRSKQNATKLSALLFKHKEQLRAEILKKRALLDKDLQIEVQEELKRDLKIKKEKDLMQLAQATAVAAPCPPVTPAPPAPPAPPPSPPPPPAVQHTGLLSTPTLPAASQKRKREEEKDSSSKSKKKKMISTTSKETKKDTKLYCICKTPYDESKFYIGCDRCQNWYHGRCVGILQSEAELIDEYVCPQCQSTEDAMTVLTPLTEKDYEGLKRVLRSLQAHKMAWPFLEPVDPNDAPDYYGVIKEPMDLATMEERVQRRYYEKLTEFVADMTKIFDNCRYYNPSDSPFYQCAEVLESFFVQKLKGFKASRSHNNKLQSTAS

SEQ ID NO: 4594 - protein, 2113 aa, Homo sapiens
MTGAGEPRREEPPPQPSAGLRSRESGAPSAGGWERAERGRGAAARPATGPPPRRIGPLYGMWLVTFLLLLDSLHKARPEDVGTSLYFVNDSLQQVTFSSSVGVVVPCPAAGSPSAALRWYLATGDDIYDVPHIRHVHANGTLQLYPFSPSAFNSFIHDNDYFCTAENAAGKIRSPNIRVKAVFREPYTVRVEDQRSMRGNVAVFKCLIPSSVQEYVSVVSWEKDTVSIIPEHRFFITYHGGLYISDVQKEDALSTYRCITKHKYSGETRQSNGARLSVTDPAESIPTILDGFHSQEVWAGHTVELPCTASGYPIPAIRWLKDGRPLPADSRWTKRITGLTISDLRTEDSGTYICEVTNTFGSAEATGILMVIDPLHVTLTPKKLKTGIGSTVILSCALTGSPEFTIRWYRNTELVLPDEAISIRGLSNETLLITSAQKSHSGAYQCFATRKAQTAQDFAIIALEDGTPRIVSSFSEKVVNPGEQFSLMCAAKGAPPPTVTWALDDEPIVRDGSHRTNQYTMSDGTTISHMNVTGPQIRDGGVYRCTARNLVGSAEYQARINVRGPPSIRAMRNITAVAGRDTLINCRVIGYPYYSIKWYKDALLLPDNHRQVVFENGTLKLTDVQKGMDEGEYLCSVLIQPQLSISQSVHVAVKVPPLIQPFEFPPASIGQLLYIPCVVSSGDMPIRITWRKDGQVIISGSGVTIESKEFMSSLQISSVSLKHNGNYTCIASNAAATVSRERQLIVRVPPRFVVQPNNQDGIYGKAGVLNCSVDGYPPPKVMWKHAKGSGNPQQYHPVPLTGRIQILPNSSLLIRHVLEEDIGYYLCQASNGVGTDISKSMFLTVKIPAMITSHPNTTIAIKGHAKELNCTARGERPIIIRWEKGDTVIDPDRVMRYAIATKDNGDEVVSTLKLKPADRGDSVFFSCHAINSYGEDRGLIQLTVQEPPDPPELEIREVKARSMNLRWTQRFDGNSIITGFDIEYKNKSDSWDFKQSTRNISPTINQANIVDLHPASVYSIRMYSFNKIGRSEPSKELTISTEEAAPDGPPMDVTLQPVTSQSIQVTWKAPKKELQNGVIRGYQIGYRENSPGSNGQYSIVEMKATGDSEVYTLDNLKKFAQYGVVVQAFNRAGTGPSSSEINATTLEDVPSQPPENVRALSITSDVAVISWSEPPRSTLNGVLKGYRVIFWSLYVDGEWGEMQNITTTRERVELRGMEKFTNYSVQVLAYTQAGDGVRSSVLYIQTKEDVPGPPAGIKAVPSSASSVVVSWLPPTKPNGVIRKYTIFCSSPGSGQPAPSEYETSPEQLFYRIAHLNRGQQYLLWVAAVTSAGRGNSSEKVTIEPAGKAPAKIISFGGTVTTPWMKDVRLPCNSVGDPAPAVKWTKDSEDSAIPVSMDGHRLIHTNGTLLLRAVKAEDSGYYTCTATNTGGFDTIIVNLLVQVPPDQPRLTVSKTSASSITLTWIPGDNGGSSIRGFVLQYSVDNSEEWKDVFISSSERSFKLDSLKCGTWYKVKLAAKNSVGSGRISEIIEAKTHGREPSFSKDQHLFTHINSTHARLNLQGWNNGGCPITAIVLEYRPKGTWAWQGLRANSSGEVFLTELREATWYELRMRACNSAGCGNETAQFATLDYDGSTIPPIKSAQGEGDDVKKLFTIGCPVILATLGVALLFIVRKKRKEKRLKRLRDAKSLAEMLISKNNRSFDTPVKGPPQGPRLHIDIPRVQLLIEDKEGIKQLGDDKATIPVTDAEFSQAVNPQSFCTGVSLHHPTLIQSTGPLIDMSDIRPGTNPVSRKNVKSAHSTRNRYSSQWTLTKCQASTPARTLTSDWRTVGSQHGVTVTESDSYSASLSQDTDKGRNSMVSTESASSTYEELARAYEHAKLEEQLQHAKFEITECFISDSSSDQMTTGTNENADSMTSMSTPSEPGICRFTASPPKPQDADRGKNVAVPIPHRANKSDYCNLPLYAKSEAFFRKADGREPCPVVPPREASIRNLARTYHTQARHLTLDPASKSLGLPHPGAPAAASTATLPQRTLAMPAPPAGTAPPAPGPTPAEPPTAPSAAPPAPSTEPPRAGGPHTKMGGSRDSLLEMSTSGVGRSQKQGAGAYSKSYTLV

SEQ ID NO: 4595 - protein, 300 aa, Homo sapiens
MAESEDRSLRIVLVGKTGSGKSATANTILGEEIFDSRIAAQAVTKNCQKASREWQGRDLLVVDTPGLFDTKESLDTTCKEISRCIISSCPGPHAIVLVLLLGRYTEEEQKTVALIKAVFGKSAMKHMVILFTRKEELEGQSFHDFIADADVGLKSIVKECGNRCCAFSNSKKTSKAEKESQVQELVELIEKMVQCNEGAYFSDDIYKDTEERLKQREEVLRKIYTDQLNEEIKLVEEDKHKSEEEKEKEIKLLKLKYDEKIKNIREEAERNIFKDVFNRIWKMLSEIWHRFLSKCKFYSS

SEQ ID NO: 4596 - protein, 965 aa, Homo sapiens
VLMEHKATTIQKHVRGWMARRHFQRLRDAAIVIQCAFRMLKARRELKALRIEARSAEHLKRLNVGMENKVVQLQRKIDEQNKEFKTLSEQLSVTTSTYTMEVERLKKELVHYQQSPGEDTSLRLQEEVESLRTELQRAHSERKILEDAHSREKDELRKRVADLEQENALLKDEKEQLNNQILCQSKDEFAQNSVKENLMKKELEEERSRYQNLVKEYSQLEQRYDNLRDEMTIIKQTPGHRRNPSNQSSLESDSNYPSISTSEIGDTEDALQQVEEIGLEKAAMDMTVFLKLQKRVRELEQERKKLQVQLEKREQQDSKKVQAEPPQTDIDLDPNADLAYNSLKRQELESENKKLKNDLNELRKAVADQATQNNSSHGSPDSYSLLLNQLKLAHEELEVRKEEVLILRTQIVSADQRRLAGRNAEPNINARSSWPNSEKHVDQEDAIEAYHGVCQTNRLLEAQLQAQSLEHEEEVEHLKAQLEALKEEMDKQQQTFCQTLLLSPEAQVEFGVQQEISRLTNENLDLKELVEKLEKNERKLKKQLKIYMKKAQDLEAAQALAQSERKRHELNRQVTVQRKEKDFQGMLEYHKEDEALLIRNLVTDLKPQMLSGTVPCLPAYILYMCIRHADYTNDDLKVHSLLTSTINGIKKVLKKHNDDFEMTSFWLSNTCRLLHCLKQYSGDEGFMTQNTAKQNEHCLKNFDLTEYRQVLSDLSIQIYQQLIKIAEGVLQPMIVSAMLENESIQGLSGVKPTGYRKRSSSMADGDNSYCLEAIIRQMNAFHTVMCDQGLDPEIILQVFKQLFYMINAVTLNNLLLRKDVCSWSTGMQLRYNISQLEEWLRGRNLHQSGAVQTMEPLIQAAQLLQLKKKTQEDAEAICSLCTSLSTQQIVKILNLYTPLNEFEERVTVAFIRTIQAQLQERNDPQQLLLDAKHMFPVLFPFNPSSLTMDSIHIPACLNLEFLNEV

SEQ ID NO: 4597 - protein, 309 aa, Homo sapiens
MAMVERPRPEWASYHNCNSNSCQDLGNSVLLLLGLIICINISINIVTLLWSRFRGVLYQVFHDTICEKEAPKSSLLRKQTQPPKKQSSPAVHLRCTMDPVMMTVSPPPAHRHRRRGSPTRCAHCPVAWAPDTDDEKPHQYPAICSYHWDVPEDWEGFQHTQGTWVPWSQDAPESPPQTIRFQPTVEERPLKTGIWSELGLRAYVYPVNPPPPSPEAPSHKNGGEGAVPEAEAAQYQPVPAPTLGPAVIPEFSRHRSSGRIVYDARDMRRRLRELTREVEALSGCYPLASGSSTAEETSKNWVYRSLTGR

SEQ ID NO: 4598 - protein, 395 aa, Homo sapiens
MALPGYPLGNVDDSRSKDSPAGEPQGQVPLTADVLAVSSSVASTDWQDIDQASFKTATPRAISTSGDKDKSAVVPEHGQKTPRKITPLLPSQNPSPLQVSMSLQNPAWDRQVQDARTSQSLVVFPSHLLGKDKMSQMASVPEREPESAPSAPSAELQSTQHMEAQPVESDADHVTAGANGQHGPQAASTTKSAEEKAEHPKAPHPEAEALPSDESPVAMGANVVDSLGDLQTWFFPPPPAGSVSPSPGPHEVALGRRPLDSSLYTASEENSYMRSMTSLLDRGEGSISSLADILVWSETTMGMAIATGFLDSGHSTVADLLHSSGPSLRSVPSLVGSVSSAFSSGLVSGTSSALRTITRVLETVEQRTVEGIRSAMRYLTSHLTPRQAQADPNYD

SEQ ID NO: 4599 - protein, 885 aa, Homo sapiens
MSHPDYRMNLRPLGTPRGVSAVAGPHDIGASPGDKKSKNRSTRGKKKSIFETYMSKEDVSEGLKRGTLIQGVLRINPKKFHEAFIPSPDGDRDIFIDGVVARNRALNGDLVVVKLLPEEHWKVVKPESNDKETEAAYESDIPEELCGHHLPQQSLKSYNDSPDVIVEAQFDGSDSEDGHGITQNVLVDGVKKLSVCVSEKGREDGDAPVTKDETTCISQDTRALSEKSLQRSAKVVYILEKKHSRAATGFLKLLADKNSELFRKYALFSPSDHRVPRIYVPLKDCPQDFVARPKDYANTLFICRIVDWKEDCNFALGQLAKSLGQAGEIEPETEGILTEYGVDFSDFSSEVLECLPQGLPWTIPPEEFSKRRDLRKDCIFTIDPSTARDLDDALSCKPLADGNFKVGVHIADVSYFVPEGSDLDKVAAERATSVYLVQKVVPMLPRLLCEELCSLNPMSDKLTFSVIWTLTPEGKILDEWFGRTIIRSCTKLSYEHAQSMIESPTEKIPAKELPPISPEHSSEEVHQAVLNLHGIAKQLRQQRFVDGALRLDQLKLAFTLDHETGLPQGCHIYEYRESNKLVEEFMLLANMAVAHKIHRAFPEQALLRRHPPPQTRMLSDLVEFCDQMGLPVDFSSAGALNKSLTQTFGDDKYSLARKEVLTNMCSRPMQMALYFCSGLLQDPAQFRHYALNVPLYTHFTSPIRRFADVLVHRLLAAALGYRERLDMAPDTLQKQADHCNDRRMASKRVQELSTSLFFAVLVKESGPLESEAMVMGILKQAFDVLVLRYGVQKRIYCNALALRSHHFQKVGKKPELTLVWEPEDMEQEPAQQVITIFSLVEVVLQAESTALKYSAILKRPGTQGHLGPEKEEEESDGEPEDSSTS

SEQ ID NO: 4600 - protein, 527 aa, Homo sapiens
MATTATCTRFTDDYQLFEELGKGAFSVVRRCVKKTSTQEYAAKIINTKKLSARDHQKLEREARICRLLKHPNIVRLHDSISEEGFHYLVFDLVTGGELFEDIVAREYYSEADASHCIHQILESVNHIHQHDIVHRDLKPENLLLASKCKGAAVKLADFGLAIEVQGEQQAWFGFAGTPGYLSPEVLRKDPYGKPVDIWACGVILYILLVGYPPFWDEDQHKLYQQIKAGAYDFPSPEWDTVTPEAKNLINQMLTINPAKRITADQALKHPWVCQRSTVASMMHRQETVECLRKFNARRKLKGAILTTMLVSRNFSVGRQSSAPASPAASAAGLAGQAAKSLLNKKSDGGVKKRKSSSSVHLMEPQTTVVHNATDGIKGSTESCNTTTEDEDLKVRKQEIIKITEQLIEAINNGDFEAYTKICDPGLTSFEPEALGNLVEGMDFHKFYFENLLSKNSKPIHTTILNPHVHVIGEDAACIAYIRLTQYIDGQGRPRTSQSEETRVWHRRDGKWLNVHYHCSGAPAAPLQ

SEQ ID NO: 4601 - protein, 505 aa, Homo sapiens
MGSGPLSLPLALSPPRLLLLLLLSLLPVARASEAEHRLFERLFEDYNEIIRPVANVSDPVIIHFEVSMSQLVKVDEVNQIMETNLWLKQIWNDYKLKWNPSDYGGAEFMRVPAQKIWKPDIVLYNNAVGDFQVDDKTKALLKYTGEVTWIPPAIFKSSCKIDVTYFPFDYQNCTMKFGSWSYDKAKIDLVLIGSSMNLKDYWESGEWAIIKAPGYKHDIKYNCCEEIYPDITYSLYIRRLPLFYTINLIIPCLLISFLTVLVFYLPSDCGEKVTLCISVLLSLTVFLLVITETIPSTSLVIPLIGEYLLFTMIFVTLSIVITVFVLNVHYRTPTTHTMPSWVKTVFLNLLPRVMFMTRPTSNEGNAQKPRPLYGAELSNLNCFSRAESKGCKEGYPCQDGMCGYCHHRRIKISNFSANLTRSSSSESVDAVLSLSALSPEIKEAIQSVKYIAENMKAQNEAKEIQDDWKYVAMVIDRIFLWVFTLVCILGTAGLFLQPLMAREDA

SEQ ID NO: 4602 - protein, 308 aa, Homo sapiens
MQPSGHRLRDVEHHPLLAENDNYDSSSSSSSEADVADRVWFIRDGCGMICAVMTWLLVAYADFVVTFVMLLPSKDFWYSVVNGVIFNCLAVLALSSHLRTMLTDPGAVPKGNATKEYMESLQLKPGEVIYKCPKCCCIKPERAHHCSICKRCIRKMDHHCPWVNNCVGEKNQRFFVLFTMYIALSSVHALILCGFQFISCVRGQWTECSDFSPPITVILLIFLCLEGLLFFTFTAVMFGTQIHSICNDETEIERLKSEKPTWERRLRWEGMKSVFGGPPSLLWMNPFVGFRFRRLPTRPRKGGPEFSV

SEQ ID NO: 4603 - protein, 643 aa, Homo sapiens
MAGLTAAAPRPGVLLLLLSILHPSRPGGVPGAIPGGVPGGVFYPGAGLGALGGGALGPGGKPLKPGLGAFPAVTFPGALVPGGVADAAAAYKAAKAGAGLGGVPGVGGLGVSAGAVVPQPGAGVKPGKVPGVGLPGVYPGGVLPGARFPGVGVLPGVPTGAGVKPKAPGVGPFGGPQPGVPLGYPIKAPKLPGYGPGGVAGAAGKAGYPTGTGVGPQAAAAAAAKAAAKFGAGAAGVLPGVGGAGVPGVPGAIPGIGGIAGVGTPAAAAAAAAAAKAAKYGAAAGLVPGGPGFGPGVVGVPGAGVPGVGVPGAGIPVVPGAGIPGAAVPGVVSPEAAAKAAAKAAKYGARPGVGVGGIPTYGVGAGGFPGFGVGVGAEAQAAAAAKAAKYGLVPGVGVAPGVGVAPGVGVAPGVGLAPGVGVAPGVGVAPGVGVAPGIGPGGVAAAAKSAAKVAAKAQLRAAAGLGAGIPGLGVGVGVPGLGVGAGVPGLGVGAGVPGFGAVPGALAAAKAAKYGAAVPGVLGGLGALGGVGIPGGVVGAGPAAAAAAAKAAAKAAQFGLVGAAGLGGLGVGGLGVPGVGGLGGIPPAAAAKAAKYGAAGLGGVLGGAGQFPLGGVAARPGFGLSPIFPGGACLGKACGRKRK

SEQ ID NO: 4604 - protein, 2569 aa, Homo sapiens
MRKHRHLPLVAVFCLFLSGFPTTHAQQQQAVIEVNKRDIVFLVDGSSALGLANFNAIRDFIAKVIQRLEIGQDLIQVAVAQYADTVRPEFYFNTHPTKREVITAVRKMKPLDGSALYTGSALDFVRNNLFTSSAGYRAAEGIPKLLVLITGGKSLDEISQPAQELKRSSIMAFAIGNKGADQAELEEIAFDSSLVFIPAEFRAAPLQGMLPGLLAPLRTLSGTPEESKRDILFLFDGSANLVGQFPVVRDFLYKIIDELNVKPEGTRIAVAQYSDDVKVESRFDEHQSKPEILNLVKRMKIKTGKALNLGYALDYAQRYIFVKSAGSRIEDGVLQFLVLLVAGRSSDRVDGPASNLKQSGVVPFIFQAKNADPAELEQIVLSPAFILAAESLPKIGDLHPQIVNLLKSVHNGAPAPVSGEKDVVFLLDGSEGVRSGFPLLKEFVQRVVESLDVGQDRVRVAVVQYSDRTRPEFYLNSYMNKQDVVNAVRQLTLLGGPTPNTGAALEFVLRNILVSSAGSRITEGVPQLLIVLTADRSGDDVRNPSVVVKRGGAVPIGIGIGNADITEMQTISFIPDFAVAIPTFRQLGTVQQVISERVTQLTREELSRLQPVLQPLPSPGVGGKRDVVFLIDGSQSAGPEFQYVRTLIERLVDYLDVGFDTTRVAVIQFSDDPKVEFLLNAHSSKDEVQNAVQRLRPKGGRQINVGNALEYVSRNIFKRPLGSRIEEGVPQFLVLISSGKSDDEVDDPAVELKQFGVAPFTIARNADQEELVKISLSPEYVFSVSTFRELPSLEQKLLTPITTLTSEQIQKLLASTRYPPPAVESDAADIVFLIDSSEGVRPDGFAHIRDFVSRIVRRLNIGPSKVRVGVVQFSNDVFPEFYLKTYRSQAPVLDAIRRLRLRGGSPLNTGKALEFVARNLFVKSAGSRIEDGVPQHLVLVLGGKSQDDVSRFAQVIRSSGIVSLGVGDRNIDRTELQTITNDPRLVFTVREFRELPNIEERIMNSFGPSAATPAPPGVDTPPPSRPEKKKADIVFLLDGSINFRRDSFQEVLRFVSEIVDTVYEDGDSIQVGLVQYNSDPTDEFFLKDFSTKRQIIDAINKVVYKGGRHANTKVGLEHLRVNHFVPEAGSRLDQRVPQIAFVITGGKSVEDAQDVSLALTQRGVKVFAVGVRNIDSEEVGKIASNSATAFRVGNVQELSELSEQVLETLHDAMHETLCPGVTDAAKACNLDVILGFDGSRDQNVFVAQKGFESKVDAILNRISQMHRVSCSGGRSPTVRVSVVANTPSGPVEAFDFDEYQPEMLEKFRNMRSQHPYVLTEDTLKVYLNKFRQSSPDSVKVVIHFTDGADGDLADLHRASENLRQEGVRALILVGLERVVNLERLMHLEFGRGFMYDRPLRLNLLDLDYELAEQLDNIAEKACCGVPCKCSGQRGDRGPIGSIGPKGIPGEDGYRGYPGDEGGPGERGPPGVNGTQGFQGCPGQRGVKGSRGFPGEKGEVGEIGLDGLDGEDGDKGLPGSSGEKGNPGRRGDKGPRGEKGERGDVGIRGDPGNPGQDSQERGPKGETGDLGPMGVPGRDGVPGGPGETGKNGGFGRRGPPGAKGNKGGPGQPGFEGEQGTRGAQGPAGPAGPPGLIGEQGISGPRGSGGAAGAPGERGRTGPLGRKGEPGEPGPKGGIGNRGPRGETGDDGRDGVGSEGRRGKKGERGFPGYPGPKGNPGEPGLNGTTGPKGIRGRRGNSGPPGIVGQKGDPGYPGPAGPKGNRGDSIDQCALIQSIKDKCPFHGPLECPVFPTELAFALDTSEGVNQDTFGRMRDVVLSIVNDLTIAESNCPRGARVAVVTYNNEVTTEIRFADSKRKSVLLDKIKNLQVALTSKQQSLETAMSFVARNTFKRVRNGFLMRKVAVFFSNTPTRASPQLREAVLKLSDAGITPLFLTRQEDRQLINALQINNTAVGHALVLPAGRDLTDFLENVLTCHVCLDICNIDPSCGFGSWRPSFRDRRAAGSDVDIDMAFILDSAETTTLFQFNEMKKYIAYLVRQLDMSPDPKASQHFARVAVVQHAPSESVDNASMPPVKVEFSLTDYGSKEKLVDFLSRGMTQLQGTRALGSAIEYTIENVFESAPNPRDLKIVVLMLTGEVPEQQLEEAQRVILQAKCKGYFFVVLGIGRKVNIKEVYTFASEPNDVFFKLVDKSTELNEEPLMRFGRLLPSFVSSENAFYLSPDIRKQCDWFQGDQPTKNLVKFGHKQVNVPNNVTSSPTSNPVTTTKPVTTTKPVTTTTKPVTTTTKPVTIINQPSVKPAAAKPAPAKPVAAKPVATKMATVRPPVAVKPATAAKPVAAKPAAVRPPAAAAAKPVATKPEVPRPQAAKPAATKPATTKPMVKMSREVQVFEITENSAKLHWERAEPPGPYFYDLTVTSAHDQSLVLKQNLTVTDRVIGGLLAGQTYHVAVVCYLRSQVRATYHGSFSTKKSQPPPPQPARSASSSTINLMVSTEPLALTETDICKLPKDEGTCRDFILKWYYDPNTKSCARFWYGGCGGNENKFGSQKECEKVCAPVLAKPGVISVMGT

SEQ ID NO: 4605 - protein, 427 aa, Homo sapiens
METTISEIHVENKDEKRSAEGSPGAERQKEKASMLCFKRRKKAAKALKPKAGSEAADVARKCPQEAGASDQPEPTRGAWASLKRLVTRRKRSESSKQQKPLEGEMQPAINAEDADLSKKKAKSRLKIPCIKFPRGPKRSNHSKIIEDSDCSIKVQEEAEILDIQTQTPLNDQATKAKSTQDLSEGISRKDGDEVCESNVSNSTTSGEKVISVELGLDNGHSAIQTGTLILEEIETIKEKQDVQPQQASPLETSETDHQQPVLSDVPPLPAIPDQQIVEEASNSTLESAPNGKDYESTEIVAEETKPKDTELSQESDFKENGITEEKSKSEESKRMEPIAIIITDTEISEFDVTKSKNVPKQFLISAENEQVGVFANDNGFEDRTSEQYETLLIETASSLVKNAIQLSIEQLVNEMASDDNKINNLLQ

SEQ ID NO: 4606 - protein, 585 aa, Homo sapiens
MGSLKEELLKAIWHAFTALDQDHSGKVSKSQLKVLSHNLCTVLKVPHDPVALEEHFRDDDEGPVSNQGYMPYLNRFILEKVQDNFDKIEFNRMCWTLCVKKNLTKNPLLITEEDAFKIWVIFNFLSEDKYPLIIVSEEIEYLLKKLTEAMGGGWQQEQFEHYKINFDDSKNGLSAWELIELIGNGQFSKGMDRQTVSMAINEVFNELILDVLKQGYMMKKGHRRKNWTERWFVLKPNIISYYVSEDLKDKKGDILLDENCCVESLPDKDGKKCLFLVKCFDKTFEISASDKKKKQEWIQAIHSTIHLLKLGSPPPHKEARQRRKELRKKQLAEQEELERQMKELQAANESKQQELEAVRKKLEEAASRAAEEEKKRLQTQVELQARFSTELEREKLIRQQMEEQVAQKSSELEQYLQRVRELEDMYLKLQEALEDERQARQDEETVRKLQARLLEEESSKRAELEKWHLEQQQAIQTTEAEKQELENQRVLKEQALQEAMEQLEQLELERKQALEQYEEVKKKLEMATNKTKSWKDKVAHHEGLIRLIEPGSKNPHLITNWGPAAFTEAELEEREKNWKEKKTTE

SEQ ID NO: 4607 - protein, 1062 aa, Homo sapiens
MLKPQPLQQPSQPQQPPPTQQAVARRPPGGTSPPNGGLPGPLATSAAPPGPPAAASPCLGPVAAAGSGLRRGAEGILAPQPPPPQQHQERPGAAAIGSARGQSTGKGPPQSPVFEGVYNNSRMLHFLTAVVGSTCDVKVKNGTTYEGIFKTLSSKFELAVDAVHRKASEPAGGPRREDIVDTMVFKPSDVMLVHFRNVDFNYATKDKFTDSAIAMNSKVNGEHKEKVLQRWEGGDSNSDDYDLESDMSNGWDPNEMFKFNEENYGVKTTYDSSLSSYTVPLEKDNSEEFRQRELRAAQLAREIESSPQYRLRIAMENDDGRTEEEKHSAVQRQGSGRESPSLASREGKYIPLPQRVREGPRGGVRCSSSRGGRPGLSSLPPRGPHHLDNSSPGPGSEARGINGGPSRMSPKAQRPLRGAKTLSSPSNRPSGETSVPPPPAVGRMYPPRSPKSAAPAPISASCPEPPIGSAVPTSSASIPVTSSVSDPGVGSISPASPKISLAPTDVKELSTKEPGRTLEPQELARIAGKVPGLQNEQKRFQLEELRKFGAQFKLQPSSSPENSLDPFPPRILKEEPKGKEKEVDGLLTSEPMGSPVSSKTESVSDKEDKPPLAPSGGTEGPEQPPPPCPSQTGSPPVGLIKGEDKDEGPVAEQVKKSTLNPNAKEFNPTKPLLSVNKSTSTPTSPGPRTHSTPSIPVLTAGQSGLYSPQYISYIPQIHMGPAVQAPQMYPYPVSNSVPGQQGKYRGAKGSLPPQRSDQHQPASAPPMMQAAAAAGPPLVAATPYSSYIPYNPQQFPGQPAMMQPMAHYPSQPVFAPMLQSNPRMLTSGSHPQAIVSSSTPQYPSAEQPTPQALYATVHQSYPHHATQLHAHQPQPATTPTGSQPQSQHAAPSPVQHQAGQAPHLGSGQPQQNLYHPGALTGTPPSLPPGPSAQSPQSSFPQPAAVYAIHHQQLPHGFTNMAHVTQAHVQTGITAAPPPHPGAPHPPQVMLLHPPQSHGGPPQGAVPQSGVPALSASTPSPYPYIGHPQGEQPGQAPGFPGGADDRIPPLPPPGELKIVLAAT

SEQ ID NO: 4608 - protein, 466 aa, Homo sapiens
MEPWPCSPGGGGGTRARHVIINVGGCRVRLAWAALARCPLARLERLRACRGHDDLLRVCDDYDVSRDEFFFDRSPCAFRAIVALLRAGKLRLLRGPCALAFRDELAYWGIDEARLERCCLRRLRRREEEAAEARAGPTERGAQGSPARALGPRGRLQRGRRRLRDVVDNPHSGLAGKLFACVSVSFVAVTAVGLCLSTMPDIRAEEERGECSPKCRSLFVLETVCVAWFSFEFLLRSLQAESKCAFLRAPLNIIDILALLPFYVSLLLGLAAGPGGTKLLERAGLVLRLLRALRVLYVMRLARHSLGLRSLGLTMRRCAREFGLLLLFLCVAMALFAPLVHLAERELGARRDFSSVPASYWWAVISMTTVGYGDMVPRSLPGQVVALSSILSGILLMAFPVTSIFHTFSRSYSELKEQQQRAASPEPALQEDSTHSATATEDSSQGPDSAGLADDSADALWVRAGR

SEQ ID NO: 4609 - protein, 1577 aa, Homo sapiens
MEAGSVVRAIFDFCPSVSEELPLFVGDIIEVLAVVDEFWLLGKKEDVTGQFPSSFVEIVTIPSLKEGERLFVCICEFTSQELDNLPLHRGDLVILDGIPTAGWLQGRSCWGARGFFPSSCVRELCLSSQSRQWHSQSALFQIPEYSMGQARALMGLSAQLDEELDFREGDVITIIGVPEPGWFEGELEGRRGIFPEGFVELLGPLRTVDESVSSGNQDDCIVNGEVDTPVGEEEIGPDEDEEEPGTYGVALYRFQALEPNELDFEVGDKIRILATLEDGWLEGSLKGRTGIFPYRFVKLCPDTRVEETMALPQEGSLARIPETSLDCLENTLGVEEQRHETSDHEAEEPDCIISEAPTSPLGHLTSEYDTDRNSYQDEDTAGGPPRSPGVEWEMPLATDSPTSDPTEVVNGISSQPQVPFHPNLQKSQYYSTVGGSHPHSEQYPDLLPLEARTRDYASLPPKRMYSQLKTLQKPVLPLYRGSSVSASRVVKPRQSSPQLHNLASYTKKHHTSSVYSISERLEMKPGPQAQGLVMEAATHSQGDGSTDLDSKLTQQLIEFEKSLAGPGTEPDKILRHFSIMDFNSEKDIVRGSSKLITEQELPERRKALRPPPPRPCTPVSTSPHLLVDQNLKPAPPLVVRPSRPAPLPPSAQQRTNAVSPKLLSRHRPTCETLEKEGPGHMGRSLDQTSPCPLVLVRIEEMERDLDMYSRAQEELNLMLEEKQDESSRAETLEDLKFCESNIESLNMELQQLREMTLLSSQSSSLVAPSGSVSAENPEQRMLEKRAKVIEELLQTERDYIRDLEMCIERIMVPMQQAQVPNIDFEGLFGNMQMVIKVSKQLLAALEISDAVGPVFLGHRDELEGTYKIYCQNHDEAIALLEIYEKDEKIQKHLQDSLADLKSLYNEWGCTNYINLGSFLIKPVQRVMRYPLLLMELLNSTPESHPDKVPLTNAVLAVKEINVNINEYKRRKDLVLKYRKGDEDSLMEKISKLNIHSIIKKSNRVSSHLKHLTGFAPQIKDEVFEETEKNFRMQERLIKSFIRDLSLYLQHIRESACVKVVAAVSMWDVCMERGHRDLEQFERVHRYISDQLFTNFKERTERLVISPLNQLLSMFTGPHKLVQKRFDKLLDFYNCTERAEKLKDKKTLEELQSARNNYEALNAQLLDELPKFHQYAQGLFTNCVHGYAEAHCDFVHQALEQLKPLLSLLKVAGREGNLIAIFHEEHSRVLQQLQVFTFFPESLPATKKPFERKTIDRQSARKPLLGLPSYMLQSEELRASLLARYPPEKLFQAERNFNAAQDLDVSLLEGDLVGVIKKKDPMGSQNRWLIDNGVTKGFVYSSFLKPYNPRRSHSDASVGSHSSTESEHGSSSPRFPRQNSGSTLTFNPSSMAVSFTSGSCQKQPQDASPPPKECDQGTLSASLNPSNSESSPSRCPSDPDSTSQPRSGDSADVARDVKQPTATPRSYRNFRHPEIVGYSVPGRNGQSQDLVKGCARTAQAPEDRSTEPDGSEAEGNQVYFAVYTFKARNPNELSVSANQKLKILEFKDVTGNTEWWLAEVNGKKGYVPSNYIRKTEYT

SEQ ID NO: 4610 - protein, 549 aa, Homo sapiens
MPVDLGQALGLLPSLAKAEDSQFSESDAALQEELSSPETARQLFRQFRYQVMSGPHETLKQLRKLCFQWLQPEVHTKEQILEILMLEQFLTILPGEIQMWVRKQCPGSGEEAVTLVESLKGDPQRLWQWISIQVLGQDILSEKMESPSCQVGEVEPHLEVVPQELGLENSSSGPGELLSHIVKEESDTEAELALAASQPARLEERLIRDQDLGASLLPAAPQEQWRQLDSTQKEQYWDLMLETYGKMVSGAGISHPKSDLTNSIEFGEELAGIYLHVNEKIPRPTCIGDRQENDKENLNLENHRDQELLHASCQASGEVPSQASLRGFFTEDEPGCFGEGENLPEALQNIQDEGTGEQLSPQERISEKQLGQHLPNPHSGEMSTMWLEEKRETSQKGQPRAPMAQKLPTCRECGKTFYRNSQLIFHQRTHTGETYFQCTICKKAFLRSSDFVKHQRTHTGEKPCKCDYCGKGFSDFSGLRHHEKIHTGEKPYKCPICEKSFIQRSNFNRHQRVHTGEKPYKCSHCGKSFSWSSSLDKHQRSHLGKKPFQ

SEQ ID NO: 4611 - protein, 857 aa, Homo sapiens
MAKAKKVGARRKASGAPAGARGGPAKANSNPFEVKVNRQKFQILGRKTRHDVGLPGVSRARALRKRTQTLLKEYKERDKSNVFRDKRFGEYNSNMSPEEKMMKRFALEQQRHHEKKSIYNLNEDEELTHYGQSLADIEKHNDIVDSDSDAEDRGTLSAELTAAHFGGGGGLLHKKTQQEGEEREKPKSRKELIEELIAKSKQEKRERQAQREDALELTEKLDQDWKEIQTLLSHKTPKSENRDKKEKPKPDAYDMMVRELGFEMKAQPSNRMKTEAELAKEEQEHLRKLEAERLRRMLGKDEDENVKKPKHMSADDLNDGFVLDKDDRRLLSYKDGKMNVEEDVQEEQSKEASDPESNEEEGDSSGGEDTEESDSPDSHLDLESNVESEEENEKPAKEQRQTPGKGLISGKERAGKATRDELPYTFAAPESYEELRSLLLGRSMEEQLLVVERIQKCNHPSLAEGNKAKLEKLFGFLLEYVGDLATDDPPDLTVIDKLVVHLYHLCQMFPESASDAIKFVLRDAMHEMEEMIETKGRAALPGLDVLIYLKITGLLFPTSDFWHPVVTPALVCLSQLLTKCPILSLQDVVKGLFVCCLFLEYVALSQRFIPELINFLLGILYIATPNKASQGSTLVHPFRALGKNSELLVVSAREDVATWQQSSLSLRWASRLRAPTSTEANHIRLSCLAVGLALLKRCVLMYGSLPSFHAIMGPLQALLTDHLADCSHPQELQELCQSTLTEMESQKQLCRPLTCEKSKPVPLKLFTPRLVKVLEFGRKQGSSKEEQERKRLIHKHKREFKGAVREIRKDNQFLARMQLSEIMERDAERKRKVKQLFNSLATQEGEWKALKRKKFKK

SEQ ID NO: 4612 - protein, 323 aa, Homo sapiens
MSAVCGGAARMLRTPGRHGYAAEFSPYLPGRLACATAQHYGIAGCGTLLILDPDEAGLRLFRSFDWNDGLFDVTWSENNEHVLITCSGDGSLQLWDTAKAAGPLQVYKEHAQEVYSVDWSQTRGEQLVVSGSWDQTVKLWDPTVGKSLCTFRGHESIIYSTIWSPHIPGCFASASGDQTLRIWDVKAAGVRIVIPAHQAEILSCDWCKYNENLLVTGAVDCSLRGWDLRNVRQPVFELLGHTYAIRRVKFSPFHASVLASCSYDFTVRFWNFSKPDSLLETVEHHTEFTCGLDFSLQSPTQVADCSWDETIKIYDPACLTIPA

SEQ ID NO: 4613 - protein, 559 aa, Homo sapiens
MKVITCEIAWHNKEPVYSLDFQHGTAGRIHRLASAGVDTNVRIWKVEKGPDGKAIVEFLSNLARHTKAVNVVRFSPTGEILASGGDDAVILLWKVNDNKEPEQIAFQDEDEAQLNKENWTVVKTLRGHLEDVYDICWATDGNLMASASVDNTAIIWDVSKGQKISIFNEHKSYVQGVTWDPLGQYVATLSCDRVLRVYSIQKKRVAFNVSKMLSGIGAEGEARSYRMFHDDSMKSFFRRLSFTPDGSLLLTPAGCVESGENVMNTTYVFSRKNLKRPIAHLPCPGKATLAVRCCPVYFELRPVVETGVELMSLPYRLVFAVASEDSVLLYDTQQSFPFGYVSNIHYHTLSDISWSSDGAFLAISSTDGYCSFVTFEKDELGIPLKEKPVLNMRTPDTAKKTKSQTHRGSSPGPRPVEGTPASRTQDPSSPGTTPPQARQAPAPTVIRDPPSITPAVKSPLPGPSEEKTLQPSSQNTKAHPSRRVTLNTLQAWSKTTPRRINLTPLKTDTPPSSVPTSVISTPSTEEIQSETPGDAQGSPPELKRPRLDENKGGTESLDP

SEQ ID NO: 4614 - protein, 1049 aa, Homo sapiens
MALVTLQRSPTPSAASSSASNSELEAGSEEDRKLNLSLSESFFMVKGAALFLQQGSSPQGQRSLQHPHKHAGDLPQHLQVMINLLRCEDRIKLAVRLESAWADRVRYMVVVYSSGRQDTEENILLGVDFSSKESKSCTIGMVLRLWSDTKIHLDGDGGFSVSTAGRMHIFKPVSVQAMWSALQVLHKACEVARRHNYFPGGVALIWATYYESCISSEQSCINEWNAMQDLESTRPDSPALFVDKPTEGERTERLIKAKLRSIMMSQDLENVTSKEIRNELEKQMNCNLKELKEFIDNEMLLILGQMDKPSLIFDHLYLGSEWNASNLEELQGSGVDYILNVTREIDNFFPGLFAYHNIRVYDEETTDLLAHWNEAYHFINKAKRNHSKCLVHCKMGVSRSASTVIAYAMKEFGWPLEKAYNYVKQKRSITRPNAGFMRQLSEYEGILDASKQRHNKLWRQQTDSSLQQPVDDPAGPGDFLPETPDGTPESQLPFLDDAAQPGLGPPLPCCFRRLSDPLLPSPEDETGSLVHLEDPEREALLEEAAPPAEVHRPARQPQQGSGLCEKDVKKKLEFGSPKGRSGSLLQVEETEREEGLGAGRWGQLPTQLDQNLLNSENLNNNSKRSCPNGMEDDAIFGILNKVKPSYKSCADCMYPTASGAPEASRERCEDPNAPAICTQPAFLPHITSSPVAHLASRSRVPEKPASGPTEPPPFLPPAGSRRADTSGPGAGAALEPPASLLEPSRETPKVLPKSLLLKNSHCDKNPPSTEVVIKEESSPKKDMKPAKDLRLLFSNESEKPTTNSYLMQHQESIIQLQKAGLVRKHTKELERLKSVPADPAPPSRDGPASRLEASIPEESQDPAALHELGPLVMPSQAGSDEKSEAAPASLEGGSLKSPPPFFYRLDHTSSFSKDFLKTICYTPTSSSMSSNLTRSSSSDSIHSVRGKPGLVKQRTQEIETRLRLAGLTVSSPLKRSHSLAKLGSLTFSTEDLSSEADPSTVADSQDTTLSESSFLHEPQGTPRDPAATSKPSGKPAPENLKSPSWMSKS

SEQ ID NO: 4615 - protein, 477 aa, Homo sapiens
MEWKLERTAPRRVRTEEEMLWESIMRVLSKDLKQKRSQDSANVLDSVNATYSDFKSNFAKRLSAEVPVASSPITTRWQQSQTRALSSDSFGEEQSTTYLPEASGSVLKTPPEKETLTLGSRKEQLKTPSKGISETSNSALHFCKAPHAMDRDWKESVASKGQKCLKQLFVTQNVVQQANGKMQLCEQSECVWKGCKDGVRDESFHLKSSGDINDSILQPEVKIHITGLRNDYYLNILDWSFQNLVAIALGSAVYIWNGENHNGIENIDLSLTCNYISSVSWIKEGTCLAVGTSEGEVQLWDVVTKKRLRNMLGHLSVVGALSWNHFILSSGSRLGRVYHHDVRVAQHHVGTLRHKQAVCALKWSPDGRLLSSGCSDGLLTIWPHDPGASAQGQPLKVITQSTAVKICSLIWLPKTKEIATGQGTPKNDVTVWTCPTVSRSGGFFGHRGRVLHLSLSPDQTRVFSAAADGTASVWNCY

SEQ ID NO: 4616 - protein, 627 aa, Homo sapiens
MARGSVSDEEMMELREAFAKVDTDGNGYISFNELNDLFKAACLPLPGYRVREITENLMATGDLDQDGRISFDEFIKIFHGLKSTDVAKTFRKAINKKEGICAIGGTSEQSSVGTQHSYSEEEKYAFVNWINKALENDPDCRHVIPMNPNTNDLFNAVGDGIVLCKMINLSVPDTIDERTINKKKLTPFTIQENLNLALNSASAIGCHVVNIGAEDLKEGKPYLVLGLLWQVIKIGLFADIELSRNEALIALLREGESLEDLMKLSPEELLLRWANYHLENAGCNKIGNFSTDIKDSKAYYHLLEQVAPKGDEEGVPAVVIDMSGLREKDDIQRAECMLQQAERLGCRQFVTATDVVRGNPKLNLAFIANLFNRYPALHKPENQDIDWGALEGETREERTFRNWMNSLGVNPRVNHLYSDLSDALVIFQLYEKIKVPVDWNRVNKPPYPKLGGNMKKLENCNYAVELGKNQAKFSLVGIGGQDLNEGNRTLTLALIWQLMRRYTLNILEEIGGGQKVNDDIIVNWVNETLREAKKSSSISSFKDPKISTSLPVLDLIDAIQPGSINYDLLKTENLNDDEKLNNAKYAISMARKIGARVYALPEDLVEVNPKMVMTVFACLMGKGMKRV

SEQ ID NO: 4617 - protein, 851 aa, Homo sapiens
MAQWEMLQNLDSPFQDQLHQLYSHSLLPVDIRQYLAVWIEDQNWQEAALGSDDSKATMLFFHFLDQLNYECGRCSQDPESLLLQHNLRKFCRDIQPFSQDPTQLAEMIFNLLLEEKRILIQAQRAQLEQGEPVLETPVESQQHEIESRILDLRAMMEKLVKSISQLKDQQDVFCFRYKIQAKGKTPSLDPHQTKEQKILQETLNELDKRRKEVLDASKALLGRLTTLIELLLPKLEEWKAQQQKACIRAPIDHGLEQLETWFTAGAKLLFHLRQLLKELKGLSCLVSYQDDPLTKGVDLRNAQVTELLQRLLHRAFVVETQPCMPQTPHRPLILKTGSKFTVRTRLLVRLQEGNESLTVEVSIDRNPPQLQGFRKFNILTSNQKTLTPEKGQSQGLIWDFGYLTLVEQRSGGSGKGSNKGPLGVTEELHIISFTVKYTYQGLKQELKTDTLPVVIISNMNQLSIAWASVLWFNLLSPNLQNQQFFSNPPKAPWSLLGPALSWQFSSYVGRGLNSDQLSMLRNKLFGQNCRTEDPLLSWADFTKRESPPGKLPFWTWLDKILELVHDHLKDLWNDGRIMGFVSRSQERRLLKKTMSGTFLLRFSESSEGGITCSWVEHQDDDKVLIYSVQPYTKEVLQSLPLTEIIRHYQLLTEENIPENPLRFLYPRIPRDEAFGCYYQEKVNLQERRKYLKHRLIVVSNRQVDELQQPLELKPEPELESLELELGLVPEPELSLDLEPLLKAGLDLGPELESVLESTLEPVIEPTLCMVSQTVPEPDQGPVSQPVPEPDLPCDLRHLNTEPMEIFRNCVKIEEIMPNGDPLLAGQNTVDEVYVSRPSHFYTDGPLMPSDF

SEQ ID NO: 4618 - protein, 789 aa, Homo sapiens
MGTKMADLDSPPKLSGVQQPSEGVGGGRCSEISAELIRSLTELQELEAVYERLCGEEKVVERELDALLEQQNTIESKMVTLHRMGPNLQLIEGDAKQLAGMITFTCNLAENVSSKVRQLDLAKNRLYQAIQRADDILDLKFCMDGVQTALRSEDYEQAAAHTHRYLCLDKSVIELSRQGKEGSMIDANLKLLQEAEQRLKAIVAEKFAIATKEGDLPQVERFFKIFPLLGLHEEGLRKFSEYLCKQVASKAEENLLMVLGTDMSDRRAAVIFADTLTLLFEGIARIVETHQPIVETYYGPGRLYTLIKYLQVECDRQVEKVVDKFIKQRDYHQQFRHVQNNLMRNSTTEKIEPRELDPILTEVTLMNARSELYLRFLKKRISSDFEVGDSMASEEVKQEHQKCLDKLLNNCLLSCTMQELIGLYVTMEEYFMRETVNKAVALDTYEKGQLTSSMVDDVFYIVKKCIGRALSSSSIDCLCAMINLATTELESDFRDVLCNKLRMGFPATTFQDIQRGVTSAVNIMHSSLQQGKFDTKGIESTDEAKMSFLVTLNNVEVCSENISTLKKTLESDCTKLFSQGIGGEQAQAKFDSCLSDLAAVSNKFRDLLQEGLTELNSTAIKPQVQPWINSFFSVSHNIEEEEFNDYEANDPWVQQFILNLEQQMAEFKASLSPVIYDSLTGLMTSLVAVELEKVVLKSTFNRLGGLQFDKELRSLIAYLTTVTTWTIRDKFARLSQMATILNLERVTEILDYWGPNSGPLTWRLTPAEVRQVLALRIDFRSEDIKRLRL

SEQ ID NO: 4619 - protein, 2971 aa, Homo sapiens
MRKHRHLPLVAVFCLFLSGFPTTHAQQQQAAQDSADIIFLIDGSNNTGSVNFAVILDFLVNLLEKLPIGTQQIRVGVVQFSDEPRTMFSLDTYSTKAQVLGAVKALGFAGGELANIGLALDFVVENHFTRAGGSRVEEGVPQVLVLISAGPSSDEIRYGVVALKQASVFSFGLGAQAASRAELQHIATDDNLVFTVPEFRSFGDLQEKLLPYIVGVAQRHIVLKPPTIVTQVIEVNKRDIVFLVDGSSALGLANFNAIRDFIAKVIQRLEIGQDLIQVAVAQYADTVRPEFYFNTHPTKREVITAVRKMKPLDGSALYTGSALDFVRNNLFTSSAGYRAAEGIPKLLVLITGGKSLDEISQPAQELKRSSIMAFAIGNKGADQAELEEIAFDSSLVFIPAEFRAAPLQGMLPGLLAPLRTLSGTPEVHSNKRDIIFLLDGSANVGKTNFPYVRDFVMNLVNSLDIGNDNIRVGLVQFSDTPVTEFSLNTYQTKSDILGHLRQLQLQGGSGLNTGSALSYVYANHFTEAGGSRIREHVPQLLLLLTAGQSEDSYLQAANALTRAGILTFCVGASQANKAELEQIAFNPSLVYLMDDFSSLPALPQQLIQPLTTYVSGGVEEVPLAQPESKRDILFLFDGSANLVGQFPVVRDFLYKIIDELNVKPEGTRIAVAQYSDDVKVESRFDEHQSKPEILNLVKRMKIKTGKALNLGYALDYAQRYIFVKSAGSRIEDGVLQFLVLLVAGRSSDRVDGPASNLKQSGVVPFIFQAKNADPAELEQIVLSPAFILAAESLPKIGDLHPQIVNLLKSVHNGAPAPVSGEKDVVFLLDGSEGVRSGFPLLKEFVQRVVESLDVGQDRVRVAVVQYSDRTRPEFYLNSYMNKQDVVNAVRQLTLLGGPTPNTGAALEFVLRNILVSSAGSRITEGVPQLLIVLTADRSGDDVRNPSVVVKRGGAVPIGIGIGNADITEMQTISFIPDFAVAIPTFRQLGTVQQVISERVTQLTREELSRLQPVLQPLPSPGVGGKRDVVFLIDGSQSAGPEFQYVRTLIERLVDYLDVGFDTTRVAVIQFSDDPKVEFLLNAHSSKDEVQNAVQRLRPKGGRQINVGNALEYVSRNIFKRPLGSRIEEGVPQFLVLISSGKSDDEVDDPAVELKQFGVAPFTIARNADQEELVKISLSPEYVFSVSTFRELPSLEQKLLTPITTLTSEQIQKLLASTRYPPPAVESDAADIVFLIDSSEGVRPDGFAHIRDFVSRIVRRLNIGPSKVRVGVVQFSNDVFPEFYLKTYRSQAPVLDAIRRLRLRGGSPLNTGKALEFVARNLFVKSAGSRIEDGVPQHLVLVLGGKSQDDVSRFAQVIRSSGIVSLGVGDRNIDRTELQTITNDPRLVFTVREFRELPNIEERIMNSFGPSAATPAPPGVDTPPPSRPEKKKADIVFLLDGSINFRRDSFQEVLRFVSEIVDTVYEDGDSIQVGLVQYNSDPTDEFFLKDFSTKRQIIDAINKVVYKGGRHANTKVGLEHLRVNHFVPEAGSRLDQRVPQIAFVITGGKSVEDAQDVSLALTQRGVKVFAVGVRNIDSEEVGKIASNSATAFRVGNVQELSELSEQVLETLHDAMHETLCPGVTDAAKACNLDVILGFDGSRDQNVFVAQKGFESKVDAILNRISQMHRVSCSGGRSPTVRVSVVANTPSGPVEAFDFDEYQPEMLEKFRNMRSQHPYVLTEDTLKVYLNKFRQSSPDSVKVVIHFTDGADGDLADLHRASENLRQEGVRALILVGLERVVNLERLMHLEFGRGFMYDRPLRLNLLDLDYELAEQLDNIAEKACCGVPCKCSGQRGDRGPIGSIGPKGIPGEDGYRGYPGDEGGPGERGPPGVNGTQGFQGCPGQRGVKGSRGFPGEKGEVGEIGLDGLDGEDGDKGLPGSSGEKGNPGRRGDKGPRGEKGERGDVGIRGDPGNPGQDSQERGPKGETGDLGPMGVPGRDGVPGGPGETGKNGGFGRRGPPGAKGNKGGPGQPGFEGEQGTRGAQGPAGPAGPPGLIGEQGISGPRGSGGAAGAPGERGRTGPLGRKGEPGEPGPKGGIGNRGPRGETGDDGRDGVGSEGRRGKKGERGFPGYPGPKGNPGEPGLNGTTGPKGIRGRRGNSGPPGIVGQKGDPGYPGPAGPKGNRGDSIDQCALIQSIKDKCPCCYGPLECPVFPTELAFALDTSEGVNQDTFGRMRDVVLSIVNDLTIAESNCPRGARVAVVTYNNEVTTEIRFADSKRKSVLLDKIKNLQVALTSKQQSLETAMSFVARNTFKRVRNGFLMRKVAVFFSNTPTRASPQLREAVLKLSDAGITPLFLTRQEDRQLINALQINNTAVGHALVLPAGRDLTDFLENVLTCHVCLDICNIDPSCGFGSWRPSFRDRRAAGSDVDIDMAFILDSAETTTLFQFNEMKKYIAYLVRQLDMSPDPKASQHFARVAVVQHAPSESVDNASMPPVKVEFSLTDYGSKEKLVDFLSRGMTQLQGTRALGSAIEYTIENVFESAPNPRDLKIVVLMLTGEVPEQQLEEAQRVILQAKCKGYFFVVLGIGRKVNIKEVYTFASEPNDVFFKLVDKSTELNEEPLMRFGRLLPSFVSSENAFYLSPDIRKQCDWFQGDQPTKNLVKFGHKQVNVPNNVTSSPTSNPVTTTKPVTTTKPVTTTTKPVTTTTKPVTIINQPSVKPAAAKPAPAKPVAAKPVATKMATVRPPVAVKPATAAKPVAAKPAAVRPPAAAAAKPVATKPEVPRPQAAKPAATKPATTKPMVKMSREVQVFEITENSAKLHWERAEPPGPYFYDLTVTSAHDQSLVLKQNLTVTDRVIGGLLAGQTYHVAVVCYLRSQVRATYHGSFSTKKSQPPPPQPARSASSSTINLMVSTEPLALTETDICKLPKDEGTCRDFILKWYYDPNTKSCARFWYGGCGGNENKFGSQKECEKVCAPVLAKPGVISVMGT

SEQ ID NO: 4620 - protein, 420 aa, Homo sapiens
MLKAVILIGGPQKGTRFRPLSFEVPKPLFPVAGVPMIQHHIEACAQVPGMQEILLIGFYQPDEPLTQFLEAAQQEFNLPVRYLQEFAPLGTGGGLYHFRDQILAGSPEAFFVLNADVCSDFPLSAMLEAHRRQRHPFLLLGTTANRTQSLNYGCIVENPQTHEVLHYVEKPSTFISDIINCGIYLFSPEALKPLRDVFQRNQQDGQLEDSPGLWPGAGTIRLEQDVFSALAGQGQIYVHLTDGIWSQIKSAGSALYASRLYLSRYQDTHPERLAKHTPGGPWIRGNVYIHPTAKVAPSAVLGPNVSIGKGVTVGEGVRLRESIVLHGATLQEHTCVLHSIVGWGSTVGRWARVEGTPSDPNPNDPRARMDSESLFKDGKLLPAITILGCRVRIPAEVLILNSIVLPHKELSRSFTNQIIL

SEQ ID NO: 4621 - protein, 611 aa, Homo sapiens
MSVQVVSAAAAAKVPEVELKDLSPSEAESQLGLSTAAVGAMAPPAGGGDPEAPAPAAERPPVPGPGSGPAAALSPAAGKVPQASAMKRSDPHHQHQRHRDGGEALVSPDGTVTEAPRTVKKQIQFADQKQEFNKRPTKIGRRSLSRSISQSSTDSYSSAASYTDSSDDETSPRDKQQKNSKGSSDFCVKNIKQAEFGRREIEIAEQEMPALMALRKRAQGEKPLAGAKIVGCTHITAQTAVLMETLGALGAQCRWAACNIYSTLNEVAAALAESGFPVFAWKGESEDDFWWCIDRCVNVEGWQPNMILDDGGDLTHWIYKKYPNMFKKIKGIVEESVTGVHRLYQLSKAGKLCVPAMNVNDSVTKQKFDNLYCCRESILDGLKRTTDMMFGGKQVVVCGYGEVGKGCCAALKAMGSIVYVTEIDPICALQACMDGFRLVKLNEVIRQVDIVITCTGNKNVVTREHLDRMKNSCIVCNMGHSNTEIDVASLRTPELTWERVRSQVDHVIWPDGKRIVLLAEGRLLNLSCSTVPTFVLSITATTQALALIELYNAPEGRYKQDVYLLPKKMDEYVASLHLPTFDAHLTELTDEQAKYLGLNKNGPFKPNYYRY

SEQ ID NO: 4622 - protein, 1453 aa, Homo sapiens
MMLPQNSWHIDFGRCCCHQNLFSAVVTCILLLNSCFLISSFNGTDLELRLVNGDGPCSGTVEVKFQGQWGTVCDDGWNTTASTVVCKQLGCPFSFAMFRFGQAVTRHGKIWLDDVSCYGNESALWECQHREWGSHNCYHGEDVGVNCYGEANLGLRLVDGNNSCSGRVEVKFQERWGTICDDGWNLNTAAVVCRQLGCPSSFISSGVVNSPAVLRPIWLDDILCQGNELALWNCRHRGWGNHDCSHNEDVTLTCYDSSDLELRLVGGTNRCMGRVELKIQGRWGTVCHHKWNNAAADVVCKQLGCGTALHFAGLPHLQSGSDVVWLDGVSCSGNESFLWDCRHSGTVNFDCLHQNDVSVICSDGADLELRLADGSNNCSGRVEVRIHEQWWTICDQNWKNEQALVVCKQLGCPFSVFGSRRAKPSNEARDIWINSISCTGNESALWDCTYDGKAKRTCFRRSDAGVICSDKADLDLRLVGAHSPCYGRLEVKYQGEWGTVCHDRWSTRNAAVVCKQLGCGKPLHVFGMTYFKEASGPIWLDDVSCIGNESNIWDCEHSGWGKHNCVHREDVIVTCSGDATWGLRLVGGSNRCSGRLEVYFQGRWGTVCDDGWNSKAAAVVCSQLDCPSSIIGMGLGNASTGYGKIWLDDVSCDGDESDLWSCRNSGWGNNDCSHSEDVGVICSDASDMELRLVGGSSRCAGKVEVNVQGAVGILCANGWGMNIAEVVCRQLECGSAIRVSREPHFTERTLHILMSNSGCTGGEASLWDCIRWEWKQTACHLNMEASLICSAHRQPRLVGADMPCSGRVEVKHADTWRSVCDSDFSLHAANVLCRELNCGDAISLSVGDHFGKGNGLTWAEKFQCEGSETHLALCPIVQHPEDTCIHSREVGVVCSRYTDVRLVNGKSQCDGQVEINVLGHWGSLCDTHWDPEDARVLCRQLSCGTALSTTGGKYIGERSVRVWGHRFHCLGNESLLDNCQMTVLGAPPCIHGNTVSVICTGSLTQPLFPCLANVSDPYLSAVPEGSALICLEDKRLRLVDGDSRCAGRVEIYHDGFWGTICDDGWDLSDAHVVCQKLGCGVAFNATVSAHFGEGSGPIWLDDLNCTGMESHLWQCPSRGWGQHDCRHKEDAGVICSEFTALRLYSETETESCAGRLEVFYNGTWGSVGRRNITTAIAGIVCRQLGCGENGVVSLAPLSKTGSGFMWVDDIQCPKTHISIWQCLSAPWERRISSPAEETWITCEDRIRVRGGDTECSGRVEIWHAGSWGTVCDDSWDLAEAEVVCQQLGCGSALAALRDASFGQGTGTIWLDDMRCKGNESFLWDCHAKPWGQSDCGHKEDAGVRCSGQSLKSLNASSGHLALILSSIFGLLLLVLFILFLTWCRVQKQKHLPLRVSTRRRGSLEENLFHEMETCLKREDPHGTRTSDDTPNHGCEDASDTSLLGVLPASEATK

SEQ ID NO: 4623 - protein, 758 aa, Homo sapiens
MRKQGVSSKRLQSSGRSQSKGRRGASLAREPEVEEEMEKSALGGGKLPRGSWRSSPGRIQSLKERKGLELEVVAKTFLLGPFQFVRNSLAQLREKVQELQARRFSSRTTLGIAVFVAILHWLHLVTLFENDRHFSHLSSLEREMTFRTEMGLYYSYFKTIIEAPSFLEGLWMIMNDRLTEYPLIINAIKRFHLYPEVIIASWYCTFMGIMNLFGLETKTCWNVTRIEPLNEVQSCEGLGDPACFYVGVIFILNGLMMGLFFMYGAYLSGTQLGGLITVLCFFFNHGEATRVMWTPPLRESFSYPFLVLQMCILTLILRTSSNDRRPFIALCLSNVAFMLPWQFAQFILFTQIASLFPMYVVGYIEPSKFQKIIYMNMISVTLSFILMFGNSMYLSSYYSSSLLMTWAIILKRNEIQKLGVSKLNFWLIQGSAWWCGTIILKFLTSKILGVSDHIRLSDLIAARILRYTDFDTLIYTCAPEFDFMEKATPLRYTKTLLLPVVMVITCFIFKKTVRDISYVLATNIYLRKQLLEHSELAFHTLQLLVFTALAILIMRLKMFLTPHMCVMASLICSRQLFGWLFRRVRFEKVIFGILTVMSIQGYANLRNQWSIIGEFNNLPQEELLQWIKYSTTSDAVFAGAMPTMASIKLSTLHPIVNHPHYEDADLRARTKIVYSTYSRKSAKEVRDKLLELHVNYYVLEEAWCVVRTKPGCSMLEIWDVEDPSNAANPPLCSVLLEDARPYFTTVFQNSVYRVLKVN

SEQ ID NO: 4624 - protein, 652 aa, Homo sapiens
MTPILTVLICLGLSLGPRTHVQAGHLPKPTLWAEPGSVITQGSPVTLRCQGGQETQEYRLYREKKTAPWITRIPQELVKKGQFPIPSITWEHTGRYRCYYGSDTAGRSESSDPLELVVTGAYIKPTLSAQPSPVVNSGGNVTLQCDSQVAFDGFILCKEGEDEHPQCLNSQPHARGSSRAIFSVGPVSPSRRWWYRCYAYDSNSPYEWSLPSDLLELLVLGVSKKPSLSVQPGPIVAPEETLTLQCGSDAGYNRFVLYKDGERDFLQLAGAQPQAGLSQANFTLGPVSRSYGGQYRCYGAHNLSSEWSAPSDPLDILIAGQFYDRVSLSVQPGPTVASGENVTLLCQSQGWMQTFLLTKEGAADDPWRLRSTYQSQKYQAEFPMGPVTSAHAGTYRCYGSQSSKPYLLTHPSDPLELVVSGPSGGPSSPTTGPTSTSAGPEDQPLTPTGSDPQSGLGRHLGVVIGILVAVILLLLLLLLLFLILRHRRQGKHWTSTQRKADFQHPAGAVGPEPTDRGLQWRSSPAADAQEENLYAAVKHTQPEDGVEMDTRQSPHDEDPQAVTYAEVKHSRPRREMASPPSPLSGEFLDTKDRQAEEDRQMDTEAAASEAPQDVTYAQLHSLTLRREATEPPPSQEGPSPAVPSIYATLAIH

SEQ ID NO: 4625 - protein, 2541 aa, Homo sapiens
MVALSLKISIGNVVKTMQFEPSTMVYDACRIIRERIPEAPAGPPSDFGLFLSDDDPKKGIWLEAGKALDYYMLRNGDTMEYRKKQRPLKIRMLDGTVKTIMVDDSKTVTDMLMTICARIGITNHDEYSLVRELMEEKKEEITGTLRKDKTLLRDEKKMEKLKQKLHTDDELNWLDHGRTLREQGVEEHETLLLRRKFFYSDQNVDSRDPVQLNLLYVQARDDILNGSHPVSFDKACEFAGFQCQIQFGPHNEQKHKAGFLDLKDFLPKEYVKQKGERKIFQAHKNCGQMSEIEAKVRYVKLARSLKTYGVSFFLVKEKMKGKNKLVPRLLGITKECVMRVDEKTKEVIQEWNLTNIKRWAASPKSFTLDFGDYQDGYYSVQTTEGEQIAQLIAGYIDIILKKKKSKDHFGLEGDEESTMLEDSVSPKKSTVLQQQYNRVGKVEHGSVALPAIMRSGASGPENFQVGSMPPAQQQITSGQMHRGHMPPLTSAQQALTGTINSSMQAVQAAQATLDDFDTLPPLGQDAASKAWRKNKMDESKHEIHSQVDAITAGTASVVNLTAGDPAETDYTAVGCAVTTISSNLTEMSRGVKLLAALLEDEGGSGRPLLQAAKGLAGAVSELLRSAQPASAEPRQNLLQAAGNVGQASGELLQQIGESDTDPHFQDALMQLAKAVASAAAALVLKAKSVAQRTEDSGLQTQVIAAATQCALSTSQLVACTKVVAPTISSPVCQEQLVEAGRLVAKAVEGCVSASQAATEDGQLLRGVGAAATAVTQALNELLQHVKAHATGAGPAGRYDQATDTILTVTENIFSSMGDAGEMVRQARILAQATSDLVNAIKADAEGESDLENSRKLLSAAKILADATAKMVEAAKGAAAHPDSEEQQQRLREAAEGLRMATNAAAQNAIKKKLVQRLEHAAKQAAASATQTIAAAQHAASTPKASAGPQPLLVQSCKAVAEQIPLLVQGVRGSQAQPDSPSAQLALIAASQSFLQPGGKMVAAAKASVPTIQDQASAMQLSQCAKNLGTALAELRTAAQKAQEACGPLEMDSALSVVQNLEKDLQEVKAAARDGKLKPLPGETMEKCTQDLGNSTKAVSSAIAQLLGEVAQGNENYAGIAARDVAGGLRSLAQAARGVAALTSDPAVQAIVLDTASDVLDKASSLIEEAKKAAGHPGDPESQQRLAQVAKAVTQALNRCVSCLPGQRDVDNALRAVGDASKRLLSDSLPPSTGTFQEAQSRLNEAAAGLNQAATELVQASRGTPQDLARASGRFGQDFSTFLEAGVEMAGQAPSQEDRAQVVSNLKGISMSSSKLLLAAKALSTDPAAPNLKSQLAAAARAVTDSINQLITMCTQQAPGQKECDNALRELETVRELLENPVQPINDMSYFGCLDSVMENSKVLGEAMTGISQNAKNGNLPEFGDAISTASKALCGFTEAAAQAAYLVGVSDPNSQAGQQGLVEPTQFARANQAIQMACQSLGEPGCTQAQVLSAATIVAKHTSALCNSCRLASARTTNPTAKRQFVQSAKEVANSTANLVKTIKALDGAFTEENRAQCRAATAPLLEAVDNLSAFASNPEFSSIPAQISPEGRAAMEPIVISAKTMLESAGGLIQTARALAVNPRDPPSWSVLAGHSRTVSDSIKKLITSMRDKAPGQLECETAIAALNSCLRDLDQASLAAVSQQLAPREGISQEALHTQMLTAVQEISHLIEPLANAARAEASQLGHKVSQMAQYFEPLTLAAVGAASKTLSHPQQMALLDQTKTLAESALQLLYTAKEAGGNPKQAAHTQEALEEAVQMMTEAVEDLTTTLNEAASAAGVVGGMVDSITQAINQLDEGPMGEPEGSFVDYQTTMVRTAKAIAVTVQEMVTKSNTSPEELGPLANQLTSDYGRLASEAKPAAVAAENEEIGSHIKHRVQELGHGCAALVTKAGALQCSPSDAYTKKELIECARRVSEKVSHVLAALQAGNRGTQACITAASAVSGIIADLDTTIMFATAGTLNREGTETFADHREGILKTAKVLVEDTKVLVQNAAGSQEKLAQAAQSSVATITRLADVVKLGAASLGAEDPETQVVLINAVKDVAKALGDLISATKAAAGKVGDDPAVWQLKNSAKVMVTNVTSLLKTVKAVEDEATKGTRALEATTEHIRQELAVFCSPEPPAKTSTPEDFIRMTKGITMATAKAVAAGNSCRQEDVIATANLSRRAIADMLRACKEAAYHPEVAPDVRLRALHYGRECANGYLELLDHVLLTLQKPSPELKQQLTGHSKRVAGSVTELIQAAEAMKGTEWVDPEDPTVIAENELLGAAAAIEAAAKKLEQLKPRAKPKEADESLNFEEQILEAAKSIAAATSALVKAASAAQRELVAQGKVGAIPANALDDGQWSQGLISAARMVAAATNNLCEAANAAVQGHASQEKLISSAKQVAASTAQLLVACKVKADQDSEAMKRLQAAGNAVKRASDNLVKAAQKAAAFEEQENETVVVKEKMVGGIAQIIAAQEEMLRKERELEEARKKLAQIRQQQYKFLPSELRDEH

SEQ ID NO: 4626 - protein, 1800 aa, Homo sapiens
MFNKSFGTPFGGGTGGFGTTSTFGQNTGFGTTSGGAFGTSAFGSSNNTGGLFGNSQTKPGGLFGTSSFSQPATSTSTGFGFGTSTGTANTLFGTASTGTSLFSSQNNAFAQNKPTGFGNFGTSTSSGGLFGTTNTTSNPFGSTSGSLFGPSSFTAAPTGTTIKFNPPTGTDTMVKAGVSTNISTKHQCITAMKEYESKSLEELRLEDYQANRKGPQNQVGAGTTTGLFGSSPATSSATGLFSSSTTNSGFAYGQNKTAFGTSTTGFGTNPGGLFGQQNQQTTSLFSKPFGQATTTQNTGFSFGNTSTIGQPSTNTMGLFGVTQASQPGGLFGTATNTSTGTAFGTGTGLFGQTNTGFGAVGSTLFGNNKLTTFGSSTTSAPSFGTTSGGLFGFGTNTSGNSIFGSKPAPGTLGTGLGAGFGTALGAGQASLFGNNQPKIGGPLGTGAFGAPGFNTTTATLGFGAPQAPVALTDPNASAAQQAVLQQHINSLTYSPFGDSPLFRNPMSDPKKKEERLKPTNPAAQKALTTPTHYKLTPRPATRVRPKALQTTGTAKSHLFDGLDDDEPSLANGAFMPKKSIKKLVLKNLNNSNLFSPVNRDSENLASPSEYPENGERFSFLSKPVDENHQQDGDEDSLVSHFYTNPIAKPIPQTPESAGNKHSNSNSVDDTIVALNMRAALRNGLEGSSEETSFHDESLQDDREEIENNSYHMHPAGIILTKVGYYTIPSMDDLAKITNEKGECIVSDFTIGRKGYGSIYFEGDVNLTNLNLDDIVHIRRKEVVVYLDDNQKPPVGEGLNRKAEVTLDGVWPTDKTSRCLIKSPDRLADINYEGRLEAVSRKQGAQFKEYRPETGSWVFKVSHFSKYGLQDSDEEEEEHPSKTSTKKLKTAPLPPASQTTPLQMALNGKPAPPPQSQSPEVEQLGRVVELDSDMVDITQEPVLDTMLEESMPEDQEPVSASTHIASSLGINPHVLQIMKASLLTDEEDVDMALDQRFSRLPSKADTSQEICSPRLPISASHSSKTRSLVGGLLQSKFTSGAFLSPSVSVQECRTPRAASLMNIPSTSSWSVPPPLTSVFTMPSPAPEVPLKTVGTRRQLGLVPREKSVTYGKGKLLMDMALFMGRSFRVGWGPNWTLANSGEQLNGSHELENHQIADSMEFGFLPNPVAVKPLTESPFKVHLEKLSLRQRKPDEDMKLYQTPLELKLKHSTVHVDELCPLIVPNLGVAVIHDYADWVKEASGDLPEAQIVKHWSLTWTLCEALWGHLKELDSQLNEPREYIQILERRRAFSRWLSCTATPQIEEEVSLTQKNSPVEAVFSYLTGKRISEACSLAQQSGDHRLALLLSQFVGSQSVRELLTMQLVDWHQLQADSFIQDERLRIFALLAGKPVWQLSEKKQINVCSQLDWKRSLAIHLWYLLPPTASISRALSMYEEAFQNTSDSDRYACSPLPSYLEGSGCVIAEEQNSQTPLRDVCFHLLKLYSDRHYDLNQLLEPRSITADPLDYRLSWHLWEVLRALNYTHLSAQCEGVLQASYAGQLESEGLWEWAIFVLLHIDNSGIREKAVRELLTRHCQLLETPESWAKETFLTQKLRVPAKWIHEAKAVRAHMESDKHLEALCLFKAEHWNRCHKLIIRHLASDAIINENYDYLKGFLEDLAPPERSSLIQDWETSGLVYLDYIRVIEMLRHIQQVDCSGNDLEQLHIKVTSLCSRIEQIQCYSAKDRLAQSDMAKRVANLLRVVLSLHHPPDRTSDSTPDPQRVPLRLLAPHIGRLPMPEDYAMDELRSLTQSYLRELAVGSL

SEQ ID NO: 4627 - protein, 821 aa, Homo sapiens
MVAPVLETSHVFCCPNRVRGVLNWSSGPRGLLAFGTSCSVVLYDPLKRVVVTNLNGHTARVNCIQWICKQDGSPSTELVSGGSDNQVIHWEIEDNQLLKAVHLQGHEGPVYAVHAVYQRRTSDPALCTLIVSAAADSAVRLWSKKGPEVTWKTGQVERGRAWKPPASLALCSRSCDSMVSCYASILCKALWKEKLHTFWHHNRISFLPSAFRPIPILACGNDDCRIHIFAQQNDQFQKVLSLCGHEDWIRGVEWAAFGRDLFLASCSQDCLIRIWKLYIKSTSLETQDDDNIRLKENTFTIENESVKIAFAVTLETVLAGHENWVNAVHWQPVFYKDGVLQQPVRLLSASMDKTMILWAPDEESGVWLEQREWTPEIVISGHFDGVQDLVWDPEGEFIITVGTDQTTRLFAPWKRKDQSQVTWHEIARPQIHGYDLKCLAMINRFQFVSGADEKVLRVFSAPRNFVENFCAITGQSLNHVLCNQDSDLPEGATVPALGLSNKAVFQGDIASQPSDEEELLTSTGFEYQQVAFQPSILTEPPTEDHLLQNTLWPEVQKLYGHGYEIFCVTCNSSKTLLASACKAAKKEHAAIILWNTTSWKQVQNLVFHSLTVTQMAFSPNEKFLLAVSRDRTWSLWKKQDTISPEFEPVFSLFAFTNKITSVHSRIIWSCDWSPDSKYFFTGSRDKKVVVWGECDSTDDCIEHNIGPCSSVLDVGGAVTAVSVCPVLHPSQRYVVAVGLECGKICLYTWKKTDQVPEINDWTHCVETSQSQSHTLAIRKLCWKNCSGKTEQKEAEGAEWLHFASCGEDHTVKIHRVNKCAL

SEQ ID NO: 4628 - protein, 716 aa, Homo sapiens
MGETKIIYHLDGQETPYLVKLPLPAERVTLADFKGVLQRPSYKFFFKSMDDDFGVVKEEISDDNAKLPCFNGRVVSWLVSAEGSHPDPAPFCADNPSELPPPMERTGGIGDSRPPSFHPHAGGGSQENLDNDTETDSLVSAQRERPRRRDGPEHATRLNGTAKGERRREPGGYDSSSTLMSSELETTSFFDSDEDDSTSRFSSSTEQSSASRLMRRHKRRRRKQKVSRIERSSSFSSITDSTMSLNIITVTLNMEKYNFLGISIVGQSNERGDGGIYIGSIMKGGAVAADGRIEPGDMLLQVNEINFENMSNDDAVRVLREIVHKPGPITLTVAKCWDPSPRGCFTLPRSEPIRPIDPAAWVSHTAAMTGTFPAYGMSPSLSTITSTSSSITSSIPDTERLDDFHLSIHSDMAAIVKAMASPESGLEVRDRMWLKITIPNAFIGSDVVDWLYHNVEGFTDRREARKYASNLLKAGFIRHTVNKITFSEQCYYIFGDLCGNMANLSLHDHDGSSGASDQDTLAPLPHPGAAPWPMAFPYQYPPPPHPYNPHPGFPELGYSYGGGSASSQHSEGSRSSGSNRSGSDRRKEKDPKAGDSKSGGSGSESDHTTRSSLRGPRERAPSERSGPAASEHSHRSHHSLASSLRSHHTHPSYGPPGVPPLYGPPMLMMPPPPAAMGPPGAPPGRDLASVPPELTASRQSFRMAMGNPSEFFVDVM

SEQ ID NO: 4629 - protein, 750 aa, Homo sapiens
MEDLFETFQDEMGFSNMEDDGPEEEERVAEPQANFNTPQALRFEELLANLLNEQHQIAKELFEQLKMKKPSAKQQKEVEKVKPQCKEVHQTLILDPAQRKRLQQQMQQHVQLLTQIHLLATCNPNLNPEASSTRICLKELGTFAQSSIALHHQYNPKFQTLFQPCNLMGAMQLIEDFSTHVSIDCSPHKTVKKTANEFPCLPKQVAWILATSKVFMYPELLPVCSLKAKNPQDKILFTKAEDNLLALGLKHFEGTEFLNPLISKYLLTCKTARQLTVRIKNLNMNRAPDNIIKFYKKTKQLPVLGKCCEEIQPHQWKPPIEREEHRLPFWLKASLPSIQEELRHMADGAREVGNMTGTTEINSDQGLEKDNSELGSETRYPLLLPKGVVLKLKPVADRFPKKAWRQKRSSVLKPLLIQPSPSLQPSFNPGKTPAQSTHSEAPPSKMVLRIPHPIQPATVLQTVPGVPPLGVSGGESFESPAALPAMPPEARTSFPLSESQTLLSSAPVPKVMMPSPASSMFRKPYVRRRPSKRRGARAFRCIKPAPVIHPASVIFTVPATTVKIVSLGGGCNMIQPVNAAVAQSPQTIPIATLLVNPTSFPCPLNQPLVASSVSPLIVSGNSVNLPIPSTPEDKAHMNVDIACAVADGENAFQGLEPKLEPQELSPLSATVFPKVEHSPGPPPVDKQCQEGLSENSAYRWTVVKTEEGRQALEPLPQGIQESLNNSSPGDLEEVVKMEPEDATEEISGFL

SEQ ID NO: 4630 - protein, 1063 aa, Homo sapiens
MPHLPLASFRPPFWGLRHSRGLPRFHSVSTQSEPHGSPISRRNREAKQKRLREKQATLEAEIAGESKSPAESIKAWRPKELVLYEIPTKPGEKKDVSGPLPPAYSPRYVEAAWYPWWVREGFFKPEYQARLPQATGETFSMCIPPPNVTGSLHIGHALTVAIQDALVRWHRMRGDQVLWVPGSDHAGIATQAVVEKQLWKERGVRRHELSREAFLREVWQWKEAKGGEICEQLRALGASLDWDRECFTMDVGSSVAVTEAFVRLYKAGLLYRNHQLVNWSCALRSAISDIEVENRPLPGHTQLRLPGCPTPVSFGLLFSVAFPVDGEPDAEVVVGTTRPETLPGDVAVAVHPDDSRYTHLHGRQLRHPLMGQPLPLITDYAVQPHVGTGAVKVTPAHSPADAEMGARHGLSPLNVIAEDGTMTSLCGDWLQGLHRFVAREKIMSVLSEWGLFRGLQNHPMVLPICSRSGDVIEYLLKNQWFVRCQEMGARAAKAVESGALELSPSFHQKNWQHWFSHIGDWCVSRQLWWGHQIPAYLVVEDHAQGEEDCWVVGRSEAEAREVAAELTGRPGAELTLERDPDVLDTWFSSALFPFSALGWPQETPDLARFYPLSLLETGSDLLLFWVGRMVMLGTQLTGQLPFSKVLLHPMVRDRQGRKMSKSLGNVLDPRDIISGVEMQVLQEKLRSGNLDPAELAIVAAAQKKDFPHGIPECGTDALRFTLCSHGVQAGDLHLSVSEVQSCRHFCNKIWNALRFILNALGEKFVPQPAEELSPSSPMDAWILSRLALAAQECERGFLTRELSLVTHALHHFWLHNLCDVYLEAVKPVLWHSPRPLGPPQVLFSCADLGLRLLAPLMPFLAEELWQRLPPRPGCPPAPSISVAPYPSACSLEHWRQPELERRFSRVQEVVQVLRALRATYQLTKARPRVLLQSSEPGDQGLFEAFLEPLGTLGYCGAVGLLPPGAAAPSGWAQAPLSDTAQVYMELQGLVDPQIQLPLLAARRYKLQKQLDSLTARTPSEGEAGTQRQQKLSSLQLELSKLDKAASHLRQLMDEPPAPGSPEL

SEQ ID NO: 4631 - protein, 402 aa, Homo sapiens
MNQENRSSFFWLLVIFTFLLKITASFSMSAYVTVTYYNETSNYTAIETCECGVYGLASPVANAMGVVGIPKNNNYQACDHNTEFSNTKKPWIALIERGNCTFSEKIQTAGRRNADAVVIYNAPETGNQTIQMANFGAVDIVAIMIGNLKGTKILQSIQRGIQVTMVIEVGKKHGPWVNHYSIFFVSVSFFIITAATVGYFIFYSARRLRNARAQSRKQRQLKADAKKAIGRLQLRTLKQGDKEIGPDGDSCAVCIELYKPNDLVRILTCNHIFHKTCVDPWLLEHRTCPMCKCDILKALGIEVDVEDGSVSLQVPVSNEISNSASSHEEDNRSETASSGYASVQGTDEPPLEEHVQSTNESLQLVNHEANSVAVDVIPHVDNPTFEEDETPNQETAVREIKS

SEQ ID NO: 4632 - protein, 649 aa, Homo sapiens
MEQSNDSLRVNHNDGEESKTSAQVFEMIVASPTENGQVLRVIPPTQTGMAQVIIPQGQLVDVNSPRDVPEEKPSNRNLPTVRVDTLADNTSNYILHPQTSFPLPKKSVTGMLEEPLLGPLQPLSSNTPIWACRLRSCEKIGDSYRGYCVSETELESVLTFHKQQTQSVWGTRQSPSPAKPATRLMWKSQYVPYDGIPFVNAGSRAVVMECQYGPRRKGFQLKKVSEQESRSCQLYKATCPARIYIKKVQKFPEYRVPTDPKIDKKIIRMEQEKAFNMLKKNLVDAGGVLRWYVQLPTQQAHQYHELETPCLTLSPSPFPVSSLEEEETAVRDENCALPSRLHPQVAHKIQELVSQGIEQVYAVRKQLRKFVERELFKPDEVPERHNLSFFPTVNDIKNHIHEVQKSLRNGDTVYNSEIIPATLQWTTDSGNILKETMTVTFAEGNSPGESITTKVETNQTRGSLSPEPTHLLSSLSSFQPKIFTQLQGLQLQPRYTSPDESPAVVSVNNQPSSSPSGLLDTIGSAVMNNNSLLLGQSHSLQRDTCLTQNNSTASTMGNLPEPDQNLVAMDELVEVGDVEDTGNLEGTVHRILLGDVQTIPIQIIDNHSALIEENPESTISVSQVKQEPKEPALSMEAKKTVDYKKLSAT

SEQ ID NO: 4633 - protein, 399 aa, Homo sapiens
MSDSKEPRVQQLGLLEEDPTTSGIRLFPRDFQFQQIHGHKSSTGCLGHGALVLQLLSFMLLAGVLVAILVQVSKVPSSLSQEQSEQDAIYQNLTQLKAAVGELSEKSKLQEIYQELTQLKAAVGELPEKSKLQEIYQELTRLKAAVGELPEKSKLQEIYQELTRLKAAVGELPEKSKLQEIYQELTRLKAAVGELPEKSKLQEIYQELTELKAAVGELPEKSKLQEIYQELTQLKAAVGELPDQSKQQQIYQELTDLKTAFERLCRHCPKDWTFFQGNCYFMSNSQRNWHDSVTACQEVRAQLVVIKTAEEQNFLQLQTSRSNRFSWMGLSDLNQEGTWQWVDGSPLSPSFQRYWNSGEPNNSGNEDCAEFSGSGWNDNRCDVDNYWICKKPAACFRDE

SEQ ID NO: 4634 - protein, 372 aa, Homo sapiens
MFKHLRKWVVTRFFGHSRQRARLVSKDGRCNIEFGNVEAQSRFIFFVDIWTTVLDLKWRYKMTIFITAFLGSWFFFGLLWYAVAYIHKDLPEFHPSANHTPCVENINGLTSAFLFSLETQVTIGYGFRCVTEQCATAIFLLIFQSILGVIINSFMCGAILAKISRPKKRAKTITFSKNAVISKRGGKLCLLIRVANLRKSLLIGSHIYGKLLKTTVTPEGETIILDQININFVVDAGNENLFFISPLTIYHVIDHNSPFFHMAAETLLQQDFELVVFLDGTVESTSATCQVRTSYVPEEVLWGYRFAPIVSKTKEGKYRVDFHNFSKTVEVETPHCAMCLYNEKDVRARMKRGYDNPNFILSEVNETDDTKM

SEQ ID NO: 4635 - protein, 482 aa, Homo sapiens
MSYPQGYLYQPSASLALYSCPAYSTSVISGPRTDELGRSSSGSAFSPYAGSTAFTAPSPGYNSHLQYGADPAAAAAAAFSSYVGSPYDHTPGMAGSLGYHPYAAPLGSYPYGDPAYRKNATRDATATLKAWLNEHRKNPYPTKGEKIMLAIITKMTLTQVSTWFANARRRLKKENKMTWTPRNRSEDEEEEENIDLEKNDEDEPQKPEDKGDPEGPEAGAEQKAASGCERLQGPPTPAGKETEGSLSDSDFKEPPSEGRLDALQGPPRTGGPSPAGPAAARLAEDPAPHYPAGAPAPGPHPAAGEVPPGPGGPSVIHSPPPPPPPAVLAKPKLWSLAEIATSSDKVKDGGGGNEGSPCPPCPGPIAGQALGGSRASPAPAPSRSPSAQCPFPGGTVLSRPLYYTAPFYPGYTNYGSFGHLHGHPGPGPGPTTGPGSHFNGLNQTVLNRADALAKDPKMLRSQSQLDLCKDSPYELKKGMSDI

SEQ ID NO: 4636 - protein, 314 aa, Homo sapiens
MGDVNQSVASDFILVGLFSHSGSRQLLFSLVAVMFVIGLLGNTVLLFLIRVDSRLHTPMYFLLSQLSLFDIGCPMVTIPKMASDFLRGEGATSYGGGAAQIFFLTLMGVAEGVLLVLMSYDRYVAVCQPLQYPVLMRRQVCLLMMGSSWVVGVLNASIQTSITLHFPYCASRIVDHFFCEVPALLKLSCADTCAYEMALSTSGVLILMLPLSLIATSYGHVLQAVLSMRSEEARHKAVTTCSSHITVVGLFYGAAVFMYMVPCAYHSPQQDNVVSLFYSLVTPTLNPLIYSLRNPEVWMALVKVLSRAGLRQMC

SEQ ID NO: 4637 - protein, 1758 aa, Homo sapiens
MSCVHYKFSSKLNYDTVTFDGLHISLCDLKKQIMGREKLKAADCDLQITNAQTKEEYTDDNALIPKNSSVIVRRIPIGGVKSTSKTYVISRTEPAMATTKAIDDSSASISLAQLTKTANLAEANASEEDKIKAMMSQSGHEYDPINYMKKPLGPPPPSYTCFRCGKPGHYIKNCPTNGDKNFESGPRIKKSTGIPRSFMMEVKDPNMKGAMLTNTGKYAIPTIDAEAYAIGKKEKPPFLPEEPSSSSEEDDPIPDELLCLICKDIMTDAVVIPCCGNSYCDECIRTALLESDEHTCPTCHQNDVSPDALIANKFLRQAVNNFKNETGYTKRLRKQLPPPPPPIPPPRPLIQRNLQPLMRSPISRQQDPLMIPVTSSSTHPAPSISSLTSNQSSLAPPVSGNPSSAPAPVPDITATVSISVHSEKSDGPFRDSDNKILPAAALASEHSKGTSSIAITALMEEKGYQVPVLGTPSLLGQSLLHGQLIPTTGPVRINTARPGGGRPGWEHSNKLGYLVSPPQQIRRGERSCYRSINRGRHHSERSQRTQGPSLPATPVFVPVPPPPLYPPPPHTLPLPPGVPPPQFSPQFPPGQPPPAGYSVPPPGFPPAPANLSTPWVSSGVQTAHSNTIPTTQAPPLSREEFYREQRRLKEESKSPYSGSSYSRSSYTYSKSRSGSTRSRSYSRSFSRSHSRSYSRSPPYPRRGRGKSRNYRSRSRSHGYHRSRSRSPPYRRYHSRSRSPQAFRGQSPNKRNVPQGETEREYFNRYREVPPPYDMKAYYGRSVDFRDPFEKERYREWERKYREWYEKYYKGYAAGAQPRPSANRENFSPERFLPLNIRNSPFTRGRREDYVGGQSHRSRNIGSNYPEKLSARDGHNQKDNTKSKEKESENAPGDGKGNKHKKHRKRRKGEESEGFLNPELLETSRKSREPTGVEENKTDSLFVLPSRDDATPVRDEPMDAESITFKSVSEKDKRERDKPKAKGDKTKRKNDGSAVSKKENIVKPAKGPQEKVDGERERSPRSEPPIKKAKEETPKTDNTKSSSSSQKDEKITGTPRKAHSKSAKEHQETKPVKEEKVKKDYSKDVKSEKLTTKEEKAKKPNEKNKPLDNKGEKRKRKTEEKGVDKDFESSSMKISKLEVTEIVKPSPKRKMEPDTEKMDRTPEKDKISLSAPAKKIKLNRETGKKIGSTENISNTKEPSEKLESTSSKVKQEKVKGKVRRKVTGTEGSSSTLVDYTSTSSTGGSPVRKSEEKTDTKRTVIKTMEEYNNDNTAPAEDVIIMIQVPQSKWDKDDFESEEEDVKSTQPISSVGKPASVIKNVSTKPSNIVKYPEKESEPSEKIQKFTKDVSHEIIQHEVKSSKNSASSEKGKTKDRDYSVLEKENPEKRKNSTQPEKESNLDRLNEQGNFKSLSQSSKEARTSDKHDSTRASSNKDFTPNRDKKTDYDTREYSSSKRRDEKNELTRRKDSPSRNKDSASGQKNKPREERDLPKKGTGDSKKSNSSPSRDRKPHDHKATYDTKRPNEETKSVDKNPCKDREKHVLEARNNKESSGNKLLYILNPPETQVEKEQITGQIDKSTVKPKPQLSHSSRLSSDLTRETDEAAFEPDYNESDSESNVSVKEEESSGNISKDLKDKIVEKAKESLDTAAVVQVGISRNQSHSSPSVSPSRSHSPSGSQTRSHSSSASSAESQDSKKKKKKKEKKKHKKHKKHKKHKKHAGTEVELEKSQKHKHKKKKSKKNKDKEKEKEKDDQKVKSVTV

SEQ ID NO: 4638 - protein, 1130 aa, Homo sapiens
MRCLAPRPAGSYLSEPQGSSQCATMELGPLEGGYLELLNSDADPLCLYHFYDQMDLAGEEEIELYSEPDTDTINCDQFSRLLCDMEGDEETREAYANIAELDQYVFQDSQLEGLSKDIFKHIGPDEVIGESMEMPAEVGQKSQKRPFPEELPADLKHWKPAEPPTVVTGSLLVGPVSDCSTLPCLPLPALFNQEPASGQMRLEKTDQIPMPFSSSSLSCLNLPEGPIQFVPTISTLPHGLWQISEAGTGVSSIFIYHGEVPQASQVPPPSGFTVHGLPTSPDRPGSTSPFAPSATDLPSMPEPALTSRANMTEHKTSPTQCPAAGEVSNKLPKWPEPVEQFYRSLQDTYGAEPAGPDGILVEVDLVQARLERSSSKSLERELATPDWAERQLAQGGLAEVLLAAKEHRRPRETRVIAVLGKAGQGKSYWAGAVSRAWACGRLPQYDFVFSVPCHCLNRPGDAYGLQDLLFSLGPQPLVAADEVFSHILKRPDRVLLILDGFEELEAQDGFLHSTCGPAPAEPCSLRGLLAGLFQKKLLRGCTLLLTARPRGRLVQSLSKADALFELSGFSMEQAQAYVMRYFESSGMTEHQDRALTLLRDRPLLLSHSHSPTLCRAVCQLSEALLELGEDAKLPSTLTGLYVGLLGRAALDSPPGALAELAKLAWELGRRHQSTLQEDQFPSADVRTWAMAKGLVQHPPRAAESELAFPSFLLQCFLGALWLALSGEIKDKELPQYLALTPRKKRPYDNWLEGVPRFLAGLIFQPPARCLGALLGPSAAASVDRKQKVLARYLKRLQPGTLRARQLLELLHCAHEAEEAGIWQHVVQELPGRLSFLGTRLTPPDAHVLGKALEAAGQDFSLDLRSTGICPSGLGSLVGLSCVTRFRAALSDTVALWESLQQHGETKLLQAAEEKFTIEPFKAKSLKDVEDLGKLVQTQRTRSSSEDTAGELPAVRDLKKLEFALGPVSGPQAFPKLVRILTAFSSLQHLDLDALSENKIGDEGVSQLSATFPQLKSLETLNLSQNNITDLGAYKLAEALPSLAASLLRLSLYNNCICDVGAESLARVLPDMVSLRVMDVQYNKFTAAGAQQLAASLRRCPHVETLAMWTPTIPFSVQEHLQQQDSRISLR

SEQ ID NO: 4639 - protein, 351 aa, Homo sapiens
MSLVCLTDFQAHAREQLSKSTRDFIEGGADDSITRDDNIAAFKRIRLRPRYLRDVSEVDTRTTIQGEEISAPICIAPTGFHCLVWPDGEMSTARAAQAAGICYITSTFASCSLEDIVIAAPEGLRWFQLYVHPDLQLNKQLIQRVESLGFKALVITLDTPVCGNRRHDIRNQLRRNLTLTDLQSPKKGNAIPYFQMTPISTSLCWNDLSWFQSITRLPIILKGILTKEDAELAVKHNVQGIIVSNHGGRQLDEVLASIDALTEVVAAVKGKIEVYLDGGVRTGNDVLKALALGAKCIFLGRPILWGLACKGEHGVKEVLNILTNEFHTSMALTGCRSVAEINRNLVQFSRL

SEQ ID NO: 4640 - protein, 2570 aa, Homo sapiens
MTATTRGSPVGGNDNQGQAPDGQSQPPLQQNQTSSPDSSNENSPATPPDEQGQGDAPPQLEDEEPAFPHTDLAKLDDMINRPRWVVPVLPKGELEVLLEAAIDLSKKGLDVKSEACQRFFRDGLTISFTKILTDEAVSGWKFEIHRCIINNTHRLVELCVAKLSQDWFPLLELLAMALNPHCKFHIYNGTRPCESVSSSVQLPEDELFARSPDPRSPKGWLVDLLNKFGTLNGFQILHDRFINGSALNVQIIAALIKPFGQCYEFLTLHTVKKYFLPIIEMVPQFLENLTDEELKKEAKNEAKNDALSMIIKSLKNLASRVPGQEETVKNLEIFRLKMILRLLQISSFNGKMNALNEVNKVISSVSYYTHRHGNPEEEEWLTAERMAEWIQQNNILSIVLRDSLHQPQYVEKLEKILRFVIKEKALTLQDLDNIWAAQAGKHEAIVKNVHDLLAKLAWDFSPEQLDHLFDCFKASWTNASKKQREKLLELIRRLAEDDKDGVMAHKVLNLLWNLAHSDDVPVDIMDLALSAHIKILDYSCSQDRDTQKIQWIDRFIEELRTNDKWVIPALKQIREICSLFGEAPQNLSQTQRSPHVFYRHDLINQLQHNHALVTLVAENLATYMESMRLYARDHEDYDPQTVRLGSRYSHVQEVQERLNFLRFLLKDGQLWLCAPQAKQIWKCLAENAVYLCDREACFKWYSKLMGDEPDLDPDINKDFFESNVLQLDPSLLTENGMKCFERFFKAVNCREGKLVAKRRAYMMDDLELIGLDYLWRVVIQSNDDIASRAIDLLKEIYTNLGPRLQVNQVVIHEDFIQSCFDRLKASYDTLCVLDGDKDSVNCARQEAVRMVRVLTVLREYINECDSDYHEERTILPMSRAFRGKHLSFVVRFPNQGRQVDDLEVWSHTNDTIGSVRRCILNRIKANVAHTKIELFVGGELIDPADDRKLIGQLNLKDKSLITAKLTQISSNMPSSPDSSSDSSTGSPGNHGNHYSDGPNPEVESCLPGVIMSLHPRYISFLWQVADLGSSLNMPPLRDGARVLMKLMPPDSTTIEKLRAICLDHAKLGESSLSPSLDSLFFGPSASQVLYLTEVVYALLMPAGAPLADDSSDFQFHFLKSGGLPLVLSMLTRNNFLPNADMETRRGAYLNALKIAKLLLTAIGYGHVRAVAEACQPGVEGVNPMTQINQVTHDQAVVLQSALQSIPNPSSECMLRNVSVRLAQQISDEASRYMPDICVIRAIQKIIWASGCGSLQLVFSPNEEITKIYEKTNAGNEPDLEDEQVCCEALEVMTLCFALIPTALDALSKEKAWQTFIIDLLLHCHSKTVRQVAQEQFFLMCTRCCMGHRPLLFFITLLFTVLGSTARERAKHSGDYFTLLRHLLNYAYNSNINVPNAEVLLNNEIDWLKRIRDDVKRTGETGIEETILEGHLGVTKELLAFQTSEKKFHIGCEKGGANLIKELIDDFIFPASNVYLQYMRNGELPAEQAIPVCGSPPTINAGFELLVALAVGCVRNLKQIVDSLTEMYYIGTAITTCEALTEWEYLPPVGPRPPKGFVGLKNAGATCYMNSVIQQLYMIPSIRNGILAIEGTGSDVDDDMSGDEKQDNESNVDPRDDVFGYPQQFEDKPALSKTEDRKEYNIGVLRHLQVIFGHLAASRLQYYVPRGFWKQFRLWGEPVNLREQHDALEFFNSLVDSLDEALKALGHPAMLSKVLGGSFADQKICQGCPHRYECEESFTTLNVDIRNHQNLLDSLEQYVKGDLLEGANAYHCEKCNKKVDTVKRLLIKKLPPVLAIQLKRFDYDWERECAIKFNDYFEFPRELDMEPYTVAGVAKLEGDNVNPESQLIQQSEQSESETAGSTKYRLVGVLVHSGQASGGHYYSYIIQRNGGDGERNRWYKFDDGDVTECKMDDDEEMKNQCFGGEYMGEVFDHMMKRMSYRRQKRWWNAYILFYERMDTIDQDDELIRYISELAITTRPHQIIMPSAIERSVRKQNVQFMHNRMQYSMEYFQFMKKLLTCNGVYLNPPPGQDHLLPEAEEITMISIQLAARFLFTTGFHTKKVVRGSASDWYDALCILLRHSKNVRFWFAHNVLFNVSNRFSEYLLECPSAEVRGAFAKLIVFIAHFSLQDGPCPSPFASPGPSSQAYDNLSLSDHLLRAVLNLLRREVSEHGRHLQQYFNLFVMYANLGVAEKTQLLKLSVPATFMLVSLDEGPGPPIKYQYAELGKLYSVVSQLIRCCNVSSRMQSSINGNPPLPNPFGDPNLSQPIMPIQQNVADILFVRTSYVKKIIEDCSNSEETVKLLRFCCWENPQFSSTVLSELLWQVAYSYTYELRPYLDLLLQILLIEDSWQTHRIHNALKGIPDDRDGLFDTIQRSKNHYQKRAYQCIKCMVALFSNCPVAYQILQGNGDLKRKWTWAVEWLGDELERRPYTGNPQYTYNNWSPPVQSNETSNGYFLERSHSARMTLAKACELCPEEVKKATSVQQIEMEESKEPDDQDAPDEHESPPPEDAPLYPHSPGSQYQQNNHVHGQPYTGPAAHHMNNPQRTGQRAQENYEGSEEVSPPQTKDQ

SEQ ID NO: 4641 - protein, 977 aa, Homo sapiens
MKGLSGSRSHHHGVTCDSACDSLSHHSDRKPYLLSPVEHHPADHPYYTQRNSFQAECVGPFSDPLASSTFPRRHYTSQQELKDECALVPRTLATKANRIPANLLDQFERQLPLSRDGYHTLQYKRTAVEHRSDSPGRIRHLVHSVQKLFTKSHSLEGPSKGSVNGGKASPDEAQAARYGKRSKSKERRAEPKARPSTSPGWWSSDDNLDGDMCIYHAPSGVMTMGRCPDRSASQYFLEAYNTISEQAVKASRSNNDVKCSTCANLPVSLDTPLLKKSAWSSTLTVSRAREVYQKASVNMDQAMVKSESCQQERSCQYLQVPQDEWTGYTPRGKDDEIPCRRMRSGSYIKAMGDEDSGDSDTSPKPSPKVAARRESYLKATQPSLTELTTLKISNEHSPKLQIRSHSYLRAVSEVSINRSLDSLDPAGLLTSPKFRSRNESYMRAMSTISQVSEMEVNGQFESVCESVFSELESQAVEALDLPMPGCFRMRSHSYVRAIEKGCSQDDECVSLRSSSPPRTTTTVRTIQSSTVSSCITTYKKTPPPVPPRTTTKPFISITAQSSTESAQDAYMDGQGQRGDIISQSGLSNSTESLDSMKALTAAIEAANAQIHGPASQHMGNNTATVTTTTTIATVTTEDRKKDHFKKNRCLSIGIQVDDAEEPDKTGENKAPSKFQSVGVQVEEEKCFRRFTRSNSVTTAVQADLDFHDNLENSLESIEDNSCPGPMARQFSRDASTSTVSIQGSGNHYHACAADDDFDTDFDPSILPPPDPWIDSITEDPLEAVQRSVCHRDGHWFLKLLQAERDRMEGWCQQMEREERENNLPEDILGKIRTAVGSAQLLMAQKFYQFRELCEENLNPNAHPRPTSQDLAGFWDMLQLSIENISMKFDELHQLKANNWKQMDPLDKKERRAPPPVPKKPAKGPAPLIRERSLESSQRQEARKRLMAAKRAASVRQNSATESAESIEIYIPEAQTRL

SEQ ID NO: 4642 - protein, 961 aa, Homo sapiens
MPDQISVSEFVAETHEDYKAPTASSFTTRTAQCRNTVAAIEEALDVDRMVLYKMKKSVKAINSSGLAHVENEEQYTQALEKFGGNCVCRDDPDLGSAFLKFSVFTKELTALFKNLIQNMNNIISFPLDSLLKGDLKGVKGDLKKPFDKAWKDYETKITKIEKEKKEHAKLHGMIRTEISGAEIAEEMEKERRFFQLQMCEYLLKVNEIKIKKGVDLLQNLIKYFHAQCNFFQDGLKAVESLKPSIETLSTDLHTIKQAQDEERRQLIQLRDILKSALQVEQKEDSQIRQSTAYSLHQPQGNKEHGTERNGSLYKKSDGIRKVWQKRKCSVKNGFLTISHGTANRPPAKLNLLTCQVKTNPEEKKCFDLISHDRTYHFQAEDEQECQIWMSVLQNSKEEALNNAFKGDDNTGENNIVQELTKEIISEVQRMTGNDVCCDCGAPDPTWLSTNLGILTCIECSGIHRELGVHYSRMQSLTLDVLGTSELLLAKNIGNAGFNEIMECCLPAEDSVKPNPGSDMNARKDYITAKYIERRYARKKHADNAAKLHSLCEAVKTRDIFGLLQAYADGVDLTEKIPLANGHEPDETALHLAVRSVDRTSLHIVDFLVQNSGNLDKQTGKGSTALHYCCLTDNAECLKLLLRGKASIEIANESGETPLDIAKRLKHEHCEELLTQALSGRFNSHVHVEYEWRLLHEDLDESDDDMDEKLQPSPNRREDRPISFYQLGSNQLQSNAVSLARDAANLAKEKQRAFMPSILQNETYGALLSGSPPPAQPAAPSTTSAPPLPPRNVGKDPLTPTPPPPVAKTPSVMEALSQPSKPAPPGISQIRPPPLPPQPPSRLPQKKPAPGADKSTPLTNKGQPRGPVDLSATEALGPLSNAMVLQPPAPMPRKSQATKLKPKRVKALYNCVADNPDELTFSEGDVIIVDGEEDQEWWIGHIDGDPGRKGAFPVSFVHFIAD

SEQ ID NO: 4643 - protein, 1132 aa, Homo sapiens
MKEICRICARELCGNQRRWIFHTASKLNLQVLLSHVLGKDVPRDGKAEFACSKCAFMLDRIYRFDTVIARIEALSIERLQKLLLEKDRLKFCIASMYRKNNDDSGAEIKAGNGTVDMSVLPDARYSALLQEDFAYSGFECWVENEDQIQEPHSCHGSEGPGNRPRRCRGCAALRVADSDYEAICKVPRKVARSISCGPSSRWSTSICTEEPALSEVGPPDLASTKVPPDGESMEEETPGSSVESLDASVQASPPQQKDEETERSAKELGKCDCCSDDQAPQHGCNHKLELALSMIKGLDYKPIQSPRGSRLPIPVKSSLPGAKPGPSMTDGVSSGFLNRSLKPLYKTPVSYPLELSDLQELWDDLCEDYLPLRVQPMTEELLKQQKLNSHETTITQQSVSDSHLAELQEKIQQTEATNKILQEKLNEMSYELKCAQESSQKQDGTIQNLKETLKSRERETEELYQVIEGQNDTMAKLREMLHQSQLGQLHSSEGTSPAQQQVALLDLQSALFCSQLEIQKLQRVVRQKERQLADAKQCVQFVEAAAHESEQQKEASWKHNQELRKALQQLQEELQNKSQQLRAWEAEKYNEIRTQEQNIQHLNHSLSHKEQLLQEFRELLQYRDNSDKTLEANEMLLEKLRQRIHDKAVALERAIDEKFSALEEKEKELRQLRLAVRERDHDLERLRDVLSSNEATMQSMESLLRAKGLEVEQLSTTCQNLQWLKEEMETKFSRWQKEQESIIQQLQTSLHDRNKEVEDLSATLLCKLGPGQSEIAEELCQRLQRKERMLQDLLSDRNKQVLEHEMEIQGLLQSVSTREQESQAAAEKLVQALMERNSELQALRQYLGGRDSLMSQAPISNQQAEVTPTGRLGKQTDQGSMQIPSRDDSTSLTAKEDVSIPRSTLGDLDTVAGLEKELSNAKEELELMAKKERESQMELSALQSMMAVQEEELQVQAADMESLTRNIQIKEDLIKDLQMQLVDPEDIPAMERLTQEVLLLREKVASVESQGQEISGNRRQQLLLMLEGLVDERSRLNEALQAERQLYSSLVKFHAHPESSERDRTLQVELEGAQVLRSRLEEVLGRSLERLNRLETLAAIGGAAAGDDTEDTSTEFTDSIEEEAAHHSHQQL

SEQ ID NO: 4644 - protein, 963 aa, Homo sapiens
MAERGGAGGGPGGAGGGSGQRGSGVAQSPQQPPPQQQQQQPPQQPTPPKLAQATSSSSSTSAAAASSSSSSTSTSMAVAVASGSAPPGGPGPGRTPAPVQMNLYATWEVDRSSSSCVPRLFSLTLKKLVMLKEMDKDLNSVVIAVKLQGSKRILRSNEIVLPASGLVETELQLTFSLQYPHFLKRDANKLQIMLQRRKRYKNRTILGYKTLAVGLINMAEVMQHPNEGALVLGLHSNVKDVSVPVAEIKIYSLSSQPIDHEGIKSKLSDRSPDIDNYSEEEEESFSSEQEGSDDPLHGQDLFYEDEDLRKVKKTRRKLTSTSAITRQPNIKQKFVALLKRFKVSDEVGFGLEHVSREQIREVEEDLDELYDSLEMYNPSDSGPEMEETESILSTPKPKLKPFFEGMSQSSSQTEIGSLNSKGSLGKDTTSPMELAALEKIKSTWIKNQDDSLTETDTLEITDQDMFGDASTSLVVPEKVKTPMKSSKTDLQGSASPSKVEGVHTPRQKRSTPLKERQLSKPLSERTNSSDSERSPDLGHSTQIPRKVVYDQLNQILVSDAALPENVILVNTTDWQGQYVAELLQDQRKPVVCTCSTVEVQAVLSALLTRIQRYCNCNSSMPRPVKVAAVGGQSYLSSILRFFVKSLANKTSDWLGYMRFLIIPLGSHPVAKYLGSVDSKYSSSFLDSGWRDLFSRSEPPVSEQLDVAGRVMQYVNGAATTHQLPVAEAMLTCRHKFPDEDSYQKFIPFIGVVKVGLVEDSPSTAGDGDDSPVVSLTVPSTSPPSSSGLSRDATATPPSSPSMSSALAIVGSPNSPYGDVIGLQVDYWLGHPGERRREGDKRDASSKNTLKSVFRSVQVSRLPHSGEAQLSGTMAMTVVTKEKNKKVPTIFLSKKPREKEVDSKSQVIEGISRLICSAKQQQTMLRVSIDGVEWSDIKFFQLAAQWPTHVKHFPVGLFSGSKAT

SEQ ID NO: 4645 - protein, 783 aa, Homo sapiens
MAKYNTGGNPTEDVSVNSRPFRVTGPNSSSGIQARKNLFNNQGNASPPAGPSNVPKFGSPKPPVAVKPSSEEKPDKEPKPPFLKPTGAGQRFGTPASLTTRDPEAKVGFLKPVGPKPINLPKEDSKPTFPWPPGNKPSLHSVNQDHDLKPLGPKSGPTPPTSENEQKQAFPKLTGVKGKFMSASQDLEPKPLFPKPAFGQKPPLSTENSHEDESPMKNVSSSKGSPAPLGVRSKSGPLKPAREDSENKDHAGEISSLPFPGVVLKPAASRGGPGLSKNGEEKKEDRKIDAAKNTFQSKINQEELASGTPPARFPKAPSKLTVGGPWGQSQEKEKGDKNSATPKQKPLPPLFTLGPPPPKPNRPPNVDLTKFHKTSSGNSTSKGQTSYSTTSLPPPPPSHPASQPPLPASHPSQPPVPSLPPRNIKPPFDLKSPVNEDNQDGVTHSDGAGNLDEEQDSEGETYEDIEASKEREKKREKEEKKRLELEKKEQKEKEKKEQEIKKKFKLTGPIQVIHLAKACCDVKGGKNELSFKQGEQIEIIRITDNPEGKWLGRTARGSYGYIKTTAVEIDYDSLKLKKDSLGAPSRPIEDDQEVYDDVAEQDDISSHSQSGSGGIFPPPPDDDIYDGIEEEDADDGFPAPPKQLDMGDEVYDDVDTSDFPVSSAEMSQGTNVGKAKTEEKDLKKLKKQEKEEKDFRKKFKYDGEIRVLYSTKVTTSITSKKWGTRDLQVKPGESLEVIQTTDDTKVLCRNEEGKYGYVLRSYLADNDGEIYDDIADGCIYDND

SEQ ID NO: 4646 - protein, 577 aa, Homo sapiens
MDGEATVKPGEQKEVVRRGREVDYSRLIAGTLPQSHVTSRRAGWKMPLFLILCLLQGSSFALPQKRPHPRWLWEGSLPSRTHLRAMGTLRPSSPLCWREESSFAAPNSLKGSRLVSGEPGGAVTIQCHYAPSSVNRHQRKYWCRLGPPRWICQTIVSTNQYTHHRYRDRVALTDFPQRGLFVVRLSQLSPDDIGCYLCGIGSENNMLFLSMNLTISAGPASTLPTATPAAGELTMRSYGTASPVANRWTPGTTQTLGQGTAWDTVASTPGTSKTTASAEGRRTPGATRPAAPGTGSWAEGSVKAPAPIPESPPSKSRSMSNTTEGVWEGTRSSVTNRARASKDRREMTTTKADRPREDIEGVRIALDAAKKVLGTIGPPALVSETLAWEILPQATPVSKQQSQGSIGETTPAAGMWTLGTPAADVWILGTPAADVWTSMEAASGEGSAAGDLDAATGDRGPQATLSQTPAVGPWGPPGKESSVKRTFPEDESSSRTLAPVSTMLALFMLMALVLLQRKLWRRRTSQEAERVTLIQMTHFLEVNPQADQLPHVERKMLQDDSLPAGASLTAPERNPGP

SEQ ID NO: 4647 - protein, 395 aa, Homo sapiens
MESKRPRLLEEADKQKKTVRVGLNAPSMLRKNQLGFLRFANYCRIARELRVSCMQRKKVQIHSWDPSSLASDRFNRILANTNTDQLFTVNQVEAGGSKYGIITMRGLTTPELRVYPHKTLYVPNRKVNSMCWASLNHLDSHLLLCFVGLADTPSCAVLLPASLFIGSFPGMRRPGMLCSFQIPDAWSCAWSLSIHAYHSFSTGLSQQVLLTNVVTGHQQSFGTSSDVLAQQFAIMTPLLFNGCRSGEIFGIDLRCGNQGSGWKAICLSHDSAVTSLQILQDGQFLVSSDMTGTIKLWDLRATKCVTQYEGHVNNSAYLPVHVNEEEGVVAAVGQDCYTRIWSLRHGHLLTTIPSPYPASENDIPSVAFSSRLGGFRGAPGLLMAVREDLYCFSYG

SEQ ID NO: 4648 - protein, 772 aa, Homo sapiens
MMEELHSLDPRRQELLEARFTGVGVSKGPLNSESSNQSLCSVGSLSDKEVETPEKKQNDQRNRKRKAEPYETSQGKGTPRGHKISDYFEFAGGSAPGTSPGRSVPPVARSSPQHSLSNPLPRRVEQPLYGLDGSAAKEATEEQSALPTLMSVMLAKPRLDTEQLAQRGAGLCFTFVSAQQNSPSSTGSGNTEHSCSSQKQISIQHRQTQSDLTIEKISALENSKNSDLEKKEGRIDDLLRANCDLRRQIDEQQKMLEKYKERLNRCVTMSKKLLIEKSKQEKMACRDKSMQDRLRLGHFTTVRHGASFTEQWTDGYAFQNLIKQQERINSQREEIERQRKMLAKRKPPAMGQAPPATNEQKQRKSKTNGAENETPSSGNTELKDTAPALGAHSLLRLTLAEYHEQEEIFKLRLGHLKKEEAEIQAELERLERVRNLHIRELKRIHNEDNSQFKDHPTLNDRYLLLHLLGRGGFSEVYKAFDLTEQRYVAVKIHQLNKNWRDEKKENYHKHACREYRIHKELDHPRIVKLYDYFSLDTDSFCTVLEYCEGNDLDFYLKQHKLMSEKEARSIIMQIVNALKYLNEIKPPIIHYDLKPGNILLVNGTACGEIKITDFGLSKIMDDDSYNSVDGMELTSQGAGTYWYLPPECFVVGKEPPKISNKVDVWSVGVIFYQCLYGRKPFGHNQSQQDILQENTILKATEVQFPPKPVVTPEAKAFIRRCLAYRKEDRIDVQQLACDPYLLPHIRKSVSTSSPAGAAIASTSGASNNSSSN

SEQ ID NO: 4649 - protein, 310 aa, Homo sapiens
MMDNHSSATEFHLLGFPGSQGLHHILFAIFFFFYLVTLMGNTVIIVIVCVDKRLQSPMYFFLSHLSTLEILVTTIIVPMMLWGLLFLGCRQYLSLHVSLNFSCGTMEFALLGVMAVDRYVAVCNPLRYNIIMNSSTCIWVVIVSWVFGFLSEIWPIYATFQFTFRKSNSLDHFYCDRGQLLKLSCDNTLLTEFILFLMAVFILIGSLIPTIVSYTYIISTILKIPSASGRRKAFSTFASHFTCVVIGYGSCLFLYVKPKQTQGVEYNKIVSLLVSVLTPFLNPFIFTLRNDKVKEALRDGMKRCCQLLKD

SEQ ID NO: 4650 - protein, 1411 aa, Homo sapiens
MSLSSGASGGKGVDANPVETYDSGDEWDIGVGNLIIDLDADLEKDQQKLEMSGSKEVGIPAPNAVATLPDNIKFVTPVPGPQGKEGKSKSKRSKSGKDTSKPTPGTSLFTPSEGAASKKEVQGRSGDGANAGGLVAAIAPKGSEKAAKASRSVAGSKKEKENSSSKSKKERSEGVGTCSEKDPGVLQPVPLGGRGGQYDGSAGVDTGAVEPLGSIAIEPGAALNPLGTKPEPEEGENECRLLKKVKSEKMESPVSTPAVLPIHLLVPVVNNDISSPCEQIMVRTRSVGVNTCDVALATEPECLGPCEPGTSVNLEGIVWQETEDGMLVVNVTWRNKTYVGTLLDCTRHDWAPPRFCDSPTSDLEMRNGRGRGKRMRPNSNTPVNETATASDSKGTSNSSKTRAGANSKGRRGSQNSSEHRPPASSTSEDVKASPSSANKRKNKPLSDMELNSSSEDSKGSKRVRTNSMGSATGPLPGTKVEPTVLDRNCPSPVLIDCPHPNCNKKYKHINGLKYHQAHAHTDDDSKPEADGDSEYGEEPILHADLGSCNGASVSQKGSLSPARSATPKVRLVEPHSPSPSSKFSTKGLCKKKLSGEGDTDLGALSNDGSDDGPSVMDETSNDAFDSLERKCMEKEKCKKPSSLKPEKIPSKSLKSARPIAPAIPPQQIYTFQTATFTAASPGSSSGLTATVAQAMPNSPQLKPIQPKPTVMGEPFTVNPALTPAKDKKKKDKKKKESSKELESPLTPGKVCRAEEGKSPFRESSGDGMKMEGLLNGSSDPHQSRLASIKAEADKIYSFTDNAPSPSIGGSSRLENTTPTQPLTPLHVVTQNGAEASSVKTNSPAYSDISDAGEDGEGKVDSVKSKDAEQLVKEGAKKTLFPPQPQSKDSPYYQGFESYYSPSYAQSSPGALNPSSQAGVESQALKTKRDEEPESIEGKVKNDICEEKKPELSSSSQQPSVIQQRPNMYMQSLYYNQYAYVPPYGYSDQSYHTHLLSTNTAYRQQYEEQQKRQSLEQQQRGVDKKAEMGLKEREAALKEEWKQKPSIPPTLTKAPSLTDLVKSGPGKAKEPGADPAKSVIIPKLDDSSKLPGQAPEGLKVKLSDASHLSKEASEAKTGAECGRQAEMDPILWYRQEAEPRMWTYVYPAKYSDIKSEDERWKEERDRKLKEERSRSKDSVPKEDGKESTSSDCKLPTSEESRLGSKEPRPSVHVPVSSPLTQHQSYIPYMHGYSYSQSYDPNHPSYRSMPAVMMQNYPGSYLPSSYSFSPYGSKVSGGEDADKARASPSVTCKSSSESKALDILQQHASHYKSKSPTISDKTSQERDRGGCGVVGGGGSCSSVGGASGGERSVDRPRTSPSQRLMSTHHHHHHLGYSLLPAQYNLPYAAGLSSTAIVASQQGSTPSLYPPPRR

SEQ ID NO: 4651 - protein, 984 aa, Homo sapiens
MAPGMSGRGGAALLCLSALLAHASGRSHPASPSPPGPQASPVLPVSYRLSHTRLAFFLREARPPSPAVANSSLQRSEPFVVFQTKELPVLNVSLGPFSTSQVVARELLQPSSTLDIPERLTVNWKVRAFIVRSHVPASQPVVQVLFYVAGRDWDDFGVTERLPCVRLHAFRDAREHPLLRIGSISLFRPPPRRTLQEHRLDSNLMIRLPDRPLKPGEVLSILLYLAPNSSSPSSPSVEHFTLRVKAKKGVTLLGTKSRSGQWHVTSELLTGAKHSTATVDVAWAQSTPLPPREGQGPLEILQLDFEMENFTSQSVKRRIMWHIDYRGHGALPDLERAVTELTVIQRDVQAILPLAMDTEIINTAILTGRTVAIPVKVIAIEVNGLVLDISALVECESDNEDIIKVSSSCDYVFVSGKESRGSMNARVTFRYDVLNAPLEMTVWVPKLPLHIELSDARLSQVKGWRVPILPDRRSVRESEDEDEEEEERRQSASRGCTLQYQHATLQVFTQFHTTSSEGTDQVVTMLGPDWLVEVTDLVSDFMRVGDPRVAHMVDSSTLAGLEPGTTPFKVVSPLTEAVLGETLLTVTEEKVSITQLQAQVVASLALSLRPSPGSSHTILATTAAQQTLSFLKQEALLSLWLSYSDGTTAPLSLYSPRDYGLLVSSLDEHVATVTQDRAFPLVVAEAEGSGELLRAELTIAESCQKTKRKSVLATTPVGLRVHFGRDEEDPTYDYPGPSQPGPGGGEDEARGAGPPGSALPAPEAPGPGTASPVVPPTEDFLPLPTGFLQVPRGLTDLEIGMYALLGVFCLAILVFLINCIVFVLRYRHKRIPPEGQTSMDHSHHWVFLGNGQPLRVQGELSPPAGNPLETVPAFCHGDHHSSGSSQTSVQSQVHGRGDGSSGGSARDQAEDPASSPTSKRKRVKFTTFTTLPSEELAYDSVPAGEEDEEEEEDLGWGCPDVAGPTRPTAPPDLHNYMRRIKEIA

SEQ ID NO: 4652 - protein, 1250 aa, Homo sapiens
MEQLSDEEIDHGAEEDSDKEDQDLDKMFGAWLGELDKLTQSLDSDKPMEPVKRSPLRQETNMANFSYRFSIYNLNEALNQGETVDLDALMADLCSIEQELSSIGSGNSKRQITETKATQKLPVSRHTLKHGTLKGLSSSSNRIAKPSHASYSLDDVTAQLEQASLSMDEAAQQSVLEDTKPLVTNQHRRTASAGTVSDAEVHSISNSSHSSITSAASSMDSLDIDKVTRPQELDLTHQGQPITEEEQAAKLKAEKIRVALEKIKEAQVKKLVIRVHMSDDSSKTMMVDERQTVRQVLDNLMDKSHCGYSLDWSLVETVSELQMERIFEDHENLVENLLNWTRDSQNKLIFMERIEKYALFKNPQNYLLGKKETAEMADRNKEVLLEECFCGSSVTVPEIEGVLWLKDDGKKSWKKRYFLLRASGIYYVPKGKAKVSRDLVCFLQLDHVNVYYGQDYRNKYKAPTDYCLVLKHPQIQKKSQYIKYLCCDDVRTLHQWVNGIRIAKYGKQLYMNYQEALKRTESAYDWTSLSSSSIKSGSSSSSIPESQSNHSNQSDSGVSDTQPAGHVRSQSIVSSVFSEAWKRGTQLEESSKARMESMNRPYTSLVPPLSPQPKIVTPYTASQPSPPLPPPPPPPPPPPPPPPPPPPPLPSQSAPSAGSAAPMFVKYSTITRLQNASQHSGALFKPPTPPVMQSQSVKPQILVPPNGVVPPPPPPPPPPTPGSAMAQLKPAPCAPSLPQFSAPPPPLKIHQVQHITQVAPPTPPPPPPIPAPLPPQAPPKPLVTIPAPTSTKTVAPVVTQAAPPTPTPPVPPAKKQPAFPASYIPPSPPTPPVPVPPPTLPKQQSFCAKPPPSPLSPVPSVVKQIASQFPPPPTPPAMESQPLKPVPANVAPQSPPAVKAKPKWQPSSIPVPSPDFPPPPPESSLVFPPPPPSPVPAPPPPPPPTASPTPDKSGSPGKKTSKTSSPGGKKPPPTPQRNSSIKSSSGAEHPEPKRPSVDSLVSKFTPPAESGSPSKETLPPPAAPPKPGKLNLSGVNLPGVLQQGCVSAKAPVLSGRGKDSVVEFPSPPSDSDFPPPPPETELPLPPIEIPAVFSGNTSPKVAVVNPQPQQWSKMSVKKAPPPTRPKRNDSTRLTQAEISEQPTMATVVPQVPTSPKSSLSVQPGFLADLNRTLQRKSITRHGSLSSRMSRAEPTATMDDMALPPPPPELLSDQQKAGYGGSHISGYATLRRGPPPAPPKRDQNTKLSRDW

SEQ ID NO: 4653 - protein, 812 aa, Homo sapiens
MTGLEDQEFDFEFLFEFNQRDEGAAAAAPEHYGYASSNVSPALPLPTAHSTLPAPCHNLQTSTPGIIPPADHPSGYGAALDGGPAGYFLSSGHTRPDGAPALESPRIEITSCLGLYHNNNQFFHDVEVEDVLPSSKRSPSTATLSLPSLEAYRDPSCLSPASSLSSRSCNSEASSYESNYSYPYASPQTSPWQSPCVSPKTTDPEEGFPRGLGACTLLGSPRHSPSTSPRASVTEESWLGARSSRPASPCNKRKYSLNGRQPPYSPHHSPTPSPHGSPRVSVTDDSWLGNTTQYTSSAIVAAINALTTDSSLDLGDGVPVKSRKTTLEQPPSVALKVEPVGEDLGSPPPPADFAPEDYSSFQHIRKGGFCDQYLAVPQHPYQWAKPKPLSPTSYMSPTLPALDWQLPSHSGPYELRIEVQPKSHHRAHYETEGSRGAVKASAGGHPIVQLHGYLENEPLMLQLFIGTADDRLLRPHAFYQVHRITGKTVSTTSHEAILSNTKVLEIPLLPENSMRAVIDCAGILKLRNSDIELRKGETDIGRKNTRVRLVFRVHVPQPSGRTLSLQVASNPIECSQRSAQELPLVEKQSTDSYPVVGGKKMVLSGHNFLQDSKVIFVEKAPDGHHVWEMEAKTDRDLCKPNSLVVEIPPFRNQRITSPVHVSFYVCNGKRKRSQYQRFTYLPANVPIIKTEPTDDYEPAPTCGPVSQGLSPLPRPYYSQQLAMPPDPSSCLVAGFPPCPQRSTLMPAAPGVSPKLHDLSPAAYTKGVASPGHCHLGLPQPAGEAPAVQDVPRPVATHPGSPGQPPPALLPQQ

SEQ ID NO: 4654 - protein, 739 aa, Homo sapiens
MAPQKHGGGGGGGSGPSAGSGGGGFGGSAAVAAATASGGKSGGGSCGGGGSYSASSSSSAAAAAGAAVLPVKKPKMEHVQADHELFLQAFEKPTQIYRFLRTRNLIAPIFLHRTLTYMSHRNSRTNIKRKTFKVDDMLSKVEKMKGEQESHSLSAHLQLTFTGFFHKNDKPSPNSENEQNSVTLEVLLVKVCHKKRKDVSCPIRQVPTGKKQVPLNPDLNQTKPGNFPSLAVSSNEFEPSNSHMVKSYSLLFRVTRPGRREFNGMINGETNENIDVNEELPARRKRNREDGEKTFVAQMTVFDKNRRLQLLDGEYEVAMQEMEECPISKKRATWETILDGKRLPPFETFSQGPTLQFTLRWTGETNDKSTAPIAKPLATRNSESLHQENKPGSVKPTQTIAVKESLTTDLQTRKEKDTPNENRQKLRIFYQFLYNNNTRQQTEARDDLHCPWCTLNCRKLYSLLKHLKLCHSRFIFNYVYHPKGARIDVSINECYDGSYAGNPQDIHRQPGFAFSRNGPVKRTPITHILVCRPKRTKASMSEFLESEDGEVEQQRTYSSGHNRLYFHSDTCLPLRPQEMEVDSEDEKDPEWLREKTITQIEEFSDVNEGEKEVMKLWNLHVMKHGFIADNQMNHACMLFVENYGQKIIKKNLCRNFMLHLVSMHDFNLISIMSIDKAVTKLREMQQKLEKGESASPANEEITEEQNGTANGFSEINSKEKALETDSVSGVSKQSKKQKL

SEQ ID NO: 4655 - protein, 620 aa, Homo sapiens
MAAATADPGAGNPQPGDSSGGGAGGGLPSPGEQELSRRLQRLYPAVNQQETPLPRSWSPKDKYNYIGLSQGNLRVHYKGHGKNHKDAASVRATHPIPAACGIYYFEVKIVSKGRDGYMGIGLSAQGVNMNRLPGWDKHSYGYHGDDGHSFCSSGTGQPYGPTFTTGDVIGCCVNLINGTCFYTKNGHSLGIAFTDLPANLYPTVGLQTPGEIVDANFGQQPFLFDIEDYMREWRAKVQGTVHCFPISARLGEWQAVLQNMVSSYLVHHGYCATATAFARMTETPIQEEQASIKNRQKIQKLVLEGRVGEAIETTQRFYPGLLEHNPNLLFMLKCRQFVEMVNGTDSEVRSLSSRSPKSQDSYPGSPSLSPRHGPSSSHMHNTGADSPSCSNGVASTKSKQNHSKYPAPSSSSSSSSSSSSSSPSSVNYSESNSTDSTKSQHHSSTSNQETSDSEMEMEAEHYPNGVLGSMSTRIVNGAYKHEDLQTDESSMDDRHPRRQLCGGNQAATERIILFGRELQALSEQLGREYGKNLAHTEMLQDAFSLLAYSDPWSCPVGQQLDPIQREPVCAALNSAILESQNLPKQPPLMLALGQASECLRLMARAGLGSCSFARVDDYLH

SEQ ID NO: 4656 - protein, 809 aa, Homo sapiens
MFKSLTKVNKVKPIGENNENEQSSRRNEEGSHPSNQSQQTTAQEENKGEEKSLKTKSTPVTSEEPHTNIQDKLSKKNSSGDLTTNPDPQNAAEPTGTVPEQKEMDPGKEGPNSPQNKPPAAPVINEYADAQLHNLVKRMRQRTALYKKKLVEGDLSSPEASPQTAKPTAVPPVKESDDKPTEHYYRLLWFKVKKMPLTEYLKRIKLPNSIDSYTDRLYLLWLLLVTLAYNWNCCFIPLRLVFPYQTADNIHYWLIADIICDIIYLYDMLFIQPRLQFVRGGDIIVDSNELRKHYRTSTKFQLDVASIIPFDICYLFFGFNPMFRANRMLKYTSFFEFNHHLESIMDKAYIYRVIRTTGYLLFILHINACVYYWASNYEGIGTTRWVYDGEGNEYLRCYYWAVRTLITIGGLPEPQTLFEIVFQLLNFFSGVFVFSSLIGQMRDVIGAATANQNYFRACMDDTIAYMNNYSIPKLVQKRVRTWYEYTWDSQRMLDESDLLKTLPTTVQLALAIDVNFSIISKVDLFKGCDTQMIYDMLLRLKSVLYLPGDFVCKKGEIGKEMYIIKHGEVQVLGGPDGTKVLVTLKAGSVFGEISLLAAGGGNRRTANVVAHGFANLLTLDKKTLQEILVHYPDSERILMKKARVLLKQKAKTAEATPPRKDLALLFPPKEETPKLFKTLLGGTGKASLARLLKLKREQAAQKKENSEGGEEEGKENEDKQKENEDKQKENEDKGKENEDKDKGREPEEKPLDRPECTASPIAVEEEPHSVRRTVLPRGTSRQSLIISMAPSAEGGEEVLTIEVKEKAKQ

SEQ ID NO: 4657 - protein, 975 aa, Homo sapiens
MDLNSASTVVLQVLTQATSQDTAVLKPAEEQLKQWETQPGFYSVLLNIFTNHTLDINVRWLAVLYFKHGIDRYWRRVAPHALSEEEKTTLRAGLITNFNEPINQIATQIAVLIAKVARLDCPRQWPELIPTLIESVKVQDDLRQHRALLTFYHVTKTLASKRLAADRKLFYDLASGIYNFACSLWNHHTDTFLQEVSSGNEAAILSSLERTLLSLKVLRKLTVNGFVEPHKNMEVMGFLHGIFERLKQFLECSRSIGTDNVCRDRLEKTIILFTKVLLDFLDQHPFSFTPLIQRSLEFSVSYVFTEVGEGVTFERFIVQCMNLIKMIVKNYAYKPSKNFEDSSPETLEAHKIKMAFFTYPTLTEICRRLVSHYFLLTEEELTMWEEDPEGFTVEETGGDSWKYSLRPCTEVLFIDIFHEYNQTLTPVLLEMMQTLQGPTNVEDMNALLIKDAVYNAVGLAAYELFDSVDFDQWFKNQLLPELQVIHNRYKPLRRRVIWLIGQWISVKFKSDLRPMLYEAICNLLQDQDLVVRIETATTLKLTVDDFEFRTDQFLPYLETMFTLLFQLLQQVTECDTKMHVLHVLSCVIERVNMQIRPYVGCLVQYLPLLWKQSEEHNMLRCAILTTLIHLVQGLGADSKNLYPFLLPVIQLSTDVSQPPHVYLLEDGLELWLVTLENSPCITPELLRIFQNMSPLLELSSENLRTCFKIINGYIFLSSTEFLQTYAVGLCQSFCELLKEITTEGQVQVLKVVENALKVNPILGPQMFQPILPYVFKGIIEGERYPVVMSTYLGVMGRVLLQNTSFFSSLLNEMAHKFNQEMDQLLGNMIEMWVDRMDNITQPERRKLSALALLSLLPSDNSVIQDKFCGIINISVEGLHDVMTEDPETGTYKDCMLMSHLEEPKVTEDEEPPTEQDKRKKMLALKDPVHTVSLQQFIYEKLKAQQEMLGEQGFQSLMETVDTEIVTQLQEFLQGF

SEQ ID NO: 4658 - protein, 613 aa, Homo sapiens
MGALRPTLLPPSLPLLLLLMLGMGCWAREVLVPEGPLYRVAGTAVSISCNVTGYEGPAQQNFEWFLYRPEAPDTALGIVSTKDTQFSYAVFKSRVVAGEVQVQRLQGDAVVLKIARLQAQDAGIYECHTPSTDTRYLGSYSGKVELRVLPDVLQVSAAPPGPRGRQAPTSPPRMTVHEGQELALGCLARTSTQKHTHLAVSFGRSVPEAPVGRSTLQEVVGIRSDLAVEAGAPYAERLAAGELRLGKEGTDRYRMVVGGAQAGDAGTYHCTAAEWIQDPDGSWAQIAEKRAVLAHVDVQTLSSQLAVTVGPGERRIGPGEPLELLCNVSGALPPAGRHAAYSVGWEMAPAGAPGPGRLVAQLDTEGVGSLGPGYEGRHIAMEKVASRTYRLRLEAARPGDAGTYRCLAKAYVRGSGTRLREAASARSRPLPVHVREEGVVLEAVAWLAGGTVYRGETASLLCNISVRGGPPGLRLAASWWVERPEDGELSSVPAQLVGGVGQDGVAELGVRPGGGPVSVELVGPRSHRLRLHSLGPEDEGVYHCAPSAWVQHADYSWYQAGSARSGPVTVYPYMHALDTLFVPLLVGTGVALVTGATVLGTITCCFMKRLRKR

SEQ ID NO: 4659 - protein, 416 aa, Homo sapiens
MDASRPKSSESQSSLEAPRPGPNPSPNVVNKPLQRDSPGMVADRLPPKTGAVVIDMGTGTCKVGFAGQASPTYTVATILGCQPKKPATSGQSGLQTFIGEAARVLPELTLVQPLRSGIVVDWDAAELIWRHLLEHDLRVATHDHPLLFSDPPFSPATNREKLVEVAFESLRSPAMYVASQSVLSVYAHGRVSGLVVDTGHGVTYTVPVFQGYNLLHATERLDLAGNNLTAFLAEMLLQAGLPLGQQDLDLVENIKHHYCYVASDFQKEQARPEQEYKRTLKLPDGRTVTLGKELFQCPELLFNPPEVPGLSPVGLSTMAKQSLRKLSLEMRADLAQNVLLCGGSSLFTGFEGRFRAELLRALPAETHVVVAAQPTRNFSVWIGGSILASLRAFQSCWVLREQYEEQGPYIVYRKCY

SEQ ID NO: 4660 - protein, 2601 aa, Homo sapiens
MKRKVVNTHKLRLSPNEEAFILKEDYERRRKLRLLQVREQERDIALQIREDIKQRRNQQFTRLAEELRAEWEESQTQKIQNLEKLYLASLRSMGEGHRQAKENEPDLDALAQRAAERKRKADLRHKEALKVQKNQKEILLKQKTWHIKARKEALLVEKERSAKITSLPPPPPTLFENIEVKRISAVKTNSSTYHHLHTFVNRETDTKRPDARLAAEEEAKRLEELQKQAAQERMERFEKAHVRGFQAMKKIHLAQNQEKLMKELKQLQQEDLARRRQTVAQMPPQLVELPYKRSEMKEDWQRELEFAFEDMYNADRKVKGNLILHLEPEPLPTVTNQIQDEELDLSMEQENLGAAEDLPVTEAEICSSETDVPLVMKTQQIPSKVLFKKLLNKIRSQKSLWTIKSMSEDESEMITTVSEIESKAPTVESGTIASKERTLSSGQEQVVESDTLTIESGPLASEDKPLSCGTNSGKEQEINETLPITTVAQSSVLLHPQEAAARIRMSARQKQIMEIEEQKQKQLELLEQIEQQKLRLETDCFRAQLEEEKRKKTQPTGVGIAPASCPVISDEDSHRQMIRNYQHQLLQQNRLHRQSVETARKQLLEYQTMLKGRCPSVSAPSLITDSVISVPSWKSERPTAISEHWDQGQRLKLSPNKYQPIQPIQTSKLEQDHFQVARQNHFPQRQVETTETLRASDILTNQALESQEHLRQFSQTETQQRDYKLVPKDSETLSRALSHDRQLISQDARKISETFGATTFQSLESQQLFSENSENISYHLTEPSSFVPLVPQHSFSSLPVKVESGKIQEPFSAMSKSTVSTSHSIISQMHDRPLLPSENITAQQGNMKALQEQLDLQKKVLQATQEAQEQLLLCKQKEVEQQTGLSVFLPLVTPDSSALLPSAKADLGRIQESSPTKNNIAVSSDHHVISQLQDKRLSLSQPILSQQNNFKFLQEQLNIQKDSLQARREAQEVLYVHKQSELDRRVCSEQAEPSFPFQVAQHTFTSLPSADTKSGKIQEQHSSKSEKGLVSCQSDIPISQDGSLSFLQQFLPLHDSLKLLQEQLTKQRDTLQARHEAQVELLLHRQRDLGDSKSGLVSSSSSPVVVQHSVASQASAKAEPRRIQELYLSEKENVGPSCHLIIPTFQDKSLSFPQHSLAQQENLTILQEQSQIQRVILGAKEGTQEFVHTESELEKRISSEQTGTSSSLSQVDESERFQECISIKSDSTIPLSHPKIPRCQERLLRVSQHMLPLQDNLEEHQAWLDTEKEAFHFSQKTQENTSSEQTGSSSFIPQLVQLSFTSLASAESGTILEPLFTESESKIFSSHLQIPQLQDRLLRISQLIQPQQDNLKALQEQLATQREAIILARQEAREELLLHQSEWEGRISPEQVDTSSLPLVPQHSFASLPLNESERNQEPCSINSDNIVSSGHSEIPTLPDGLLGLSHLVLPQQDNLIALEEHLHAQTDFLPSIEKTQKELVLSKPCKFEEKVSSEHFIQSHHGDLQALQQQLDTQKKAIRSIQEVQEELLLQRLSELEKRVSSEQVCSSSFVSQVPVADSERTQKSFPTKSNDTLPSSHREIPRLQDRLLSLSKPILPQQDNMTAQLDAQREVMYSYEKPQEELSLNKQRKLNKSESAEHTIPSLFLPKETEHSFIPLPFAEAKPKSTCELYSSQNEHAAPPSNPVIPGFQDRLLSFSQSVLTQQDNLGLQKQLDLQREVLHYSQKAQEKLLVQRQTALQQQIQKHEETLKDFFKDSQISKPTVENDLKTQKMGQLRDWFPNTQDLAGNDQENIRHADRNNSDDNHLASEDTSAKQSGEHLEKDLGRRSSKPPVAKVKCGLDLNQHELSAIQEVESPAIGRTSILGKPGIYEDRDPLRVSISREQSFFGSPLAHDPFSCLQLVGQENVCGDDYDEAVKLKESVVENHAVLSYAVEEEHAYLGPTVKPDDKAKTLSYEPLSSATVSTGSLLSYENTDLSLTDPESFSEHMDDSKQESTTSKEEETNIISSIVPSTQDIYQRQNSSDVHKSLLPAVDETTCGHTHFQQMIDKYINEANLIPEKTDLQELEHIFPNLHHQLFKPLEPHPDFDLSSSSSGISPDNRDFYQRSDSSSESHCATGLSKSTVYFTALRRTSMHSSLNTSPNQQPDTNLAHVGAHSFATENIIGGSEQCFEQLQPEYSSQEESQHADLPSIFSIEARDSSQGMKNQNYPSEEHTEILQNKKKIVHFQLSIGNLSSVYSSSDEANVFDQLNVQHSTPCGSNSSECSTKHQLESRKESMGFEELSKRGVVTMLQSQGLIEDNKNETCRVLDINPQVEETDSRLCVRTVEMGTSIQAPYSLTTQNEKYFENSAETDIPKITKKLSQLGESELFASSGSFSLQSSIPVWETETGHGIMEEPELTLISTTDTSIAEMDFANLTLEEKSENEAKCFFQVSEFLPLVSATEASDYPAVSELSIEKPRTASTETPRRLTPVPGSLQEAFIKRKKSFMERSHQRQKEIRNKIHVSENSQIKTVKEKPSISSSVSRLKGVNKVRASFPEDRKTTQALRHQRGLRLYNQLAEVKQQKEEKTKQEAYAQNRARAKEFHKKTLEKLRAKNTC

SEQ ID NO: 4661 - protein, 858 aa, Homo sapiens
MAAKGAHGSYLKVESELERCRAEGHWDRMPELVRQLQTLSMPGGGGNRRGSPSAAFTFPDTDDFGKLLLAEALLEQCLKENHAKIKDSMPLLEKNEPKMSEAKNYLSSILNHGRLSPQYMCEAMLILGKLHYVEGSYRDAISMYARAGIDDMSMENKPLYQMRLLSEAFVIKGLSLERLPNSIASRFRLTEREEEVITCFERASWIAQVFLQELEKTTNNSTSRHLKGCHPLDYELTYFLEAALQSAYVKNLKKGNIVKGMRELREVLRTVETKATQNFKVMAAKHLAGVLLHSLSEECYWSPLSHPLPEFMGKEESSFATQALRKPHLYEGDNLYCPKDNIEEALLLLLISESMATRDVVLSRVPEQEEDRTVSLQNAAAIYDLLSITLGRRGQYVMLSECLERAMKFAFGEFHLWYQVALSMVACGKSAYAVSLLRECVKLRPSDPTVPLMAAKVCIGSLRWLEEAEHFAMMVISLGEEAGEFLPKGYLALGLTYSLQATDATLKSKQDELHRKALQTLERAQQLAPSDPQVILYVSLQLALVRQISSAMEQLQEALKVRKDDAHALHLLALLFSAQKHHQHALDVVNMAITEHPENFNLMFTKVKLEQVLKGPEEALVTCRQVLRLWQTLYSFSQLGGLEKDGSFGEGLTMKKQSGMHLTLPDAHDADSGSRRASSIAASRLEEAMSELTMPSSVLKQGPMQLWTTLEQIWLQAAELFMEQQHLKEAGFCIQEAAGLFPTSHSVLYMRGRLAEVKGNLEEAKQLYKEALTVNPDGVRIMHSLGLMLSRLGHKSLAQKVLRDAVERQSTCHEAWQGLGEVLQAQGQNEAAVDCFLTALELEASSPVLPFSIIPREL

SEQ ID NO: 4662 - protein, 475 aa, Homo sapiens
MTTLPPLPMTRPKLTALARQKLPCSSRKIPRSQLIKEKDDIDHYLEVNFKGLSKEEVAAYRNSYKKNICVDMLRDGYHKSFTELFALMERWDALREAARVRSLFWLQKPLEEQPDKLDYLYHYLTRAEDAERKESFEDVHNNLYALACYFNNSEDKWVRNHFYERCFKIAQLIKIDCGKKEAEAHMHMGLLYEEDGQLLEAAEHYEAFHQLTQGRIWKDETGRSLNLLACESLLRTYRLLSDKMLENKEYKQAIKILIKASEIAKEGSDKKMEAEASYYLGLAHLAAEEYETALTVLDTYCKISTDLDDDLSLGRGYEAIAKVLQSQGEMTEAIKYLKKFVKIARNNFQSLDLVRASTMLGDIYNEKGYYNKASECFQQAFDTTVELMSMPLMDETKVHYGIAKAHQMMLTVNNYIESADLTSLNYLLSWKESRGNIEPDPVTEEFRGSTVEAVSQNSERLEELSRFPGDQKNET

SEQ ID NO: 4663 - protein, 1136 aa, Homo sapiens
MFSRKKRELMKTPSISKKNRAGSPSPQPSGELPRKDGADAVFPGPSLEPPAGSSGVKATGTLKRPTSLSRHASAAGFPLSGAASWTLGRSHRSPLTAASPGELPTEGAGPDVVEDISHLLADVARFAEGLEKLKECVLRDDLLEARRPRAHECLGEALRVMHQIISKYPLLNTVETLTAAGTLIAKVKAFHYESNNDLEKQEFEKALETIAVAFSSTVSEFLMGEVDSSTLLAVPPGDSSQSMESLYGPGSEGTPPSLEDCDAGCLPAEEVDVLLQRCEGGVDAALLYAKNMAKYMKDLISYLEKRTTLEMEFAKGLQKIAHNCRQSVMQEPHMPLLSIYSLALEQDLEFGHSMVQAVGTLQTQTFMQPLTLRRLEHEKRRKEIKEAWHRAQRKLQEAESNLRKAKQGYVQRCEDHDKARFLVAKAEEEQAGSAPGAGSTATKTLDKRRRLEEEAKNKAEEAMATYRTCVADAKTQKQELEDTKVTALRQIQEVIRQSDQTIKSATISYYQMMHMQTAPLPVHFQMLCESSKLYDPGQQYASHVRQLQRDQEPDVHYDFEPHVSANAWSPVMRARKSSFNVSDVARPEAAGSPPEEGGCTEGTPAKDHRAGRGHQVHKSWPLSISDSDSGLDPGPGAGDFKKFERTSSSGTMSSTEELVDPDGGAGASAFEQADLNGMTPELPVAVPSGPFRHEGLSKAARTHRLRKLRTPAKCRECNSYVYFQGAECEECCLACHKKCLETLAIQCGHKKLQGRLQLFGQDFSHAARSAPDGVPFIVKKCVCEIERRALRTKGIYRVNGVKTRVEKLCQAFENGKELVELSQASPHDISNVLKLYLRQLPEPLISFRLYHELVGLAKDSLKAEAEAKAASRGRQDGSESEAVAVALAGRLRELLRDLPPENRASLQYLLRHLRRIVEVEQDNKMTPGNLGIVFGPTLLRPRPTEATVSLSSLVDYPHQARVIETLIVHYGLVFEEEPEETPGGQDESSNQRAEVVVQVPYLEAGEAVVYPLQEAAADGCRESRVVSNDSDSDLEEASELLSSSEASALGHLSFLEQQQSEASLEVASGSHSGSEEQLEATAREDGDGDEDGPAQQLSGFNTNQSNNVLQAPLPPMRLRGGRMTLGSCRERQPEFV

SEQ ID NO: 4664 - protein, 265 aa, Homo sapiens
MEALPPVRSSLLGILLQVTRLSVLLVQNRDHLYNFLLLKINLFNHWVSGLAQEARGSCNWQAHLPLGAAACPLGQALWAGLALIQVPVWLVLQGPRLMWAGMWGSTKGLGLALLSAWEQLGLSVAIWTDLFLSCLHGLMLVALLLVVVTWRVCQKSHCFRLGRQLSKALQVNCVVRKLLVQLRRLYWWVETMTALTSWHLAYLITWTTCLASHLLQAAFEHTTQLAEAQEVEPQEVSGSSLLPSLSASSDSESGTVLPEQETPRE

SEQ ID NO: 4665 - protein, 475 aa, Homo sapiens
MVEDLAASYIVLKLENEIRQAQVQWLMEENAALQAQIPELQKSQAAKEYDLLRKSSEAKEPQKLPEHMNPPAAWEAQKTPEFKEPQKPPEPQDLLPWEPPAAWELQEAPAAPESLAPPATRESQKPPMAHEIPTVLEGQGPANTQDATIAQEPKNSEPQDPPNIEKPQEAPEYQETAAQLEFLELPPPQEPLEPSNAQEFLELSAAQESLEGLIVVETSAASEFPQAPIGLEATDFPLQYTLTFSGDSQKLPEFLVQLYSYMRVRGHLYPTEAALVSFVGNCFSGRAGWWFQLLLDIQSPLLEQCESFIPVLQDTFDNPENMKDANQCIHQLCQGEGHVATHFHLIAQELNWDESTLWIQFQEGLASSIQDELSHTSPATNLSDLITQCISLEEKPDPNPLGKSSSAEGDGPESPPAENQPMQAAINCPHISEAEWVRWHKGRLCLYCGYPGHFARDCPVKPHQALQAGNIQACQ

SEQ ID NO: 4666 - protein, 739 aa, Homo sapiens
MATLPAEPSAGPAAGGEAVAAAAATEEEEEEARQLLQTLQAAEGEAAAAAGAGAGAAAAGAEGPGSPGVPGSPPEAASEPPTGLRFSPEQVACVCEALLQAGHAGRLSRFLGALPPAERLRGSDPVLRARALVAFQRGEYAELYRLLESRPFPAAHHAFLQDLYLRARYHEAERARGRALGAVDKYRLRKKFPLPKTIWDGEETVYCFKERSRAALKACYRGNRYPTPDEKRRLATLTGLSLTQVSNWFKNRRQRDRTGAGGGAPCKSESDGNPTTEDESSRSPEDLERGAAPVSAEAAAQGSIFLAGTGPPAPCPASSSILVNGSFLAASGSPAVLLNGGPVIINGLALGEASSLGPLLLTGGGGAPPPQPSPQGASETKTSLVLDPQTGEVRLEEAQSEAPETKGAQVAAPGPALGEEVLGPLAQVVPGPPTAATFPLPPGPVPAVAAPQVVPLSPPPGYPTGLSPTSPLLNLPQVVPTSQVVTLPQAVGPLQLLAAGPGSPVKVAAAAGPANVHLINSGVGVTALQLPSATAPGNFLLANPVSGSPIVTGVALQQGKIILTATFPTSMLVSQVLPPAPGLALPLKPETAISVPEGGLPVAPSPALPEAHALGTLSAQQPPPAAATTSSTSLPFSPDSPGLLPNFPAPPPEGLMLSPAAVPVWSAGLELSAGTEGLLEAEKGLGTQAPHTVLRLPDPDPEGLLLGATAGGEVDEGLEAEAKVLTQLQSVPVEEPLEL

SEQ ID NO: 4667 - protein, 690 aa, Homo sapiens
MPWEEPAGEKPSCSHSQKAFHMEPAQKPCFTTDMVTWALLCISAETVRGEAPSQPRGIPHRSPVSVDDLWLEKTQRKKLQKQAHVERRLHIGAVHKDGVKCWRKTIITSPESLNLPRRSHPLSQSAPTGLNHMGWPEHTPGTAMPDGALDTAVCADEVGSEEDLYDDLHSSSHHYSHPGGGGEQLAINELISDGSVVCAEALWDHVTMDDQELGFKAGDVIEVMDATNREWWWGRVADGEGWFPASFVRLRVNQDEPADDDAPLAGNSGAEDGGAEAQSSKDQMRTNVINEILSTERDYIKHLRDICEGYVRQCRKRADMFSEEQLRTIFGNIEDIYRCQKAFVKALEQRFNRERPHLSELGACFLEHQADFQIYSEYCNNHPNACVELSRLTKLSKYVYFFEACRLLQKMIDISLDGFLLTPVQKICKYPLQLAELLKYTHPQHRDFKDVEAALHAMKNVAQLINERKRRLENIDKIAQWQSSIEDWEGEDLLVRSSELIYSGELTRVTQPQAKSQQRMFFLFDHQLIYCKKDLLRRDVLYYKGRLDMDGLEVVDLEDGKDRDLHVSIKNAFRLHRGATGDSHLLCTRKPEQKQRWLKAFAREREQVQLDQETGFSITELQRKQAMLNASKQQVTGKPKAVGRPCYLTRQKHPALPSNRPQQQVLVLAEPRRKPSTFWHSISRLAPFRK

SEQ ID NO: 4668 - protein, 1599 aa, Homo sapiens
MNKAPQSTGPPPAPSPGLPQPAFPPGQTAPVVFSTPQATQMNTPSQPRQHFYPSRAQPPSSAASRVQSAAPARPGPAAHVYPAGSQVMMIPSQISYPASQGAYYIPGQGRSTYVVPTQQYPVQPGAPGFYPGASPTEFGTYAGAYYPAQGVQQFPTGVAPTPVLMNQPPQIAPKRERKTIRIRDPNQGGKDITEEIMSGARTASTPTPPQTGGGLEPQANGETPQVAVIVRPDDRSQGAIIADRPGLPGPEHSPSESQPSSPSPTPSPSPVLEPGSEPNLAVLSIPGDTMTTIQMSVEESTPISRETGEPYRLSPEPTPLAEPILEVEVTLSKPVPESEFSSSPLQAPTPLASHTVEIHEPNGMVPSEDLEPEVESSPELAPPPACPSESPVPIAPTAQPEELLNGAPSPPAVDLSPVSEPEEQAKEVTASMAPPTIPSATPATAPSATSPAQEEEMEEEEEEEEGEAGEAGEAESEKGGEELLPPESTPIPANLSQNLEAAAATQVAVSVPKRRRKIKELNKKEAVGDLLDAFKEANPAVPEVENQPPAGSNPGPESEGSGVPPRPEEADETWDSKEDKIHNAENIQPGEQKYEYKSDQWKPLNLEEKKRYDREFLLGFQFIFASMQKPEGLPHISDVVLDKANKTPLRPLDPTRLQGINCGPDFTPSFANLGRTTLSTRGPPRGGPGGELPRGPAGLGPRRSQQGPRKEPRKIIATVLMTEDIKLNKAEKAWKPSSKRTAADKDRGEEDADGSKTQDLFRRVRSILNKLTPQMFQQLMKQVTQLAIDTEERLKGVIDLIFEKAISEPNFSVAYANMCRCLMALKVPTTEKPTVTVNFRKLLLNRCQKEFEKDKDDDEVFEKKQKEMDEAATAEERGRLKEELEEARDIARRRSLGNIKFIGELFKLKMLTEAIMHDCVVKLLKNHDEESLECLCRLLTTIGKDLDFEKAKPRMDQYFNQMEKIIKEKKTSSRIRFMLQDVLDLRGSNWVPRRGDQGPKTIDQIHKEAEMEEHREHIKVQQLMAKGSDKRRGGPPGPPISRGLPLVDDGGWNTVPISKGSRPIDTSRLTKITKPGSIDSNNQLFAPGGRLSWGKGSSGGSGAKPSDAASEAARPATSTLNRFSALQQAVPTESTDNRRVVQRSSLSRERGEKAGDRGDRLERSERGGDRGDRLDRARTPATKRSFSKEVEERSRERPSQPEGLRKAASLTEDRDRGRDAVKREAALPPVSPLKAALSEEELEKKSKAIIEEYLHLNDMKEAVQCVQELASPSLLFIFVRHGVESTLERSAIAREHMGQLLHQLLCAGHLSTAQYYQGLYEILELAEDMEIDIPHVWLYLAELVTPILQEGGVPMGELFREITKPLRPLGKAASLLLEILGLLCKSMGPKKVGTLWREAGLSWKEFLPEGQDIGAFVAEQKVEYTLGEESEAPGQRALPSEELNRQLEKLLKEGSSNQRVFDWIEANLSEQQIVSNTLVRALMTAVCYSAIIFETPLRVDVAVLKARAKLLQKYLCDEQKELQALYALQALVVTLEQPPNLLRMFFDALYDEDVVKEDAFYSWESSKDPAEQQGKGVALKSVTAFFKWLREAEEESDHN

SEQ ID NO: 4669 - protein, 708 aa, Homo sapiens
MRERIWAPPLLLLLPLLLPPPLWGGPPDSPRRELELEPGPLQPFDLLYASGAAAYYSGDYERAVRDLEAALRSHRRLREIRTRCARHCAARHPLPPPPPGEGPGAELPLFRSLLGRARCYRSCETQRLGGPASRHRVSEDVRSDFQRRVPYNYLQRAYIKLNQLEKAVEAAHTFFVANPEHMEMQQNIENYRATAGVEALQLVDREAKPHMESYNAGVKHYEADDFEMAIRHFEQALREYFVEDTECRTLCEGPQRFEEYEYLGYKAGLYEAIADHYMQVLVCQHECVRELATRPGRLSPIENFLPLHYDYLQFAYYRVGEYVKALECAKAYLLCHPDDEDVLDNVDYYESLLDDSIDPASIEAREDLTMFVKRHKLESELIKSAAEGLGFSYTEPNYWIRYGGRQDENRVPSGVNVEGAEVHGFSMGKKLSPKIDRDLREGGPLLYENITFVYNSEQLNGTQRVLLDNVLSEEQCRELHSVASGIMLVGDGYRGKTSPHTPNEKFEGATVLKALKSGYEGRVPLKSARLFYDISEKARRIVESYFMLNSTLYFSYTHMVCRTALSGQQDRRNDLSHPIHADNCLLDPEANECWKEPPAYTFRDYSALLYMNDDFEGGEFIFTEMDAKTVTASIKPKCGRMISFSSGGENPHGVKAVTKGKRCAVALWFTLDPLYRELERIQADEVIAILDQEQQGKHELNINPKDEL

SEQ ID NO: 4670 - protein, 1083 aa, Homo sapiens
MACPALGLEALQPLQPEPPPEPAFSEAQKWIEQVTGRSFGDKDFRTGLENGILLCELLNAIKPGLVKKINRLPTPIAGLDNIILFLRGCKELGLKESQLFDPSDLQDTSNRVTVKSLDYSRKLKNVLVTIYWLGKAANSCTSYSGTTLNLKEFEGLLAQMRKDTDDIESPKRSIRDSGYIDCWDSERSDSLSPPRHGRDDSFDSLDSFGSRSRQTPSPDVVLRGSSDGRGSDSESDLPHRKLPDVKKDDMSARRTSHGEPKSAVPFNQYLPNKSNQTAYVPAPLRKKKAEREEYRKSWSTATSPLGGERPFRYGPRTPVSDDAESTSMFDMRCEEEAAVQPHSRARQEQLQLINNQLREEDDKWQDDLARWKSRRRSVSQDLIKKEEERKKMEKLLAGEDGTSERRKSIKTYREIVQEKERRERELHEAYKNARSQEEAEGILQQYIERFTISEAVLERLEMPKILERSHSTEPNLSSFLNDPNPMKYLRQQSLPPPKFTATVETTIARASVLDTSMSAGSGSPSKTVTPKAVPMLTPKPYSQPKNSQDVLKTFKVDGKVSVNGETVHREEEKERECPTVAPAHSLTKSQMFEGVARVHGSPLELKQDNGSIEINIKKPNSVPQELAATTEKTEPNSQEDKNDGGKSRKGNIELASSEPQHFTTTVTRCSPTVAFVEFPSSPQLKNDVSEEKDQKKPENEMSGKVELVLSQKVVKPKSPEPEATLTFPFLDKMPEANQLHLPNLNSQVDSPSSEKSPVMTPQFKFWAWDPEEERRRQEKWQQEQERLLQERYQKEQDKLKEEWEKAQKEVEEEERRYYEEERKIIEDTVVPFTVSSSSADQLSTSSSMTEGSGTMNKIDLGNCQDEKQDRRWKKSFQGDDSDLLLKTRESDRLEEKGSLTEGALAHSGNPVSKGVHEDHQLDTEAGAPHCGTNPQLAQDPSQNQQTSNPTHSSEDVKPKTLPLDKSINHQIESPSERRKKSPREHFQAGPFSPCSPTPPGQSPNRSISGKKLCSSCGLPLGKGAAMIIETLNLYFHIQCFRCGICKGQLGDAVSGTDVRIRNGLLNCNDCYMRSRSAGQPTTL

SEQ ID NO: 4671 - protein, 589 aa, Homo sapiens
MPFKAFDTFKEKILKPGKEGVKNAVGDSLGILQRKIDGTTEEEDNIELNEEGRPVQTSRPSPPLCDCHCCGLPKRYIIAIMSGLGFCISFGIRCNLGVAIVEMVNNSTVYVDGKPEIQTAQFNWDPETVGLIHGSFFWGYIMTQIPGGFISNKFAANRVFGAAIFLTSTLNMFIPSAARVHYGCVMCVRILQGLVEGVTYPACHGMWSKWAPPLERSRLATTSFCGSYAGAVVAMPLAGVLVQYIGWSSVFYIYGMFGIIWYMFWLLQAYECPAAHPTISNEEKTYIETSIGEGANVVSLSKFSTPWKRFFTSLPVYAIIVANFCRSWTFYLLLISQPAYFEEVFGFAISKVGLLSAVPHMVMTIVVPIGGQLADYLRSRQILTTTAVRKIMNCGGFGMEATLLLVVGFSHTKGVAISFLVLAVGFSGFAISGFNVNHLDIAPRYASILMGISNGVGTLSGMVCPLIVGAMTRHKTREEWQNVFLIAALVHYSGVIFYGVFASGEKQEWADPENLSEEKCGIIDQDELAEEIELNHESFASPKKKMSYGATSQNCEVQKKEWKGQRGATLDEEELTSYQNEERNFSTIS

SEQ ID NO: 4672 - protein, 299 aa, Homo sapiens
MGGPRALLAALWALEAAGTAALRIGAFNIQSFGDSKVSDPACGSIIAKILAGYDLALVQEVRDPDLSAVSALMEQINSVSEHEYSFVSSQPLGRDQYKEMYLFVYRKDAVSVVDTYLYPDPEDVFSREPFVVKFSAPGTGERAPPLPSRRALTPPPLPAAAQNLVLIPLHAAPHQAVAEIDALYDVYLDVIDKWGTDDMLFLGDFNADCSYVRAQDWAAIRLRSSEVFKWLIPDSADTTVGNSDCAYDRIVACGARLRRSLKPQSATVHDFQEEFGLDQTQALAISDHFPVEVTLKFHR

SEQ ID NO: 4673 - protein, 481 aa, Homo sapiens
MRHSKRTHCPDWDSRESWGHESYRGSHKRKRRSHSSTQENRHCKPHHQFKESDCHYLEARSLNERDYRDRRYVDEYRNDYCEGYVPRHYHRDIESGYRIHCSKSSVRSRRSSPKRKRNRHCSSHQSRSKSHRRKRSRSIEDDEEGHLICQSGDVLRARYEIVDTLGEGAFGKVVECIDHGMDGMHVAVKIVKNVGRYREAARSEIQVLEHLNSTDPNSVFRCVQMLEWFDHHGHVCIVFELLGLSTYDFIKENSFLPFQIDHIRQMAYQICQSINFLHHNKLTHTDLKPENILFVKSDYVVKYNSKMKRDERTLKNTDIKVVDFGSATYDDEHHSTLVSTRHYRAPEVILALGWSQPCDVWSIGCILIEYYLGFTVFQTHDSKEHLAMMERILGPIPQHMIQKTRKRKYFHHNQLDWDEHSSAGRYVRRRCKPLKEFMLCHDEEHEKLFDLVRRMLEYDPTQRITLDEALQHPFFDLLKKK

SEQ ID NO: 4674 - protein, 600 aa, Homo sapiens
MADANKAEVPGATGGDSPHLQPAEPPGEPRREPHPAEAEKQQPQHSSSSNGVKMENDESAKEEKSDLKEKSTGSKKANRFHPYSKDKNSGAGEKKGPNRNRVFISNIPYDMKWQAIKDLMREKVGEVTYVELFKDAEGKSRGCGVVEFKDEEFVKKALETMNKYDLSGRPLNIKEDPDGENARRALQRTGGSFPGGHVPDMGSGLMNLPPSILNNPNIPPEVISNLQAGRLGSTIFVANLDFKVGWKKLKEVFSIAGTVKRADIKEDKDGKSRGMGTVTFEQAIEAVQAISMFNGQFLFDRPMHVKMDDKSVPHEEYRSHDGKTPQLPRGLGGIGMGLGPGGQPISASQLNIGGVMGNLGPGGMGMDGPGFGGMNRIGGGIGFGGLEAMNSMGGFGGVGRMGELYRGAMTSSMERDFGRGDIGINRGFGDSFGRLGSAMIGGFAGRIGSSNMGPVGSGISGGMGSMNSVTGGMGMGLDRMSSSFDRMGPGIGAILERSIDMDRGFLSGPMGSGMRERIGSKGNQIFVRNLPFDLTWQKLKEKFSQCGHVMFAEIKMENGKSKGCGTVRFDSPESAEKACRIMNGIKISGREIDVRLDRNA

SEQ ID NO: 4675 - protein, 676 aa, Homo sapiens
MEDSYKDRTSLMKGAKDIAREVKKQTVKKVNQAVDRAQDEYTQRSYSRFQDEEDDDDYYPAGETYNGEANDDEGSSEATEGHDEDDEIYEGEYQGIPSMNQAKDSIVSVGQPKGDEYKDRRELESERRADEEELAQQYELIIQECGHGRFQWALFFVLGMALMADGVEVFVVGFVLPSAETDLCIPNSGSGWLGSIVYLGMMVGAFFWGGLADKVGRKQSLLICMSVNGFFAFLSSFVQGYGFFLFCRLLSGFGIGGAIPTVFSYFAEVLAREKRGEHLSWLCMFWMIGGIYASAMAWAIIPHYGWSFSMGSAYQFHSWRVFVIVCALPCVSSVVALTFMPESPRFLLEVGKHDEAWMILKLIHDTNMRARGQPEKVFTVNKIKTPKQIDELIEIESDTGTWYRRCFVRIRTELYGIWLTFMRCFNYPVRDNTIKLTIVWFTLSFGYYGLSVWFPDVIKPLQSDEYALLTRNVERDKYANFTINFTMENQIHTGMEYDNGRFIGVKFKSVTFKDSVFKSCTFEDVTSVNTYFKNCTFIDTVFDNTDFEPYKFIDSEFKNCSFFHNKTGCQITFDDDYSAYWIYFVNFLGTLAVLPGNIVSALLMDRIGRLTMLGGSMVLSGISCFFLWFGTSESMMIGMLCLYNGLTISAWNSLDVVTVELYPTDRRRRVLPCCPG

SEQ ID NO: 4676 - protein, 429 aa, Homo sapiens
MGLLVFVRNLLLALCLFLVLGFLYYSAWKLHLLQWEEDSNSVVLSFDSAGQTLGSEYDRLGFLLNLDSKLSPRTLCTVVFGLDCILESPGEPKKLLMPASHPLEILKSLSEDTAFALGFLKLPRPAELATKYANFSEGACKPGYASALMTAIFPRFSKPAPMFLDDSFRKWARIREFVPPFGIKGQDNLIKAILSVTKEYRLTPALDSLRCRRCIIVGNGGVLANKSLGSRIDDYDIVVRLNSAPVKGFEKDVGSKTTLRITYPEGAMQRPEQYERDSLFVLAGFKWQDFKWLKYIVYKERVSASDGFWKSVATRVPKEPPEIRILNPYFIQEAAFTLIGLPFNNGLMGRGNIPTLGSVAVTMALHGCDEVAVAGFGYDMSTPNAPLHYYETVRMAAIKESWTHNIQREKEFLRKLVKARVITDLSSGI

SEQ ID NO: 4677 - protein, 370 aa, Homo sapiens
MSASAATGVFVLSLSAIPVTYVFNHLAAQHDSWTIVGVAALILFLVALLARVLVKRKPPRDPLFYVYAVFGFTSVVNLIIGLEQDGIIDGFMTHYLREGEPYLNTAYGHMICYWDGSAHYLMYLVMVAAIAWEETYRTIGLYWVGSIIMSVVVFVPGNIVGKYGTRICPAFFLSIPYTCLPVWAGFRIYNQPSENYNYPSKVIQEAQAKDLLRRPFDLMLVVCLLLATGFCLFRGLIALDCPSELCRLYTQFQEPYLKDPAAYPKIQMLAYMFYSVPYFVTALYGLVVPGCSWMPDITLIHAGGLAQAQFSHIGASLHARTAYVYRVPEEAKILFLALNIAYGVLPQLLAYRCIYKPEFFIKTKAEEKVE

SEQ ID NO: 4678 - protein, 552 aa, Homo sapiens
MDRKVAREFRHKVDFLIENDAEKDYLYDVLRMYHQTMDVAVLVGDLKLVINEPSRLPLFDAIRPLIPLKHQVEYDQLTPRRSRKLKEVRLDRLHPEGLGLSVRGGLEFGCGLFISHLIKGGQADSVGLQVGDEIVRINGYSISSCTHEEVINLIRTKKTVSIKVRHIGLIPVKSSPDEPLTWQYVDQFVSESGGVRGSLGSPGNRENKEKKVFISLVGSRGLGCSISSGPIQKPGIFISHVKPGSLSAEVGLEIGDQIVEVNGVDFSNLDHKEAVNVLKSSRSLTISIVAAAGRELFMTDRERLAEARQRELQRQELLMQKRLAMESNKILQEQQEMERQRRKEIAQKAAEENERYRKEMEQIVEEEEKFKKQWEEDWGSKEQLLLPKTITAEVHPVPLRKPKYDQGVEPELEPADDLDGGTEEQGEQDFRKYEEGFDPYSMFTPEQIMGKDVRLLRIKKEGSLDLALEGGVDSPIGKVVVSAVYERGAAERHGGIVKGDEIMAINGKIVTDYTLAEAEAALQKAWNQGGDWIDLVVAVCPPKEYDDELTFF

SEQ ID NO: 4679 - protein, 453 aa, Homo sapiens
MKIFKCYFKHTLQQKVFILFLTLWLLSLLKLLNVRRLFPQKDIYLVEYSLSTSPFVRNRYTHVKDEVRYEVNCSGIYEQEPLEIGKSLEIRRRDIIDLEDDDVVAMTSDCDIYQTLRGYAQKLVSKEEKSFPIAYSLVVHKDAIMVERLIHAIYNQHNIYCIHYDRKAPDTFKVAMNNLAKCFSNIFIASKLEAVEYAHISRLQADLNCLSDLLKSSIQWKYVINLCGQDFPLKSNFELVSELKKLNGANMLETVKPPNSKLERFTYHHELRRVPYEYVKLPIRTNISKEAPPHNIQIFVGSAYFVLSQAFVKYIFNNSIVQDFFAWSKDTYSPDEHFWATLIRVPGIPGEISRSAQDVSDLQSKTRLVKWNYYEGFFYPSCTGSHLRSVCIYGAAELRWLIKDGHWFANKFDSKVDPILIKCLAEKLEEQQRDWITLPSEKLFMDRNLTTTS

SEQ ID NO: 4680 - protein, 625 aa, Homo sapiens
MNVTSIALRAETWLLAAWHVKVPPMWLEACINWIQEENNNVNLSQAQMNKQVFEQWLLTDLRDLEHPLLPDGILEIPKGELNGFYALQINSLVDVSQPAYSQIQKLRGKNTTNDLVTAEAQVTPKPWEAKPSRMLMLQLTDGIVQIQGMEYQPIPILHSDLPPGTKILIYGNISFRLGVLLLKPENVKVLGGEVDALLEEYAQEKVLARLIGEPDLVVSVIPNNSNENIPRVTDVLDPALGPSDEELLASLDENDELTANNDTSSERCFTTGSSSNTIPTRQSSFEPEFVISPRPKEEPSNLSIHVMDGELDDFSLEEALLLEETVQKEQMETKELQPLTFNRNADRSIERFSHNPNTTNNFSLTCKNGNNNWSEKNVSEQMTNEDKSFGCPSVRDQNRSIFSVHCNVPLAHDFTNKEKNLETDNKIKQTSSSDSHSLNNKILNREVVNYVQKRNSQISNENDCNLQSCSLRSSENSINLSIAMDLYSPPFVYLSVLMASKPKEVTTVKVKAFIVTLTGNLSSSGGIWSITAKVSDGTAYLDVDFVDEILTSLIGFSVPEMKQSKKDPLQYQKFLEGLQKCQRDLIDLCCLMTISFNPSLSKAMVLALQDVNMEHLENLKKRLNK

SEQ ID NO: 4681 - protein, 291 aa, Homo sapiens
MSMPLHQISAIPSQDAISARVYRSKTKEKEREEQNEKTLGHFMSHSSNISKAGSPPSASAPAPVSSFSRTSITPSSQDICRICHCEGDDESPLITPCHCTGSLHFVHQACLQQWIKSSDTRCCELCKYEFIMETKLKPLRKWEKLQMTSSERRKIMCSVTFHVIAITCVVWSLYVLIDRTAEEIKQGQATGILEWPFWTKLVVVAIGFTGGLLFMYVQCKVYVQLWKRLKAYNRVIYVQNCPETSKKNIFEKSPLTEPNFENKHGYGICHSDTNSSCCTEPEDTGAEIIHV

SEQ ID NO: 4682 - protein, 435 aa, Homo sapiens
MLLGGPPRSPRSGTSPKGPWSSTGHVQFGKSPQTWPRRTRPRSPEPAAPSGVRGSTWTRRRDSPRRAGPTALSRYVGHLWMGRRPPSPEARGPVPRSSAASRARRSLASPGISPGPLTATIGGAVAGGGPRQGRAEAHKEVFPGQRVGKMAAPMELFCWSGGWGLPSVDLDSLAVLTYARFTGAPLKVHKISNPWQSPSGTLPALRTSHGEVISVPHKIITHLRKEVHTFWIDTKNYVEVTRKWYAEAMPFPLNFFLPGRMQRQYMERLQLLTGEHRPEDEEELEKELYREARECLTLLSQRLGSQKFFFGDAPASLDAFVFSYLALLLQAKLPSGKLQVHLRGLHNLCAYCTHILSLYFPWDGAEVPPQRQTPAGPETEEEPYRRRNQILSVLAGLAAMVGYALLSGIVSIQRATPARAPGTRTLGMAEEDEEE

SEQ ID NO: 4683 - protein, 172 aa, Homo sapiens
MSSSGGAPGASASSAPPAQEEGMTWWYRWLCRLSGVLGAVSCAISGLFNCITIHPLNIAAGVWMIMNAFILLLCEAPFCCQFIEFANTVAEKVDRLRSWQKAVFYCGMAVVPIVISLTLTTLLGNAIAFATGVLYGLSALGKKGDAISYARIQQQRQQADEEKLAETLEGEL

SEQ ID NO: 4684 - protein, 2136 aa, Homo sapiens
MADVTARSLQYEYKANSNLVLQADRSLIDRTRRDEPTGEVLSLVGKLEGTRMGDKAQRTKPQMQEERRAKRRKRDEDRHDINKMKGYTLLSEGIDEMVGIIYKPKTKETRETYEVLLSFIQAALGDQPRDILCGAADEVLAVLKNEKLRDKERRKEIDLLLGQTDDTRYHVLVNLGKKITDYGGDKEIQNMDDNIDETYGVNVQFESDEEEGDEDVYGEVREEASDDDMEGDEAVVRCTLSANLVASGELMSSKKKDLHPRDIDAFWLQRQLSRFYDDAIVSQKKADEVLEILKTASDDRECENQLVLLLGFNTFDFIKVLRQHRMMILYCTLLASAQSEAEKERIMGKMEADPELSKFLYQLHETEKEDLIREERSRRERVRQSRMDTDLETMDLDQGGEALAPRQVLDLEDLVFTQGSHFMANKRCQLPDGSFRRQRKGYEEVHVPALKPKPFGSEEQLLPVEKLPKYAQAGFEGFKTLNRIQSKLYRAALETDENLLLCAPTGAGKTNVALMCMLREIGKHINMDGTINVDDFKIIYIAPMRSLVQEMVGSFGKRLATYGITVAELTGDHQLCKEEISATQIIVCTPEKWDIITRKGGERTYTQLVRLIILDEIHLLHDDRGPVLEALVARAIRNIEMTQEDVRLIGLSATLPNYEDVATFLRVDPAKGLFYFDNSFRPVPLEQTYVGITEKKAIKRFQIMNEIVYEKIMEHAGKNQVLVFVHSRKETGKTARAIRDMCLEKDTLGLFLREGSASTEVLRTEAEQCKNLELKDLLPYGFAIHHAGMTRVDRTLVEDLFADKHIQVLVSTATLAWGVNLPAHTVIIKGTQVYSPEKGRWTELGALDILQMLGRAGRPQYDTKGEGILITSHGELQYYLSLLNQQLPIESQMVSKLPDMLNAEIVLGNVQNAKDAVNWLGYAYLYIRMLRSPTLYGISHDDLKGDPLLDQRRLDLVHTAALMLDKNNLVKYDKKTGNFQVTELGRIASHYYITNDTVQTYNQLLKPTLSEIELFRVFSLSSEFKNITVREEEKLELQKLLERVPIPVKESIEEPSAKINVLLQAFISQLKLEGFALMADMVYVTQSAGRLMRAIFEIVLNRGWAQLTDKTLNLCKMIDKRMWQSMCPLRQFRKLPEEVVKKIEKKNFPFERLYDLNHNEIGELIRMPKMGKTIHKYVHLFPKLELSVHLQPITRSTLKVELTITPDFQWDEKVHGSSEAFWILVEDVDSEVILHHEYFLLKAKYAQDEHLITFFVPVFEPLPPQYFIRVVSDRWLSCETQLPVSFRHLILPEKYPPPTELLDLQPLPVSALRNSAFESLYQDKFPFFNPIQTQVFNTVYNSDDNVFVGAPTGSGKTICAEFAILRMLLQSSEGRCVYITPMEALAEQVYMDWYEKFQDRLNKKVVLLTGETSTDLKLLGKGNIIISTPEKWDILSRRWKQRKNVQNINLFVVDEVHLIGGENGPVLEVICSRMRYISSQIERPIRIVALSSSLSNAKDVAHWLGCSATSTFNFHPNVRPVPLELHIQGFNISHTQTRLLSMAKPVYHAITKHSPKKPVIVFVPSRKQTRLTAIDILTTCAADIQRQRFLHCTEKDLIPYLEKLSDSTLKETLLNGVGYLHEGLSPMERRLVEQLFSSGAIQVVVASRSLCWGMNVAAHLVIIMDTQYYNGKIHAYVDYPIYDVLQMVGHANRPLQDDEGRCVIMCQGSKKDFFKKFLYEPLPVESHLDHCMHDHFNAEIVTKTIENKQDAVDYLTWTFLYRRMTQNPNYYNLQGISHRHLSDHLSELVEQTLSDLEQSKCISIEDEMDVAPLNLGMIAAYYYINYTTIELFSMSLNAKTKVRGLIEIISNAAEYENIPIRHHEDNLLRQLAQKVPHKLNNPKFNDPHVKTNLLLQAHLSRMQLSAELQSDTEEILSKAIRLIQACVDVLSSNGWLSPALAAMELAQMVTQAMWSKDSYLKQLPHFTSEHIKRCTDKGVESVFDIMEMEDEERNALLQLTDSQIADVARFCNRYPNIELSYEVVDKDSIRSGGPVVVLVQLEREEEVTGPVIAPLFPQKREEGWWVVIGDAKSNSLISIKRLTLQQKAKVKLDFVAPATGAHNYTLYFMSDAYMGCDQEYKFSVDVKEAETDSDSD

SEQ ID NO: 4685 - protein, 738 aa, Homo sapiens [sequence omitted]

SEQ ID NO: 4686 - protein, 1925 aa, Homo sapiens
MAPRAAGGAPLSARAAAASPPPFQTPPRCPVPLLLLLLLGAARAGALEIQRRFPSPTPTNNFALDGAAGTVYLAAVNRLYQLSGANLSLEAEAAVGPVPDSPLCHAPQLPQASCEHPRRLTDNYNKILQLDPGQGLVVVCGSIYQGFCQLRRRGNISAVAVRFPPAAPPAEPVTVFPSMLNVAANHPNASTVGLVLPPAAGAGGSRLLVGATYTGYGSSFFPRNRSLEDHRFENTPEIAIRSLDTRGDLAKLFTFDLNPSDDNILKIKQGAKEQHKLGFVSAFLHPSDPPPGAQSYAYLALNSEARAGDKESQARSLLARICLPHGAGGDAKKLTESYIQLGLQCAGGAGRGDLYSRLVSVFPARERLFAVFERPQGSPAARAAPAALCAFRFADVRAAIRAARTACFVEPAPDVVAVLDSVVQGTGPACERKLNIQLQPEQLDCGAAHLQHPLSILQPLKATPVFRAPGLTSVAVASVNNYTAVFLGTVNGRLLKINLNESMQVVSRRVVTVAYGEPVHHVMQFDPADSGYLYLMTSHQMARVKVAACNVHSTCGDCVGAADAYCGWCALETRCTLQQDCTNSSQQHFWTSASEGPSRCPAMTVLPSEIDVRQEYPGMILQISGSLPSLSGMEMACDYGNNIRTVARVPGPAFGHQIAYCNLLPRDQFPPFPPNQDHVTVEMSVRVNGRNIVKANFTIYDCSRTAQVYPHTACTSCLSAQWPCFWCSQQHSCVSNQSRCEASPNPTSPQDCPRTLLSPLAPVPTGGSQNILVPLANTAFFQGAALECSFGLEEIFEAVWVNESVVRCDQVVLHTTRKSQVFPLSLQLKGRPARFLDSPEPMTVMVYNCAMGSPDCSQCLGREDLGHLCMWSDGCRLRGPLQPMAGTCPAPEIHAIEPLSGPLDGGTLLTIRGRNLGRRLSDVAHGVWIGGVACEPLPDRYTVSEEIVCVTGPAPGPLSGVVTVNASKEGKSRDRFSYVLPLVHSLEPTMGPKAGGTRITIHGNDLHVGSELQVLVNDTDPCTELMRTDTSIACTMPEGALPAPVPVCVRFERRGCVHGNLTFWYMQNPVITAISPRRSPVSGGRTITVAGERFHMVQNVSMAVHHIGREPTLCKVLNSTLITCPSPGALSNASAPVDFFINGRAYADEVAVAEELLDPEEAQRGSRFRLDYLPNPQFSTAKREKWIKHHPGEPLTLVIHKEQDSLGLQSHEYRVKIGQVSCDIQIVSDRIIHCSVNESLGAAVGQLPITIQVGNFNQTIATLQLGGSETAIIVSIVICSVLLLLSVVALFVFCTKSRRAERYWQKTLLQMEEMESQIREEIRKGFAELQTDMTDLTKELNRSQGIPFLEYKHFVTRTFFPKCSSLYEERYVLPSQTLNSQGSSQAQETHPLLGEWKIPESCRPNMEEGISLFSSLLNNKHFLIVFVHALEQQKDFAVRDRCSLASLLTIALHGKLEYYTSIMKELLVDLIDASAAKNPKLMLRRTESVVEKMLTNWMSICMYSCLRETVGEPFFLLLCAIKQQINKGSIDAITGKARYTLSEEWLLRENIEAKPRNLNVSFQGCGMDSLSVRAMDTDTLTQVKEKILEAFCKNVPYSQWPRAEDVDLEWFASSTQSYILRDLDDTSVVEDGRKKLNTLAHYKIPEGASLAMSLIDKKDNTLGRVKDLDTEKYFHLVLPTDELAEPKKSHRQSHRKKVLPEIYLTRLLSTKGTLQKFLDDLFKAILSIREDKPPLAVKYFFDFLEEQAEKRGISDPDTLHIWKTNSLPLRFWVNILKNPQFVFDIDKTDHIDACLSVIAQAFIDACSISDLQLGKDSPTNKLLYAKEIPEYRKIVQRYYKQIQDMTPLSEQEMNAHLAEESRKYQNEFNTNVAMAEIYKYAKRYRPQIMAALEANPTARRTQLQHKFEQVVALMEDNIYECYSEA

SEQ ID NO: 4687 - protein, 757 aa, Homo sapiens
MSRKISKESKKVNISSSLESEDISLETTVPTDDISSSEEREGKVRITRQLIERKELLHNIQLLKIELSQKTMMIDNLKVDYLTKIEELEEKLNDALHQKQLLTLRLDNQLAFQQKDASKYQELMKQEMETILLRQKQLEETNLQLREKAGDVRRNLRDFELTEEQYIKLKAFPEDQLSIPEYVSVRFYELVNPLRKEICELQVKKNILAEELSTNKNQLKQLTETYEEDRKNYSEVQIRCQRLALELADTKQLIQQGDYRQENYDKVKSERDALEQEVIELRRKHEILEASHMIQTKERSELSKEVVTLEQTVTLLQKDKEYLNRQNMELSVRCAHEEDRLERLQAQLEESKKAREEMYEKYVASRDHYKTEYENKLHDELEQIRLKTNQEIDQLRNASREMYERENRNLREARDNAVAEKERAVMAEKDALEKHDQLLDRYRELQLSTESKVTEFLHQSKLKSFESERVQLLQEETARNLTQCQLECEKYQKKLEVLTKEFYSLQASSEKRITELQAQNSEHQARLDIYEKLEKELDEIIMQTAEIENEDEAERVLFSYGYGANVPTTAKRRLKQSVHLARRVLQLEKQNSLILKDLEHRKDQVTQLSQELDRANSLLNQTQQPYRYLIESVRQRDSKIDSLTESIAQLEKDVSNLNKEKSALLQTKNQMALDLEQLLNHREELAAMKQILVKMHSKHSENSLLLTKTEPKHVTENQKSKTLNVPKEHEDNIFTPKPTLFTKKEAPEWSKKQKMKT

SEQ ID NO: 4688 - protein, 2062 aa, Homo sapiens
MDGCLDTETPTVSIQENVDVASLKPISDSGINFTDAIWSPTCERRTCECHESIEKNKDKTDLPQSVVYQNEEGRWVTDLAYYTSFNSKQNLNVSLSDEMNEDFRSGSEAFDLIAQDEEEFNKEHQFIQPSFGYFIRSPEKREPIALIRKSDVSRGNLEKEMAHLNHDLYSGDLNEQSQAQLSEGSITLQVEAVESTSQVDENDVTLTADKGKTEDTFFMSNKPQRYKDKLPDSGDSMLRISTIASAIAEASVNTDPSQLAAMIKALSNKTRDKTFQEDEKQKDYSHVRHFLPNDLEKSNGSNALDMEKYLKKTEVSRYESALENFSRASMSDTWDLSLPKEQTTQDIHPVDLSATSVSVRAPEENTAAIVYVENGESENQESFRTINSSNSVTNRENNSAVVDVKTCSIDNKLQDVGNDEKATSISTPSDSYSSVRNPRITSLCLLKDCEEIRDNRENQRQNECVSEISNSEKHVTFENHRIVSPKNSDLKNTSPEHGGRGSEDEQESFRPSTSPLSHSSPSEISGTSSSGCALESFGSAAQQQQPPCEQELSPLVCSPAGVSRLTYVSEPESSYPTTATDDALEDRKSDITSELSTTIIQGSPAALEERAMEKLREKVPFQNRGKGTLSSIIQNNSDTRKATETTSLSSKPEYVKPDFRWSKDPSSKSGNLLETSEVGWTSNPEELDPIRLALLGKSGLSCQVGSATSHPVSCQEPIDEDQRISPKDKSTAGREFSGQVSHQTTSENQCTPIPSSTVHSSVADMQNMPAAVHALLTQPSLSAAPFAQRYLGTLPSTGSTTLPQCHAGNATVCGFSGGLPYPAVAGEPVQNSVAVGICLGSNIGSGWMGTSSLCNPYSNTLNQNLLSTTKPFPVPSVGTNCGIEPWDSGVTSGLGSVRVPEELKLPHACCVGIASQTLLSVLNPTDRWLQVSIGVLSISVNGEKVDLSTYRCLVFKNKAIIRPHATEEIKVLFIPSSPGVFRCTFSVASWPCSTDAETIVQAEALASTVTLTAIAESPVIEVETEKKDVLDFGDLTYGGWKALPLKLINRTHATVPIRLIINANAVAWRCFTFSKESVRAPVEVAPCADVVTRLAGPSVVNHMMPASYDGQDPEFLMIWVLFHSPKKQISSSDILDSAEEFSAKVDIEVDSPNPTPVLRSVSLRARAGIARIHAPRDLQTMHFLAKVASSRKQHLPLKNAGNIEVYLDIKVPEQGSHFSVDPKNLLLKPGEEHEVIVSFTPKDPEACEERILKIFVQPFGPQYEVVLKGEVISSGSKPLSPGPCLDIPSILSNKQFLAWGGVPLGRTQLQKLALRNNSASTTQHLRLLIRGQDQDCFQLQNTFGSEQRLTSNCEIRIHPKEDIFISVLFAPTRLSCMLARLEIKQLGNRSQPGIKFTIPLSGYGGTSNLILEGVKKLSDSYMVTVNGLVPGKESKIVFSVRNTGSRAAFVKAVGFKDSQKKVLLDPKVLRIFPDKFVLKERTQENVTLIYNPSDRGINNKTATELSTVYLFGGDEISRQQYRRALLHKPEMIKQILPEHSVLQNINFVEAFQDELLVTEVYDLPQRPNDVQLFYGSMCKIILSVIGEFRDCISSREFLQPSSKASLESTSDLGASGKHGGNVSLDVLPVKGPQGSPLLSRAARPPLDQLASEEPWTVLPEHLILVAPSPCDMAKTGRFQIVNNSVRLLRFELCWPAHCLTVTPQHGCVAPESKLQILVSPNSSLSTKQSMFPWSGLIYIHCDDGQKKIVKVQIREDLTQVELLTRLTSKPFGILSPVSEPSVSHLVKPMTKPPSTKVEIRNKSITFPTTEPGETSESCLELENHGTTDVKWHLSSLAPPYVKGVDESGDVFRATYAAFRCSPISGLLESHGIQKVSITFLPRGRGDYAQFWDVECHPLKEPHMKHTLRFQLSGQSIEAENEPENACLSTDSLIKIDHLVKPRRQAVSEASARIPEQLDVTARGVYAPEDVYRFRPTSVGESRTLKVNLRNNSFITHSLKFLSPREPFYVKHSKYSLRAQHYINMPVQFKPKSAGKFEALLVIQTDEGKSIAIRLIGEALGKN

SEQ ID NO: 4689 - protein, 572 aa, Homo sapiens
MADFEELRNMVSSFRVSELQVLLGFAGRNKSGRKHDLLMRALHLLKSGCSPAVQIKIRELYRRRYPRTLEGLSDLSTIKSSVFSLDGGSSPVEPDLAVAGIHSLPSTSVTPHSPSSPVGSVLLQDTKPTFEMQQPSPPIPPVHPDVQLKNLPFYDVLDVLIKPTSLVQSSIQRFQEKFFIFALTPQQVREICISRDFLPGGRRDYTVQVQLRLCLAETSCPQEDNYPNSLCIKVNGKLFPLPGYAPPPKNGIEQKRPGRPLNITSLVRLSSAVPNQISISWASEIGKNYSMSVYLVRQLTSAMLLQRLKMKGIRNPDHSRALIKEKLTADPDSEIATTSLRVSLMCPLGKMRLTIPCRAVTCTHLQCFDAALYLQMNEKKPTWICPVCDKKAAYESLILDGLFMEILNDCSDVDEIKFQEDGSWCPMRPKKEAMKVSSQPCTKIESSSVLSKPCSVTVASEASKKKVDVIDLTIESSSDEEEDPPAKRKCIFMSETQSSPTKGVLMYQPSSVRVPSVTSVDPAAIPPSLTDYSVPFHHTPISSMSSDLPGEQRRNDINNELKLGTSSDTVQQ

SEQ ID NO: 4690 - protein, 1030 aa, Homo sapiens
MRENYETLVSVGTAELLPLSAFLSPSEPGRAVGGGSHADEGQEPAGCGDPQGGQPRHSLHLTALVQLVKEIPEFLFGEVKGAMDSPESESRGASLDGERASPEAAAAREPCPLRGLLSCLPDGPTSQPHLATTPTDSSCSSGPTGDGVQGSPLPIKTADKPWPTRKEGPGALGGEPSPPTHSPSRRKSHRGQERGTSEAGISPGNSPLQGLINCLKEILVPGPRHPETSPSFLPPLPSLGTSRLTRADLGPGSPPWAVKTEAVSGDCPLQGLLHCLKELPEAQDRHPSPSGVGNRRLQENPGAWKRGSGGPGYLLTPPPHPDLGAGGLLSVKMENSWVQSPPGPASCQPGRQPLSPSATGDTRGVPQPSWGPEAQAASASSSPLEALEACLKGIPPNGSSPSQLPPTSCSQNPQPGDSRSQKPELQPHRSHSEEATREPVLPLGLQSCVRDGPSRPLAPRGTPTSFSSSSSTDWDLDFGSPVGNQGQHPGKGSPPGSSPLQGLENCLKEIPVPVLRPAWPCSSAADRGPRRAEPRNWTADKEGLRAEACESARLGQGRGEAPTRSLHLVSPQVFTSSCVPACHQRGFKDPGATRPGVWRWLPEGSAPKPSPLHCLESALRGILPVRPLRFACVGGPSPSPSPGSSSSFSGSEGEDPRPEPDLWKPLPQERDRLPSCKPPVPLSPCPGGTPAGSSGGSPGEDPRRTEPRYCSGLGAGTAQDPCPVSQLEKRPRVSEASRGLELGHGRPRVAAKTHERLLPQGPPELPSESPPPELPPPEAAPPVLPASSLQPPCHCGKPLQQELHSLGAALAEKLDRLATALAGLAQEVATMRTQVNRLGRRPQGPGPMGQASWMWTLPRGPRWAHGPGHRHLPYWRQKGPTRPKPKILRGQGESCRAGDLQGLSRGTARRARPLPPDAPPAEPPGLHCSSSQQLLSSTPSCHAAPPAHPLLAHTGGHQSPLPPLVPAALPLQGASPPAASADADVPTSGVAPDGIPERPKEPSSLLGGVQRALQEELWGGEHRDPRWGAH

SEQ ID NO: 4691 - protein, 525 aa, Homo sapiens
MLGKRKRVVLTIKDKLDIIKKLEEGISFKKLSVVYGIGESTVRDIKKNKERIINYANSSDPTSGVSKRKSMKSSTYEELDRVMIEWFNQQKTDGIPVSGTICAKQAKFFFDALGMEGDFNASSGWLTRFKQRHGIPKAAGKGTKLKGDETAAREFCGSFQEFVEKENLQPEQIYGADQTGLFWKCLPSRTLTLETDQSTSGCRSSRERIIIMCCANATGLHKLNLCVVGKAKKPRAFKGTDLSNLPVTYYSQKGAWIEQSVFRQWFEKYFVPQVQKHLKSKGLLEKAVLLLDFPPARPNEEMLSSDDGRIIVKYLPPNVTSLIQPMSQGVLATVKRYYRAGLLQKYMDEGNDPKIFWKNLTVLDAIYEVSRAWNMVKSSTITKAWKKLFPGNEENSGMNIDEGAILAANLATVLQNTEECEHVDIENIDQWFDSRSSDSSCQVLTDSESAEDQTKAAEQKPSSKSRKTELNPEKHISHKAALEWTENLLDYLEQQDDMLLSDKLVLRRLRTIIRKKQKIQNNKNH

SEQ ID NO: 4692 - protein, 506 aa, Homo sapiens
MFTSKSNSVSPSPSLEQADSDALDISTKVQLYGVLWKRPFGRPSAKWSRRFFIIKESFLLYYSESEKKSFETNKYFNIHPKGVIPLGGCLVEPKEEPSMPYAMKISHQDFHGNILLAAESEFEQTQWLEMLQESGKVTWKNAQLGEAMIKSLEAQGLQLAKEKQEYLDKLMEETEELCLQREQREELERLNQVLEAEKQQFEEVVQELRMEQEQIKRELELTARCLKGVEQEKKELRHLTESLQQTLEELSIEKKKTLEMLEENENHLQTLANQSEQPPPSGGLHSNLRQIEEKMQQLLEEKLLAEKRMKENEERSRALEEEREFYSSQSQALQNSLQELTAEKQQAERELKAEVKVRMDLERRLREAEGALRSLEQGLNSKVRNKEKEERMRADVSHLKRFFEECIRNAELEAKMPVIMKNSVYIHKAATRRIKSCRFHRRRSSTSWNDMKPSQSFMTSQLDANNMEELKEVAKRLSRDQRFRESIYHIMATQPGAPSALSRGGK

SEQ ID NO: 4693 - protein, 513 aa, Homo sapiens
MWKASAGHAVSIAQDDAGADDWETDPDFVNDVSEKEQRWGAKTVQGSGHQEHINIHKLRENVFQEHQTLKEKELETGPKASHGYGGKFGVEQDRMDKSAVGHEYQSKLSKHCSQVDSVRGFGGKFGVQMDRVDQSAVGFEYQGKTEKHASQKDYSSGFGGKYGVQADRVDKSAVGFDYQGKTEKHESQRDYSKGFGGKYGIDKDKVDKSAVGFEYQGKTEKHESQKDYVKGFGGKFGVQTDRQDKCALGWDHQEKLQLHESQKDYSKGFGGKYGVQKDRMDKNASTFEDVTQVSSAYQKTVPVEAVTSKTSNIRANFENLAKEKEQEDRRKAEAERAQRMAKERQEQEEARRKLEEQARAKTQTPPVSPAPQPTEERLPSSPVYEDAASFKAELSYRGPVSGTEPEPVYSMEAADYREASSQQGLAYATEAVYESAEAPGHYPAEDSTYDEYENDLGITAVALYDYQAAGDDEISFDPDDIITNIEMIDDGWWRGVCKGRYGLFPANYVELRQ

SEQ ID NO: 4694 - protein, 375 aa, Homo sapiens
MGLLVFVRNLLLALCLFLVLGFLYYSAWKLHLLQWEEDSNSVVLSFDSAGQTLGSEYDRLGFLLNLDSKLPAELATKYANFSEGACKPGYASALMTAIFPRFSKPAPMFLDDSFRKWARIREFVPPFGIKGQDNLIKAILSVTKEYRLTPALDSLRCRRCIIVGNGGVLANKSLGSRIDDYDIVVRLNSAPVKGFEKDVGSKTTLRITYPEGAMQRPEQYERDSLFVLAGFKWQDFKWLKYIVYKERVSASDGFWKSVATRVPKEPPEIRILNPYFIQEAAFTLIGLPFNNGLMGRGNIPTLGSVAVTMALHGCDEVAVAGFGYDMSTPNAPLHYYETVRMAAIKESWTHNIQREKEFLRKLVKARVITDLSSGI

SEQ ID NO: 4695 - protein, 641 aa, Homo sapiens
MGPPLKLFKNQKYQELKQECIKDSRLFCDPTFLPENDSLFYNRLLPGKVVWKRPQDICDDPHLIVGNISNHQLTQGRLGHKPMVSAFSCLAVQESHWTKTIPNHKEQEWDPQKTEKYAGIFHFRFWHFGEWTEVVIDDLLPTINGDLVFSFSTSMNEFWNALLEKAYAKLLGCYEALDGLTITDIIVDFTGTLAETVDMQKGRYTELVEEKYKLFGELYKTFTKGGLICCSIESPNQEEQEVETDWGLLKGHTYTMTDIRKIRLGERLVEVFSAEKVYMVRLRNPLGRQEWSGPWSEISEEWQQLTASDRKNLGLVMSDDGEFWMSLEDFCRNFHKLNVCRNVNNPIFGRKELESVLGCWTVDDDPLMNRSGGCYNNRDTFLQNPQYIFTVPEDGHKVIMSLQQKDLRTYRRMGRPDNYIIGFELFKVEMNRKFRLHHLYIQERAGTSTYIDTRTVFLSKYLKKGNYVLVPTMFQHGRTSEFLLRIFSEVPVQLRELTLDMPKMSCWNLARGYPKVVTQITVHSAEDLEKKYANETVNPYLVIKCGKEEVRSPVQKNTVHAIFDTQAIFYRRTTDIPIIVQVWNSRKFCDQFLGQVTLDADPSDCRDLKSLYLRKKGGPTAKVKQGHISFKVISSDDLTEL

SEQ ID NO: 4696 - protein, 632 aa, Homo sapiens
MSNLKMKEAALIYLDRSGGLQKFIDDCKYYNDSKQSYAVYRFKILINPSDVVELDAELGNHILHQPLKAAEVFQSVCFIAVKTLSLIGQLQTETQINIVLKLTHLPPLPSYGLDLCEFPLDYTSQRFYMMQGIVIAMTTITKYTQGARFLCSDEACPLSKGFQYIRVHVPGATESATIRNDFLCNLCASSLQEDRKFRVLGDKQIVEIIATKALRAFQGYSNNQPFRFQSLTIFLRDESVNKMNIGNEYKIIGIPTCVKTSQTAVCIEANSITFCNSKVPSGISDNFRCLLSLTSSSCWKFTAILANIFASQITPPGTYNLLKLCLLMSLVQTTDRNKELEDCLDILIITSDTLLIDRLLNFSINLVPRGIRHLVSTEIFPTLSRNKYGTGAVSIQAGSALLAKGGICFIGDLASHKKDKLEQLQTVLESRSITVYIPGKKFGEDIDQQMTFPVQCSFWSFVDVDSSSRRNAQKINTLIGQMDCSLIPANLVEAFGLLINCNESSPCHPFLPTVQHTLNKAINPEGLFYAASRQFTTEDFEKLLAFAKNLNVEFSLEAERMTHGYYLASRRIRTGSVCGSKLSASALKYLVFLSEAHARLNLRNKVLKEDVLIAALLFETSLTLKYGNELNY

SEQ ID NO: 4697 - protein, 1136 aa, Homo sapiens
MKVTVCFGRTGIVVPCKEGQLRVGELTQQALQRYLKTREKGPGYWVKIHHLEYTDGGILDPDDVLADVVEDKDKLIAVFEEQEPLHKIESPSGNPADRQSPDAFETEVAAQLAAFKPIGGEIEVTPSALKLGTPLLVRRSSDPVPGPPADTQPSASHPGGQSLKLVVPDSTQNLEDREVLNGVQTELLTSPRTKDTLSDMTRTVEISGEGGPLGIHVVPFFSSLSGRILGLFIRGIEDNSRSKREGLFHENECIVKINNVDLVDKTFAQAQDVFRQAMKSPSVLLHVLPPQNREQYEKSVIGSLNIFGNNDGVLKTKVPPPVHGKSGLKTANLTGTDSPETDASASLQQNKSPRVPRLGGKPSSPSLSPLMGFGSNKNAKKIKIDLKKGPEGLGFTVVTRDSSIHGPGPIFVKNILPKGAAIKDGRLQSGDRILEVNGRDVTGRTQEELVAMLRSTKQGETASLVIARQEGHFLPRELKGEPDCCALSLETSEQLTFEIPLNDSGSAGLGVSLKGNKSRETGTDLGIFIKSIIHGGAAFKDGRLRMNDQLIAVNGESLLGKSNHEAMETLRRSMSMEGNIRGMIQLVILRRPERPMEDPAECGAFSKPCFENCQNAVTTSRRNDNSILHPLGTCSPQDKQKGLLLPNDGWAESEVPPSPTPHSALGLGLEDYSHSSGVDSAVYFPDQHINFRSVTPARQPESINLKASKSMDLVPDESKVHSLAGQKSDGLSDKSSHSGQGALNCESAPQGNSELEDMENKARKVKKTKEKEKKKEKGKLKVKEKKRKEENEDPERKIKKKGFGAMLRFGKKKEDKGGKAEQKGTLKHGGLREEELEKMKEERERIGAKHQELREKQARGLLDYATGAIGSVYDMDDDEMDPNYARVNHFREPCTSANVFRSPSPPRAGPFGYPRDGHPLSPERDHLEGLYAKVNKPYHPLVPADSGRPTGGSTDRIQKLRKEYYQARREGFPLYEDDEGRARPSEYDLLWVPGRGPDGNAHNLRFEGMERQYASLPRGGPADPVDYLPAAPRGLYKERELPYYPGAHPMHPPKGSYPRPTELRVADLRYPQHYPPPPAPQHKGPFRQDVPPSPPQHQRMPAYQETGRPGPRGGSPDQYPYRTQDSRQKNPMTAAV

SEQ ID NO: 4698 - protein, 1408 aa, Homo sapiens
MKAPAVLAPGILVLLFTLVQRSNGECKEALAKSEMNVNMKYQLPNFTAETPIQNVILHEHHIFLGATNYIYVLNEEDLQKVAEYKTGPVLEHPDCFPCQDCSSKANLSGGVWKDNINMALVVDTYYDDQLISCGSVNRGTCQRHVFPHNHTADIQSEVHCIFSPQIEEPSQCPDCVVSALGAKVLSSVKDRFINFFVGNTINSSYFPDHPLHSISVRRLKETKDGFMFLTDQSYIDVLPEFRDSYPIKYVHAFESNNFIYFLTVQRETLDAQTFHTRIIRFCSINSGLHSYMEMPLECILTEKRKKRSTKKEVFNILQAAYVSKPGAQLARQIGASLNDDILFGVFAQSKPDSAEPMDRSAMCAFPIKYVNDFFNKIVNKNNVRCLQHFYGPNHEHCFNRTLLRNSSGCEARRDEYRTEFTTALQRVDLFMGQFSEVLLTSISTFIKGDLTIANLGTSEGRFMQVVVSRSGPSTPHVNFLLDSHPVSPEVIVEHTLNQNGYTLVITGKKITKIPLNGLGCRHFQSCSQCLSAPPFVQCGWCHDKCVRSEECLSGTWTQQICLPAIYKVFPNSAPLEGGTRLTICGWDFGFRRNNKFDLKKTRVLLGNESCTLTLSESTMNTLKCTVGPAMNKHFNMSIIISNGHGTTQYSTFSYVDPVITSISPKYGPMAGGTLLTLTGNYLNSGNSRHISIGGKTCTLKSVSNSILECYTPAQTISTEFAVKLKIDLANRETSIFSYREDPIVYEIHPTKSFISTWWKEPLNIVSFLFCFASGGSTITGVGKNLNSVSVPRMVINVHEAGRNFTVACQHRSNSEIICCTTPSLQQLNLQLPLKTKAFFMLDGILSKYFDLIYVHNPVFKPFEKPVMISMGNENVLEIKGNDIDPEAVKGEVLKVGNKSCENIHLHSEAVLCTVPNDLLKLNSELNIEWKQAISSTVLGKVIVQPDQNFTGLIAGVVSISTALLLLLGFFLWLKKRKQIKDLGSELVRYDARVHTPHLDRLVSARSVSPTTEMVSNESVDYRATFPEDQFPNSSQNGSCRQVQYPLTDMSPILTSGDSDISSPLLQNTVHIDLSALNPELVQAVQHVVIGPSSLIVHFNEVIGRGHFGCVYHGTLLDNDGKKIHCAVKSLNRITDIGEVSQFLTEGIIMKDFSHPNVLSLLGICLRSEGSPLVVLPYMKHGDLRNFIRNETHNPTVKDLIGFGLQVAKGMKYLASKKFVHRDLAARNCMLDEKFTVKVADFGLARDMYDKEYYSVHNKTGAKLPVKWMALESLQTQKFTTKSDVWSFGVLLWELMTRGAPPYPDVNTFDITVYLLQGRRLLQPEYCPDPLYEVMLKCWHPKAEMRPSFSELVSRISAIFSTFIGEHYVHVNATYVNVKCVAPYPSLLSSEDNADDEVDTRPASFWETS

SEQ ID NO: 4699 - protein, 524 aa, Homo sapiens
MSQGSPGDWAPLDPTPGPPASPNPFVHELHLSRLQRVKFCLLGALLAPIRVLLAFIVLFLLWPFAWLQVAGLSEEQLQEPITGWRKTVCHNGVLGLSRLLFFLLGFLRIRVRGQRASRLQAPVLVAAPHSTFFDPIVLLPCDLPKVVSRAENLSVPVIGALLRFNQAILVSRHDPASRRRVVEEVRRRATSGGKWPQVLFFPEGTCSNKKALLKFKPGAFIAGVPVQPVLIRYPNSLDTTSWAWRGPGVLKVLWLTASQPCSIVDVEFLPVYHPSPEESRDPTLYANNVQRVMAQALGIPATECEFVGSLPVIVVGRLKVALEPQLWELGKVLRKAGLSAGYVDAGAEPGRSRMISQEEFARQLQLSDPQTVAGAFGYFQQDTKGLVDFRDVALALAALDGGRSLEELTRLAFELFAEEQAEGPNRLLYKDGFSTILHLLLGSPHPAATALHAELCQAGSSQGLSLCQFQNFSLHDPLYGKLFSTYLRPPHTSRGTSQTPNASSPGNPTALANGTVQAPKQKGD

SEQ ID NO: 4700 - protein, 255 aa, Homo sapiens
MKLTRKMVLTRAKASELHSVRKLNCWGSRLTDISICQEMPSLEVITLSVNSISTLEPVSRCQRLSELYLRRNRIPSLAELFYLKGLPRLRVLWLAENPCCGTSPHRYRMTVLRTLPRLQKLDNQAVTEEELSRALSEGEEITAAPEREGTGHGGPKLCCTLSSLSSAAETGRDPLDSEEEATGAQDERGLKPPSRGQFPSLSARDASSSHRGRNVLTAILLLLRELDAEGLEAVQQTVGSRLQALRGEEVQEHAE

SEQ ID NO: 4701 - protein, 661 aa, Homo sapiens
MAAGETQLYAKVSNKLKSRSSPSLLEPLLAMGFPVHTALKALAATGRKTAEEALAWLHDHCNDPSLDDPIPQEYALFLCPTGPLLEKLQEFWRESKRQCAKNRAHEVFPHVTLCDFFTCEDQKVECLYEALKRAGDRLLGSFPTAVPLALHSSISYLGFFVSGSPADVIREFAMTFATEASLLAGTSVSRFWIFSQVPGHGPNLRLSNLTRASFVSHYILQKYCSVKPCTKQLHLTLAHKFYPHHQRTLEQLARAIPLGHSCQWTAALYSRDMRFVHYQTLRALFQYKPQNVDELTLSPGDYIFVDPTQQDEASEGWVIGISQRTGCRGFLPENYTDRASESDTWVKHRMYTFSLATDLNSRKDGEASSRCSGEFLPQTARSLSSLQALQATVARKSVLVVRHGERVDQIFGKAWLQQCSTPDGKYYRPDLNFPCSLPRRSRGIKDFENDPPLSSCGIFQSRIAGDALLDSGIRISSVFASPALRCVQTAKLILEELKLEKKIKIRVEPGIFEWTKWEAGKTTPTLMSLEELKEANFNIDTDYRPAFPLSALMPAESYQEYMDRCTASMVQIVNTCPQDTGVILIVSHGSTLDSCTRPLLGLPPRECGDFAQLVRKIPSLGMCFCEENKEEGKWELVNPPVKTLTHGANAAFNWRNWISGN

SEQ ID NO: 4702 - protein, 346 aa, Homo sapiens
MYRFTDFDVSNISIYLNHVLFYTTQQAGDLEHMETRNYSAMTEFFLVGLSQYPELQLFLFLLCLIMYMIILLGNSLLIIITILDSRLHTPMYFFLGNLSFLDICYTSSSIPPMLIIFMSERKSISFIGCALQMVVSLGLGSTECVLLAVMAYDHYVAICNPLRYSIIMNGVLYVQMAAWSWIIGCLTSLLQTVLTMMLPFCGNNVIDHITCEILALLKLVCSDITINVLIMTVTNIVSLVILLLLIFISYVFILSSILRINCAEGRKKAFSTCSAHSIVVILFYGSALFMYMKPKSKNTNTSDEIIGLSYGVVSPMLNPIIYSLRNKEVKEAVKKVLSRHLHLLKM

SEQ ID NO: 4703 - protein, 558 aa, Homo sapiens
MSAGSERGAAATPGGLPAPCASKVELRLSCRHLLDRDPLTKSDPSVALLQQAQGQWVQVGRTEVVRSSLHPVFSKVFTVDYYFEEVQRLRFEVYDTHGPSGFSCQEDDFLGGMECTLGQIVAQKKVTRPLLLKFGRNAGKSTITVIAEDISGNNGYVELSFRARKLDDKDLFSKSDPFLELYRVNDDQGLQLVYRTEVVKNNLNPVWEAFKVSLSSLCSCEETRPLKCLVWDYDSRGKHDFIGEFSTTFEEMQKAFEEGQAQWDCVNPKYKQKRRSYKNSGVVVLADLKFHRVYSFLDYIMGGCQIHFTVAIDFTASNGDPRNSCSLHYINPYQPNEYLKALVSVGEICQDYDSDKRFSALGFGARIPPKYEVSHDFAINFNPEDDECEGIQGVVEAYQNCLPRVQLYGPTNVAPIISKVARVAAAEESTGKASQYYILLILTDGVVTDMADTREAIVRASRLPMSIIIVGVGNADFTDMQVLDGDDGVLRSPRGEPALRDIVQFVPFRELKNASPAALAKCVLAEVPKQVVEYYSHRGLPPRSLGVPAGEASPGCTP

SEQ ID NO: 4704 - protein, 669 aa, Homo sapiens
MMRLRGSGMLRDLLLRSPAGVSATLRRAQPLVTLCRRPRGGGRPAAGPAAAARLHPWWGGGGWPAEPLARGLSSSPSEILQELGKGSTHPQPGVSPPAAPAAPGPKDGPGETDAFGNSEGKELVASGENKIKQGLLPSLEDLLFYTIAEGQEKIPVHKFITALKSTGLRTSDPRLKECMDMLRLTLQTTSDGVMLDKDLFKKCVQSNIVLLTQAFRRKFVIPDFMSFTSHIDELYESAKKQSGGKVADYIPQLAKFSPDLWGVSVCTVDGQRHSTGDTKVPFCLQSCVKPLKYAIAVNDLGTEYVHRYVGKEPSGLRFNKLFLNEDDKPHNPMVNAGAIVVTSLIKQGVNNAEKFDYVMQFLNKMAGNEYVGFSNATFQSERESGDRNFAIGYYLKEKKCFPEGTDMVGILDFYFQLCSIEVTCESASVMAATLANGGFCPITGERVLSPEAVRNTLSLMHSCGMYDFSGQFAFHVGLPAKSGVAGGILLVVPNVMGMMCWSPPLDKMGNSVKGIHFCHDLVSLCNFHNYDNLRHFAKKLDPRREGGDQRVKSVINLLFAAYTGDVSALRRFALSAMDMEQRDYDSRTALHVAAAEGHVEVVKFLLEACKVNPFPKDRWNNTPMDEALHFGHHDVFKILQEYQVQYTPQGDSDNGKENQTVHKNLDGLL

SEQ ID NO: 4705 - protein, 504 aa, Homo sapiens
MEAAATPAAAGAARREELDMDVMRPLINEQNFDGTSDEEHEQELLPVQKHYQLDDQEGISFVQTLMHLLKGNIGTGLLGLPLAIKNAGIVLGPISLVFIGIISVHCMHILVRCSHFLCLRFKKSTLGYSDTVSFAMEVSPWSCLQKQAAWGRSVVDFFLVITQLGFCSVYIVFLAENVKQVHEGFLESKVFISNSTNSSNPCERRSVDLRIYMLCFLPFIILLVFIRELKNLFVLSFLANVSMAVSLVIIYQYVVRNMPDPHNLPIVAGWKKYPLFFGTAVFAFEGIGVVLPLENQMKESKRFPQALNIGMGIVTTLYVTLATLGYMCFHDEIKGSITLNLPQDVWLYQSVKILYSFGIFVTYSIQFYVPAEIIIPGITSKFHTKWKQICEFGIRSFLVSITCAGAILIPRLDIVISFVGAVSSSTLALILPPLVEILTFSKEHYNIWMVLKNISIAFTGVVGFLLGTYITVEEIIYPTPKVVAGTPQSPFLNLNSTCLTSGLK

SEQ ID NO: 4706 - protein, 938 aa, Homo sapiens
MPALEHMNQILHILFVFLPFLWALGTLPPPDALLLWAMEQVLEFGLGGSSMSTHLRLLVMFIMSAGTAIASYFIPSTVGVVLFMTGFGFLLSLNLSDMGHKIGTKSKDLPSGPEKHFSWKECLFYIIILVLALLETSLLHHFAGFSQISKSNSQAIVGYGLMILLIILWILREIQSVYIIGIFRNPFYPKDVQTVTVFFEKQTRLMKIGIVRRILLTLVSPFAMIAFLSLDSSLQGLHSVSVCIGFTRAFRMVWQNTENALLETVIVSTVHLISSTDIWWNRSLDTGLRLLLVGIIRDRLIQFISKLQFAVTVLLTSWTEKKQRRKTTATLCILNIVFSPFVLVIIVFSTLLSSPLLPLFTLPVFLVGFPRPIQSWPGAAGTTACVCADTVYYYQMVPRLTAVLQTAMAAGSLGLLLPGSHYLGRFQDRLMWIMILECGYTYCSINIKGLELQETSCHTAEARRVDEVFEDAFEQEYTRVCSLNEHFGNVLTPCTVLPVKLYSDARNVLSGIIDSHENLKEFKGDLIKVLVWILVQYCSKRPGMKENVHNTENKGKAPLMLPALNTLPPPKSPEDIDSLNSETFNDWSDDNIFDDEPTIKKVIEEKHQLKDLPGTNLFIPGSVESQRVGDHSTGTVPENDLYKAVLLGYPAVDKGKQEDMPYIPLMEFSCSHSHLVCLPAEWRTSCMPSSKMKEMSSLFPEDWYQFVLRQLECYHSEEKASNVLEEIAKDKVLKDFYVHTVMTCYFSLFGIDNMAPSPGHILRVYGGVLPWSVALDWLTEKPELFQLALKAFRYTLKLMIDKASLGPIEDFRELIKYLEEYERDWYIGLVSDEKWKEAILQEKPYLFSLGYDSNMGIYTGRVLSLQELLIQVGKLNPEAVRGQWANLSWELLYATNDDEERYSIQAHPLLLRNLTVQAAEPPLGYPIYSSKPLHIHLY

SEQ ID NO: 4707 - protein, 1226 aa, Homo sapiens
MDSFDLALLQEWDLESLCVYEPDRNALRRKERERRNQETQQDDGTFNSSYSLFSEPYKTNKGDELSNRIQNTLGNYDEMKDFLTDRSNQSHLVGVPKPGVPQTPVNKIDEHFVADSRAQNQPSSICSTTTSTPAAVPVQQSKRGTMGWQKAGHPPSDGQQRATQQGSLRTLLGDGVGRQQPRAKQVCNVEVGLQTQERPPAMAAKHSSSGHCVQNFPPSLASKPSLVQQKPTAYVRPMDGQDQAPDESPKLKSSSETSVHCTSYRGVPASKPEPARAKAKLSKFSIPKQGEESRSGETNSCVEEIIREMTWLPPLSAIQAPGKVEPTKFPFPNKDSQLVSSGHNNPKKGDAEPESPDNGTSNTSMLEDDLKLSSDEEENEQQAAQRTALRALSDSAVVQQPNCRTSVPSSKGSSSSSSSGSSSSSSDSESSSGSDSETESSSSESEGSKPPHFSSPEAEPASSNKWQLDKWLNKVNPHKPPILIQNESHGSESNQYYNPVKEDVQDCGKVPDVCQPSLREKEIKSTCKEEQRPRTANKAPGSKGVKQKSPPAAVAVAVSAAAPPPAVPCAPAENAPAPARRSAGKKPTRRTERTSAGDGANCHRPEEPAAADALGTSVVVPPEPTKTRPCGNNRASHRKELRSSVTCEKRRTRGLSRIVPKSKEFIETESSSSSSSSDSDLESEQEEYPLSKAQTVAASASSGNDQRLKEAAANGGSGPRAPVGSINARTTSDIAKELEEQFYTLVPFGRNELLSPLKDSDEIRSLWVKIDLTLLSRIPEHLPQEPGVLSAPATKDSESAPPSHTSDTPAEKALPKSKRKRKCDNEDDYREIKKSQGEKDSSSRLATSTSNTLSANHCNMNINSVAIPINKNEKMLRSPISPLSDASKHKYTSEDLTSSSRPNGNSLFTSASSSKKPKADSQLQPHGGDLTKAAHNNSENIPLHKSRPQTKPWSPGSNGHRDCKRQKLVFDDMPRSADYFMQEAKRMKHKADAMVEKFGKALNYAEAALSFIECGNAMEQGPMESKSPYTMYSETVELIRYAMRLKTHSGPNATPEDKQLAALCYRCLALLYWRMFRLKRDHAVKYSKALIDYFKNSSKAAQAPSPWGASGKSTGTPSPMSPNPSPASSVGSQGSLSNASALSPSTIVSIPQRIHQMAANHVSITNSILHSYDYWEMADNLAKENREFFNDLDLLMGPVTLHSSMEHLVQYSQQGLHWLRNSAHLS

SEQ ID NO: 4708 - protein, 607 aa, Homo sapiens
MAFRRQVKNFVKNYSDAEIKVREATSNDPWGPSSSLMLDISDLTFNTISLSEIMNMLWHRLNDHGKNWRHVYKSLTLMDYLIKNGSKKVIQHCREGFCNLQTLKDFQHIDEAGKDQGYYIREKSKQVITLLMDEPLLCKEREVACRTRQRTSHSILFSKRQLGSSNSLTACTSAPTPDISASEKKYKLPKFGRLHNKRNVCKAGLKQEHCQDVHLPTETMLSQETLPLKIHGWKSTEDLMTFLDDDPELPLLATPPSIVSPITCLSEAEEVCNLSGADAVPTLSENSPSGQRDVSLDKRSDGIFTNTVTENLLETPLEKQSAAEGLKTLTILPACWSSKEEFISPDLRVSKSDSTFHNQASVETLCLSPSFKIFDRVKEIVINKAYQKPAQSSIQMDDKILKTTTRVSTASEGASSFSPLSMSSPDLASPEKSAHLLSPILAGPSFWTLSHQQLSSTSFKDEDKTAKLHHSFASRGPVSSDVEENDSLNLLGILPNNSDSAKKNISHISSSHWGEFSTQNVDQFIPLSCSGFQSTKDFPQEPEAKNSISVLLREVKRAIARLHEDLSTVIQELNVINNILMSMSLNSSQISQSSQVPQSSEGSSDQI

SEQ ID NO: 4709 - protein, 653 aa, Homo sapiens
MADIKTGIFAKNVQKRLNRAQEKVLQKLGKADETKDEQFEEYVQNFKRQEAEGTRLQRELRGYLAAIKGMQEASMKLTESLHEVYEPDWYGREDVKMVGEKCDVLWEDFHQKLVDGSLLTLDTYLGQFPDIKNRIAKRSRKLVDYDSARHHLEALQSSKRKDESRISKAEEEFQKAQKVFEEFNVDLQEELPSLWSRRVGFYVNTFKNVSSLEAKFHKEIAVLCHKLYEVMTKLGDQHADKAFTIQGAPSDSGPLRIAKTPSPPEEPSPLPSPTASPNHTLAPASPAPARPRSPSQTRKGPPVPPLPKVTPTKELQQENIISFFEDNFVPEISVTTPSQNEVPEVKKEETLLDLDFDPFKPEVTPAGSAGVTHSPMSQTLPWDLWTTSTDLVQPASGGSFNGFTQPQDTSLFTMQTDQSMICNLIIPGADADAAVGTLVSAAEGAPGEEAEAEKATVPAGEGVSLEEAKIGTETTEGAESAQPEAEELEATVPQEKVIPSVVIEPASNHEEEGENEITIGAEPKETTEDAAPPGPTSETPELATEQKPIQDPQPTPSAPAMGAADQLASAREASQELPPGFLYKVETLHDFEAANSDELTLQRGDVVLVVPSDSEADQDAGWLVGVKESDWLQYRDLATYKGLFPENFTRRLD

SEQ ID NO: 4710 - protein, 852 aa, Homo sapiens
MAPKQKKKTSRGKKRLKPVLAASEDMEPVNMESMGHPEIYPLVLTTKTQEIFNCRIDEDVTDEQPYKLINKEDIFEDLRNRAAVSDFHPVKKIVQEYPGNELLLVYDKDFKYGLNFYLIATEEGKENYLNPPEVPEEQEEYKEHIPEDVYIYKPPVSKPWVSLGSEKEIEEESVTESTKQITYMISRKRSEFGAPIKFSDQNASSVKDAYIECTAYPDKNFTLKQLEKDVGMQVIPQIKDISTQTKCVEIALQQNEIMNTFIDDWKYLAEEEGTFGDKTDTHLKEYQSFTDLHSPTEKMITCVSWHPTIYGLIAVSVAVRLSFEDRVHFSGKLLLQPSLILFWSFSDPIHPQLMLESPDDIFCFKFCPSDPNIIAGGCINGQIVMWDITAHADRIENIKAGGSRSKRATLKPMFLLEPESNKEAMYIRHCAVSSIENGHKKVITDIHWLSDTFEINRMGSVFENRSGICCQLVTCSADCTICFWDIRPQKPLTPQTTEKKKEESIEIPFDVPSTFLHLDLSWKPLTKVRLSKGETSLDHCPTKISLNEDHLLCKTQDKMLAQSKTEKAEEMNPYHNLESGMANLLKPIDDFCTKFFVGTEEGEVIYTDWKMEKDPETGRLMSKKPVSHHTIHDGTVHTIQRSPFYNDIILTVGGWNVAIWKEGVMTGPLLQSCCAPKRYTSGHWSLTRPGVFYIGREDGYIDIWDLLEKTHEPAQSQNICITMITYIKPWIFSSKQQFIATADYYGTLHILEIPWTLSRPSTNEMASVNHYFEREVKHLEYVEQRKKIREQEKKEMELEMAKKKVKTYQKSKEQMQAELKMDYESYLELEKTVLINLGLIKVTEKGSYMEVM

SEQ ID NO: 4711 - protein, 593 aa, Homo sapiens
MAAASSSDSDACGAESNEANSKWLDAHYDPMANIHTFSACLALADLHGDGEYKLVVGDLGPGGQQPRLKVLKGPLVMTESPLPALPAAAATFLMEQHEPRTPALALASGPCVYVYKNLRPYFKFSLPQLPPNPLEQDLWNQAKEDRIDPLTLKEMLESIRETAEEPLSIQSLRFLQLELSEMEAFVNQHKSNSIKRQTVITTMTTLKKNLADEDAVSCLVLGTENKELLVLDPEAFTILAKMSLPSVPVFLEVSGQFDVEFRLAAACRNGNIYILRRDSKHPKYCIELSAQPVGLIRVHKVLVVGSTQDSLHGFTHKGKKLWTVQMPAAILTMNLLEQHSRGLQAVMAGLANGEVRIYRDKALLNVIHTPDAVTSLCFGRYGREDNTLIMTTRGGGLIIKILKRTAVFVEGGSEVGPPPAQAMKLNVPRKTRLYVDQTLREREAGTAMHRAFQTDLYLLRLRAARAYLQALESSLSPLSTTAREPLKLHAVVQGLGPTFKLTLHLQNTSTTRPVLGLLVCFLYNEALYSLPRAFFKVPLLVPGLNYPLETFVESLSNKGISDIIKVLVLREGQSAPLLSAHVNMPGSEGLAAA

SEQ ID NO: 4712 - protein, 331 aa, Homo sapiens
MGTPQKDVIIKSDAPDTLLLEKHADYIASYGSKKDDYEYCMSEYLRMSGIYWGLTVMDLMGQLHRMNREEILAFIKSCQHECGGISASIGHDPHLLYTLSAVQILTLYDSINVIDVNKVVEYVKGLQKEDGSFAGDIWGEIDTRFSFCAVATLALLGKLDAINVEKAIEFVLSCMNFDGGFGCRPGSESHAGQIYCCTGFLAITSQLHQVNSDLLGWWLCERQLPSGGLNGRPEKLPDVCYSWWVLASLKIIGRLHWIDREKLRNFILACQDEETGGFADRPGDMVDPFHTLFGIAGLSLLGEEQIKPVNPVFCMPEEVLQRVNVQPELVS

SEQ ID NO: 4713 - protein, 422 aa, Homo sapiens
CFQSQEHKHHMVCGIQEAAENYRKLFQEILNTSREKLEAAKSILTDEQERMAMIQEEEQNFKKMIESEYSMRLRLLNEECEQNLQRQQECISDLNLRETLLNQAIKLATELEEMFQEMLQRLGRVGRENMEKLKESEARASEQVRSLLKLIVELEKKCGEGTLALLKCLDLEIRPPELREMNFCCAEATQSMNAKYSLERSKSLLLEHLEPAHITDLSLCHIRGLSSMFRVLQRHLTLDPETAHPCLALSEDLRTMRLRHGQQDGAGNPERLDFSAMVLAAESFTSGRHYWEVDVEKATRWQVGIYHGSADAKGSTARASGEKVLLTGSVMGTEWTLWVFPPLKRLFLEKKLDTVGVFLDCEHGQISFYNVTEMSLIYNFSHCAFQGALRPVFSLCIPNGDTSPDSLTILQHGPSCDATVSP

SEQ ID NO: 4714 - protein, 510 aa, Homo sapiens
MNFETSRCATLQYCPDPYIQRFVETPAHFSWKESYYRSTMSQSTQTNEFLSPEVFQHIWDFLEQPICSVQPIDLNFVDEPSEDGATNKIEISMDCIRMQDSDLSDPMWPQYTNLGLLNSMDQQIQNGSSSTSPYNTDHAQNSVTAPSPYAQPSSTFDALSPSPAIPSNTDYPGPHSFDVSFQQSSTAKSATWTYSTELKKLYCQIAKTCPIQIKVMTPPPQGAVIRAMPVYKKAEHVTEVVKRCPNHELSREFNEGQIAPPSHLIRVEGNSHAQYVEDPITGRQSVLVPYEPPQVGTEFTTVLYNFMCNSSCVGGMNRRPILIIVTLETRDGQVLGRRCFEARICACPGRDRKADEDSIRKQQVSDSTKNGDGTKRPFRQNTHGIQMTSIKKRRSPDDELLYLPVRGRETYEMLLKIKESLELMQYLPQHTIETYRQQQQQQHQHLLQKQTSIQSPSSYGNSSPPLNKMNSMNKLPSVSQLINPQQRNALTPTTIPDGMGANRSGKSENP

SEQ ID NO: 4715 - protein, 504 aa, Homo sapiens
MSVEMDSSSFIQFDVPEYSSTVLSQLNELRLQGKLCDIIVHIQGQPFRAHKAVLAASSPYFRDHSALSTMSGLSISVIKNPNVFEQLLSFCYTGRMSLQLKDVVSFLTAASFLQMQCVIDKCTQILESIHSKISVGDVDSVTVGAEENPESRNGVKDSSFFANPVEISPPYCSQGRQPTASSDLRMETTPSKALRSRLQEEGHSDRGSSGSVSEYEIQIEGDHEQGDLLVRESQITEVKVKMEKSDRPSCSDSSSLGDDGYHTEMVDGEQVVAVNVGSYGSVLQHAYSYSQAASQPTNVSEAFGSLSNSSPSRSMLSCFRGGRARQKRALSVHLHSDLQGLVQGSDSEAMMNNPGYESSPRERSARGHWYPYNERLICIYCGKSFNQKGSLDRHMRLHMGITPFVCKFCGKKYTRKDQLEYHIRGHTDDKPFRCEICGKCFPFQGTLNQHLRKNHPGVAEVRSRIESPERTDVYVEQKLENDASASEMGLDSRMEIHTVSDAPD

SEQ ID NO: 4716 - protein, 688 aa, Homo sapiens
MADLEAVLADVSYLMAMEKSKATPAARASKRIVLPEPSIRSVMQKYLAERNEITFDKIFNQKIGFLLFKDFCLNEINEAVPQVKFYEEIKEYEKLDNEEDRLCRSRQIYDAYIMKELLSCSHPFSKQAVEHVQSHLSKKQVTSTLFQPYIEEICESLRGDIFQKFMESDKFTRFCQWKNVELNIHLTMNEFSVHRIIGRGGFGEVYGCRKADTGKMYAMKCLDKKRIKMKQGETLALNERIMLSLVSTGDCPFIVCMTYAFHTPDKLCFILDLMNGGDLHYHLSQHGVFSEKEMRFYATEIILGLEHMHNRFVVYRDLKPANILLDEHGHARISDLGLACDFSKKKPHASVGTHGYMAPEVLQKGTAYDSSADWFSLGCMLFKLLRGHSPFRQHKTKDKHEIDRMTLTVNVELPDTFSPELKSLLEGLLQRDVSKRLGCHGGGSQEVKEHSFFKGVDWQHVYLQKYPPPLIPPRGEVNAADAFDIGSFDEEDTKGIKLLDCDQELYKNFPLVISERWQQEVTETVYEAVNADTDKIEARKRAKNKQLGHEEDYALGKDCIMHGYMLKLGNPFLTQWQRRYFYLFPNRLEWRGEGESRQNLLTMEQILSVEETQIKDKKCILFRIKGGKQFVLQCESDPEFVQWKKELNETFKEAQRLLRRAPKFLNKPRSGTVELPKPSLCHRNSNGL

SEQ ID NO: 4717 - protein, 237 aa, Homo sapiens
MPARLETCISDLDCASSSGSDLSGFLTDEEDCARLQQAASASGPPAPARRGAPNISRASEVPGAQDDEQERRRRRGRTRVRSEALLHSLRRSRRVKANDRERNRMHNLNAALDALRSVLPSFPDDTKLTKIETLRFAYNYIWALAETLRLADQGLPGGGARERLLPPQCVPCLPGPPSPASDAESWGSGAAAASPLSDPSSPAASEDFTYRPGDPVFSFPSLPKDLLHTTPCFIPYH

SEQ ID NO: 4718 - protein, 841 aa, Homo sapiens
MTTEKSLVTEAENSQHQQKEEGEEAINSGQQEPQQEESCQTAAEGDNWCEQKLKASNGDTPTHEDLTKNKERTSESRGLSRLFSSFLKRPKSQVSEEEGKEVESDKEKGEGGQKEIEFGTSLDEEIILKAPIAAPEPELKTDPSLDLHSLSSAETQPAQEELREDPDFEIKEGEGLEECSKIEVKEESPQSKAETELKASQKPIRKHRNMHCKVSLLDDTVYECVVEKHAKGQDLLKRVCEHLNLLEEDYFGLAIWDNATSKTWLDSAKEIKKQVRGVPWNFTFNVKFYPPDPAQLTEDITRYYLCLQLRQDIVAGRLPCSFATLALLGSYTIQSELGDYDPELHGVDYVSDFKLAPNQTKELEEKVMELHKSYRSMTPAQADLEFLENAKKLSMYGVDLHKAKDLEGVDIILGVCSSGLLVYKDKLRINRFPWPKVLKISYKRSSFFIKIRPGEQEQYESTIGFKLPSYRAAKKLWKVCVEHHTFFRLTSTDTIPKSKFLALGSKFRYSGRTQAQTRQASALIDRPAPHFERTASKRASRSLDGAAAVDSADRSPRPTSAPAITQGQVAEGGVLDASAKKTVVPKAQKETVKAEVKKEDEPPEQAEPEPTEAWKVEKTHIEVTVPTSNGDQTQDLDKSQEEIKKHHASISELKKNFMESVPEPRPSEWDKRLSTHSPFRTLNINGQIPTGEGVKKTSVLPSERKPPLVKTQTVTISDNANAVKSEIPTKDVPIVHTETKTITYEAAQTDDNSGDLDPGVLLTAQTITSETPSSTTTTQITKTVKGGISETRIEKRIVITGDADIDHDQVLVQAIKEAKEQHPDMSVTKVVVHQETEIADE

SEQ ID NO: 4719 - protein, 1435 aa, Homo sapiens
MNQPPQIAPKRERKTIRIRDPNQGGKDITEEIMSGARTASTPTPPQTGGGLEPQANGETPQVAVIVRPDDRSQGAIIADRPGLPGPEHSPSESQPSSPSPTPSPSPVLEPGSEPNLAVLSIPGDTMTTIQMSVEESTPISRETGEPYRLSPEPTPLAEPILEVEVTLSKPVPESEFSSSPLQAPTPLASHTVEIHEPNGMVPSEDLEPEVESSPELAPPPACPSESPVPIAPTAQPEELLNGAPSPPAVDLSPVSEPEEQAKEVTASMAPPTIPSATPATAPSATSPAQEEEMEEEEEEEEGEAGEAGEAESEKGGEELLPPESTPIPANLSQNLEAAAATQVAVSVPKRRRKIKELNKKEAVGDLLDAFKEANPAVPEVENQPPAGSNPGPESEGSGVPPRPEEADETWDSKEDKIHNAENIQPGEQKYEYKSDQWKPLNLEEKKRYDREFLLGFQFIFASMQKPEGLPHISDVVLDKANKTPLRPLDPTRLQGINCGPDFTPSFANLGRTTLSTRGPPRGGPGGELPRGPAGLGPRRSQQGPRKEPRKIIATVLMTEDIKLNKAEKAWKPSSKRTAADKDRGEEDADGSKTQDLFRRVRSILNKLTPQMFQQLMKQVTQLAIDTEERLKGVIDLIFEKAISEPNFSVAYANMCRCLMALKVPTTEKPTVTVNFRKLLLNRCQKEFEKDKDDDEVFEKKQKEMDEAATAEERGRLKEELEEARDIARRRSLGNIKFIGELFKLKMLTEAIMHDCVVKLLKNHDEESLECLCRLLTTIGKDLDFEKAKPRMDQYFNQMEKIIKEKKTSSRIRFMLQDVLDLRGSNWVPRRGDQGPKTIDQIHKEAEMEEHREHIKVQQLMAKGSDKRRGGPPGPPISRGLPLVDDGGWNTVPISKGSRPIDTSRLTKITKPGSIDSNNQLFAPGGRLSWGKGSSGGSGAKPSDAASEAARPATSTLNRFSALQQAVPTESTDNRRVVQRSSLSRERGEKAGDRGDRLERSERGGDRGDRLDRARTPATKRSFSKEVEERSRERPSQPEGLRKAASLTEDRDRGRDAVKREAALPPVSPLKAALSEEELEKKSKAIIEEYLHLNDMKEAVQCVQELASPSLLFIFVRHGVESTLERSAIAREHMGQLLHQLLCAGHLSTAQYYQGLYEILELAEDMEIDIPHVWLYLAELVTPILQEGGVPMGELFREITKPLRPLGKAASLLLEILGLLCKSMGPKKVGTLWREAGLSWKEFLPEGQDIGAFVAEQKVEYTLGEESEAPGQRALPSEELNRQLEKLLKEGSSNQRVFDWIEANLSEQQIVSNTLVRALMTAVCYSAIIFETPLRVDVAVLKARAKLLQKYLCDEQKELQALYALQALVVTLEQPPNLLRMFFDALYDEDVVKEDAFYSWESSKDPAEQQGKGVALKSVTAFFKWLREAEEESDHN

SEQ ID NO: 4720 - protein, 1074 aa, Homo sapiens
MKDIGQQLYTTHLNGGHNSLTMSPKQPDANGAPRPNRQEAQTLLYQGSEAEAAMMTIATCAKCKSVHKISLQDLQKGTGKDGMYVCFQCSLGAAPPNFHFVSNNSSATHVGNKTENFSSSVNSKFKVRNFKPGKYYCDKCRFSTKDPLQYKKHTLQHEEIKFICSHCSYISYTKGEFQRHLVKHTGIFPYQCEYCDYGAIRNDYIVKHTKRVHERAGAKRPVKAVAKLEPKRTGTSKQNPELLKASNPRTTFQNKWSDQLSGFSLHANKDKMHNIMLLPEPKEYQKDVVCIPNKMTLSEPNEVNLFENKNVEVEVLSPAKEPVQPGMPLTVVAPAELVVPANCLAQLIDVKVVNGTQQLVLKLFPLEENNCLEAGRDNGGNSERMVKEKGSNEQEKVLSAEKTKSLTVDGNVGKLVGIDSFQPSVQKQLKNVKWVRSYDFIMPNSSVHNNGKSFINSETIEDFQKKNNLYPHRTAFPSVALKGHSLASVFKNSVLRSLGAASNPFPYKAAVCFAESGRNLHSSSQQLLPFAASPATCSFSGEKGLLPVSENDLESTSKVNIPVKVVSSNRKQEDNQTEEHKAVSTVGQISSQHKSEYLHINITGEDRSQQPGDKPLELKNSERTNNTNDGPVISSVFSLSSGSENVPEGIKWNSSTSKIKSIELLRRKIAQLIESCGKPSSLASNSAHRRSVGQASKGTSKATSEGIQEINVSLTGLGHSTGTLQKPPNDGGITGNRQLTHQQIYPHFADGSNRKTKSRVARKAHVATPVLIPKGAVLRVLNSSENAHIIEATCEAPVSIPCSERQLIKPVPFCPVRQADSDLQPLRSERGPIDMSPNIETPLRPKLRKESAVCSTIHRKTGLLYGQQGSSELNKQGRLLSRSLSISRNKTKQVHLSRKKNKIQAEPSRCLKDPSIFQVARQLRLIAAKPDQLIKCPRRNQPVIVLNHPDVDSPEVTNVMKVINKYKGNVLKVVLSERTRCQLGIRRHHVRLTYQNAEEASQIKRQMMLKMKLKKVHKNNYQVVDSLPDDSSQCVFKCWFCGRLYEDQEEWMSHGQRHLIEATRDWDVLSSKGK

SEQ ID NO: 4721 - protein, 430 aa, Homo sapiens
MAEAVLIDLFGLKLNSQKNCHQTLLKTLNAVQYHHAAKAKFLCIMCCSNISYERDGEQDNCEIETSNGLSALLEEFEIVSCPSMAATLYTIKQKIDEKNLSSIKVIVPRHRKTLMKAFIDQLFTDVYNFEFEDLQVTFRGGLFKQSIEINVITAQELRGIQNEIETFLRSLPALRGKLTIITSSLIPDIFIHGFTTRTGGISYIPTLSSFNLFSSSKRRDPKVVVQENLRRLANAAGFNVEKFYRIKTHHSNDIWIMGRKEPDSYDGITTNQRGVTIAALGADCIPIVFADPVKKACGVAHAGWKGTLLGVAMATVNAMIAEYGCSLEDIVVVLGPSVGPCCFTLPRESAEAFHNLHPACVQLFDSPNPCIDIRKATRILLEQGGILPQNIQDQNQDLNLCTSCHPDKFFSHVRDGLNFGTQIGFISIKE

SEQ ID NO: 4722 - protein, 991 aa, Homo sapiens
MSSHHTTFPFDPERRVRSTLKKVFGFDSFKTPLQESATMAVVKGNKDVFVCMPTGAGKSLCYQLPALLAKGITIVVSPLIALIQDQVDHLLTLKVRVSSLNSKLSAQERKELLADLEREKPQTKILYITPEMAASSSFQPTLNSLVSRHLLSYLVVDEAHCVSQWGHDFRPDYLRLGALRSRLGHAPCVALTATATPQVQEDVFAALHLKKPVAIFKTPCFRANLFYDVQFKELISDPYGNLKDFCLKALGQEADKGLSGCGIVYCRTREACEQLAIELSCRGVNAKAYHAGLKASERTLVQNDWMEEKVPVIVATISFGMGVDKANVRFVAHWNIAKSMAGYYQESGRAGRDGKPSWCRLYYSRNDRDQVSFLIRKEVAKLQEKRGNKASDKATIMAFDALVTFCEELGCRHAAIAKYFGDALPACAKGCDHCQNPTAVRRRLEALERSSSWSKTCIGPSQGNGFDPELYEGGRKGYGDFSRYDEGSGGSGDEGRDEAHKREWNLFYQKQMQLRKGKDPKIEEFVPPDENCPLKEASSRRIPRLTVKAREHCLRLLEEALSSNRQSTRTADEADLRAKAVELEHETFRNAKVANLYKASVLKKVADIHRASKDGQPYDMGGSAKSCSAQAEPPEPNEYDIPPASHVYSLKPKRVGAGFPKGSCPFQTATELMETTRIREQAPQPERGGEHEPPSRPCGLLDEDGSEPLPGPRGEVPGGSAHYGGPSPEKKAKSSSGGSSLAKGRASKKQQLLATAAHKDSQSIARFFCRRVESPALLASAPEAEGACPSCEGVQGPPMAPEKYTGEEDGAGGHSPAPPQTEECLRERPSTCPPRDQGTPEVQPTPAKDTWKGKRPRSQQENPESQPQKRPRPSAKPSVVAEVKGSVSASEQGTLNPTAQDPFQLSAPGVSLKEAANVVVKCLTPFYKEGKFASKELFKGFARHLSHLLTQKTSPGRSVKEEAQNLIRHFFHGRARCESEADWHGLCGPQR

SEQ ID NO: 4723 - protein, 652 aa, Homo sapiens
MNWVGGSRSRVLIKQERRKQKEYFEKHRLKSKMKSLGVLSPVKNSAVSLDILNLYMVNQISCKKKIPETVRKPTHVNMNRDIKMPLRKHNLELTMSPHCVPSKLCLDDTETNVNCQRLSSKEDLGPVQSQGMDSYSMLHPQFSKIENCSFTPSSFSVELPSNRHISKLNFTSGIAPTPQKLAYEKKQNDQRSTVNCSDSLLSKLNKSQDVFSPSHKTTRFGTLFERLNSLGNRNLLTKSPAVIMDEDCRSTDEIRQSDYITEKHSIQHIWGKNGKEVSNFLEDVNQSTPNLLSENCDSFVSQNMINVLNIDEQRIKKTFNKCDYDSMGDTCVVTSSDKNHVTDRCIRNIFTVPELTFSNSTLNKTSYPEKCQPNKKYQREYNKNERNDLSTSFENDYYPSSSERKEKFENDYQEKTPQKSIQKYPANSMGNIPSEELHSKQSWDFGLDEILMEEGGIYSLKSKRISTKKISLDSAQSSRSTSYSPRPTDSCFSSSSDLPSEDEDQISQQIEDSNRMTIKTKEKMNNFYVERMAKLSGDRIVKNDDKIHKQNENFYQFSVKNNTDQFPQLQCNSAHILQNKTNDNCVLQAARCDAGIQTESESVMEEKLDVAIQCDLISKCTCRSDVSLCNLERCSGNIKADTTGGQEIHKNN

SEQ ID NO: 4724 - protein, 414 aa, Homo sapiens
MRFKSHTVELRRPCSDMEGAALLRVSVLCIWMSALFLGVGVRAEEAGARVQQNVPSGTDTGDPQSKPLGDWAAGTMDPESSIFIEDAIKYFKEKVSTQNLLLLLTDNEAWNGFVAAAELPRNEADELRKALDNLARQMIMKDKNWHDKGQQYRNWFLKEFPRLKSELEDNIRRLRALADGVQKVHKGTTIANVVSGSLSISSGILTLVGMGLAPFTEGGSLVLLEPGMELGITAALTGITSSTMDYGKKWWTQAQAHDLVIKSLDKLKEVREFLGENISNFLSLAGNTYQLTRGIGKDIRALRRARANLQSVPHASASRPRVTEPISAESGEQVERVNEPSILEMSRGVKLTDVAPVSFFLVLDVVYLVYESKHLHEGAKSETAEELKKVAQELEEKLNILNNNYKILQADQEL

SEQ ID NO: 4725 - protein, 246 aa, Homo sapiens
MNRFLLLMSLYLLGSARGTSSQPNELSGSIDHQTSVQQLPGEFFSLENPSDAEALYETSSGLNTLSEHGSSEHGSSKHTVAEHTSGEHAESEHASGEPAATEHAEGEHTVGEQPSGEQPSGEHLSGEQPLSELESGEQPSDEQPSGEHGSGEQPSGEQASGEQPSGTILNCYTCAYMNDQGKCLRGEGTCITQNSQQCMLKKIFEGGKLQFMVQGCENMCPSMNLFSHGTRMQIICCRNQSFCNKI

SEQ ID NO: 4726 - protein, 310 aa, Homo sapiens
MSQQLKKRAKTRHQKGLGGRAPSGAKPRQGKSSQDLQAEIEPVSAVWALCDGYVCYEPGPQALGGDDFSDCYIECVIRGEFSQPILEEDSLFESLEYLKKGSEQQLSQKVFEASSLECSLEYMKKGVKKELPQKIVGENSLEYSEYMTGKKLPPGGIPGIDLSDPKQLAEFARKKPPINKEYDSLSAIACPQSGCTRKLRNRAALRKHLLIHGPRDHVCAECGKAFVESSKLKRHFLVHTGEKPFRCTFEGCGKRFSLDFNLRTHVRIHTGEKRFVCPFQGCNRRFIQSNNLKAHILTHANTNKNEQEGK

SEQ ID NO: 4727 - protein, 833 aa, Homo sapiens
MAEAPPVSGTFKFNTDAAEFIPQEKKNSGLNCGTQRRLDSNRIGRRNYSSPPPCHLSRQVPYDEISAVHQHSYHPSGSKPKSQQTSFQSSPCNKSPKSHGLQNQPWQKLRNEKHHIRVKKAQSLAEQTSDTAGLESSTRSESGTDLREHSPSESEKEVVGADPRGAKPKKATQFVYSYGRGPKVKGKLKCEWSNRTTPKPEDAGPESTKPVGVFHPDSSEASSRKGVLDGYGARRNEQRRYPQKRPPWEVEGARPRPGRNPPKQEGHRHTNAGHRNNMGPIPKDDLNERPAKSTCDSENLAVINKSSRRVDQEKCTVRRQDPQVVSPFSRGKQNHVLKNVETHTGSLIEQLTTEKYECMVCCELVRVTAPVWSCQSCYHVFHLNCIKKWARSPASQADGQSGWRCPACQNVSAHVPNTYTCFCGKVKNPEWSRNEIPHSCGEVCRKKQPGQDCPHSCNLLCHPGPCPPCPAFMTKTCECGRTRHTVRCGQAVSVHCSNPCENILNCGQHQCAELCHGGQCQPCQIILNQVCYCGSTSRDVLCGTDVGKSDGFGDFSCLKICGKDLKCGNHTCSQVCHPQPCQQCPRLPQLVRCCPCGQTPLSQLLELGSSSRKTCMDPVPSCGKVCGKPLPCGSLDFIHTCEKLCHEGDCGPCSRTSVISCRCSFRTKELPCTSLKSEDATFMCDKRCNKKRLCGRHKCNEICCVDKEHKCPLICGRKLRCGLHRCEEPCHRGNCQTCWQASFDELTCHCGASVIYPPVPCGTRPPECTQTCARVHECDHPVYHSCHSEEKCPPCTFLTQKWCMGKHEQSHYWASTQKKRSHYMKKIPAHACL

SEQ ID NO: 4728 - protein, 322 aa, Homo sapiens
GRLGKDLATGVLSQECTKFKVSSCRECIESGPGCTWCQKLNFTGPGDPDSIRCDTRPQLLMRGCAADDIMDPTSLAETQEDHNGGQKQLSPQKVTLYLRPGQAAAFNVTFRRAKGYPIDLYYLMDLSYSMLDDLRNVKKLGGDLLRALNEITESGRIGFGSFVDKTVLPFVNTHPDKLRNPCPNKEKECQPPFAFRHVLKLTNNSNQFQTEVGKQLISGNLDAPEGGLDAMMQVAACPEEIGWRNVTRLLVFATDDGFHFAGDGKLGAILTPNDGRCHLEDNLYKRSNEFDYPSVGQLAHKLAENNIQPIFAVTSRMVKTYE

SEQ ID NO: 4729 - protein, 349 aa, Homo sapiens
MAIPITVLDCDLLLYGRGHRTLDRFKLDDVTDEYLMSMYGFPRQFIYYLVELLGANLSRPTQRSRAISPETQVLAALGFYTSGSFQTRMGDAIGISQASMSRCVANVTEALVERASQFIRFPADEASIQALKDEFYGLAGMPGVMGVVDCIHVAIKAPNAEDLSYVNRKGLHSLNCLMVCDIRGTLMTVETNWPGSLQDCAVLQQSSLSSQFEAGMHKDSWLLGDSSFFLRTWLMTPLHIPETPAEYRYNMAHSATHSVIEKTFRTLCSRFRCLDGSKGALQYSPEKSSHIILACCVLHNISLEHGMDVWSSPMTGPMEQPPEEEYEHMESLDLEADRIRQELMLTHFS

SEQ ID NO: 4730 - protein, 827 aa, Homo sapiens
ERETLRKATRATQRTGSFPQAWHSTAAGVAWVAPLSPQHQRAWLCRCFGAWQQFVQRGSRYRDHLADRRTGTLRKCLEQWVRMKQLRESDGAKVTQLSLCRQKAGREAVYTAGPGACGLGAVGQAQGQQEQGRGSLQDACWTLALCWALLLWKMRLFQRQWANSFFQGLQQRMLQRSLRWWHLRALGPDATSSCTKTPSALEPLSSSTLQDSLEKVPRAPTLPDTLQGSLLWAAGQRQQGQCLLLWQARAQQFQGTARWYQHTRQRRIFLSWSRWATAQWAWRELASHRAWDRTCRAVLGLWRQRLLQSRLVEWWAQERGWRLARDALCHWHSCWQGQQFLHEKCQTWVQVHLQGLQKVVFRSWQQAAAHQRCTVTRPEQLLLQSYFQAWCEVVRDTGVLRAQHQAFQDGLRRRALGAVFATWREAQEVAAGAQEQRVAQASLARWRSCGQQGQEDGQQKKARAPQAFPAWPVAPGMHHEAQQQAGESAGAQAAQCWTWCWALWVHESCRGQVSRAHASWKPRAWVLEASVQSAVRGGVQRAILTQLRPAELRRFLRTVQLRVRLGLPGAGKTRSCWTQATELVPPAPSLQCSLGGRRKPRGTAWAQRCREHSLCPAFQLWPQWPGQSSWVPGLPLWTRDQGPRAHSSPEPRACKAQSKAHKRRLRILEKQAQAHGSALLLALKGHDALGHQEEVPAAPVPRGTASRAAGFPAGQVPGSGMAALGGCPRGRAAGADPAQGVAPEMGLADVVAADPATASGSAVTAAGRWAFKKWHQRLAARSPRRGAASSPRPWSKPGPKGPESGQEAARAPRGWGLGAEHGAQLQL

SEQ ID NO: 4731 - protein, 1793 aa, Homo sapiens
QEAELGEPDPEQKRSRARERRREGRSKTFDWAEFRPIQQALAQERVGGVGPADTHEPLRPEAEPGELERERARRREERRKRFGMLDATDGPGTEDAALRMEVDRSPGLPMSDLKTHNVHVEIEQRWHQVETTPLREEKQVPIAPVHLSSEDGGDRLSTHELTSLLEKELEQSQKEASDLLEQNRLLQDQLRVALGREQSAREGYVLQTEVAASPSGAWQRLHRVNQDLQSELEAQCQRQELITHQIQTLKRSYGEAKDTIRHHEAEIRSLQARLSNAAAELAIKEQALAKLKGDLKREQGRVREQLEERQHSEAALSSQLRASEQKLKSAEALLLEKTQELRGLETQQALQRDRQKEVQRLQERIADLSQQLGASEQAQRLMEEKLQRNYELLLESCEKEKQALLQNLKEVEDKASAYEDQLQGQAQQVETLQKEKLSATFEGSEQVHQLEEQLEAREASVRRLAEHVQSLCDERDLLRQRFQELTERVATSDEDVAELREKLRRREADNQSLEHSYQRVSSQLQSMHTLLREKEEELERIKEAHEKVLEKKEQDLNEALVKMVALGSSLEETEIKLQAKEEILRKFASESPKDMEEPRSTPEETERDGTLLPGQPVQATRAPLGLPHTRLEDEDEDLGAPPGEEYGDGSPSREDSMVPPKSVEVLDREGHQQGTAKLDQGAPGVKRQRIRFSTIQCQRYIHPEGSEKTWTSSTSSDTSQDRSPSEESMSSEPAPSVLPATGDSDTYLSIIHSLETKLYVTEEKLKDVTVRLESQQGQSREALLALHHQWAGTEAQLREQLRASLLQVGALASQLEQERQERARRVEGHVGELGDFQVKNSQALMCLENCREQLRSLPRASQEDEQDARAASLASVESALVSAIQALQHWPAPAHGGARAQLETGGTEENGKPASLQQCSQSELTEQEQVRLLSDQIALEASLISQIADSLKNTTSDVSRMLHEISWSGQPPMESAGAPVDTWARKVLVDGEFWSQVESLRKHLGTLGGEAVGASGDGQQSIPQGLAPILANATWVRAELSFATQSVRESFHRRLQSIQETLRGTQTALRQHKCLLREILGAYQTPDFERVMQQVLEALRLPAGHEDGVQLSWDLSPLGEVLGRDSDSSQEPFDVSDQSPGAFVAIQEELAQQLKEKASLLEEIAAALPSLPPVESLRDCQKLLQVSQSLSYNTCLGGLGQYSSLLVQDAIIQAQVCYASCRIRLEYEKELQLCKESWQTREPSCSEQAQAARALREEYEELLRKQKSEYLDVIAIVERENAELKAKAAQLDHQQQCLEDAESKHSMSMFTLRGRYEEEIRCVVEQLTRTESTLQAERSRVLSQLDASVRDRQDMERHHGEQIQTLEDRFQLKVRELQTIHEEELRTLQEHYSQSLRCLQDTLCLHQGPHPKALPAPAPNWQATQGEADSMTGLRERIQELEAQMDVMREELGHKDLEGDAATLREKYQRDLESLKATCERGFAAMEETHQKKIEDLQRQHQRELEKLREEKDRLLAEETAATISAIEAMKNAHREEMERELEKSQRSQISSVNSDVEALRRQYLEELQSVQRELEVLSEQYSQKCLENAHLAQALEAERQALRQCQRENQELNAHNQELNNRLAAEITRLRTLLTGDGGGEATGSPLAQGKDAYELEVLLRVKESEIQYLKQEISSLKDELQTALRDKKYASDKYKDIYTELSIAKAKADCDISRLKEQLKAATEALGEKSPDSATVSGYDIMKSKSNPDFLKKDRSCVTRQLRNIRSKSLKEGLTVQERLKLFESRDLKKD

SEQ ID NO: 4732 - protein, 463 aa, Homo sapiens
METEQPEETFPNTETNGEFGKRPAEDMEEEQAFKRSRNTDEMVELRILLQSKNAGAVIGKGGKNIKALRTDYNASVSVPDSSGPERILSISADIETIGEILKKIIPTLEEGLQLPSPTATSQLPLESDAVECLNYQHYKGSDFDCELRLLIHQSLAGGIIGVKGAKIKELRENTQTTIKLFQECCPHSTDRVVLIGGKPDRVVECIKIILDLISESPIKGRAQPYDPNFYDETYDYGGFTMMFDDRRGRPVGFPMRGRGGFDRMPPGRGGRPMPPSRRDYDDMSPRRGPPPPPPGRGGRGGSRARNLPLPPPPPPRGGDLMAYDRRGRPGDRYDGMVGFSADETWDSAIDTWSPSEWQMAYEPQGGSGYDYSYAGGRGSYGDLGGPIITTQVTIPKDLAGSIIGKGGQRIKQIRHESGASIKIDEPLEGSEDRIITITGTQDQIQNAQYLLQNSVKQYSGKFF

SEQ ID NO: 4733 - protein, 3674 aa, Homo sapiens
MAGQPHSPRELLGAAGHRSRRPSTELRVPPSPSLTMDSQYETGHIRKLQARHMQMQEKTFTKWINNVFQCGQAGIKIRNLYTELADGIHLLRLLELISGEALPPPSRGRLRVHFLENSSRALAFLRAKVPVPLIGPENIVDGDQTLILGLIWVIILRFQISHISLDKEEFGASAALLSTKEALLVWCQRKTASYTNVNITDFSRSWSDGLGFNALIHAHRPDLLDYGSLRPDRPLHNLAFAFLVAEQELGIAQLLDPEDVAAAQPDERSIMTYVSLYYHYCSRLHQGQTVQRRLTKILLQLQETELLQTQYEQLVADLLRWIAEKQMQLEARDFPDSLPAMRQLLAAFTIFRTQEKPPRLQQRGAAEALLFRLQTALQAQNRRPFLPHEGLGLAELSQCWAGLEWAEAARSQALQQRLLQLQRLETLARRFQHKAALRESFLKDAEQVLDQARAPPASLATVEAAVQRLGMLEAGILPQEGRFQALAEIADILRQEQYHSWADVARRQEEVTVRWQRLLQHLQGQRKQVADMQAVLSLLQEVEAASHQLEELQEPARSTACGQQLAEVVELLQRHDLLEAQVSAHGAHVSHLAQQTAELDSSLGTSVEVLQAKARTLAQLQQSLVALVRARRALLEQTLQRAEFLRNCEEEEAWLKECGQRVGNAALGRDLSQIAGALQKHKALEAEVHRHQAVCVDLVRRGRDLSARRPPTQPDPGERAEAVQGGWQLLQTRVVGRGARLQTALLVLQYFADAAEAASWLRERRSSLERASCGQDQAAAETLLRRHVRLERVLRAFAAELRRLEEQGRAASARASLFTVNSALSPPGESLRNPGPWSEASCHPGPGDAWKMALPAEPDPDFDPNTILQTQDHLSQDYESLRALAQLRRARLEEAMALFGFCSSCGELQLWLEKQTVLLQRVQPQADTLEVMQLKYENFLTALAVGKGLWAEVSSSAEQLRQRYPGNSTQIQRQQEELSQRWGQLEALKREKAVQLAHSVEVCSFLQECGPTQVQLRDVLLQLEALQPGSSEDTCHALQLAQKKTLVLERRVHFLQSVVVKVEEPGYAESQPLQGQVETLQGLLKQVQEQVAQRARRQAETQARQSFLQESQQLLLWAESVQAQLRSKEVSVDVASAQRLLREHQDLLEEIHLWQERLQQLDAQSQPMAALDCPDSQEVPNTLRVLGQQGQELKVLWEQRQQWLQEGLELQKFGREVDGFTATCANHQAWLHLDNLGEDVREALSLLQQHREFGRLLSTLGPRAEALRAHGEKLVQSQHPAAHTVREQLQSIQAQWTRLQGRSEQRRRQLLASLQLQEWKQDVAELMQWMEEKGLMAAHEPSGARRNILQTLKRHEAAESELLATRRHVEALQQVGRELLSRRPCGQEDIQTRLQGLRSKWEALNRKMTERGDELQQAGQQEQLLRQLQDAKEQLEQLEGALQSSETGQDLRSSQRLQKRHQQLESESRTLAAKMAALASMAHGMAASPAILEETQKHLRRLELLQGHLAIRGLQLQASVELHQFCHLSNMELSWVAEHMPHGSPTSYTECLNGAQSLHRKHKELQVEVKAHQGQVQRVLSSGRSLAASGHPQAQHIVEQCQELEGHWAELERACEARAQCLQQAVTFQQYFLDVSELEGWVEEKRPLVSSRDYGRDEAATLRLINKHQALQEELAIYWSSMEELDQTAQTLTGPEVPEQQRVVQERLREQLRALQELAATRDRELEGTLRLHEFLREAEDLQGWLASQKQAAKGGESLGEDPEHALHLCTKFAKFQHQVEMGSQRVAACRLLAESLLERGHSAGPMVRQRQQDLQTAWSELWELTQARGHALRDTETTLRVHRDLLEVLTQVQEKATSLPNNVARDLCGLEAQLRSHQGLERELVGTERQLQELLETAGRVQKLCPGPQAHAVQQRQQAVTQAWAVLQRRMEQRRAQLERARLLARFRTAVRDYASWAARVRQDLQVEESSQEPSSGPLKLSAHQWLRAELEAREKLWQQATQLGQQALLAAGTPTKEVQEELRALQDQRDQVYQTWARKQERLQAEQQEQLFLRECGRLEEILAAQEVSLKTSALGSSVEEVEQLIRKHEVFLKVLTAQDKKEAALRERLKTLRRPRVRDRLPILLQRRMRVKELAESRGHALHASLLMASFTQAATQAEDWIQAWAQQLKEPVPPGDLRDKLKPLLKHQAFEAEVQAHEEVMTSVAKKGEALLAQSHPRAGEVSQRLQGLRKHWEDLRQAMALRGQELEDRRNFLEFLQRVDLAEAWIQEKEVKMNVGDLGQDLEHCLQLRRRLREFRGNSAGDTVGDACIRSISDLSLQLKNRDPEEVKIICQRRSQLNNRWASFHGNLLRYQQQLEGALEIHVLSRELDNVTKRIQEKEALIQALDCGKDLESVQRLLRKHEELEREVHPIQAQVESLEREVGRLCQRSPEAAHGLRHRQQEVAESWWQLRSRAQKRREALDALHQAQKLQAMLQELLVSAQRLRAQMDTSPAPRSPVEARRMLEEHQECKAELDSWTDSISLARSTGQQLLTAGHPFSSDIRQVLAGLEQELSSLEGAWQEHQLQLQQALELQLFLSSVEKMERWLCSKEDSLASEGLWDPLAPMEPLLWKHKMLEWDLEVQAGKISALEATARGLHQGGHPEAQSALGRCQAMLLRKEALFRQAGTRRHRLEELRQLQAFLQDSQEVAAWLREKNLVALEEGLLDTAMLPAQLQKQQNFQAELDASMHQQQELQREGQRLLQGGHPASEAIQERLEELGALWGELQDNSQKKVAKLQKACEALRLRRSMEELENWLEPIEVELRAPTVGQALPGVGELLGTQRELEAAVDKKARQAEALLGQAQAFVREGHCLAQDVEEQARRLLQRFKSLREPLQERRTALEARSLLLKFFRDADEEMAWVQEKLPLAAAQDYGQSLSAVRHLQEQHQNLESEMSSHEALTRVVLGTGYKLVQAGHFAAHEVAARVQQLEKAMAHLRAEAARRRLLLQQAQEAQQFLTELLEAGSWLAERGHVLDSEDMGHSAEATQALLRRLEATKRDLEAFSPRIERLQQTAALLESRKNPESPKVLAQLQAVREAHAELLRRAEARGHGLQEQLQLHQLERETLLLDAWLTTKAATAESQDYGQDLEGVKVLEEKFDAFRKEVQSLGQAKVYALRKLAGTLERGAPRRYPHIQAQRSRIEAAWERLDQAIKARTENLAAAHEVHSFQQAAAELQGRMQEKTALMKGEDGGHSLSSVRTLQQQHRRLERELEAMEKEVARLQTEACRLGQLHPAAPGGLAKVQEAWATLQAKAQERGQWLAQAAQGHAFLGRCQELLAWAQERQELASSEELAEDVAGAEQLLGQHEELGQEIRECRLQAQDLRQEGQQLVDNSHFMSAEVTECLQELEGRLQELEEAWALRWQRCAESWGLQKLRQRLEQAEAWLACWEGLLLKPDYGHSVSDVELLLHRHQDLEKLLAAQEEKFAQMQKTEMEQELLLQPQELKPGRAGSSLTSFQWRPSGHQGLGAQLAETRDPQDAKGTPTMEGSLEFKQHLLPGGRQPSSSSWDSCRGNLQGSSLSLFLDERMAAEKVASIALLDLTGARCERLRGRHGRKHTFSLRLTSGAEILFAAPSEEQAESWWRALGSTAAQSLSPKLKAKPVSSLNECTTKDARPGCLLRSDP

SEQ ID NO: 4734 - protein, 1398 aa, Homo sapiens
MQDYNKDDMSYRRISAVEPKTALPFNRFLPNKSRQPSYVPAPLRKKKPDKHEDNRRSWASPVYTEADGTFSSNQRRIWGTNVENWPTVQGTSKSSCYLEEEKAKTRSIPNIVKDDLYVRKLSPVMPNPGNAFDQFLPKCWTPEDVNWKRIKRETYKPWYKEFQGFSQFLLLQALQTYSDDILSSETHTKIDPTSGPRLITRRKNLSYAPGYRRDDLEMAALDPDLENDDFFVRKTGAFHANPYVLRAFEDFRKFSEQDDSVERDIILQCREGELVLPDLEKDDMIVRRIPAQKKEVPLSGAPDRYHPVPFPEPWTLPPEIQAKFLCVLERTCPSKEKSNSCRILVPSYRQKKDDMLTRKIQSWKLGTTVPPISFTPGPCSEADLKRWEAIREASRLRHKKRLMVERLFQKIYGENGSKSMSDVSAEDVQNLRQLRYEEMQKIKSQLKEQDQKWQDDLAKWKDRRKSYTSDLQKKKEEREEIEKQALEKSKRSSKTFKEMLQDRESQNQKSTVPSRRRMYSFDDVLEEGKRPPTMTVSEASYQSERVEEKGATYPSEIPKEDSTTFAKREDRVTTEIQLPSQSPVEEQSPASLSSLRSRSTQMESTRVSASLPRSYRKTDTVRLTSVVTPRPFGSQTRGISSLPRSYTMDDAWKYNGDVEDIKRTPNNVVSTPAPSPDASQLASSLSSQKEVAATEEDVTRLPSPTSPFSSLSQDQAATSKATLSSTSGLDLMSESGEGEISPQREVSRSQDQFSDMRISINQTPGKSLDFGFTIKWDIPGIFVASVEAGSPAEFSQLQVDDEIIAINNTKFSYNDSKEWEEAMAKAQETGHLVMDVRRYGKAGSPETKWIDATSGIYNSEKSSNLSVTTDFSESLQSSNIESKEINGIHDESNAFESKASESISLKNLKRRSQFFEQGSSDSVVPDLPVPTISAPSRWVWDQEEERKRQERWQKEQDRLLQEKYQREQEKLREEWQRAKQEAERENSKYLDEELMVLSSNSMSLTTREPSLATWEATWSEGSKSSDREGTRAGEEERRQPQEEVVHEDQGKKPQDQLVIERERKWEQQLQEEQEQKRLQAEAEEQKRPAEEQKRQAEIERETSVRIYQYRRPVDSYDIPKTEEASSGFLPGDRNKSRSTTELDDYSTNKNGNNKYLDQIGNMTSSQRRSKKEQVPSGAELERQQILQEMRKRTPLHNDNSWIRQRSASVNKEPVSLPGIMRRGESLDNLDSPRSNSWRQPPWLNQPTGFYASSSVQDFSRPPPQLVSTSNRAYMRNPSSSVPPPSAGSVKTSTTGVATTQSPTPRSHSPSASQSGSQLRNRSVSGKRICSYCNNILGKGAAMIIESLGLCYHLHCFKCVACECDLGGSSSGAEVRIRNHQLYCNDCYLRFKSGRPTAM

SEQ ID NO: 4735 - protein, 673 aa, Homo sapiens
MPRSPGTRLKPAKYIPVATAAALLVGSSTLFFVFTCPWLTRAVSPAVPVYNGIIFLFVLANFSMATFMDPGVFPRADEDEDKEDDFRAPLYKNVDVRGIQVRMKWCATCHFYRPPRCSHCSVCDNCVEVTGKFRGGVNPFTRGCCGNVEHVLCSPLAPRYVVEPPRLPLAVSLKPPFLRPELLDRAAPLKVKLSDNGLKAGLGRSKSKGSLDRLDEKPLDLGPPLPPKIEAGTFSSDLQTPRPGSAESALSVQRTSPPTPAMYKFRPAFPTGPKVPFCGPGEQVPGPDSLTLGDDSIRSLDFVSEPSLDLPDYGPGGLHAAYPPSPPLSASDAFSGALRSLSLKASSRRGGDHVALQPLRSEGGPPTPHRSIFAPHALPNRNGSLSYDSLLNPGSPGGHACPAHPAVGVAGYHSPYLHPGATGDPPRPLPRSFSPVLGPRPREPSPVRYDNLSRTIMASIQERKDREERERLLRSQADSLFGDSGVYDAPSSYSLQQASVLSEGPRGPALRYGSRDDLVAGPGFGGARNPALQTSLSSLSSSVSRAPRTSSSSLQADQASSNAPGPRPSSGSHRSPARQGLPSPPGTPHSPSYAGPKAVAFIHTDLPEPPPSLTVQRDHPQLKTPPSKLNGQSPGLARLGPATGPPGPSASPTRHTLVKKVSGVGGTTYEISV

SEQ ID NO: 4736 - protein, 753 aa, Homo sapiens
MPMDLILVVWFCVCTARTVVGFGMDPDLQMDIVTELDLVNTTLGVAQVSGMHNASKAFLFQDIEREIHAAPHVSEKLIQLFRNKSEFTILATVQQKPSTSGVILSIRELEHRIYERVIDPPDTNLPPGINLWLGQRNQKHGLFKGIIQDGKIIFMPNGYITQCPNLNHTCPTCSDFLSLVQGIMDLQELLAKMTAKLNYAETRLSQLENCHCEKTCQVSGLLYRDQDSWVDGDHCRNCTCKSGAVECRRMSCPPLNCSPDSLPVHIAGQCCKVCRPKCIYGGKVLAEGQRILTKSCRECRGGVLVKITEMCPPLNCSEKDHILPENQCCRVCRGHNFCAEGPKCGENSECKNWNTKATCECKSGYISVQGDSAYCEDIDECAAKMHYCHANTVCVNLPGLYRCDCVPGYIRVDDFSCTEHDECGSGQHNCDENAICTNTVQGHSCTCKPGYVGNGTICRAFCEEGCRYGGTCVAPNKCVCPSGFTGSHCEKDIDECSEGIIECHNHSRCVNLPGWYHCECRSGFHDDGTYSLSGESCIDIDECALRTHTCWNDSACINLAGGFDCLCPSGPSCSGDCPHEGGLKHNGQVWTLKEDRCSVCSCKDGKIFCRRTACDCQNPSADLFCCPECDTRVTSQCLDQNGHKLYRSGDNWTHSCQQCRCLEGEVDCWPLTCPNLSCEYTAILEGECCPRCVSDPCLADNITYDIRKTCLDSYGVSRLSGSVWTMAGSPCTTCKCKNGRVCCSVDFECLQNN

SEQ ID NO: 4737 - protein, 411 aa, Homo sapiens
MEQRGQNAPAASGARKRHGPGPREARGARPGPRVPKTLVLVVAAVLLLVSAESALITQQDLAPQQRAAPQQKRSSPSEGLCPPGHHISEDGRDCISCKYGQDYSTHWNDLLFCLRCTRCDSGEVELSPCTTTRNTVCQCEEGTFREEDSPEMCRKCRTGCPRGMVKVGDCTPWSDIECVHKESGIIIGVTVAAVVLIVAVFVCKSLLWKKVLPYLKGICSGGGGDPERVDRSSQRPGAEDNVLNEIVSILQPTQVPEQEMEVQEPAEPTGVNMLSPGESEHLLEPAEAERSQRRRLLVPANEGDPTETLRQCFDDFADLVPFDSWEPLMRKLGLMDNEIKVAKAEAAGHRDTLYTMLIKWVNKTGRDASVHTLLDALETLGERLAKQKIEDHLLSSGKFMYLEGNADSAMS

SEQ ID NO: 4738 - protein, 1792 aa, Homo sapiens
MSCVHYKFSSKLNYDTVTFDGLHISLCDLKKQIMGREKLKAADCDLQITNAQTKEEYTDDNALIPKNSSVIVRRIPIGGVKSTSKTYVISRTEPAMATTKAIDDSSASISLAQLTKTANLAEANASEEDKIKAMMSQSGHEYDPINYMKKPLGPPPPSYTCFRCGKPGHYIKNCPTNGDKNFESGPRIKKSTGIPRSFMMEVKDPNMKGAMLTNTGKYAIPTIDAEAYAIGKKEKPPFLPEEPSSSSEEDDPIPDELLCLICKDIMTDAVVIPCCGNSYCDECIRTALLESDEHTCPTCHQNDVSPDALIANKFLRQAVNNFKNETGYTKRLRKQLPPPPPPIPPPRPLIQRNLQPLMRSPISRQQDPLMIPVTSSSTHPAPSISSLTSNQSSLAPPVSGNPSSAPAPVPDITATVSISVHSEKSDGPFRDSDNKILPAAALASEHSKGTSSIAITALMEEKGYQVPVLGTPSLLGQSLLHGQLIPTTGPVRINTARPGGGRPGWEHSNKLGYLVSPPQQIRRGERSCYRSINRGRHHSERSQRTQGPSLPATPVFVPVPPPPLYPPPPHTLPLPPGVPPPQFSPQFPPGQPPPAGYSVPPPGFPPAPANLSTPWVSSGVQTAHSNTIPTTQAPPLSREEFYREQRRLKEEEKKKSKLDEFTNDFAKELMEYKKIQKERRRSFSRSKSPYSGSSYSRSSYTYSKSRSGSTRSRSYSRSFSRSHSRSYSRSPPYPRRGRGKSRNYRSRSRSHGYHRSRSRSPPYRRYHSRSRSPQAFRGQSPNKRNVPQGETEREYFNRYREVPPPYDMKAYYGRSVDFRDPFEKERYREWERKYREWYEKYYKGYAAGAQPRPSANRENFSPERFLPLNIRNSPFTRGRREDYVGGQSHRSRNIGSNYPEKLSARDGHNQKDNTKSKEKESENAPGDGKGNKHKKHRKRRKGEESEGFLNPELLETSRKSREPTGVEENKTDSLFVLPSRDDATPVRDEPMDAESITFKSVSEKDKRERDKPKAKGDKTKRKNDGSAVSKKENIVKPAKGPQEKVDGERERSPRSEPPIKKAKEETPKTDNTKSSSSSQKDEKITGTPRKAHSKSAKEHQETKPVKEEKVKKDYSKDVKSEKLTTKEEKAKKPNEKNKPLDNKGEKRKRKTEEKGVDKDFESSSMKISKLEVTEIVKPSPKRKMEPDTEKMDRTPEKDKISLSAPAKKIKLNRETGKKIGSTENISNTKEPSEKLESTSSKVKQEKVKGKVRRKVTGTEGSSSTLVDYTSTSSTGGSPVRKSEEKTDTKRTVIKTMEEYNNDNTAPAEDVIIMIQVPQSKWDKDDFESEEEDVKSTQPISSVGKPASVIKNVSTKPSNIVKYPEKESEPSEKIQKFTKDVSHEIIQHEVKSSKNSASSEKGKTKDRDYSVLEKENPEKRKNSTQPEKESNLDRLNEQGNFKSLSQSSKEARTSDKHDSTRASSNKDFTPNRDKKTDYDTREYSSSKRRDEKNELTRRKDSPSRNKDSASGQKNKPREERDLPKKGTGDSKKSNSSPSRDRKPHDHKATYDTKRPNEETKSVDKNPCKDREKHVLEARNNKESSGNKLLYILNPPETQVEKEQITGQIDKSTVKPKPQLSHSSRLSSDLTRETDEAAFEPDYNESDSESNVSVKEEESSGNISKDLKDKIVEKAKESLDTAAVVQVGISRNQSHSSPSVSPSRSHSPSGSQTRSHSSSASSAESQDSKKKKKKKEKKKHKKHKKHKKHKKHAGTEVELEKSQKHKHKKKKSKKNKDKEKEKEKDDQKVKSVTV

SEQ ID NO: 4739 - protein, 636 aa, Homo sapiens
MEGRGPYRIYDPGGSVPSGEASAAFERLVKENSRLKEKMQGIKMLGELLEESQMEATRLRQKAEELVKDNELLPPPSPSLGSFDPLAELTGKDSNVTASPTAPACPSDKPAPVQKPPSSGTSSEFEVVTPEEQNSPESSSHANAMALGPLPREDGNLMLHLQRLETTLSVCAEEPDHGQLFTHLGRMALEFNRLASKVHKNEQRTSILQTLCEQLRKENEALKAKLDKGLEQRDQAAERLREENLELKKLLMSNGNKEGASGRPGSPKMEGTGKKAVAGQQQASVTAGKVPEVVALGAAEKKVKMLEQQRSELLEVNKQWDQHFRSMKQQYEQKITELRQKLADLQKQVTDLEAEREQKQRDFDRKLLLAKSKIEMEETDKEQLTAEAKELRQKVKYLQDQLSPLTRQREYQEKEIQRLNKALEEALSIQTPPSSPPTAFGSPEGAGALLRKQELVTQNELLKQQVKIFEEDFQRERSDRERMNEEKEELKKQVEKLQAQVTLSNAQLKAFKDEEKAREALRQQKRKAKASGERYHVEPHPEHLCGAYPYAYPPMPAMVPHHGFEDWSQIRYPPPPMAMEHPPPLPNSRLFHLPEYTWRLPCGGVRNPNQSSQVMDPPTARPTEPESPKNDREGPQ

SEQ ID NO: 4740 - protein, 784 aa, Homo sapiens
MAQLLNSILSVIDVFHKYAKGNGDCALLCKEELKQLLLAEFGDILQRPNDPETVETILNLLDQDRDGHIDFHEYLLLVFQLVQACYHKLDNKSHGGRTSQQERGQEGAQDCKFPGNTGRQHRQRHEEERQNSHHSQPERQDGDSHHGQPERQDRDSHHGQSEKQDRDSHHSQPERQDRDSHHNQSERQDKDFSFDQSERQSQDSSSGKKVSHKSTSGQAKWQGHIFALNRCEKPIQDSHYGQSERHTQQSETLGQASHFNQTNQQKSGSYCGQSERLGQELGCGQTDRQGQSSHYGQTDRQDQSYHYGQTDRQGQSSHYSQTDRQGQSSHYSQPDRQGQSSHYGQMDRKGQCYHYDQTNRQGQGSHYSQPNRQGQSSHYGQPDTQDQSSHYGQTDRQDQSSHYGQTERQGQSSHYSQMDRQGQGSHYGQTDRQGQSSHYGQPDRQGQNSHYGQTDRQGQSSHYGQTDRQGQSSHYSQPDKQGQSSHYGKIDRQDQSYHYGQPDGQGQSSHYGQTDRQGQSFHYGQPDRQGQSSHYSQMDRQGQSSHYGQTDRQGQSSHYGQTDRQGQSYHYGQTDRQGQSSHYIQSQTGEIQGQNKYFQGTEGTRKASYVEQSGRSGRLSQQTPGQEGYQNQGQGFQSRDSQQNGHQVWEPEEDSQHHQHKLLAQIQQERPLCHKGRDWQSCSSEQGHRQAQTRQSHGEGLSHWAEEEQGHQTWDRHSHESQEGPCGTQDRRTHKDEQNHQRRDRQTHEHEQSHQRRDRQTHEDKQNRQRRDRQTHEDEQNHQR

SEQ ID NO: 4741 - protein, 976 aa, Homo sapiens
MSNSNTTQETLEIMKESEKKLVEESVNKNKFISKTPSKEEIEKECEDTSLRQETQRRTSNHGHARKRAKSNSKLKLVRSLAVCEESSTPFADGPLETQDIIQLHISCPSDKEEEKSTKDVSEKEDKDKNKEKIPRKMLSRDSSQEYTDSTGIDLHEFLVNTLKKNPRDRMMLLKLEQEILEFINDNNNQFKKFPQMTSYHRMLLHRVAAYFGMDHNVDQTGKAVIINKTSNTRIPEQRFSEHIKDEKNTEFQQRFILKRDDASMDRDDNQTGQNGYLNDIRLSKEAFSSSSHKRRQIFRGNREGLSRTSSSRQSSTDSELKSLEPRPWSSTDSDGSVRSMRPPVTKASSFSGISILTRGDSIGSSKGGSAGRISRPGMALGAPEVCNQVTSSQSVRGLLPCTAQQQQQQQQQQLPALPPTPQQQPPLNNHMISQADDLSNPFGQMSLSRQGSTEAADPSAALFQTPLISQHPQQTSFIMASTGQPLPTSNYSTSSHAPPTQQVLPPQGYMQPPQQIQVSYYPPGQYPNSNQQYRPLSHPVAYSPQRGQQLPQPSQQPGLQPMMPNQQQAAYQGMIGVQQPQNQGLLSSQRSSMGGQMQGLVVQYTPLPSYQVPVGSDSQNVVQPPFQQPMLVPVSQSVQGGLPAAGVPVYYSMIPPAQQNGTSPSVGFLQPPGSEQYQMPQSPSPCSPPQMPQQYSGVSPSGPGVVVMQLNVPNGPQPPQNPSMVQWSHCKYYSMDQRGQKPGDLYSPDSSPQANTQMSSSPVTSPTQSPAPSPVTSLSSVCTGLSPLPVLTQFPRPGGPAQGDGRYSLLGQPLQYNLSICPPLLHGQSTYTVHQGQSGLKHGNRGKRQALKSASTDLGTADVVLGRVLEVTDLPEGITRTEADKLFTQLAMSGAKIQWLKDAQGLPGGGGGDNSGTAENGRHSDLAALYTIVAVFPSPLAAQNASLRLNNSVSRFKLRMAKKNYDLRILERASSQ

SEQ ID NO: 4742 - protein, 1411 aa, Homo sapiens
MLRRILQRTPGRVGSQGSDLDSSATPINTVDVNNESSSEGFICPQCMKSLGSADELFKHYEAVHDAGNDSGHGGESNLALKRDDVTLLRQEVQDLQASLKEEKWYSEELKKELEKYQGLQQQEAKPDGLVTDSSAELQSLEQQLEEAQTENFNIKQMKDLFEQKAAQLATEIADIKSKYDEERSLREAAEQKVTRLTEELNKEATVIQDLKTELLQRPGIEDVAVLKKELVQVQTLMDNMTLERERESEKLKDECKKLQSQYASSEATISQLRSELAKGPQEVAVYVQELQKLKSSVNELTQKNQTLTENLLKKEQDYTKLEEKHNEESVSKKNIQATLHQKDLDCQQLQSRLSASETSLHRIHVELSEKGEATQKLKEELSEVETKYQHLKAEFKQLQQQREEKEQHGLQLQSEINQLHSKLLETERQLGEAHGRLKEQRQLSSEKLMDKEQQVADLQLKLSRLEEQLKEKVTNSTELQHQLDKTKQQHQEQQALQQSTTAKLREAQNDLEQVLRQIGDKDQKIQNLEALLQKSKENISLLEKEREDLYAKIQAGEGETAVLNQLQEKNHTLQEQVTQLTEKLKNQSESHKQAQENLHDQVQEQKAHLRAAQDRVLSLETSVNELNSQLNESKEKVSQLDIQIKAKTELLLSAEAAKTAQRADLQNHLDTAQNALQDKQQELNKITTQLDQVTAKLQDKQEHCSQLESHLKEYKEKYLSLEQKTEELEGQIKKLEADSLEVKASKEQALQDLQQQRQLNTDLELRATELSKQLEMEKEIVSSTRLDLQKKSEALESIKQKLTKQEEEKKILKQDFETLSQETKIQHEELNNRIQTTVTELQKVKMEKEALMTELSTVKDKLSKVSDSLKNSKSEFEKENQKGKAAILDLEKTCKELKHQLQVQMENTLKEQKELKKSLEKEKEASHQLKLELNSMQEQLIQAQNTLKQNEKEEQQLQGNINELKQSSEQKKKQIEALQGELKIAVLQKTELENKLQQQLTQAAQELAAEKEKISVLQNNYEKSQETFKQLQSDFYGRESELLATRQDLKSVEEKLSLAQEDLISNRNQIGNQNKLIQELKTAKATLEQDSAKKEQQLQERCKALQDIQKEKSLKEKELVNEKSKLAEIEEIKCRQEKEITKLNEELKSHKLESIKEITNLKDAKQLLIQQKLELQGKADSLKAAVEQEKRNQQILKDQVKKEEEELKKEFIEKEAKLHSEIKEKEVGMKKHEENEAKLTMQITALNENLGTVKKEWQSSQRRVSELEKQTDDLRGEIAVLEATVQNNQDERRALLERCLKGEGEIEKLQTKVLELQRKLDNTTAAVQELGRENQSLQIKHTQALNRKWAEDNEVQNCMACGKGFSVTVRRHHCRQCGNIFCAECSAKNALTPSSKKPVRVCDACFNDLQG

SEQ ID NO: 4743 - protein, 677 aa, Homo sapiens
MAKVNITRDLIRRQIKERGALSFERRYHVTDPFIRRLGLEAELQGHSGCVNCLEWNEKGDLLASGSDDQHTIVWDPLHHKKLLSMHTGHTANIFSVKFLPHAGDRILITGAADSKVHVHDLTVKETIHMFGDHTNRVKRIATAPMWPNTFWSAAEDGLIRQYDLRENSKHSEVLIDLTEYCGQLVEAKCLTVNPQDNNCLAVGASGPFVRLYDIRMIHNHRKSMKQSPSAGVHTFCDRQKPLPDGAAQYYVAGHLPVKLPDYNNRLRVLVATYVTFSPNGTELLVNMGGEQVYLFDLTYKQRPYTFLLPRKCHSSGEVQNGKMSTNGVSNGVSNGLHLHSNGFRLPESRGHVSPQVELPPYLERVKQQANEAFACQQWTQAIQLYSKAVQRAPHNAMLYGNRAAAYMKRKWDGDHYDALRDCLKAISLNPCHLKAHFRLARCLFELKYVAEALECLDDFKGKFPEQAHSSACDALGRDITAALFSKNDGEEKKGPGGGAPVRLRSTSRKDSISEDEMVLRERSYDYQFRYCGHCNTTTDIKEANFFGSNAQYIVSGSDDGSFFIWEKETTNLVRVLQGDESIVNCLQPHPSYCFLATSGIDPVVRLWNPRPESEDLTGRVVEDMEGASQANQRRMNADPLEVMLLNMGYRITGLSSGGAGASDDEDSSEGQVQCRPS

SEQ ID NO: 4744 - protein, 1349 aa, Homo sapiens
MIWYVATFIASVIGTRGLAAEGAHGLREEPEFVTARAGESVVLRCDVIHPVTGQPPPYVVEWFKFGVPIPIFIKFGYYPPHVDPEYAGRASLHDKASLRLEQVRSEDQGWYECKVLMLDQQYDTFHNGSWVHLTINAPPTFTETPPQYIEAKEGGSITMTCTAFGNPKPIVTWLKEGTLLGASGKYQVSDGSLTVTSVSREDRGAYTCRAYSIQGEAVHTTHLLVQGPPFIVSPPENITVNISQDALLTCRAEAYPGNLTYTWYWQDENVYFQNDLKLRVRILIDGTLIIFRVKPEDSGKYTCVPSNSLGRSPSASAYLTVQYPARVLNMPPVIYVPVGIHGYIRCPVDAEPPATVVKWNKDGRPLQVEKNLGWTLMEDGSIRIEEATEEALGTYTCVPYNTLGTMGQSAPARLVLKDPPYFTVLPGWEYRQEAGRELLIPCAAAGDPFPVITWRKVGKPSRSKHSALPSGSLQFRALSKEDHGEWECVATNVVTSITASTHLTVIGTSPHAPGSVRVQVSMTTANVSWEPGYDGGYEQTFSVWMKRAQFGPHDWLSLPVPPGPSWLLVDTLEPETAYQFSVLAQNKLGTSAFSEVVTVNTLAFPITTPEPLVLVTPPRCLIANRTQQGVLLSWLPPANHSFPIDRYIMEFRVAERWELLDDGIPGTEGEFFAKDLSQDTWYEFRVLAVMQDLISEPSNIAGVSSTDIFPQPDLTEDGLARPVLAGIVATICFLAAAILFSTLAACFVNKQRKRKLKRKKDPPLSITHCRKSLESPLSSGKVSPESIRTLRAPSESSDDQGQPAAKRMLSPTREKELSLYKKTKRAISSKKYSVAKAEAEAEATTPIELISRGPDGRFVMDPAEMEPSLKSRRIEGFPFAEETDMYPEFRQSDEENEDPLVPTSVAALKSQLTPLSSSQESYLPPPAYSPRFQPRGLEGPGGLEGRLQATGQARPPAPRPFHHGQYYGYLSSSSPGEVEPPPFYVPEVGSPLSSVMSSPPLPTEGPFGHPTIPEENGENASNSTLPLTQTPTGGRSPEPWGRPEFPFGGLETPAMMFPHQLPPCDVPESLQPKAGLPRGLPPTSLQVPAAYPGILSLEAPKGWAGKSPGRGPVPAPPAAKWQDRPMQPLVSQGQLRHTSQGMGIPVLPYPEPAEPGAHGGPSTFGLDTRWYEPQPRPRPSPRQARRAEPSLHQVVLQPSRLSPLTQSPLSSRTGSPELAARARPRPGLLQQAEMSEITLQPPAAVSFSRKSTPSTGSPSQSSRSGSPSYRPAMGFTTLATGYPSPPPGPAPAGPGDSLDVFGQTPSPRRTGEELLRPETPPPTLPTSGKLQRDRPAPATSPPERALSKL

SEQ ID NO: 4745 - protein, 1388 aa, Homo sapiens
MSRPPPTGKMPGAPETAPGDGAGASRQRKLEALIRDPRSPINVESLLDGLNSLVLDLDFPALRKNKNIDNFLNRYEKIVKKIRGLQMKAEDYDVVKVIGRGAFGEVQLVRHKASQKVYAMKLLSKFEMIKRSDSAFFWEERDIMAFANSPWVVQLFYAFQDDRYLYMVMEYMPGGDLVNLMSNYDVPEKWAKFYTAEVVLALDAIHSMGLIHRDVKPDNMLLDKHGHLKLADFGTCMKMDETGMVHCDTAVGTPDYISPEVLKSQGGDGFYGRECDWWSVGVFLYEMLVGDTPFYADSLVGTYSKIMDHKNSLCFPEDAEISKHAKNLICAFLTDREVRLGRNGVEEIRQHPFFKNDQWHWDNIRETAAPVVPELSSDIDSSNFDDIEDDKGDVETFPIPKAFVGNQLPFIGFTYYRENLLLSDSPSCRETDSIQSRKNEESQEIQKKLYTLEEHLSNEMQAKEELEQKCKSVNTRLEKTAKELEEEITLRKSVESALRQLEREKALLQHKNAEYQRKADHEADKKRNLENDVNSLKDQLEDLKKRNQNSQISTEKVNQLQRQLDETNALLRTESDTAARLRKTQAESSKQIQQLESNNRDLQDKNCLLETAKLKLEKEFINLQSALESERRDRTHGSEIINDLQGRICGLEEDLKNGKILLAKVELEKRQLQERFTDLEKEKSNMEIDMTYQLKVIQQSLEQEEAEHKATKARLADKNKIYESIEEAKSEAMKEMEKKLLEERTLKQKVENLLLEAEKRCSLLDCDLKQSQQKINELLKQKDVLNEDVRNLTLKIEQETQKRCLTQNDLKMQTQQVNTLKMSEKQLKQENNHLMEMKMNLEKQNAELRKERQDADGQMKELQDQLEAEQYFSTLYKTQVRELKEECEEKTKLGKELQQKKQELQDERDSLAAQLEITLTKADSEQLARSIAEEQYSDLEKEKIMKELEIKEMMARHKQELTEKDATIASLEETNRTLTSDVANLANEKEELNNKLKDVQEQLSRLKDEEISAAAIKAQFEKQLLTERTLKTQAVNKLAEIMNRKEPVKRGNDTDVRRKEKENRKLHMELKSEREKLTQQMIKYQKELNEMQAQIAEESQIRIELQMTLDSKDSDIEQLRSQLQALHIGLDSSSIGSGPGDAEADDGFPESRLEGWLSLPVRNNTKKFGWVKKYVIVSSKKILFYDSEQDKEQSNPYMVLDIDKLFHVRPVTQTDVYRADAKEIPRIFQILYANEGESKKEQEFPVEPVGEKSNYICHKGHEFIPTLYHFPTNCEACMKPLWHMFKPPPALECRRCHIKCHKDHMDKKEEIIAPCKVYYDISTAKNLLLLANSTEEQQKWVSRLVKKIPKKPPAPDPFARSSPRTSMKIQQNQSIRRPSRQLAPNKPS

SEQ ID NO: 4746 - protein, 1551 aa, Homo sapiens
MGFCLALAWTLLVGAWTPLGAQNPISWEVQRFDGWYNNLMEHRWGSKGSRLQRLVPASYADGVYQPLGEPHLPNPRDLSNTISRGPAGLASLRNRTVLGVFFGYHVLSDLVSVETPGCPAEFLNIRIPPGDPMFDPDQRGDVVLPFQRSRWDPETGRSPSNPRDPANQVTGWLDGSAIYGSSHSWSDALRSFSRGQLASGPDPAFPRDSQNPLLMWAAPDPATGQNGPRGLYAFGAERGNREPFLQALGLLWFRYHNLWAQRLARQHPDWEDEELFQHARKRVIATYQNIAVYEWLPSFLQKTLPEYTGYRPFLDPSISSEFVAASEQFLSTMVPPGVYMRNASCHFQGVINRNSSVSRALRVCNSYWSREHPSLQSAEDVDALLLGMASQIAEREDHVLVEDVRDFWPGPLKFSRTDHLASCLQRGRDLGLPSYTKARAALGLSPITRWQDINPALSRSNDTVLEATAALYNQDLSWLELLPGGLLESHRDPGPLFSTIVLEQFVRLRDGDRYWFENTRNGLFSKKEIEEIRNTTLQDVLVAVINIDPSALQPNVFVWHKGDPCPQPRQLSTEGLPACAPSVVRDYFEGSGFGFGVTIGTLCCFPLVSLLSAWIVARLRMRNFKRLQGQDRQSIVSEKLVGGMEALEWQGHKEPCRPVLVYLQPGQIRVVDGRLTVLRTIQLQPPQKVNFVLSSNRGRRTLLLKIPKEYDLVLLFNLEEERQALVENLRGALKESGLSIQEWELREQELMRAAVTREQRRHLLETFFRHLFSQVLDINQADAGTLPLDSSQKVREALTCELSRAEFAESLGLKPQDMFVESMFSLADKDGNGYLSFREFLDILVVFMKGSPEEKSRLMFRMYDFDGNGLISKDEFIRMLRSFIEISNNCLSKAQLAEVVESMFRESGFQDKEELTWEDFHFMLRDHNSELRFTQLCVKGVEVPEVIKDLCRRASYISQDMICPSPRVSARCSRSDIETELTPQRLQCPMDTDPPQEIRRRFGKKVTSFQPLLFTEAHREKFQRSCLHQTVQQFKRFIENYRRHIGCVAVFYAIAGGLFLERAYYYAFAAHHTGITDTTRVGIILSRGTAASISFMFSYILLTMCRNLITFLRETFLNRYVPFDAAVDFHRLIASTAIVLTVLHSVGHVVNVYLFSISPLSVLSCLFPGLFHDDGSELPQKYYWWFFQTVPGLTGVVLLLILAIMYVFASHHFRRRSFRGFWLTHHLYILLYVLLIIHGSFALIQLPRFHIFFLVPAIIYGGDKLVSLSRKKVEISVVKAELLPSGVTHLRFQRPQGFEYKSGQWVRIACLALGTTEYHPFTLTSAPHEDTLSLHIRAAGPWTTRLREIYSAPTGDRCARYPKLYLDGPFGEGHQEWHKFEVSVLVGGGIGVTPFASILKDLVFKSSVSCQVFCKKIYFIWVTRTQRQFEWLADIIREVEENDHQDLVSVHIYITQLAEKFDLRTTMLYICERHFQKVLNRSLFTGLRSITHFGRPPFEPFFNSLQEVHPQVRKIGVFSCGPPGMTKNVEKACQLINRQDRTHFSHHYENF

SEQ ID NO: 4747 - protein, 1159 aa, Homo sapiens
MLDFLAENNLCGQAILRIVSCGNAIIAELLRLSEFIPAVFRLKDRADQQKYGDIIFDFSYFKGPELWESKLDAKPELQDLDEEFRENNIEIVTRFYLAFQSVHKYIVDLNRYLDDLNEGVYIQQTLETVLLNEDGKQLLCEALYLYGVMLLVIDQKIEGEVRERMLVSYYRYSAARSSADSNMDDICKLLRSTGYSSQPGAKRPSNYPESYFQRVPINESFISMVIGRLRSDDIYNQVSAYPLPEHRSTALANQAAMLYVILYFEPSILHTHQAKMREIVDKYFPDNWVISIYMGITVNLVDAWEPYKAAKTALNNTLDLSNVREQASRYATVSERVHAQVQQFLKEGYLREEMVLDNIPKLLNCLRDCNVAIRWLMLHTADSACDPNNKRLRQIKDQILTDSRYNPRILFQLLLDTAQFEFILKEMFKQMLSEKQTKWEHYKKEGSERMTELADVFSGVKPLTRVEKNENLQAWFREISKQILSLNYDDSTAAGRKTVQLIQALEEVQEFHQLESNLQVCQFLADTRKFLHQMIRTINIKEEVLITMQIVGDLSFAWQLIDSFTSIMQESIRVNPSMVTKLRATFLKLASALDLPLLRINQANSPDLLSVSQYYSGELVSYVRKVLQIIPESMFTSLLKIIKLQTHDIIEVPTRLDKDKLRDYAQLGPRYEVAKLTHAISIFTEGILMMKTTLVGIIKVDPKQLLEDGIRKELVKRVAFALHRGLIFNPRAKPSELMPKLKELGATMDGFHRSFEYIQDYVNIYGLKIWQEEVSRIINYNVEQECNNFLRTKIQDWQSMYQSTHIPIPKFTPVDESVTFIGRLCREILRITDPKMTCHIDQLNTWYDMKTHQEVTSSRLFSEIQTTLGTFGLNGLDRLLCFMIVKELQNFLSMFQKIILRDRTVQDTLKTLMNAVSPLKSIVANSNKIYFSAIAKTQKIWTAYLEAIMKVGQMQILRQQIANELNYSCRFDSKHLAAALENLNKALLADIEAHYQDPSLPYPKEDNTLLYEITAYLEAAGIHNPLNKIYITTKRLPYFPIVNFLFLIAQLPKLQYNKNLGMVCRKPTDPVDWPPLVLGLLTLLKQFHSRYTEQFLALIGQFICSTVEQCTSQKIPEIPADVVGALLFLEDYVRYTKLPRRVAEAHVPNFIFDEFRTVL

SEQ ID NO: 4748 - protein, 453 aa, Homo sapiens
MKLLVILLFSGLITGFRSDSSSSLPPKLLLVSFDGFRADYLKNYEFPHLQNFIKEGVLVEHVKNVFITKTFPNHYSIVTGLYEESHGIVANSMYDAVTKKHFSDSNDKDPFWWNEAVPIWVTNQLQENRSSAAAMWPGTDVPIHDTISSYFMNYNSSVSFEERLNNITMWLNNSNPPVTFATLYWEEPDASGHKYGPEDKENMSRVLKKIDDLIGDLVQRLKMLGLWENLNVIITSDHGMTQCSQDRLINLDSCIDHSYYTLIDLSPVAAILPKINRTEVYNKLKNCSPHMNVYLKEDIPNRFYYQHNDRIQPIILVADEGWTIVLNESSQKLGDHGYDNSLPSMHPFLAAHGPAFHKGYKHSTINIVDIYPMMCHILGLKPHPNNGTFGHTKCLLVDQWCINLPEAIAIVIGSLLVLTMLTCLIIIMQNRLSVPRPFSRLQLQEDDDDPLIG

SEQ ID NO: 4749 - protein, 1062 aa, Homo sapiens
MEVYASEKEQHGDLCRPGEHVTSRFKNEVERMGFDMNNAWRISNINEKYKLCGSYPQELIVPAWITDKELESVSSFRSWKRIPAVIYRHQSNGAVIARCGQPEVSWWGWRNADDEHLVQSVAKACASDSRSSGSKLSTRNTSRDFPNGGDLSDVEFDSSLSNASGAESLAIQPQKLLILDARSYAAAVANRAKGGGCECPEYYPNCEVVFMGMANIHSIRRSFQSLRLLCTQMPDPGNWLSALESTKWLHHLSVLLKSALLVVHAVDQDQRPVLVHCSDGWDRTPQIVALAKLLLDPYYRTIEGFQVLVEMEWLDFGHKFADRCGHGENSDDLNERCPVFLQWLDCVHQLQRQFPCSFEFNEAFLVKLVQHTYSCLFGTFLCNNAKERGEKHTQERTCSVWSLLRAGNKAFKNLLYSSQSEAVLYPVCHVRNLMLWSAVYLPCPSPTTPVDDSCAPYPAPGTSPDDPPLSRLPKTRSYDNLTTACDNTVPLASRRCSDPSLNEKWQEHRRSLELSSLAGPGEDPLSADSLGKPTRVPGGAELSVAAGVAEGQMENILQEATKEESGVEEPAHRAGIEIQEGKEDPLLEKESRRKTPEASAIGLHQDPELGDAALRSHLDMSWPLFSQGISEQQSGLSVLLSSLQVPPRGEDSLEVPVEQFRIEEIAEGREEAVLPIPVDAKVGYGTSQSCSLLPSQVPFETRGPNVDSSTDMLVEDKVKSVSGPQGHHRSCLVNSGKDRLPQTMEPSPSETSLVERPQVGSVVHRTSLGSTLSLTRSPCALPLAECKEGLVCNGAPETENRASEQPPGLSTLQMYPTPNGHCANGEAGRSKDSLSRQLSAMSCSSAHLHSRNLHHKWLHSHSGRPSATSSPDQPSRSHLDDDGMSVYTDTIQQRLRQIESGHQQEVETLKKQVQELKSRLESQYLTSSLHFNGDFGDEVTSIPDSESNLDQNCLSRCSTEIFSEASWEQVDKQDTEMTRWLPDHLAAHCYACDSAFWLASRKHHCRNCGNVFCSSCCNQKVPVPSQQLFEPSRVCKSCYSSLHPTSSSIDLELDKPIAATSN

SEQ ID NO: 4750 - protein, 506 aa, Homo sapiens
MPTVDDILEQVGESGWFQKQAFLILCLLSAAFAPICVGIVFLGFTPDHHCQSPGVAELSQRCGWSPAEELNYTVPGLGPAGEAFLGQCRRYEVDWNQSALSCVDPLASLATNRSHLPLGPCQDGWVYDTPGSSIVTEFNLVCADSWKLDLFQSCLNAGFLFGSLGVGYFADRFGRKLCLLGTVLVNAVSGVLMAFSPNYMSMLLFRLLQGLVSKGNWMAGYTLITEFVGSGSRRTVAIMYQMAFTVGLVALTGLAYALPHWRWLQLAVSLPTFLFLLYYWCVPESPRWLLSQKRNTEAIKIMDHIAQKNGKLPPADLKMLSLEEDVTEKLSPSFADLFRTPRLRKRTFILMYLWFTDSVLYQGLILHMGATSGNLYLDFLYSALVEIPGAFIALITIDRVGRIYPMAMSNLLAGAACLVMIFISPDLHWLNIIIMCVGRMGITIAIQMICLVNAELYPTFVSGVGPACRGSDATSSRDQGGRFARDHEGRREPWEKSKAQRKHDLP

SEQ ID NO: 4751 - protein, 709 aa, Homo sapiens
MESPTKEIEEFESNSLKYLQPEQIEKIWLRLRGLRKYKKTSQRLRSLVKQLERGEASVVDLKKNLEYAATVLESVYIDETRRLLDTEDELSDIQSDAVPSEVRDWLASTFTRQMGMMLRRSDEKPRFKSIVHAVQAGIFVERMYRRTSNMVGLSYPPAVIEALKDVDKWSFDVFSLNEASGDHALKFIFYELLTRYDLISRFKIPISALVSFVEALEVGYSKHKNPYHNLMHAADVTQTVHYLLYKTGVANWLTELEIFAIIFSAAIHDYEHTGTTNNFHIQTRSDPAILYNDRSVLENHHLSAAYRLLQDDEEMNILINLSKDDWREFRTLVIEMVMATDMSCHFQQIKAMKTALQQPEAIEKPKALSLMLHTADISHPAKAWDLHHRWTMSLLEEFFRQGDREAELGLPFSPLCDRKSTMVAQSQVGFIDFIVEPTFTVLTDMTEKIVSPLIDETSQTGGTGQRRSSLNSISSSDAKRSGVKTSGSEGSAPINNSVISVDYKSFKATWTEVVHINRERWRAKVPKEEKAKKEAEEKARLAAEEQQKEMEAKSQAEEGASGKAEKKTSGETKNQVNGTRANKSDNPRGKNSKAEKSSGEQQQNGDFKDGKNKTDKKDHSNIGNDSKKTDGTKQRSHGSPAPSTSSTCRLTLPVIKPPLRHFKRPAYASSSYAPSVSKKTDEHPARYKMLDQRIKMKKIQNISHNWNRK

SEQ ID NO: 4752 - protein, 439 aa, Homo sapiens
MSKTMAMNLLEDWCRGMEVDIHRSLLVTGIPEDCGQAEIEETLNGVLSPLGPYRVLNKIFVREENVKAALIEVGEGVNLSTIPREFPGRGGVWRVVCRDPTQDAEFLKNLNEFLDAEGRTWEDVVRLLQLNHPTLSQNQHQPPENWAEALGVLLGAVVQIIFCMDAEIRSREEARAQEAAEFEEMAAWALAAGRKVKKEPGLAAEVGSALKAETPNNWNATEDQHEPTKPLVRRAGAKSRSRRKKQKKNSRQEAVPWKKPKGINSNSTANLEDPEVGDAESMAISEPIKGSRKPCVNKEELALKKPMAKCAWKGPREPPQDARAEAESPGGASESDQDGGHESPPKKKAVAWVSAKNPAPMRKKKKVSLGPVSYVLVDSEDGRKKPVMPKKGPGSRREASDQKAPRGQQPAEATASTSRGPKAKPEGSPRRATNESRKV

SEQ ID NO: 4753 - protein, 342 aa, Homo sapiens
MNNAGHGPTRRLRGLGVLAGVALLAALWLLWLLGSAPRGTPAPQPTITILVWHWPFTDQPPELPSDTCTRYGIARCHLSANRSLLASADAVVFHHRELQTRRSHLPLAQRPRGQPWVWASMESPSHTHGLSHLRGIFNWVLSYRRDSDIFVPYGRLEPHWGPSPPLPAKSRVAAWVVSNFQERQLRARLYRQLAPHLRVDVFGRANGRPLCASCLVPTVAQYRFYLSFENSQHRDYITEKFWRNALVAGTVPVVLGPPRATYEAFVPADAFVHVDDFGSARELAAFLTGMNESRYQRFFAWRDRLRVRLFTDWRERFCAICDRYPHLPRSQVYEDLEGWFQA

SEQ ID NO: 4754 - protein, 730 aa, Homo sapiens
MVQFSTSEFRLTPHIDNLEVANSFAVTNAFCSQFSRGVYAIFGFYDKKSVNTITSFCGTLHVSFITPSFPTDGTHPFVIQMRPDLKGALLSLIEYYQWDKFAYLYDSDRGLSTLQAVLDSAAEKKWQVTAINVGNINNDKKDEMYRSLFQDLELKKERRVILDCERDKVNDIVDQVITIGKHVKGYHYIIANLGFTDGDLLKIQFGGANVSGFQIVDYDDSLVSKFIERWSTLEEKEYPGAHTTTIKYTSALTYDAVQVMTEAFRNLRKQRIEISRRGNAGDCLANPAVPWGQGVEIERALKQVQVEGLSGNIKFDQNGKRINYTINIMELKTNGPRKIGYWSEVDKMVVTLTELPSGNDTSGLENKTVVVTTILESPYVMMKKNHEMLEGNERYEGYCVDLAAEIAKHCGFKYKLTIVGDGKYGARDADTKIWNGMVGELVYGKADIAIAPLTITLVREEVIDFSKPFMSLGISIMIKKPQKSKPGVFSFLDPLAYEIWMCIVFAYIGVSVVLFLVSRFSPYEWHTEEFEDGRETQSSESTNEFGIFNSLWFSLGAFMQQGCDISPRSLSGRIVGGVWWFFTLIIISSYTANLAAFLTVERMVSPIESAEDLSKQTEIAYGTLDSGSTKEFFRRSKIAVFDKMWTYMRSAEPSVFVRTTAEGVARVRKSKGKYAYLLESTMNEYIEQRKPCDTMKVGGNLDSKGYGIATPKGSSLSGVTFKTLLFVCCG

SEQ ID NO: 4755 - protein, 932 aa, Homo sapiens
MSEAGGRGCGSPVPQRARWRLVAATAAFCLVSATSVWTAGAEPMSREEKQKLGNQVLEMFDHAYGNYMEHAYPADELMPLTCRGRVRGQEPSRGDVDDALGKFSLTLIDSLDTLVVLNKTKEFEDAVRKVLRDVNLDNDVVVSVFETNIRVLGGLLGGHSLAIMLKEKGEYMQWYNDELLQMAKQLGYKLLPAFNTTSGLPYPRINLKFGIRKPEARTGTETDTCTACAGTLILEFAALSRFTGATIFEEYARKALDFLWEKRQRSSNLVGVTINIHTGDWVRKDSGVGAGIDSYYEYLLKAYVLLGDDSFLERFNTHYDAIMRYISQPPLLLDVHIHKPMLNARTWMDALLAFFPGLQVLKGDIRPAIETHEMLYQVIKKHNFLPEAFTTDFRVHWAQHPLRPEFAESTYFLYKATGDPYYLEVGKTLIENLNKYARVPCGFAAMKDVRTGSHEDRMDSFFLAEMFKYLYLLFADKEDIIFDIEDYIFTTEAHLLPLWLSTTNQSISKKNTTSEYTELDDSNFDWTCPNTQILFPNDPLYAQSIREPLKNVVDKSCPRGIIRVEESFRSGAKPPLRARDFMATNPEHLEILKKMGVSLIHLKDGRVQLVQHAIQAASSIDAEDGLRFMQEMIELSSQQQKEQQLPPRAVQIVSHPFFGRVVLTAGPAQFGLDLSKHKETRGFVASSKPSNGCSELTNPEAVMGKIALIQRGQCMFAEKARNIQNAGAIGGIVIDDNEGSSSDTAPLFQMAGDGKDTDDIKIPMLFLFSKEGSIILDAIREYEEVEVLLSDKAKDRDPEMENEEQPSSENDSQNQSGEQISSSSQEVDLVDQESSEENSLNSHPESLSLADMDNAASISPSEQTSNPTENHETTNLNGECTDLDNQLQEQSETEEDSNPNVSWGKKVQPIDSILADWNEDIEAFEMMEKDEL

SEQ ID NO: 4756 - protein, 667 aa, Homo sapiens
MAAETLLSSLLGLLLLGLLLPASLTGGVGSLNLEELSEMRYGIEILPLPVMGGQSQSSDVVIVSSKYKQRYECRLPAGAIHFQREREEETPAYQGPGIPELLSPMRDAPCLLKTKDWWTYEFCYGRHIQQYHMEDSEIKGEVLYLGYYQSAFDWDDETAKASKQHRLKRYHSQTYGNGSKCDLNGRPREAEVRFLCDEGAGISGDYIDRVDEPLSCSYVLTIRTPRLCPHPLLRPPPSAAPQAILCHPSLQPEEYMAYVQRQADSKQYGDKIIEELQDLGPQVWSETKSGVAPQKMAGASPTKDDSKDSDFWKMLNEPEDQAPGGEEVPAEEQDPSPEAADSASGAPNDFQNNVQVKVIRSPADLIRFIEELKGGTKKGKPNIGQEQPVDDAAEVPQREPEKERGDPERQREMEEEEDEDEDEDEDEDERQLLGEFEKELEGILLPSDRDRLRSEVKAGMERELENIIQETEKELDPDGLKKESERDRAMLALTSTLNKLIKRLEEKQSPELVKKHKKKRVVPKKPPPSPQPTEEDPEHRVRVRVTKLRLGGPNQDLTVLEMKRENPQLKQIEGLVKELLEREGLTAAGKIEIKIVRPWAEGTEEGARWLTDEDTRNLKEIFFNILVPGAEEAQKERQRQKELESNYRRVWGSPGGEGTGDLDEFDF

SEQ ID NO: 4757 - protein, 313 aa, Homo sapiens
MSQSRHRAEAPPLEREDSGTFSLGKMITAKPGKTPIQVLHEYGMKTKNIPVYECERSDVQIHVPTFTFRVTVGDITCTGEGTSKKLAKHRAAEAAINILKANASICFAVPDPLMPDPSKQPKNQLNPIGSLQELAIHHGWRLPEYTLSQEGGPAHKREYTTICRLESFMETGKGASKKQAKRNAAEKFLAKFSNISPENHISLTNVVGHSLGCTWHSLRNSPGEKINLLKRSLLSIPNTDYIQLLSEIAKEQGFNITYLDIDELSANGQYQCLAELSTSPITVCHGSGISCGNAQSDAAHNALQYLKIIAERK

SEQ ID NO: 4758 - protein, 428 aa, Homo sapiens
MSYYLSSENHLDPGPIYMRENGQLHMVNLALDGVRSSLQKPRPFRLFPKGFSVELCMNREDDTARKEKTDHFIFTYTREGNLRYSAKSLFSLVLGFISDNVDHIDSLIGFPEQIAEKLFSAAEARQKFTEPGAGLRALQKFTEAYGSLVLCSLCLRNRYLVISEKLEEIKSFRELTCLDLSCCKLGDEHELLEHLTNEALSSVTQLHLKDNCLSDAGVRKMTAPVRVMKRGLENLTLLDLSCNPEITDAGIGYLFSFRKLNCLDISGTGLKDIKTVKHKLQTHIGLVHSKVPLKEFDHSNCKTEGWADQIVLQWERVTAEAVKPRETSEPRAAAQRFYGKRSRAEAPLKCPLADTHMNSSEKLQFYKEKAPDCHGPVLKHEAISSQESKKSKKRPFEESETEQNNSSQPSKQKYVCLAVEDWDLLNSY

SEQ ID NO: 4759 - protein, 958 aa, Homo sapiens
MPVRRGHVAPQNTYLDTIIRKFEGQSRKFLIANAQMENCAIIYCNDGFCELFGYSRVEVMQQPCTCDFLTGPNTPSSAVSRLAQALLGAEECKVDILYYRKDASSFRCLVDVVPVKNEDGAVIMFILNFEDLAQLLAKCSSRSLSQRLLSQSFLGSEGSHGRPGGPGPGTGRGKYRTISQIPQFTLNFVEFNLEKHRSSSTTEIEIIAPHKVVERTQNVTEKVTQVLSLGADVLPEYKLQAPRIHRWTILHYSPFKAVWDWLILLLVIYTAVFTPYSAAFLLSDQDESRRGACSYTCSPLTVVDLIVDIMFVVDIVINFRTTYVNTNDEVVSHPRRIAVHYFKGWFLIDMVAAIPFDLLIFRTGSDETTTLIGLLKTARLLRLVRVARKLDRYSEYGAAVLFLLMCTFALIAHWLACIWYAIGNVERPYLEHKIGWLDSLGVQLGKRYNGSDPASGPSVQDKYVTALYFTFSSLTSVGFGNVSPNTNSEKVFSICVMLIGSLMYASIFGNVSAIIQRLYSGTARYHTQMLRVKEFIRFHQIPNPLRQRLEEYFQHAWSYTNGIDMNAVLKGFPECLQADICLHLHRALLQHCPAFSGAGKGCLRALAVKFKTTHAPPGDTLVHLGDVLSTLYFISRGSIEILRDDVVVAILGKNDIFGEPVSLHAQPGKSSADVRALTYCDLHKIQRADLLEVLDMYPAFAESFWSKLEVTFNLRDAAGGLHSSPRQAPGSQDHQGFFLSDNQSDAAPPLSISDASGLWPELLQEMPPRHSPQSPQEDPDCWPLKLGSRLEQLQAQMNRLESRVSSDLSRILQLLQKPMPQGHASYILEAPASNDLALVPIASETTSPGPRLPQGFLPPAQTPSYGDLDDCSPKHRNSSPRMPHLAVATDKTLAPSSEQEQPEGLWPPLASPLHPLEVQGLICGPCFSSLPEHLGSVPKQLDFQRHGSDPGFAGSWGH

SEQ ID NO: 4760 - protein, 913 aa, Homo sapiens
MGPEALSSLLLLLLVASGDADMKGHFDPAKCRYALGMQDRTIPDSDISASSSWSDSTAARHSRLESSDGDGAWCPAGSVFPKEEEYLQVDLQRLHLVALVGTQGRHAGGLGKEFSRSYRLRYSRDGRRWMGWKDRWGQEVISGNEDPEGVVLKDLGPPMVARLVRFYPRADRVMSVCLRVELYGCLWRDGLLSYTAPVGQTMYLSEAVYLNDSTYDGHTVGGLQYGGLGQLADGVVGLDDFRKSQELRVWPGYDYVGWSNHSFSSGYVEMEFEFDRLRAFQAMQVHCNNMHTLGARLPGGVECRFRRGPAMAWEGEPMRHNLGGNLGDPRARAVSVPLGGRVARFLQCRFLFAGPWLLFSEISFISDVVNNSSPALGGTFPPAPWWPPGPPPTNFSSLELEPRGQQPVAKAEGSPTAILIGCLVAIILLLLLIIALMLWRLHWRRLLSKAERRVLEEELTVHLSVPGDTILINNRPGPREPPPYQEPRPRGNPPHSAPCVPNGSALLLSNPAYRLLLATYARPPRGPGPPTPAWAKPTNTQAYSGDYMEPEKPGAPLLPPPPQNSVPHYAEADIVTLQGVTGGNTYAVPALPPGAVGDGPPRVDFPRSRLRFKEKLGEGQFGEVHLCEVDSPQDLVSLDFPLNVRKGHPLLVAVKILRPDATKNARNDFLKEVKIMSRLKDPNIIRLLGVCVQDDPLCMITDYMENGDLNQFLSAHQLEDKAAEGAPGDGQAAQGPTISYPMLLHVAAQIASGMRYLATLNFVHRDLATRNCLVGENFTIKIADFGMSRNLYAGDYYRVQGRAVLPIRWMAWECILMGKFTTASDVWAFGVTLWEVLMLCRAQPFGQLTDEQVIENAGEFFRDQGRQVYLSRPPACPQGLYELMLRCWSRESEQRPPFSQLHRFLAEDALNTV

SEQ ID NO: 4761 - protein, 597 aa, Homo sapiens
MSSKGSSTDGRTDLANGSLSSSPEEMSGAEEGRETSSGIEVEASDLSLSLTGDDGGPNRTSTESRGTDTESSGEDKDSDSMEDTGHYSINDENRVHDRSEEEEEEEEEEEEEQPRRRVQRKRANRDQDSSDDERALEDWVSSETSALPRPRWQALPALRERELGSSARFVYEACGARVFVQRFRLQHGLEGHTGCVNTLHFNQRGTWLASGSDDLKVVVWDWVRRQPVLDFESGHKSNVFQAKFLPNSGDSTLAMCARDGQVRVAELSATQCCKNTKRVAQHKGASHKLALEPDSPCTFLSAGEDAVVFTIDLRQDRPASKLVVTKEKEKKVGLYTIYVNPANTHQFAVGGRDQFVRIYDQRKIDENENNGVLKKFCPHHLVNSESKANITCLVYSHDGTELLASYNDEDIYLFNSSHSDGAQYVKRYKGHRNNATVKGVNFYGPKSEFVVSGSDCGHIFLWEKSSCQIIQFMEGDKGGVVNCLEPHPHLPVLATSGLDHDVKIWAPTAEASTELTGLKDVIKKNKRERDEDSLHQTDLFDSHMLWFLMHHLRQRRHHRRWREPGVGATDADSDESPSSSDTSDEEEGPDRVQCMPS

SEQ ID NO: 4762 - protein, 585 aa, Homo sapiens
MSGILKRKFEEVDGSSPCSSVRESDDEVSSSESADSGDSVNPSTSSHFTPSSILKREKRLRTKNVHFSCVTVYYFTRRQGFTSVPSQGGSTLGMSSRHNSVRQYTLGEFAREQERLHREMLREHLREEKLNSLKLKMTKNGTVESEEASTLTLDDISDDDIDLDNTEVDEYFFLQPLPTKKRRALLRASGVKKIDVEEKHELRAIRLSREDCGCDCRVFCDPDTCTCSLAGIKCQVDRMSFPCGCTKEGCSNTAGRIEFNPIRVRTHFLHTIMKLELEKNREQQIPTLNGCHSEISAHSSSMGPVAHSVEYSIADSFEIETEPQAAVLHLQSAEELDCQGEEEEEEEDGSSFCSGVTDSSTQSLAPSESDEEEEEEEEEEEEEDDDDDKGDGFVEGLGTHAEVVPLPSVLCYSDGTAVHESHAKNASFYANSSTLYYQIDSHIPGTPNQISENYSERDTVKNGTLSLVPYTMTPEQFVDYARQAEEAYGASHYPAANPSVIVCCSSSENDSGVPCNSLYPEHRSNHPQVEFHSYLKGPSQEGFVSALNGDSHISEHPAENSLSLAEKSILHEECIKSPVVETVPV

SEQ ID NO: 4763 - protein, 444 aa, Homo sapiens
MSSGLRAADFPRWKRHISEQLRRRDRLQRQAFEEIILQYNKLLEKSDLHSVLAQKLQAEKHDVPNRHEIRRRQARLQKELAEAAKEPLPVEQDDDIEVIVDETSDHTEETSPVRAISRAATRRSVSSFPVPQDNVDTHPGSGKEVRVPATALCVFDAHDGEVNAVQFSPGSRLLATGGMDRRVKLWEVFGEKCEFKGSLSGSNAGITSIEFDSAGSYLLAASNDFASRIWTVDDYRLRHTLTGHSGKVLSAKFLLDNARIVSGSHDRTLKLWDLRSKVCIKTVFAGSSCNDIVCTEQCVMSGHFDKKIRFWDIRSESIVREMELLGKITALDLNPERTELLSCSRDDLLKVIDLRTNAIKQTFSAPGFKCGSDWTRVVFSPDGSYVAAGSAEGSLYIWSVLTGKVEKVLSKQHSSSINAVAWSPSGSHVVSVDKGCKAVLWAQY

SEQ ID NO: 4764 - protein, 391 aa, Homo sapiens
MNEKSCSFHSKEELRDGQGERLSAGYSPSYDKDKSVLAFRGIPISELKNHGILQALTTEAYEWEPRVVSTEVVRAQEEWEAVDTIQPETGSQASSEQPGQLISFSEALQHFQTVDLSPFKKRIQPTIRRTGLAALRHYLFGPPKLHQRLREERDLVLTIAQCGLDSQDPVHGRVLQTIYKKLTGSKFDCALHGNHWEDLGFQGANPATDLRGAGFLALLHLLYLVMDSKTLPMAQEIFRLSRHHIQQFPFCLMSVNITHIAIQALREECLSRECNRQQKVIPVVNSFYAATFLHLAHVWRTQRKTISDSGFVLKGVLFLLGRPRLNAQCPRSREPKVVARLVLAAVLPHPHFLKFQLTKISITHPLESASSPFSALTVALFWSYTYDKHIF

SEQ ID NO: 4765 - protein, 706 aa, Homo sapiens
MDRRNDYGYRVPLFQGPLPPPGSLGLPFPPDIQTETTEEDSVLLMHTLLAATKDSLAMDPPVVNRPKKSKTKKAPIKTITKAAPAAPPVPAANEIATNKPKITWQALNLPVITQISQALPTTEVTNTQASSVTAQPKKANKMKRVTAKAAQGSQSPTGHEGGTIQLKSPLQVLKLPVISQNIHAPIANESASSQALITSIKPKKASKAKKAANKAIASATEVSLAATATHTATTQGQITNETASIHTTAASIRTKKASKARKTIAKVINTDTEHIEALNVTDAATRQIEASVVAIRPKKSKGKKAASRGPNSVSEISEAPLATQIVTNQALAATLRVKRGSRARKAATKARATESQTPNADQGAQAKIASAQTNVSALETQVAAAVQALADDYLAQLSLEPTTRTRGKRNRKSKHLNGDERSGSNYRRIPWGRRPAPPRDVAILQERANKLVKYLLVKDQTKIPIKRSDMLRDVIQEYDEYFPEIIERASYTLEKMFRVNLKEIDKQSSLYILISTQESSAGILGTTKDTPKLGLLMVILSVIFMNGNKASEAVIWEVLRKLGLRPGVRHSLFGEVRKLITDEFVKQKYLEYKRVPNSRPPEYEFFWGLRSYHETSKMKVLKFACRVQKKDPKDWAVQYREAVEMEVQAAAVAVAEAEARAEIYSPCLQIPLINCSSPSHGAKVHPWNLCPHSSQGSYGQSAEGVM

SEQ ID NO: 4766 - protein, 1208 aa, Homo sapiens
MKVVPEKNAVRILWGRERGARAMGAQRLLQELVEDKTRWMKWEGKRVELPDSPRSTFLLAFSPDRTLLASTHVNHNIYITEVKTGKCVHSLIGHRRTPWCVTFHPTISGLIASGCLDGEVRIWDLHGGSESWFTDSNNAIASLAFHPTAQLLLIATANEIHFWDWSRREPFAVVKTASEMERVRLVRFDPLGHYLLTAIVNPSNQQGDDEPEIPIDGTELSHYRQRALLQSQPVRRTPLLHNFLHMLSSRSSGIQTEPFHPPEQASSTQQDQGLLNRPSAFSTVQSSTAGNTLRNLSLGPTRRSLGGPLSSHPSRYHREIAPGLTGSEWTRTVLSLNSRSEAESMPPPRTSASSVSLLSVLRQQEGGSQASVYTSATEGRGFPASGLATESDGGNGSSQNNSGSIRHELQCDLRRFFLEYDRLQELDQSLSGEAPQTQQAQEMLNNNIESERPGPSHQPTPHSSENNSNLSRGHLNRCRACHNLLTFNNDTLRWERTTPNYSSGEASSSWQVPSSFESVPSSGSQLPPLERTEGQTPSSSRLELSSSASPQEERTVGVAFNQETGHWERIYTQSSRSGTVSQEALHQDMPEESSEEDSLRRRLLESSLISLSRYDGAGSREHPIYPDPARLSPAAYYAQRMIQYLSRRDSIRQRSMRYQQNRLRSSTSSSSSDNQGPSVEGTDLEFEDFEDNGDRSRHRAPRNARMSAPSLGRFVPRRFLLPEYLPYAGIFHERGQPGLATHSSVNRVLAGAVIGDGQSAVASNIANTTYRLQWWDFTKFDLPEISNASVNVLVQNCKIYNDASCDISADGQLLAAFIPSSQRGFPDEGILAVYSLAPHNLGEMLYTKRFGPNAISVSLSPMGRYVMVGLASRRILLHPSTEHMVAQVFRLQQAHGGETSMRRVFNVLYPMPADQRRHVSINSARWLPEPGLGLAYGTNKGDLVICRPEALNSGVEYYWDQLNETVFTVHSNSRSSERPGTSRATWRTDRDMGLMNAIGLQPRNPATSVTSQGTQTLALQLQNAETQTEREVPEPGTAASGPGEGEGSEYGASGEDALSRIQRLMAEGGMTAVVQREQSTTMASMGGFGNNIIVSHRIHRSSQTGTEPGAAHTSSPQPSTSRGLLPEAGQLAERGLSPRTASWDQPGTPGREPTQPTLPSSSPVPIPVSLPSAEGPTLHCELTNNNHLLDGGSSRGDAAGPRGEPRNR

SEQ ID NO: 4767 - protein, 671 aa, Homo sapiens
MADPAAGPPPSEGEESTVRFARKGALRQKNVHEVKNHKFTARFFKQPTFCSHCTDFIWGFGKQGFQCQVCCFVVHKRCHEFVTFSCPGADKGPASDDPRSKHKFKIHTYSSPTFCDHCGSLLYGLIHQGMKCDTCMMNVHKRCVMNVPSLCGTDHTERRGRIYIQAHIDRDVLIVLVRDAKNLVPMDPNGLSDPYVKLKLIPDPKSESKQKTKTIKCSLNPEWNETFRFQLKESDKDRRLSVEIWDWDLTSRNDFMGSLSFGISELQKASVDGWFKLLSQEEGEYFNVPVPPEGSEANEELRQKFERAKISQGTKVPEEKTTNTVSKFDNNGNRDRMKLTDFNFLMVLGKGSFGKVMLSERKGTDELYAVKILKKDVVIQDDDVECTMVEKRVLALPGKPPFLTQLHSCFQTMDRLYFVMEYVNGGDLMYHIQQVGRFKEPHAVFYAAEIAIGLFFLQSKGIIYRDLKLDNVMLDSEGHIKIADFGMCKENIWDGVTTKTFCGTPDYIAPEIIAYQPYGKSVDWWAFGVLLYEMLAGQAPFEGEDEDELFQSIMEHNVAYPKSMSKEAVAICKGLMTKHPGKRLGCGPEGERDIKEHAFFRYIDWEKLERKEIQPPYKPKARDKRDTSNFDKEFTRQPVELTPTDKLFIMNLDQNEFAGFSYTNPEFVINV

SEQ ID NO: 4768 - protein, 612 aa, Homo sapiens
MDVSLCPAKCSFWRIFLLGSVWLDYVGSVLACPANCVCSKTEINCRRPDDGNLFPLLEGQDSGNSNGNASINITDISRNITSIHIENWRSLHTLNAVDMELYTGLQKLTIKNSGLRSIQPRAFAKNPHLRYINLSSNRLTTLSWQLFQTLSLRELQLEQNFFNCSCDIRWMQLWQEQGEAKLNSQNLYCINADGSQLPLFRMNISQCDLPEISVSHVNLTVREGDNAVITCNGSGSPLPDVDWIVTGLQSINTHQTNLNWTNVHAINLTLVNVTSEDNGFTLTCIAENVVGMSNASVALTVYYPPRVVSLEEPELRLEHCIEFVVRGNPPPTLHWLHNGQPLRESKIIHVEYYQEGEISEGCLLFNKPTHYNNGNYTLIAKNPLGTANQTINGHFLKEPFPESTDNFILFDEVSPTPPITVTHKPEEDTFGVSIAVGLAAFACVLLVVLFVMINKYGRRSKFGMKGPVAVISGEEDSASPLHHINHGITTPSSLDAGPDTVVIGMTRIPVIENPQYFRQGHNCHKPDTWVFSNIDNHGILNLKDNRDHLVPSTHYIYEEPEVQSGEVSYPRSHGFREIMLNPISLPGHSKPLNHGIYVEDVNVYFSKGRHGF

SEQ ID NO: 4769 - protein, 392 aa, Homo sapiens
MAVVAAAAGWLLRLRAAGAEGHWRRLPGAGLARGFLHPAATVEDAAQRRQVAHFTFQPDPEPREYGQTQKMNLFQSVTSALDNSLAKDPTAVIFGEDVAFGGVFRCTVGLRDKYGKDRVFNTPLCEQGIVGFGIGIAVTGATAIAEIQFADYIFPAFDQIVNEAAKYRYRSGDLFNCGSLTIRSPWGCVGHGALYHSQSPEAFFAHCPGIKVVIPRSPFQAKGLLLSCIEDKNPCIFFEPKILYRAAAEEVPIEPYNIPLSQAEVIQEGSDVTLVAWGTQVHVIREVASMAKEKLGVSCEVIDLRTIIPWDVDTICKSVIKTGRLLISHEAPLTGGFASEISSTVQEECFLNLEAPISRVCGYDTPFPHIFEPFYIPDKWKCYDALRKMINY

SEQ ID NO: 4770 - protein, 541 aa, Homo sapiens
MPRRKQSHPQPVKCEGVKVDTEDSLDEGPGALVLESDLLLGQDLEFEEEEEEEEGDGNSDQLMGFERDSEGDSLGARPGLPYGLSDDESGGGRALSAESEVEEPARGPGEARGERPGPACQLCGGPTGEGPCCGAGGPGGGPLLPPRLLYSCRLCTFVSHYSSHLKRHMQTHSGEKPFRCGRCPYASAQLVNLTRHTRTHTGEKPYRCPHCPFACSSLGNLRRHQRTHAGPPTPPCPTCGFRCCTPRPARPPSPTEQEGAVPRRPEDALLLPDLSLHVPPGGASFLPDCGQLRGEGEGLCGTGSEPLPELLFPWTCRGCGQELEEGEGSRLGAAMCGRCMRGEAGGGASGGPQGPSDKGFACSLCPFATHYPNHLARHMKTHSGEKPFRCARCPYASAHLDNLKRHQRVHTGEKPYKCPLCPYACGNLANLKRHGRIHSGDKPFRCSLCNYSCNQSMNLKRHMLRHTGEKPFRCATCAYTTGHWDNYKRHQKVHGHGGAGGPGLSASEGWAPPHSPPSVLSSRGPPALGTAGSRAVHTDSS

SEQ ID NO: 4771 - protein, 800 aa, Homo sapiens
MAANVGDQRSTDWSSQYSMVAGAGRENGMETPMHENPEWEKARQALASISKSGAAGGSAKSSSNGPVASAQYVSQAEASALQQQQYYQWYQQYNYAYPYSYYYPMSMYQSYGSPSQYGMAGSYGSATPQQPSAPQHQGTLNQPPVPGMDESMSYQAPPQQLPSAQPPQPSNPPHGAHTLNSGPQPGTAPATQHSQAGPATGQAYGPHTYTEPAKPKKGQQLWNRMKPAPGTGGLKFNIQKRPFAVTTQSFGSNAEGQHSGFGPQPNPEKVQNHSGSSARGNLSGKPDDWPQDMKEYVERCFTACESEEDKDRTEKLLKEVLQARLQDGSAYTIDWSREPLPGLTREPVAESPKKKRWEAASSLHPPRGAGSATRGGGAPSQRGTPGAGGAGRARGNSFTKFGNRNVFMKDNSSSSSTDSRSRSSSRSPTRHFRRSDSHSDSDSSYSGNECHPVGRRNPPPKGRGGRGAHMDRGRGRAQRGKRHDLAPTKRSRKKMAALECEDPERELKKQKRAARFQHGHSRRLRLEPLVLQMSSLESSGADPDWQELQIVGTCPDITKHYLRLTCAPDPSTVRPVAVLKKSLCMVKCHWKEKQDYAFACEQMKSIRQDLTVQGIRTEFTVEVYETHARIALEKGDHEEFNQCQTQLKSLYAENLPGNVGEFTAYRILYYIFTKNSGDITTELAYLTRELKADPCVAHALALRTAWALGNYHRFFRLYCHAPCMSGYLVDKFADRERKVALKAMIKTFRPALPVSYLQAELAFEGEAACRAFLEPLGLAYTGPDNSSIDCRLSLAQLSAF

SEQ ID NO: 4772 - protein, 1049 aa, Homo sapiens
MEKRLGVKPNPASWILSGYYWQTSAKWLRSLYLFYTCFCFSVLWLSTDASESRCQQGKTQFGVGLRSGGENHLWLLEGTPSLQSCWAACCQDSACHVFWWLEGMCIQADCSRPQSCRAFRTHSSNSMLVFLKKFQTADDLGFLPEDDVPHLLGLGWNWASWRQSPPRAALRPAVSSSDQQSLIRKLQKRGSPSDVVTPIVTQHSKVNDSNELGGLTTSGSAEVHKAITISSPLTTDLTAELSGGPKNVSVQPEISEGLATTPSTQQVKSSEKTQIAVPQPVAPSYSYATPTPQASFQSTSAPYPVIKELVVSAGESVQITLPKNEVQLNAYVLQEPPKGETYTYDWQLITHPRDYSGEMEGKHSQILKLSKLTPGLYEFKVIVEGQNAHGEGYVNVTVKPEPRKNRPPIAIVSPQFQEISLPTTSTVIDGSQSTDDDKIVQYHWEELKGPLREEKISEDTAILKLSKLVPGNYTFSLTVVDSDGATNSTTANLTVNKAVDYPPVANAGPNQVITLPQNSITLFGNQSTDDHGITSYEWSLSPSSKGKVVEMQGVRTPTLQLSAMQEGDYTYQLTVTDTIGQQATAQVTVIVQPENNKPPQADAGPDKELTLPVDSTTLDGSKSSDDQKIISYLWEKTQGPDGVQLENANSSVATVTGLQVGTYVFTLTVKDERNLQSQSSVNVIVKEEINKPPIAKITGNVVITLPTSTAELDGSKSSDDKGIVSYLWTRDEGSPAAGEVLNHSDHHPILFLSNLVEGTYTFHLKVTDAKGESDTDRTTVEVKPDPRKNNLVEIILDINVSQLTERLKGMFIRQIGVLLGVLDSDIIVQKIQPYTEQSTKMVFFVQNEPPHQIFKGHEVAAMLKSELRKQKADFLIFRALEVNTVTCQLNCSDHGHCDSFTKRCICDPFWMENFIKVQLRDGDSNCEWSVLYVIIATFVIVVALGILSWTVICCCKRQKGKPKRKSKYKILDATDQESLELKPTSRAGIKQKGLLLSSSLMHSESELDSDDAIFTWPDREKGKLLHGQNGSVPNGQTPLKARSPREEIL

SEQ ID NO: 4773 - protein, 270 aa, Homo sapiens
MTQNTVIVNGVAMASRPSQPTHVNVHIHQESALTQLLKAGGSLKKFLFHPGDTVPSTARIGYEQLALGVTQILLGVVSCVLGVCLSLGPWTVLSASGCAFWAGSVVIAAGAGAIVHEKHPGKLAGYISSLLTLAGFATAMAAVVLCVNSFIWQTEPFLYIDTVCDRSDPVFPTTGYRWMRRSQENQWQKEECRAYMQMLRKLFTAIRALFLAVCVLKVIVSLVSLGVGLRNLCGQSSQPLNEEGSEKRLLGENSVPPSPSREQTSTAIVL

SEQ ID NO: 4774 - protein, 757 aa, Homo sapiens
MKVFCEVLEELYKKVLLGATLENDSHDYIFYLNPAVSDQDCSTATSLEWANTCGIQGRHQPISVGVAPIAVAPVCLKTNSQMSGSREVMLLQLTVIKVMTTRILSVKTEFHAKEQYRDVIKILLESAKVDSKLICMFQNSDKLLSHMAAQCLALLLYFQLREKITLSNSWIAFCQKNLSEYSESNKAIYCLWTLTAIIKEIFKDSCSQKTEILKQFLTHFDTIFEVFYNSLFSQHFENCRDTSKIVNILMCFLDLLELLIASRIHLKLHFTCQRILFLKPSCMLEVITWPIQAFVKRKVIIFLKKCLLCKVGEDLCRGSVPALMPPDHHVAVDMLALANAVLQAVNSGLLKTLSVYEKHSFFGGDEVQPECELITSPDHVILRAASLVIMKSLEIKFQNYSSASEVKVDLQRFMSELLTFLKPHLQPSLQLHNPCKWLSRVFIEQDDDMLEAAKASLGIYLTLTRGCEATESLTQGKEMWDHHTHENGYNPHCIFLFFLKNIGFDSTVLLDFLISSETCFLEYFVRYLKLLQKDWDNFFTICNNFDATESKYDISICGCVPSLVQDQSSNQTIPHRLTAPHSHRDVCARHSWASDAPSEPLKAVMSKGAHTMCASSLSSPRASQSLVDYDSSDDSDVESTEQCLANSKQTSLHQQATKEIQDAAGTSRDKKEFSLEPPSRPLVLKEFDTAFSFDCEVAPNDVVSEVGIFYRIVKCFQELQDAICRLQKKNLFPYNPTALLKLLKYIEVISNKTMNTL

SEQ ID NO: 4775 - protein, 670 aa, Homo sapiens
MEGERRAYSKEVHQRINKQLEEIRRLEEVRGDLQVQISAAQNQVKRLRDSQRLENMDRLLKGRAQVQAEIEELQEQTRALDKQIQEWETRIFTHSKNVRSPGFILDQKVKIRRRIRILENQLDRVTCHFDNQLVRNAALREELDLLRIDRNRYLNVDRKLKKEIHHLHHLVSTLILSSTSAYAVREEAKAKMGLLRERAEKEEAQSEMEAQVLQRQILHLEQLHHFLKLKNNDRQPDPDVLEKREKQAGEVAEGVWKTSQERLVLCYEDALNKLSQLMGESDPDLLVQKYLEIEERNFAEFNFINEQNLELEHVQEEIKEMQEALVSARASKDDQHLLQEQQQKVLQQRMDKVHSEAERLEARFQDVRGQLEKLKADIQLLFTKAHCDSSMIDDLLGVKTSMGDRDMGLFLSLIEKRLVELLTVQAFLHAQSFTSLADAALLVLGQSLEDLPKKMAPLQPPDTLEDPPGFEASDDYPMSREELLSQVEKLVELQEQAEAQRQKDLAAAAAKLDGTLSVDLASTQRAGSSTVLVPTRHPHAIPGSILSHKTSRDRGSLGHVTFGGLSSSTGHLPSHITHGDPNTGHVTFGSTSASSGGHVTFRPVSASSYLGSTGYVGSSRGGENTEGGVESGGTASDSSGGLGSSRDHVSSTGPASSTGPGSSTSKDSRG

SEQ ID NO: 4776 - protein, 483 aa, Homo sapiens
MGRRVGVEVTPRWAPQKCQGARPQRPGMSPGNRMPMAGLQVGPPAGSPFGAAAPLRPGMPPTMMDPFRKRLLVPQAQPPMPAQRRGLKRRKMADKVLPQRIRELVPESQAYMDLLAFERKLDQTIARKRMEIQEAIKKPLTQKRKLRIYISNTFSPSKAEGDSAGTAGTPGGTPAGDKVASWELRVEGKLLDDPSKQKRKFSSFFKSLVIELDKELYGPDNHLVEWHRMPTTQETDGFQVKRPGDLNVKCTLLLMLDHQPPQYKLDPRLARLLGVHTQTRAAIMQALWLYIKHNQLQDGHEREYINCNRYFRQIFSCGRLRFSEIPMKLAGLLQHPDPIVINHVISVDPNDQKKTACYDIDVEVDDPLKAQMSNFLASTTNQQEIASLDVKIHETIESINQLKTQRDFMLSFSTDPQDFIQEWLRSQRRDLKIITDVIGNPEEERRAAFYHQPWAQEAVGRHIFAKVQQRRQELEQVLGIRLT

SEQ ID NO: 4777 - protein, 858 aa, Homo sapiens
MLQTKDLIWTLFFLGTAVSLQVDIVPSQGEISVGESKFFLCQVAGDAKDKDISWFSPNGEKLTPNQQRISVVWNDDSSSTLTIYNANIDDAGIYKCVVTGEDGSESEATVNVKIFQKLMFKNAPTPQEFREGEDAVIVCDVVSSLPPTIIWKHKGRDVILKKDVRFIVLSNNYLQIRGIKKTDEGTYRCEGRILARGEINFKDIQVIVNVPPTIQARQNIVNATANLGQSVTLVCDAEGFPEPTMSWTKDGEQIEQEEDDEKYIFSDDSSQLTIKKVDKNDEAEYICIAENKAGEQDATIHLKVFAKPKITYVENQTAMELEEQVTLTCEASGDPIPSITWRTSTRNISSEEKASWTRPEKQETLDGHMVVRSHARVSSLTLKSIQYTDAGEYICTASNTIGQDSQSMYLEVQYAPKLQGPVAVYTWEGNQVNITCEVFAYPSATISWFRDGQLLPSSNYSNIKIYNTPSASYLEVTPDSENDFGNYNCTAVNRIGQESLEFILVQADTPSSPSIDQVEPYSSTAQVQFDEPEATGGVPILKYKAEWRAVGEEVWHSKWYDAKEASMEGIVTIVGLKPETTYAVRLAALNGKGLGEISAASEFKTQPVQGEPSAPKLEGQMGEDGNSIKVNLIKQDDGGSPIRHYLVRYRALSSEWKPEIRLPSGSDHVMLKSLDWNAEYEVYVVAENQQGKSKAAHFVFRTSAQPTAIPANGSPTSGLSTGAIVGILIVIFVLLLVVVDITCYFLNKCGLFMCIAVNLCGKAGPGAKGKDMEEGKAAFSKDESKEPIVEVRTEEERTPNHDGGKHTEPNETTPLTEPEKGPVEAKPECQETETKPAPAEVKTVPNDATQTKENESKA

SEQ ID NO: 4778 - protein, 773 aa, Homo sapiens
MFSLSSTVQPQVTVPLSHLINAFHTPKNTSVSLSGVSVSQNQHRDVVPEHEAPSSECMFSDFLTKLNIVSIGKGKIFEGYRSMFMEPAKRMKKSLDTTDNWHIRPEPFSLSIPPSLNLRDLGLSELKIGQIDQLVENLLPGFCKGKNISSHWHTSHVSAQSFFENKYGNLDIFSTLRSSCLYRHHSRALQSICSDLQYWPVFIQSRGFKTLKSRTRRLQSTSERLAETQNIAPSFVKGFLLRDRGSDVESLDKLMKTKNIPEAHQDAFKTGFAEGFLKAQALTQKTNDSLRRTRLILFVLLLFGIYGLLKNPFLSVRFRTTTGLDSAVDPVQMKNVTFEHVKGVEEAKQELQEVVEFLKNPQKFTILGGKLPKGILLVGPPGTGKTLLARAVAGEADVPFYYASGSEFDEMFVGVGASRIRNLFREAKANAPCVIFIDELDSVGGKRIESPMHPYSRQTINQLLAEMDGFKPNEGVIIIGATNFPEALDNALIRPGRFDMQVTVPRPDVKGRTEILKWYLNKIKFDQSVDPEIIARGTVGFSGAELENLVNQAALKAAVDGKEMVTMKELEFSKDKILMGPERRSVEIDNKNKTITAYHESGHAIIAYYTKDAMPINKATIMPRGPTLGHVSLLPENDRWNETRAQLLAQMDVSMGGRVAEELIFGTDHITTGASSDFDNATKIAKRMVTKFGMSEKLGVMTYSDTGKLSPETQSAIEQEIRILLRDSYERAKHILKTHAKEHKNLAEALLTYETLDAKEIQIVLEGKKLEVR

SEQ ID NO: 4779 - protein, 618 aa, Homo sapiens
MRALENDFFNSPPRKTVRFGGTVTEVLLKYKKGETNDFELLKNQLLDPDIKDDQIINWLLEFRSSIMYLTKDFEQLISIILRLPWLNRSQTVVEEYLAFLGNLVSAQTVFLRPCLSMIASHFVPPRVIIKEGDVDVSDSDDEDDNLPANFDTCHRALQIIARYVPSTPWFLMPILVEKFPFVRKSERTLECYVHNLLRISVYFPTLRHEILELIIEKLLKLDVNASRQGIEDAEETATQTCGGTDSTEGLFNMDEDEETEHETKAGPERLDQMVHPVAERLDILMSLVLSYMKDVCYVDGKVDNGKTKDLYRDLINIFDKLLLPTHASCHVQFFMFYLCSFKLGFAEAFLEHLWKKLQDPSNPAIIRQAAGNYIGSFLARAKFIPLITVKSCLDLLVNWLHIYLNNQDSGTKAFCDVALHGPFYSACQAVFYTFVFRHKQLLSGNLKEGLQYLQSLNFERIVMSQLNPLKICLPSVVNFFAAITNKYQLVFCYTIIERNNRQMLPVIRSTAGGDSVQICTNPLDTFFPFDPCVLKRSKKFIDPIYQVWEDMSAEELQEFKKPMKKDIVEDEDDDFLKGEVPQNDTVIGITPSSFDTHFRSPSSSVGSPPVLYMQPSPL

SEQ ID NO: 4780 - protein, 314 aa, Homo sapiens
MKLINGKKQTFPWFGMDIGGTLVKLVYFEPKDITAEEEQEEVENLKSIRKYLTSNTAYGKTGIRDVHLELKNLTMCGRKGNLHFIRFPSCAMHRFIQMGSEKNFSSLHTTLCATGGGAFKFEEDFRMIADLQLHKLDELDCLIQGLLYVDSVGFNGKPECYYFENPTNPELCQKKPYCLDNPYPMLLVNMGSGVSILAVYSKDNYKRVTGTSFGNMMSKEKRDSISKEDLARATLVTITNNIGSIARMCALNENIDRVVFVGNFLRINMVSMKLLAYAMDFWSKGQLKALFLEHEGYFGAVGALLELFKMTDDK

SEQ ID NO: 4781 - protein, 614 aa, Homo sapiens
MKQPNRKRKLNMDSKERLDQDGRLEQAEEEKKPKDSTTPLSHVPSAAAQGAWSWEWYLKEQKAVAAPVELFSKDQSFPEHENGFQIGMRLEGIDPRHPSVFCVLSVAEVCGYRLRLHFDGYLSCYDFWTNAGSPDIHPVGWCEKTKHELHIPKGYRKDKFVWMDYLKACKLQNAPKKLFRNRSPNGPMSKEFQVGMKLEAVDRKNPSLVCVATIADIVEDRLLVHFDNWDDSYDYWCDVNSPYVQPVGWCQENGRTLIAPQGYPNPENFSWTEYLEATQTNAVPAKVFKMRLPHGFLPNMKLEVVDKRNPRLIRVATIVDVDDQRVKVHFDGWDHKYDYWVEADSPDIHPIGWCDVTGHPLEVPQRTNDLKILPGQAVCPTPGCRGIGHIRGPRYSGHHSAFGCPYSDMNLKKEATLHDRLREQTQANLESDSSHSKSKSLCSLNFNGKHEKVNSQPRLVQQAKCLKIKGKEDIDLDNLFREYSVEQAQQVLHQSVSMSTVSAHPFRDLPLGREQHCKLLPGVADIRASQVARWTVDEVAEFVQSLLGCEEHAKCFKKEQIDGKAFLLLTQTDIVKVMKIKLGPALKIYNSILMFRHSQELPEEDIASGQEVRG

SEQ ID NO: 4782 - protein, 389 aa, Homo sapiens
MEDSPTMVRVDSPTMVRGENQVSPCQGRRCFPKALGYVTGDMKELANQLKDKPVVLQFIDWILRGISQVVFVNNPVSGILILVGLLVQNPWWALTGWLGTVVSTLMALLLSQDRSLIASGLYGYNATLVGVLMAVFSDKGDYFWWLLLPVCAMSMTCPIFSSALNSMLSKWDLPVFTLPFNMALSMYLSATGHYNPFFPAKLVIPITTAPNISWSDLSALELLKSIPVGVGQIYGCDNPWTGGIFLGAILLSSPLMCLHAAIGSLLGIAAGLSLSAPFEDIYFGLWGFNSSLACIAMGGMFMALTWQTHLLALGCALFTAYLGVGMANFMAEVGLPACTWPFCLATLLFLIMTTKNSNIYKMPLSKVTYPEENRIFYLQAKKRMVESPL

SEQ ID NO: 4783 - protein, 1085 aa, Homo sapiens
MPHFTVVPVDGPRRGDYDNLEGLSWVDYGERAELDDSDGHGNHRESSPFLSPLEASRGIDYYDRNLALFEEELDIRPKVSSLLGKLVSYTNLTQGAKEHEEAESGEGTRRRAAEAPSMGTLMGVYLPCLQNIFGVILFLRLTWMVGTAGVLQALLIVLICCCCTLLTAISMSAIATNGVVPAGGSYFMISRSLGPEFGGAVGLCFYLGTTFAAAMYILGAIEILLTYIAPPAAIFYPSGAHDTSNATLNNMRVYGTIFLTFMTLVVFVGVKYVNKFASLFLACVIISILSIYAGGIKSIFDPPVFPVCMLGNRTLSRDQFDICAKTAVVDNETVATQLWSFFCHSPNLTTDSCDPYFMLNNVTEIPGIPGAAAGVLQENLWSAYLEKGDIVEKHGLPSADAPSLKESLPLYVVADIATSFTVLVGIFFPSVTGIMAGSNRSGDLRDAQKSIPVGTILAIITTSLVYFSSVVLFGACIEGVVLRDKYGDGVSRNLVVGTLAWPSPWVIVIGSFFSTCGAGLQSLTGAPRLLQAIAKDNIIPFLRVFGHGKVNGEPTWALLLTALIAELGILIASLDMVAPILSMFFLMCYLFVNLACAVQTLLRTPNWRPRFKYYHWALSFLGMSLCLALMFVSSWYYALVAMLIAGMIYKYIEYQGAEKEWGDGIRGLSLSAARYALLRLEEGPPHTKNWRPQLLVLLKLDEDLHVKYPRLLTFASQLKAGKGLTIVGSVIQGSFLESYGEAQAAEQTIKNMMEIEKVKGFCQVVVASKVREGLAHLIQSCGLGGMRHNSVVLGWPYGWRQSEDPRAWKTFIDTVRCTTAAHLALLVPKNIAFYPSNHERYLEGHIDVWWIVHDGGMLMLLPFLLRQHKVWRKCRMRIFTVAQMDDNSIQMKKDLAVFLYHLRLEAEVEVVEMHNSDISAYTYERTLMMEQRSQMLRQMRLTKTEREREAQLVKDRHSALRLESLYSDEEDESAVGADKIQMTWTRDKYMTETWDPSHAPDNFRELVHIKPDQSNVRRMHTAVKLNEVIVTRSHDARLVLLNMPGPPRNSEGDENYMEFLEVLTEGLERVLLVRGGGREVITIYS

SEQ ID NO: 4784 - protein, 813 aa, Homo sapiens
MSKLSFRARALDASKPLPVFRCEDLPDLHEYASINRAVPQMPTGMEKEEESEHHLQRAISAQQVYGEKRDNMVIPVPEAESNIAYYESIYPGEFKMPKQLIHIQPFSLDAEQPDYDLDSEDEVFVNKLKKKMDICPLQFEEMIDRLEKGSGQQPVSLQEAKLLLKEDDELIREVYEYWIKKRKNCRGPSLIPSVKQEKRDGSSTNDPYVAFRRRTEKMQTRKNRKNDEASYEKMLKLRRDLSRAVTILEMIKRREKSKRELLHLTLEIMEKRYNLGDYNGEIMSEVMAQRQPMKPTYAIPIIPITNSSQFKHQEAMDVKEFKVNKQDKADLIRPKRKYEKKPKVLPSSAAATPQQTSPAALPVFNAKDLNQYDFPSSDEEPLSQVLSGSSEAEEDNDPDGPFAFRRKAGCQYYAPHLDQTGNWPWTSPKDGGLGDVRYRYCLTTLTVPQRCIGFARRRVGRGGRVLLDRAHSDYDSVFHHLDLEMLSSPQHSPVNQFANTSETNTSDKSFSKDLSQILVNIKSCRWRHFRPRTPSLHDSDNDELSCRKLYRSINRTGTAQPGTQTCSTSTQSKSSSGSAHFAFTAEQYQQHQQQLALMQKQQLAQIQQQQANSNSSTNTSQGFVSKTLDSASAQFAASALVTSEQLMGFKMKDDVVLGIGVNGVLPASGVYKGLHLSSTTPTALVHTSPSTAGSALLQPSNITQTSSSHSALSHQVTAANSATTQVLIGNNIRLTVPSSVATVNSIAPINARHIPRTLSAVPSSALKLAAAANCQVSKVPSSSSVDSVPRENHESEKPALNNIADNTVAMEVT

SEQ ID NO: 4785 - protein, 501 aa, Homo sapiens
MAQALPWLLLWMGAGVLPAHGTQHGIRLPLRSGLGGAPLGLRLPRETDEEPEEPGRRGSFVEMVDNLRGKSGQGYYVEMTVGSPPQTLNILVDTGSSNFAVGAAPHPFLHRYYQRQLSSTYRDLRKGVYVPYTQGKWEGELGTDLVSIPHGPNVTVRANIAAITESDKFFINGSNWEGILGLAYAEIARPDDSLEPFFDSLVKQTHVPNLFSLQLCGAGFPLNQSEVLASVGGSMIIGGIDHSLYTGSLWYTPIRREWYYEVIIVRVEINGQDLKMDCKEYNYDKSIVDSGTTNLRLPKKVFEAAVKSIKAASSTEKFPDGFWLGEQLVCWQAGTTPWNIFPVISLYLMGEVTNQSFRITILPQQYLRPVEDVATSQDDCYKFAISQSSTGTVMGAVIMEGFYVVFDRARKRIGFAVSACHVHDEFRTAAVEGPFVTLDMEDCGYNIPQTDESTLMTIAYVMAAICALFMLPLCLMVCQWRCLRCLRQQHDDFADDISLLK

SEQ ID NO: 4786 - protein, 1042 aa, Homo sapiens
MELQKGKGAAAAAAASGAAGGGGGGAGAGAPGGGRLLLSTSLDAKDELEERLERCMSIVTSMTAGVSEREANDALNAYVCKGLPQHEEICLGLFTLILTEPAQAQKCYRDLALVSRDGMNIVLNKINQILMEKYLKLQDTCRTQLVWLVRELVKSGVLGADGVCMTFMKQIAGGDVTAKNIWLAESVLDILTEQREWVLKSSILIAMAVYTYLRLIVDHHGTAQLQALRQKEVDFCISLLRERFMECLMIGRDLVRLLQNVARIPEFELLWKDIIHNPQALSPQFTGILQLLQSRTSRKFLACRLTPDMETKLLFMTSRVRFGQQKRYQDWFQRQYLSTPDSQSLRCDLIRYICGVVHPSNEVLSSDILPRWAIIGWLLTTCTSNVAASNAKLALFYDWLFFSPDKDSIMNIEPAILVMHHSMKPHPAITATLLDFMCRIIPNFYPPLEGHVRQGVFSSLNHIVEKRVLAHLAPLFDNPKLDKELRAMLREKFPEFCSSPSPPVEVKIEEPVSMEMDNHMSDKDESCYDNAEAAFSDDEEDLNSKGKKREFRFHPIKETVVEEPVDITPYLDQLDESLRDKVLQLQKGSDTEAQCEVMQEIVDQVLEEDFDSEQLSVLASCLQELFKAHFRGEVLPEEITEESLEESVGKPLYLIFRNLCQMQEDNSSFSLLLDLLSELYQKQPKIGYHLLYYLRASKAAAGKMNLYESFAQATQLGDLHTCLMMDMKACQEDDVRLLCHLTPSIYTEFPDETLRSGELLNMIVAVIDSAQLQELVCHVMMGNLVMFRKDSVLNILIQSLDWETFEQYCAWQLFLAHNIPLETIIPILQHLKYKEHPEALSCLLLQLRREKPSEEMVKMVLSRPCHPDDQFTTSILRHWCMKHDELLAEHIKSLLIKNNSLPRKRQSLRSSSSKLAQLTLEQILEHLDNLRLNLTNTKQNFFSQTPILQALQHVQASCDEAHKMKFSDLFSLAEEYEDSSTKPPKSRRKAALSSPRSRKNATQPPNAEEESGSSSASEEEDTKPKPTKRKRKGSSAVGSDSD

SEQ ID NO: 4787 - protein, 168 aa, Homo sapiens
MFWKLSLSLFLVAVLVKVAEARKNRPAGAIPSPYKDGSSNNSERWQHQIKEVLASSQEALVVTERKYLKSDWCKTQPLRQTVSEEGCRSRTILNRFCYGQCNSFYIPRHVKKEEESFQSCAFCKPQRVTSVLVELECPGLDPPFRLKKIQKVKQCRCMSVNLSDSDKQ

SEQ ID NO: 4788 - protein, 318 aa, Homo sapiens
MTLDHQIINPTLKWSQPAVPSGGPLVQHAHTTLDSDAGLTENPLTKLLAIGKEDDNAQWHLSGSILDVYSGEQGISPINMGLTSASCPSSLPMKREITETDTRALAKERQKKDNHNLIERRRRYNINYRIKELGTLIPKSNDPDMRWNKGTILKASVEYIKWLQKEQQRARELEHRQKKLEQANRRLLLRIQELEIQARTHGLPTLASLGTVDLGAHVTKQQSHPEQNSVDYCQQLTVSQGPSPELCDQAIAFSDPLSYFTDLSFSAALKEEQRLDGMLLDDTISPFGTDPLLSATSPAVSKESSRRSSFSSDDGDEL

SEQ ID NO: 4789 - protein, 858 aa, Homo sapiens
MSVVGLDVGSQSCYIAVARAGGIETIANEFSDRCTPSVISFGSKNRTIGVAAKNQQITHANNTVSNFKRFHGRAFNDPFIQKEKENLSYDLVPLKNGGVGIKVMYMGEEHLFSVEQITAMLLTKLKETAENSLKKPVTDCVISVPSFFTDAERRSVLDAAQIVGLNCLRLMNDMTAVALNYGIYKQDLPSLDEKPRIVVFVDMGHSAFQVSACAFNKGKLKVLGTAFDPFLGGKNFDEKLVEHFCAEFKTKYKLDAKSKIRALLRLYQECEKLKKLMSSNSTDLPLNIECFMNDKDVSGKMNRSQFEELCAELLQKIEVPLYSLLEQTHLKVEDVSAVEIVGGATRIPAVKERIAKFFGKDISTTLNADEAVARGCALQCAILSPAFKVREFSVTDAVPFPISLIWNHDSEDTEGVHEVFSRNHAAPFSKVLTFLRRGPFELEAFYSDPQGVPYPEAKIGRFVVQNVSAQKDGEKSRVKVKVRVNTHGIFTISTASMVEKVPTEENEMSSEADMECLNQRPPENPDTDKNVQQDNSEAGTQPQVQTDAQQTSQSPPSPELTSEENKIPDADKANEKKVDQPPEAKKPKIKVVNVELPIEANLVWQLGKDLLNMYIETEGKMIMQDKLEKERNDAKNAVEEYVYEFRDKLCGPYEKFICEQDHQNFLRLLTETEDWLYEEGEDQAKQAYVDKLEELMKIGTPVKVRFQEAEERPKMFEELGQRLQHYAKIAADFRNKDEKYNHIDESEMKKVEKSVNEVMEWMNNVMNAQAKKSLDQDPVVRAQEIKTKIKELNNTCEPVVTQPKPKIESPKLERTPNGPNIDKKEEDLEDKNNFGAEPPHQNGECYPNEKNSVNMDLD

SEQ ID NO: 4790 - protein, 781 aa, Homo sapiens
MAHRPKRTFRQRAADSSDSDGAEESPAEPGAPRELPVPGSAEEEPPSGGGRAQVAGLPHRVRGPRGRGRVWASSRRATKAAPRADEGSESRTLDVSTDEEDKIHHSSESKDDQGLSSDSSSSLGEKELSSTVKIPDAAFIQAARRKRELARAQDDYISLDVQHTSSISGMKRESEDDPESEPDDHEKRIPFTLRPQTLRQRMAEESISRNEETSEESQEDEKQDTWEQQQMRKAVKIIEERDIDLSCGNGSSKVKKFDTSISFPPVNLEIIKKQLNTRLTLLQETHRSHLREYEKYVQDVKSSKSTIQNLESSSNQALNCKFYKSMKIYVENLIDCLNEKIINIQEIESSMHALLLKQAMTFMKRRQDELKHESTYLQQLSRKDETSTSGNFSVDEKTQWILEEIESRRTKRRQARVLSGNCNHQEGTSSDDELPSAEMIDFQKSQGDILQKQKKVFEEVQDDFCNIQNILLKFQQWREKFPDSYYEAFISLCIPKLLNPLIRVQLIDWNPLKLESTGLKEMPWFKSVEEFMDSSVEDSKKESSSDKKVLSAIINKTIIPRLTDFVEFLWDPLSTSQTTSLITHCRVILEEHSTCENEVSKSRQDLLKSIVSRMKKAVEDDVFIPLYPKSAVENKTSPHSKFQERQFWSGLKLFRNILLWNGLLTDDTLQELGLGKLLNRYLIIALLNATPGPDVVKKCNQVAACLPEKWFENSAMRTSIPQLENFIQFLLQSAHKLSRSEFRDEVEEIILILVKIKALNQAESFIGEHHLDHLKSLIKED

SEQ ID NO: 4791 - protein, 446 aa, Homo sapiens
MREIVHIQAGQCGNQIGTKFWEVISDEHGIDPAGGYVGDSALQLERINVYYNESSSQKYVPRAALVDLEPGTMDSVRSGPFGQLFRPDNFIFGQTGAGNNWAKGHYTEGAELVDAVLDVVRKECEHCDCLQGFQLTHSLGGGTGSGMGTLLISKIREEFPDRIMNTFSVMPSPKVSDTVVEPYNATLSVHQLVENTDETYCIDNEALYDICFRTLKLTTPTYGDLNHLVSATMSGVTTSLRFPGQLNADLRKLAVNMVPFPRLHFFMPGFAPLTSRGSQQYRALTVPELTQQMFDARNMMAACDPRHGRYLTVATVFRGPMSMKEVDEQMLAIQSKNSSYFVEWIPNNVKVAVCDIPPRGLKMASTFIGNSTAIQELFKRISEQFSAMFRRKAFLHWFTGEGMDEMEFTEAESNMNDLVSEYQQYQDATANDGEEAFEDEEEEIDG

SEQ ID NO: 4792 - protein, 186 aa, Homo sapiens
MAAWGKKHAGKDPVRDECEERNRFTETREEDVTDEHGEREPFAETDEHTGANTKKPEDTAEDLTAKRKRMKMDKTCSKTKNKSKHALRKKQLKRQKRDYIHSLKLLNVLEEYITDEQKEEEEEEGEEEELIRIFQEQQKKWQQYRSVRRERLKEMKLLRDQFVKALEDFEDLCDRVFSDEDSELDN

SEQ ID NO: 4793 - protein, 938 aa, Homo sapiens
MHQLSLIRGNRGRSIHILERTASSSTEPSVSRQLLEPEPVPLSKEADSWEIIEGLKIGQTNVQKPDKHEGFMLKKRKWPLKGWHKRFFVLDNGMLKYSKAPLDIQKGKVHGSIDVGLSVMSIKKKARRIDLDTEEHIYHLKVKSQDWFDAWVSKLRHHRLYRQNEIVRSPRDASFHIFPSTSTAESSPAANVSVMDGKMQPNSFPWQSPLPCSNSLPATCTTGQSKVAAWLQDSEEMDRCAEDLAHCQSNLVELSKLLQNLEILQRTQSAPNFTDMQANCVDISKKDKRVTRRWRTKSVSKDTKIQLQEGPPAKGQFSTTRRRQRLAAAVATTVPFSATMSPVRLHSSNPNLCADIEFQTPPSHLTDPLESSTDYTKLQEEFCLIAQKVHSLLKSAFNSIAIEKEKLKQMVSEQDHSKGHSTQMARLRQSLSQALNQNAELRSRLNRIHSESIICDQVVSVNIIPSPDEAGEQIHVSLPLSQQVANESRLSMSESVSEFFDAQEVLLSASSSENEASDDESYISDVSDNISEDNTSVADNISRQILNGELTGGAFRNGRRACLPAPCPDTSNINLWNILRNNIGKDLSKVSMPVELNEPLNTLQHLCEEMEYSELLDKASETDDPYERMVLVAAFAVSGYCSTYFRAGSKPFNPVLGETYECIREDKGFRFFSEQVSHHPPISACHCESKNFVFWQDIRWKNKFWGKSMEILPVGTLNVMLPKYGDYYVWNKVTTCIHNILSGRRWIEHYGEVTIRNTKSSVCICKLTFVKVNYWNSNMNEVQGVVIDQEGKAVYRLFGKWHEGLYCGVAPSAKCIWRPGSMPTNYELYYGFTRFAIELNELDPVLKDLLPPTDARFRPDQRFLEEGNLEAAASEKQRVEELQRSRRRYMEENNLEHIPKFFKKVIDANQREAWVSNDTYWELRKDPGFSKVDSPVLW

SEQ ID NO: 4794 - protein, 808 aa, Homo sapiens
MLRFPTCFPSFRVVGEKQLPQEIIFLVWSPKRDLIALANTAGEVLLHRLASFHRVWSFPPNENTGKEVTCLAWRPDGKLLAFALADTKKIVLCDVEKPESLHSFSVEAPVSCMHWMEVTVESSVLTSFYNAEDESNLLLPKLPTLPKNYSNTSKIFSEENSDEIIKLLGDVRLNILVLGGSSGFIELYAYGMFKIARVTGIAGTCLALCLSSDLKSLSVVTEVSTNGASEVSYFQLETNLLYSFLPEVTRMARKFTHISALLQYINLSLTCMCEAWEEILMQMDSRLTKFVQEKNTTTSVQDEFMHLLLWGKASAELQTLLMNQLTVKGLKKLGQSIESSYSSIQKLVISHLQSGSESLLYHLSELKGMASWKQKYEPLGLDAAGIEEAITAVGSFILKANELLQVIDSSMKNFKAFFRWLYVAMLRMTEDHVLPELNKMTQKDITFVAEFLTEHFNEAPDLYNRKGKYFNVERVGQYLKDEDDDLVSPPNTEGNQWYDFLQNSSHLKESPLLFPYYPRKSLHFVKRRMENIIDQCLQKPADVIGKSMNQAICIPLYRDTRSEDSTRRLFKFPFLWNNKTSNLHYLLFTILEDSLYKMCILRRHTDISQSVSNGLIAIKFGSFTYATTEKVRRSIYSCLDAQFYDDETVTVVLKDTVGREGRDRLLVQLPLSLVYNSEDSAEYQFTGTYSTRLDEQCSAIPTRTMHFEKHWRLLESMKAQYVAGNGFRKVSCVLSSNLRHVRVFEMDIDDEWELDESSDEEEEASNKPVKIKEEVLSESEAENQQAGAAALAPEIVIKVEKLDPELDS

SEQ ID NO: 4795 - protein, 381 aa, Homo sapiens
MERGMHLGAAAAGEDDLFLHKSLSASTSKRLEAAFRSTPPGMDLSLAPPPRERPASSSSSPLGCFEPADPEGAGLLLPPPGGGGGGSAGSGGGGGGGVGVPGLLVGSAGVGGDPSLSSLPAGAALCLKYGESASRGSVAESSGGEQSPDDDSDGRCELVLRAGVADPRASPGAGGGGAKAAEGCSNAHLHGGASVPPGGLGGGGGGGSSSGSSGGGGGSGSGSGGSSSSSSSSSKKSKEQKALRLNINARERRRMHDLNDALDELRAVIPYAHSPSVRKLSKIATLLLAKNYILMQAQALEEMRRLVAYLNQGQAISAASLPSSAAAAAAAAALHPALGAYEQAAGYPFSAGLPPAASCPEKCALFNSVSSSLCKQCTEKP

SEQ ID NO: 4796 - protein, 935 aa, Homo sapiens
MIDLSFLTEEEQEAIMKVLQRDAALKRAEEERVRHLPEKIKDDQQLKNMSGQWFYEAKAKRHRDKIHGADIIRASMRKKRPQIAAEQSKDRENGAKESWVNNVNKDAFLPPELAGVVEEPEEDAAPASPSSSVVNPASSVIDMSQENTRKPNVSPEKQRKNPFNSSKLPEGHSSQQTKNEQSKNGRTGLFQTSKEDELSESKEKSTVADTSIQKLEKSKQTLPGLSNGSQIKAPIPKARKMIYKSTDLNKDDNQSFPRQRTDSLKARGAPRGILKRNSSSSSTDSETLRYNHNFEPKSKIVSPGLTIHERISEKEHSLEDNSSPNSLEPLKHVRFSAVKDELPQSPGLIHGREVGEFSVLESDRLKNGMEDAGDTEEFQSDPKPSQYRKPSLFHQSTSSPYVSKSETHQPMTSGSFPINGLHSHSEVLTARPQSMENSPTINEPKDKSSELTRLESVLPRSPADELSHCVEPEPSQVPGGSSRDRQQGSEEEPSPVLKTLERSAARKMPSKSLEDISSDSSNQAKVDNQPEELVRSAEDVSTVPTQPDNPFSHPDKLKRMSKSVPAFLQDESDDRETDTASESSYQLSRHKKSPSSLTNLSSSSGMTSLSSVSGSVMSVYSGDFGNLEVKGNIQFAIEYVESLKELHVFVAQCKDLAAADVKKQRSDPYVKAYLLPDKGKMGKKKTLVVKKTLNPVYNEILRYKIEKQILKTQKLNLSIWHRDTFKRNSFLGEVELDLETWDWDNKQNKQLRWYPLKRKTAPVALEAENRGEMKLALQYVPEPVPGKKLPTTGEVHIWVKECLDLPLLRGSHLNSFVKCTILPDTSRKSRQKTRAVGKTTNPIFNHTMVYDGFRPEDLMEACVELTVWDHYKLTNQFLGGLRIGFGTGKSYGTEVDWMDSTSEEVALWEKMVNSPNTWIEATLPLRMLLIAKISK

SEQ ID NO: 4797 - protein, 442 aa, Homo sapiens
MRGAMELEPELLLQEARENVEAAQSYRRELGHRLEGLREARRQIKESASQTRDVLKQHFNDLKGTLGKLLDERLVTLLQEVDTIEQETIKPLDDCQKLIEHGVNTAEDLVREGEIAMLGGVGEENEKLWSFTKKASHIQLDSLPEVPLLVDVPCLSAQLDDSILNIVKDHIFKHGTVASRPPVQIEELIEKPGGIIVRWCKVDDDFTAQDYRLQFRKCTSNHFEDVYVGSETEFIVLHIDPNVDYQFRVCARGDGRQEWSPWSVPQIGHSTLVPHEWTAGFEGYSLSSRRNIALRNDSESSGVLYSRAPTYFCGQTLTFRVETVGQPDRRDSIGVCAEKQDGYDSLQRDQAVCISTNGAVFVNGKEMTNQLPAVTSGSTVTFDIEAVTLGTTSNNEGGHFKLRVTISSNNREVVFDWLLDQSCGSLYFGCSFFYPGWKVLVF

SEQ ID NO: 4798 - protein, 647 aa, Homo sapiens
ITQEKNRVKEALEEEQTRVQELEERLARQKEISESNIAYEKRKAKEAMEKEKKKVQDLENRLTKQKEELELKEQKEDVLNNKLSDALAMVEETQKTKATESLKAESLALKLNETLAELETTKTKMIMVEERLILQQKMVKALQDEQESQRHGFEEEIMEYKEQIKQHAQTIVSLEEKLQKVTQHHKKIEGEIATLKDNDPAPKEERPQDPLVAPMTESSAKDMAYEHLIDDLLAAQKEILSQQEVIMKLRKDLTEAHSRMSDLRGELNEKQKMELEQNVVLVQQQSKELSVLKEKMAQMSSLVEKKDRELKALEEALRASQEKHRLQLNTEKEQKPRKKTQTCDTSVQIEPVHTEAFSSSQEQQSFSDLGVRCKGSRHEEVIQRQKKALSELRARIKELEKARSPDHKDHQNESFLDLKNLRMENNVQKILLDAKPDLPTLSRIEILAPQNGLCNARFGSAMEKSGKMDVAEALELSEKLYLDMSKTLGSLMNIKNMSGHVSMKYLSRQEREKVNQLRQRDLDLVFDKITQLKNQLGRKEELLRGYEKDVEQLRRSKVSIEMYQSQVAKLEDDIYKEAEEKALLKEALERMEHQLCQEKRINRAIRQQKVGTRKASLKMDQEREMLRKETSSKSSQSLLHSKPSGKY

SEQ ID NO: 4799 - protein, 933 aa, Homo sapiens
MRALAVLSVTLVMACTEAFFPFISRGKELLWGKPEESRVSSVLEESKRLVDTAMYATMQRNLKKRGILSPAQLLSFSKLPEPTSGVIARAAEIMETSIQAMKRKVNLKTQQSQHPTDALSEDLLSIIANMSGCLPYMLPPKCPNTCLANKYRPITGACNNRDHPRWGASNTALARWLPPVYEDGFSQPRGWNPGFLYNGFPLPPVREVTRHVIQVSNEVVTDDDRYSDLLMAWGQYIDHDIAFTPQSTSKAAFGGGADCQMTCENQNPCFPIQLPEEARPAAGTACLPFYRSSAACGTGDQGALFGNLSTANPRQQMNGLTSFLDASTVYGSSPALERQLRNWTSAEGLLRVHARLRDSGRAYLPFVPPRAPAACAPEPGIPGETRGPCFLAGDGRASEVPSLTALHTLWLREHNRLAAALKALNAHWSADAVYQEARKVVGALHQIITLRDYIPRILGPEAFQQYVGPYEGYDSTANPTVSNVFSTAAFRFGHATIHPLVRRLDASFQEHPDLPGLWLHQAFFSPWTLLRGGGLDPLIRGLLARPAKLQVQDQLMNEELTERLFVLSNSSTLDLASINLQRGRDHGLPGYNEWREFCGLPRLETPADLSTAIASRSVADKILDLYKHPDNIDVWLGGLAENFLPRARTGPLFACLIGKQMKALRDGDWFWWENSHVFTDAQRRELEKHSLSRVICDNTGLTRVPMDAFQVGKFPEDFESCDSITGMNLEAWRETFPQDDKCGFPESVENGDFVHCEESGRRVLVYSCRHGYELQGREQLTCTQEGWDFQPPLCKDVNECADGAHPPCHASARCRNTKGGFQCLCADPYELGDDGRTCVDSGRLPRVTWISMSLAALLIGGFAGLTSTVICRWTRTGTKSTLPISETGGGTPELRCGKHQAVGTSPQRAAAQDSEQESAGMEGRDTHRLPRAL

SEQ ID NO: 4800 - protein, 775 aa, Homo sapiens
MEKFGMNFGGGPSKKDLLETIETQKKQLLQYQARLKDVVRAYKSLLKEKEALEASIKVLSVSHEADVGLAGVQLPGLTFPDSVDDRCSTHSEDSTGTATSLDTAASLTSTKGEFGVEDDRPARGPPPPKSEEASWSESGVSSSSGDGPFAGGEVDKRLHQLKTQLATLTSSLATVTQEKSRMEASYLADKKKMKQDLEDASNKAEEERARLEGELKGLQEQIAETKARLITQQHDRAQEQSDHALMLRELQKLLQEERTQRQDLELRLEETREALAGRAYAAEQMEGFELQTKQLTREVEELKSELQAIRDEKNQPDPRLQELQEEAARLKSHFQAQLQQEMRKTALAEDQLRQQSQVEEQRVAALENQISEVSELLGTYEKAKQKDQLAIQKLKERILQLDLENKTLALAASSRSPLDSHGEESSLDVNVLKDKMEKLKRLLQVAARKSQVTLDVEKLCDLEIMPSSEAADGEKATALYYQQELKQLKEEFERYKMRAQVVLKSKNTKDGNLGKELEAAQEQLAELKEKYISLRLSCEELEHQHQQEADDWKQELARLQQLHRQELERCQLDFRDRTLKLEEELHKQRDRALAVLTEKDLELEQLRSVALASGLPGRRSPVGGGGPGDPADTSSSDSLTQALQLAAANEPTFFLYAEQLARKEVEITSLRKQKHRLEVEVHQLQDRLLEEGERHREEVAALQSHIEKNIRDQSREGANLEYLKNIIYRFLTLPDSLGRQQTLTAILTILHFSPEEKQVIMRLPTSASWWPSGKR

SEQ ID NO: 4801 - protein, 241 aa, Homo sapiens
MCSGAGVMMARWAARGRAGWRSTVRILSPLGHCEPGVSRSCRAAQAMDCEVNNGSSLRDECITNLLVFGFLQSCSDNSFRRELDALGHELPVLAPQWEGYDELQTDGNRSSHSRLGRIEADSESQEDIIRNIARHLAQVGDSMDRSIPPGLVNGLALQLRNTSRSEEDRNRDLATALEQLLQAYPRDMEKEKTMLVLALLLAKKVASHTPSLLRDVFHTTVNFINQNLRTYVRSLARNGMD

SEQ ID NO: 4802 - protein, 316 aa, Homo sapiens
MPSQNYSIISEFNLFGFSAFPQHLLPILFLLYLLMFLFTLLGNLLIMATIWIEHRLHTPMYLFLCTLSVSEILFTVAITPRMLADLLSTHHSITFVACANQMFFSFMFGFTHSFLLLVMGYDRYVAICHPLRYNVLMSPRDCAHLVACTWAGGSVMGMMVTTIVFHLTFCGSNVIHHFFCHVLSLLKLACENKTSSVIMGVMLVCVTALIGCLFLIILSYVFIVAAILRIPSAEGRHKTFSTCVSHLTVVVTHYSFASFIYLKPKGLHSMYSDALMATTYTVFTPFLSPIIFSLRNKELKNAINKNFYRKFCPPSS

SEQ ID NO: 4803 - protein, 501 aa, Homo sapiens
MVLWGPVLGALLVVIAGYLCLPGMLRQRRPWEPPLDKGTVPWLGHAMAFRKNMFEFLKRMRTKHGDVFTVQLGGQYFTFVMDPLSFGSILKDTQRKLDFGQYAKKLVLKVFGYRSVQGDHEMIHSASTKHLRGDGLKDLNETMLDSLSFVMLTSKGWSLDASCWHEDSLFRFCYYILFTAGYLSLFGYTKDKEQDLLQAGELFMEFRKFDLLFPRFVYSLLWPREWLEVGRLQRLFHKMLSVSHSQEKEGISNWLGNMLQFLREQGVPSAMQDKFNFMMLWASQGNTGPTSFWALLYLLKHPEAIRAVREEATQVLGEARLETKQSFAFKLGALQHTPVLDSVVEETLRLRAAPTLLRLVHEDYTLKMSSGQEYLFRHGDILALFPYLSVHMDPDIHPEPTVFKYDRFLNPNGSRKVDFFKTGKKIHHYTMPWGSGVSICPGRFFALSEVKLFILLMVTHFDLELVDPDTPLPHVDPQRWGFGTMQPSHDVRFRYRLHPTE

SEQ ID NO: 4804 - protein, 485 aa, Homo sapiens
MASSSTVPLGFHYETKYVVLSYLGLLSQEKLQEQHLSSPQGVQLDIASQSLDQEILLKVKTEIEEELKSLDKEISEAFTSTGFDRHTSPVFSPANPESSMEDCLAHLGEKVSQELKEPLHKALQMLLSQPVTYQAFRECTLETTVHASGWNKILVPLVLLRQMLLELTRRGQEPLSALLQFGVTYLEDYSAEYIIQQGGWGTVFSLESEEEEYPGITAEDSNDIYILPSDNSGQVSPPESPTVTTSWQSESLPVSLSASQSWHTESLPVSLGPESWQQIAMDPEEVKSLDSNGAGEKSENNSSNSDIVHVEKEEVPEGMEEAAVASVVLPARELQEALPEAPAPLLPHITATSLLGTREPDTEVITVEKSSPATSLFVELDEEEVKAATTEPTEVEEVVPALEPTETLLSEKEINAREESLVEELSPASEKKPVPPSEGKSRLSPAGEMKPMPLSEGKSILLFGGAAAVAILAVAIGVALALRKK

SEQ ID NO: 4805 - protein, 1722 aa, Homo sapiens
MGNQDGKLKRSAGDALHEGGGGAEDALGPRDVEATKKGSGGKKALGKHGKGGGGGGGGGESGKKKSKSDSRASVFSNLRIRKNLSKGKGAGGSREDVLDSQALQTGELDSAHSLLTKTPDLSLSADEAGLSDTECADPFEVTGPGGPGPAEARVGGRPIAEDVETAAGAQDGQRTSSGSDTDIYSFHSATEQEDLLSDIQQAIRLQQQQQQQLQLQLQQQQQQQQLQGAEEPAAPPTAVSPQPGAFLGLDRFLLGPSGGAGEAPGSPDTEQALSALSDLPESLAAEPREPQQPPSPGGLPVSEAPSLPAAQPAAKDSPSSTAFPFPEAGPGEEAAGAPVRGAGDTDEEGEEDAFEDAPRGSPGEEWAPEVGEDAPQRLGEEPEEEAQGPDAPAAASLPGSPAPSQRCFKPYPLITPCYIKTTTRQLSSPNHSPSQSPNQSPRIKRRPEPSLSRGSRTALASVAAPAKKHRADGGLAAGLSRSADWTEELGARTPRVGGSAHLLERGVASDSGGGVSPALAAKASGAPAAADGFQNVFTGRTLLEKLFSQQENGPPEEAEKFCSRIIAMGLLLPFSDCFREPCNQNAQTNAASFDQDQLYTWAAVSQPTHSLDYSEGQFPRRVPSMGPPSKPPDEEHRLEDAETESQSAVSETPQKRSDAVQKEVVDMKSEGQATVIQQLEQTIEDLRTKIAELERQYPALDTEVASGHQGLENGVTASGDVCLEALRLEEKEVRHHRILEAKSIQTSPTEEGGVLTLPPVDGLPGRPPCPPGAESGPQTKFCSEISLIVSPRRISVQLDSHQPTQSISQPPPPPSLLWSAGQGQPGSQPPHSISTEFQTSHEHSVSSAFKNSCNIPSPPPLPCTESSSSMPGLGMVPPPPPPLPGMTVPTLPSTAIPQPPPLQGTEMLPPPPPPLPGAGIPPPPPLPGAGILPLPPLPGAGIPPPPPLPGAAIPPPPPLPGAGIPLPPPLPGAGIPPPPPLPGAGIPPPPPLPGAGIPPPPPLPGAGIPPPPPLPGAGIPPPPPLPGAGIPPPPPLPGAGIPPPPPLPGAGIPPPPPLPGAGIPPPPPLPGAGIPPPPPLPGAGIPPPPPLPGAGIPPPPPLPGVGIPPPPPLPGAGIPPPPPLPGAGIPPPPPLPGAGIPPPPPLPRVGIPPPPPLPGAGIPPPPPLPGAGIPPPPPLPGVGIPPPPPLPGVGIPPPPPLPGAGIPPPPPLPGMGIPPAPAPPLPPPGTGIPPPPLLPVSGPPLLPQVGSSTLPTPQVCGFLPPPLPSGLFGLGMNQDKGSRKQPIEPCRPMKPLYWTRIQLHSKRDSSTSLIWEKIEEPSIDCHEFEELFSKTAVKERKKPISDTISKTKAKQVVKLLSNKRSQAVGILMSSLHLDMKDIQHAVVNLDNSVVDLETLQALYENRAQSDELEKIEKHGRSSKDKENAKSLDKPEQFLYELSLIPNFSERVFCILFQSTFSESICSIRRKLELLQKLCETLKNGPGVMQVLGLVLAFGNYMNGGNKTRGQADGFGLDILPKLKDVKSSDNSRSLLSYIVSYYLRNFDEDAGKEQCLFPLPEPQDLFQASQMKFEDFQKDLRKLKKDLKACEVEAGKVYQVSSKEHMQPFKENMEQFIIQAKIDQEAEENSLTETHKCFLETTAYFFMKPKLGEKEVSPNAFFSIWHEFSSDFKDFWKKENKLLLQERVKEAEEVCRQKKGKSLYKIKPRHDSGIKAKISMKT

SEQ ID NO: 4806 - protein, 873 aa, Homo sapiens
MAEMEKEGRPPENKRSRKPAHPVKREINEEMKNFAENTMNELLGWYGYDKVELKDGEDIEFRSYPTDGESRQHISVLKENSLPKPKLPEDSVISPYNISTGYSGLATGNGLSDSPAGSKDHGSVPIIVPLIPPPFIKPPAEDDVSNVQIMCAWCQKVGIKRYSLSMGSEVKSFCSEKCFAACRRAYFKRNKARDEDGHAENFPQQHYAKETPRLAFKNNCELLVCDWCKHIRHTKEYLDFGDGERRLQFCSAKCLNQYKMDIFYKETQANLPAGLCSTLHPPMENKAEGTGVQLLTPDSWNIPLTDARRKAPSPVATAGQSQGPGPSASTTVSPSDTANCSVTKIPTPVPKSIPISETPNIPPVSVQPPASIGPPLGVPPRSPPMVMTNRGPVPLPIFMEQQIMQQIRPPFIRGPPHHASNPNSPLSNPMLPGIGPPPGGPRNLGPTSSPMHRPMLSPHIHPPSTPTMPGNPPGLLPPPPPGAPLPSLPFPPVSMMPNGPMPVPQMMNFGLPSLAPLVPPPTLLVPYPVIVPLPVPIPIPIPIPHVSDSKPPNGFSSNGENFIPNAPGDSAAAGGKPSGHSLSPRDSKQGSSKSADSPPGCSGQALSLAPTPAEHGRSEVVDLTRRAGSPPGPPGAGGQLGFPGVLQGPQDGVIDLTVGHRARLHNVIHRALHAHVKAEREPSAAERRTCGGCRDGHCSPPAAGDPGPGAPAGPEAAAACNVIVNGTRGAAAEGAKSAEPPPEQPPPPPPPAPPKKLLSPEEPAVSELESVKENNCASNCHLDGEAAKKLMGEEALAGGDKSDPNLNNPADEDHAYALRMLPKTGCVIQPVPKPAEKAAMAPCIISSPMLSAGPEDLEPPLKRRCLRIRNQNK

SEQ ID NO: 4807 - protein, 677 aa, Homo sapiens
MMQESGTETKSNGSAIQNGSGGSNHLLECGGLREGRSNGETPAVDIGAADLAHAQQQQQQALQVARQLLLQQQQQQQVSGLKSPKRNDKQPALQVPVSVAMMTPQVITPQQMQQILQQQVLSPQQLQVLLQQQQALMLQQQQLQEFYKKQQEQLQLQLLQQQHAGKQPKEQQQVATQQLAFQQQLLQMQQLQQQHLLSLQRQGLLTIQPGQPALPLQPLAQGMIPTELQQLWKEVTSAHTAEETTGNNHSSLDLTTTCVSSSAPSKTSLIMNPHASTNGQLSVHTPKRESLSHEEHPHSHPLYGHGVCKWPGCEAVCEDFQSFLKHLNSEHALDDRSTAQCRVQMQVVQQLELQLAKDKERLQAMMTHLHVKSTEPKAAPQPLNLVSSVTLSKSASEASPQSLPHTPTTPTAPLTPVTQGPSVITTTSMHTVGPIRRRYSDKYNVPISSADIAQNQEFYKNAEVRPPFTYASLIRQAILESPEKQLTLNEIYNWFTRMFAYFRRNAATWKNAVRHNLSLHKCFVRVENVKGAVWTVDEVEFQKRRPQKISGNPSLIKNMQSSHAYCTPLNAALQASMAENSIPLYTTASMGNPTLGNLASAIREELNGAMEHTNSNESDSSPGRSPMQAVHPVHVKEEPLDPEEAEGPLSLVTTANHSPDFDHDRDYEDEPVNEDME

SEQ ID NO: 4808 - protein, 520 aa, Homo sapiens
MRNKKILKEDELLSETQQAAFHQIAMEPFEINVPKPKRRNGVNFSLAVVVIYLILLTAGAGLLVVQVLNLQARLRVLEMYFLNDTLAAEDSPSFSLLQSAHPGEHLAQGASRLQVLQAQLTWVRVSHEHLLQRVDNFTQNPGMFRIKGEQGAPGLQGHKGAMGMPGAPGPPGPPAEKGAKGAMGRDGATGPSGPQGPPGVKGEAGLQGPQGAPGKQGATGTPGPQGEKGSKGDGGLIGPKGETGTKGEKGDLGLPGSKGDRGMKGDAGVMGPPGAQGSKGDFGRPGPPGLAGFPGAKGDQGQPGLQGVPGPPGAVGHPGAKGEPGSAGSPGRAGLPGSPGSPGATGLKGSKGDTGLQGQQGRKGESGVPGPAGVKGEQGSPGLAGPKGAPGQAGQKGDQGVKGSSGEQGVKGEKGERGENSVSVRIVGSSNRGRAEVYYSGTWGTICDDEWQNSDAIVFCRMLGYSKGRALYKVGAGTGQIWLDNVQCRGTESTLWSCTKNSWGHHDCSHEEDAGVECSV

SEQ ID NO: 4809 - protein, 506 aa, Homo sapiens
MRDPLTDCPYNKVYKNLKEFSQNGENFCKQVTSVLQQRANLEISYAKGLQKLASKLSKALQNTRKSCVSSAWAWASEGMKSTADLHQKLGKAIELEAIKPTYQVLNVQEKKRKSLDNEVEKTANLVISNWNQQIKAKKKLMVSTKKHEALFQLVESSKQSMTEKEKRKLLNKLTKSTEKLEKEDENYYQKNMAGYSTRLKWENTLENCYQSILELEKERIQLLCNNLNQYSQHISLFGQTLTTCHTQIHCAISKIDIEKDIQAVMEETAILSTENKSEFLLTDYFEEDPNSAMDKERRKSLLKPKLLRLQRDIEKASKDKEGLERMLKTYSSTSSFSDAKSQKDTAALMDENNLKLDLLEANSYKLSSMLAELEQRPQPSHPCSNSIFRWREKEHTHSYVKISRPFLMKRLENIVSKASSGGQSNPGSSTPAPGAAQLSSRLCKALYSFQARQDDELNLEKGDIVIIHEKKEGGWWFGSLNGKKGHFPAAYVEELPSNAGNTATKA

SEQ ID NO: 4810 - protein, 394 aa, Homo sapiens
MGRVSTSHQPLRGVPAPADSGAPVLQPPRMGRWALDVAFLWKAVLTLGLVLLYYCFSIGITFYNKWLTKSFHFPLFMTMLHLAVIFLFSALSRALVQCSSHRARVVLSWADYLRRVAPTALATALDVGLSNWSFLYVTVSLYTMTKSSAVLFILIFSLIFKLEELRAALVLVVLLIAGGLFMFTYKSTQFNVEGFALVLGASFIGGIRWTLTQMLLQKAELGLQNPIDTMFHLQPLMFLGLFPLFAVFEGLHLSTSEKIFRFQDTGLLLRVLGSLFLGGILAFGLGFSEFLLVSRTSSLTLSIAGIFKEVCTLLLAAHLLGDQISLLNWLGFALCLSGISLHVALKALHSRGDGGPKALKGLGSSPDLELLLRSSQREEGDNEEEEYFVAQGQQ

SEQ ID NO: 4811 - protein, 328 aa, Homo sapiens
MSMLAERRRKQKWAVDPQNTAWSNDDSKFGQRMLEKMGWSKGKGLGAQEQGATDHIKVQVKNNHLGLGATINNEDNWIAHQDDFNQLLAELNTCHGQETTDSSDKKEKKSFSLEEKSKISKNRVHYMKFTKGKDLSSRSKTDLDCIFGKRQSKKTPEGDASPSTPEENETTTTSAFTIQEYFAKRMAALKNKPQVPVPGSDISETQVERKRGKKRNKEATGKDVESYLQPKAKRHTEGKPERAEAQERVAKKKSAPAEEQLRGPCWDQSSKASAQDAGDHVQPPEGRDFTLKPKKRRGKKKLQKPVEIAEDATLEETLVKKKKKKDSK

SEQ ID NO: 4812 - protein, 248 aa, Homo sapiens
MGKRDNRVAYMNPIAMARWRGPTQSVGPTIQDYLNRPRPTWEEVKKQLENKKTGSKALAEFEEKMNENWKKELEKSREKLLSGNESSSKKRERKKKRKKKSCRSSSSSSSSDSSSSSSDSEDEEKKQGKRRKKKKNRSYKSSQSSTHESESESKESVKKKKKSKDETEKEKDVRSLSKKRKKSYPDDKPLSSESSSESDYEEDVQAKKKRRCEEREQAKEKVKKKKKKQHKKHSKKKKKKSGSSHKSR

SEQ ID NO: 4813 - protein, 908 aa, Homo sapiens
MGVNDLWQILEPVKQHIPLRNLGGKTIAVDLSLWVCEAQTVKKMMGSVMKPHLRNLFFRISYLTQMDVKLVFVMEGEPPKLKADVISKRNQSRYGSSGKSWSQKTGRSHFKSVLRECLHMLECLGIPWVQAAGEAEAMCAYLNAGGHVDGCLTNDGDTFLYGAQTVYRNFTMNTKDPHVDCYTMSSIKSKLGLDRDALVGLAILLGCDYLPKGVPGVGKEQALKLIQILKGQSLLQRFNRWNETSCNSSPQLLVTKKLAHCSVCSHPGSPKDHERNGCRLCKSDKYCEPHDYEYCCPCEWHRTEHDRQLSEVENNIKKKACCCEGFPFHEVIQEFLLNKDKLVKVIRYQRPDLLLFQRFTLEKMEWPNHYACEKLLVLLTHYDMIERKLGSRNSNQLQPIRIVKTRIRNGVHCFEIEWEKPEHYAMEDKQHGEFALLTIEEESLFEAAYPEIVAVYQKQKLEIKGKKQKRIKPKENNLPEPDEVMSFQSHMTLKPTCEIFHKQNSKLNSGISPDPTLPQESISASLNSLLLPKNTPCLNAQEQFMSSLRPLAIQQIKAVSKSLISESSQPNTSSHNISVIADLHLSTIDWEGTSFSNSPAIQRNTFSHDLKSEVESELSAIPDGFENIPEQLSCESERYTANIKKVLDEDSDGISPEEHLLSGITDLCLQDLPLKERIFTKLSYPQDNLQPDVNLKTLSILSVKESCIANSGSDCTSHLSKDLPGIPLQNESRDSKILKGDQLLQEDYKVNTSVPYSVSNTVVKTCNVRPPNTALDHSRKVDMQTTRKILMKKSVCLDRHSSDEQSAPVFGKAKYTTQRMKHSSQKHNSSHFKESGHNKLSSPKIHIKETEQCVRSYETAENEESCFPDSTKSSLSSLQCHKKENNSGTCLDSPLPLRQRLKLRFQST

SEQ ID NO: 4814 - protein, 324 aa, Homo sapiens
MSFFFVDLRPMNRSATHIVTEFILLGFPGCWKIQIFLFSLFLVIYVLTLLGNGAIIYAVRCNPLLHTPMYFLLGNFAFLEIWYVSSTIPNMLVNILSKTKAISFSGCFLQFYFFFSLGTTECLFLAVMAYDRYLAICHPLQYPAIMTVRFCGKLVSFCWLIGFLGYPIPIFYISQLPFCGPNIIDHFLCDMDPLMALSCAPAPITECIFYTQSSLVLFFTSMYILRSYILLLTAVFQVPSAAGRRKAFSTCGSHLVVVSLFYGTVMVMYVSPTYGIPTLLQKILTLVYSVTTPLFNPLIYTLRNKDMKLALRNVLFGMRIRQNS

SEQ ID NO: 4815 - protein, 467 aa, Homo sapiens
MSVVVQHVEEKAVHSWSRISTAGKKALEEALLVFNPMSQDLSATEAQLVAFLQGLRDDGFQPTILRSGDVYGYSSCTANPPSQTKLQARAPNPTATSPPASAPRTAMRLPAGRATLLPMPLSGRLAKASTPALAKHATTNLLLSSLKQSSASHARGAAVGFPTHLYPGVYPAMRLSVVLEALVPLKTPMPCLGAKHKAQSLQLSLADSPLKLRKSSGKGPGNPRPKAPRKTTSKGPKCLTRKGPGAGPRRGSGHQSKTNRATGSPSVRRMKGGSALGTKTAQAKVARTLAKAARAQAKVARTQAKAAKARAKAKAAQVKAKAKAKAAQVKAKAKVMAAWAKAKAKAKAVRAKAKVARTQPRGRGRPKGSAKARTTRKGQKNRPETVGQKRKRAEEAKDLPPKKRTRLGPRSPKAWLGPGTAKLLKFRAIKVDRRSSDDEVRQRAQRILRVNLSPVIRLQPLLPYSAV

SEQ ID NO: 4816 - protein, 545 aa, Homo sapiens
MDCVIFEEVAVNFTPEEWALLDHAQRSLYRDVMLETCRNLASLDCYIYVRTSGSSSQRDVFGNGISNDEEIVKFTGSDSWSIFGENWRFDNTGDQHQIPQRHLRSQLGRLCESNEGHQCGETLSQTANLLVHKSYPTEAKPSECTKCGKAFENRQRSHTGQRPCKECGQACSCLSCQSPPMKTQTVEKPCNCQDSRTASVTYVKSLSSKKSYECQKCGKAFICPSSFRGHVNSHHGQKTHACKVCGKTFMYYSYLTRHVRTHTGEKPYECKECGKAFSCPSYFREHVRTHTGEKPYECKHCGKSFSCYSSFRDHVRTHTGEKPCQCKHCGKAFTCYSSLREHGRTHSGEKPYECKECGKAFRYPSSLRAHMRMHTGEKPYVCKQCGKAFGCPTYFRRHVKTHSGVKPYQCKECGKAYSFSSSLRIHVRTHTGEKPFECKHCGKAFSCHSSLREHVRTHSGEKPYECNQCGKAFSHAQYFQKHVRSHSGVKPYECTECGKAYSCSSSLRVHVRTHTGERPYECKQCGKTFRYLASLQAHVRTHAGA

SEQ ID NO: 4817 - protein, 556 aa, Homo sapiens
MATTATCTRFTDDYQLFEELGKGAFSVVRRCVKKTSTQEYAAKIINTKKLSARDHQKLEREARICRLLKHPNIVRLHDSISEEGFHYLVFDLVTGGELFEDIVAREYYSEADASHCIHQILESVNHIHQHDIVHRDLKPENLLLASKCKGAAVKLADFGLAIEVQGEQQAWFGFAGTPGYLSPEVLRKDPYGKPVDIWACGVILYILLVGYPPFWDEDQHKLYQQIKAGAYDFPSPEWDTVTPEAKNLINQMLTINPAKRITADQALKHPWVCQRSTVASMMHRQETVECLRKFNARRKLKGAILTTMLVSRNFSAAKSLLNKKSDGGVKPQSNNKNSLVSPAQEPAPLQTAMEPQTTVVHNATDGIKGSTESCNTTTEDEDLKAAPLRTGNGSSVPEGRSSRDRTAPSAGMQPQPSLCSSAMRKQEIIKITEQLIEAINNGDFEAYTKICDPGLTSFEPEALGNLVEGMDFHKFYFENLLSKNSKPIHTTILNPHVHVIGEDAACIAYIRLTQYIDGQGRPRTSQSEETRVWHRRDGKWLNVHYHCSGAPAAPLQ

SEQ ID NO: 4818 - protein, 710 aa, Homo sapiens
MVMACRVVNKRRHMGLQQLSSFAETGRTFLGPLKSSKFIIDEECHESVLISSTVRLLESLDLTSAVGQLLNEAVQAQNNTYRTGISTLLFLVGAWSSAVEECLHLGVPISIIVSVMSEGLNFCSEEVVSLHVPVHNIFDCMDSTKTFSQLETFSVSLCPFLQVPSDTDLIEELHGLKDVASQTLTISNLSGRPLKSYELFKPQTKVEADNNTSRTLKNSLLADTCCRQSILIHSRHFNRTDNTEGVSKPDGFQEHVTATHKTYRCNDLVELAVGLSHGDHSSMKLVEEAVQLQYQNACVQQGNCTKPFMFDISRIFTCCLPGLPETSSCVCPGYITVVSVSNNPVIKELQNQPVRIVLIEGDLTENYRHLGFNKSANIKTVLDSMRLQEDSSEELWANHVLQVLIQFKVNLVLVQGNVSERLIEKCINSKRLVIGSVNGSVMQAFAEAAGAVQVAYITQVNEDCVGDGVCVTFWRSSPLDVVDRNNRIAILLKTEGINLVTAVLTNPVTAQMQIKEDRFWTCAYRLYYALKEEKVFLGGGAVEFLCLSCLHILAEQSLKKENHACSGWLHNTSSWLASSLAIYRPTVLKFLANGWQKYLSTLLYNTANYSSEFEASTYIQHHLQNATDSGSPSSYILNEYSKLNSRIFNSDISNKLEQIPRVYDVVTPKIEAWRRALDLVLLVLQTDSEIITGHGHTQINSQELTGFLFL

SEQ ID NO: 4819 - protein, 330 aa, Homo sapiens
MFFIIHSLVTSVFLTALGPQNRTMHFVTEFVLLGFHGQREMQSCFFSFILVLYLLTLLGNGAIVCAVKLDRRLHTPMYILLGNFAFLEIWYISSTVPNMLVNILSEIKTISFSGCFLQFYFFFSLGTTECFFLSVMAYDRYLAICRPLHYPSIMTGKFCIILVCVCWVGGFLCYPVPIVLISQLPFCGPNIIDHLVCDPGPLFALACISAPSTELICYTFNSMIIFGPFLSILGSYTLVIRAVLCIPSGAGRTKAFSTCGSHLMVVSLFYGTLMVMYVSPTSGNPAGMQKIITLVYTAMTPFLNPLIYSLRNKDMKDALKRVLGLTVSQN

SEQ ID NO: 4820 - protein, 214 aa, Homo sapiens
MMWSNFFLQEENRRRGAAGRRRAHGQGRSGLTPEREGKVKLALLLAAVGATLAVLSVGTEFWVELNTYKANGSAVCEAAHLGLWKACTKRLWQADVPVDRDTCGPAELPGEANCTYFKFFTTGENARIFQRTTKKGLLLLVSLEVFRHSVRALLQRVSPEPPPAPRLTYEYSWSLGCGVGAGLILLLGAGCFLLLTLPSWPWGSLCPKRGHRAT

SEQ ID NO: 4821 - protein, 1726 aa, Homo sapiens
MSDFVESEAEESEEEYNDEGEVVPRVTKKFVEEEDDDEEEEEENLDDQDEQGNLKGFINDDDDEDEGEEDEGSDSGDSEDDVGHKKRKRTSFDDRLEDDDFDLIEENLGVKVKRGQKYRRVKKMSDDEDDDEEEYGKEEHEKEAIAEEIFQDGEGEEGQEAMEAPMAPPEEEEEDDEESDIDDFIVDDDGQPLKKPKWRKKLPGYTDAALQEAQEIFGVDFDYDEFEKYNEYDEELEEEYEYEDDEAEGEIRVRPKKTTKKRVSRRSIFEMYEPSELESSHLTDQDNEIRATDLPERFQLRSIPVKGAEDDELEEEADWIYRNAFATPTISLQESCDYLDRGQPASSFSRKGPSTIQKIKEALGFMRNQHFEVPFIAFYRKEYVEPELHINDLWRVWQWDEKWTQLRIRKENLTRLFEKMQAYQYEQISADPDKPLADGIRALDTTDMERLKDVQSMDELKDVYNHFLLYYGRDIPKMQNAAKASRKKLKRVREEGDEEGEGDEAEDEEQRGPELKQASRRDMYTICQSAGLDGLAKKFGLTPEQFGENLRDSYQRHETEQFPAEPLELAKDYVCSQFPTPEAVLEGARYMVALQIAREPLVRQVLRQTFQERAKLNITPTKKGRKDVDEAHYAYSFKYLKNKPVKELRDDQFLKICLAEDEGLLTTDISIDLKGVEGYGNDQTYFEEIKQFYYRDEFSHQVQEWNRQRTMAIERALQQFLYVQMAKELKNKLLAEAKEYVIKACSRKLYNWLRVAPYRPDQQVEEDDDFMDENQGKGIRVLGIAFSSARDHPVFCALVNGEGEVTDFLRLPHFTKRRTAWREEEREKKAQDIETLKKFLLNKKPHVVTVAGENRDAQMLIEDVKRIVHELDQGQQLSSIGVELVDNELAILYMNSKKSEAEFRDYPPVLRQAVSLARRIQDPLIEFAQVCSSDEDILCLKFHPLQEHVVKEELLNALYCEFINRVNEVGVDVNRAIAHPYSQALIQYVCGLGPRKGTHLLKILKQNNTRLESRTQLVTMCHMGPKVFMNCAGFLKIDTASLGDSTDSYIEVLDGSRVHPETYEWARKMAVDALEYDESAEDANPAGALEEILENPERLKDLDLDAFAEELERQGYGDKHITLYDIRAELSCRYKDLRTAYRSPNTEEIFNMLTKETPETFYIGKLIICNVTGIAHRRPQGESYDQAIRNDETGLWQCPFCQQDNFPELSEVWNHFDSGSCPGQAIGVKTRLDNGVTGFIPTKFLSDKVVKRPEERVKVGMTVHCRIMKIDIEKFSADLTCRTSDLMDRNNEWKLPKDTYYDFDAEAADHKQEEDMKRKQQRTTYIKRVIAHPSFHNINFKQAEKMMETMDQGDVIIRPSSKGENHLTVTWKVSDGIYQHVDVREEGKENAFSLGATLWINSEEFEDLDEIVARYVQPMASFARDLLNHKYYQDCSGGDRKKLEELLIKTKKEKPTFIPYFICACKELPGKFLLGYQPRGKPRIEYVTVTPEGFRYRGQIFPTVNGLFRWFKDHYQDPVPGITPSSSSRTRTPASINATPANINLADLTRAVNALPQNMTSQMFSAIAAVTGQGQNPNATPAQWASSQYGYGGSGGGSSAYHVFPTPAQQPVATPLMTPSYSYTTPSQPITTPQYHQLQASTTPQSAQAQPQPSSSSRQRQQQPKSNSHAAIDWGKMAEQWLQEKEAERRKQKQRLTPRPSPSPMIESTPMSIAGDATPLLDEMDR

SEQ ID NO: 4822 - protein, 189 aa, Homo sapiens
MMWSNFFLQEENRRRGAAGRRRAHGQGRSGLTPEREGKVKLALLLAAVGATLAVLSVGTEFWVELNTYKANGSAVCEAAHLGLWKACTKRLWQADVPVDRDTCGPAELPGGLLLLVSLEVFRHSVRALLQRVSPEPPPAPRLTYEYSWSLGCGVGAGLILLLGAGCFLLLTLPSWPWGSLCPKRGHRAT

SEQ ID NO: 4823 - protein, 785 aa, Homo sapiens
MKLGKVEFCHFLQLIALFLCFSGMSQAELSRSRSKPYFQSGRSRTKRSWVWNQFFVLEEYMGSDPLYVGKLHSDVDKGDGSIKYILSGEGASSIFIIDENTGDIHATKRLDREEQAYYTLRAQALDRLTNKPVEPESEFVIKIQDINDNEPKFLDGPYTAGVPEMSPVGTSVVQVTATDADDPTYGNSARVVYSILQGQPYFSVEPKTGVIKTALPNMDREAKDQYLLVIQAKDMVGQNGGLSGTTSVTVTLTDVNDNPPRFPRRSYQYNVPESLPVASVVARIKAADADIGANAEMEYKIVDGDGLGIFKISVDKETQEGIITIQKELDFEAKTSYTLRIEAANKDADPRFLSLGPFSDTTTVKIIVEDVDEPPVFSSPLYPMEVSEATQVGNIIGTVAAHDPDSSNSPVRYSIDRNTDLERYFNIDANSGVITTAKSLDRETNAIHNITVLAMESQNPSQVGRGYVAITILDINDNAPEFAMDYETTVCENAQPGQVIQKISAVDKDEPSNGHQFYFSLTTDATNNHNFSLKDNKDNTASILTRRNGFRRQEQSVYYLPIFIVDSGSPSLSSTNTLTIRVCDCDADGVAQTCNAEAYVLPAGLSTGALIAILACVLTLLVLILLIVTMRRRKKEPLIFDEERDIRENIVRYDDEGGGEEDTEAFDMAALRNLNVIRDTKTRRDVTPEIQFLSRPAFKSIPDNVIFREFIWERLKEADVDPGAPPYDSLQTYAFEGNGSVAESLSSLDSISSNSDQNYDYLSDWGPRFKRLADMYGTGQESLYS

SEQ ID NO: 4824 - protein, 398 aa, Homo sapiens
MPRPGHPRPASGPPRLGPWERPTELCLETYDKPPQPPPSRRTRRPDPKDPGHHGPESITFISGSAEPALESPTCCLLWRPWVWEWCRAAFCFRRCRDCLQRCGACVRGCSPCLSTEDSTEGTAEANWAKEHNGVPPSPDRAPPSRRDGQRLKSTMGSSFSYPDVKLKGIPVYPYPRATSPAPDADSCCKEPLADPPPMRHSLPSTFASSPRGSEEYYSFHESDLDLPEMGSGSMSSREIDVLIFKKLTELFSVHQIDELAKCTSDTVFLEKTSKISDLISSITQDYHLDEQDAEGRLVRGIIRISTRKSRARPQTSEGRSTRAAAPTAAAPDSGHETMVGSGLSQDELTVQISQETTADAIARKLRPYGAPGYPASHDSSFQGTDTDSSGAPLLQVYC

SEQ ID NO: 4825 - protein, 1015 aa, Homo sapiens
MTVSQKGGPQPTPSPAGPGTQLGPITGEMDEADSAFLKFKQTADDSLSLTSPNTESIFVEDPYTASLRSEIESDGHEFEAESWSLAVDAAYAKKQKREVVKRQDVLYELMQTEVHHVRTLKIMLKVYSRALQEELQFSSKAIGRLFPCADDLLETHSHFLARLKERRQESLEEGSDRNYVIQKIGDLLVQQFSGENGERMKEKYGVFCSGHNEAVSHYKLLLQQNKKFQNLIKKIGNFSIVRRLGVQECILLVTQRITKYPVLVERIIQNTEAGTEDYEDLTQALNLIKDIISQVDAKVSECEKGQRLREIAGKMDLKSSSKLKNGLTFRKEDMLQRQLHLEGMLCWKTTSGRLKDILAILLTDVLLLLQEKDQKYVFASVDSKPPVISLQKLIVREVANEEKAMFLISASLQGPEMYEIYTSSKEDRNAWMAHIQRAVESCPDEEEGPFSLPEEERKVVEARATRLRDFQERLSMKDQLIAQSLLEKQQIYLEMAEMGGLEDLPQPRGLFRGGDPSETLQGELILKSAMSEIEGIQSLICRQLGSANGQAEDGGSSTGPPRRAETFAGYDCTNSPTKNGSFKKKVSSTDPRPRDWRGPPNSPDLKLSDSDIPGSSEESPQVVEAPGTESDPRLPTVLESELVQRIQTLSQLLLNLQAVIAHQDSYVETQRAAIQEREKQFRLQSTRGNLLLEQERQRNFEKQREERAALEKLQSQLRHEQQRWERERQWQHQELERAGARLQEREGEARQLRERLEQERAELERQRQAYQHDLERLREAQRAVERERERLELLRRLKKQNTAPGALPPDTLAEAQPPSHPPSFNGEGLEGPRVSMLPSGVGPEYAERPEVARRDSAPTENRLAKSDVPIQLLSATNQFQRQAAVQQQIPTKLAASTKGGKDKGGKSRGSQRWESSASFDLKQQLLLNKLMGKDESTSRNRRSLSPILPGRHSPAPPPDPGFPAPSPPPADSPSEGFSLKAGGTALLPGPPAPSPLPATPLSAKEDASKEDVIFF

SEQ ID NO: 4826 - protein, 312 aa, Homo sapiens
MDLKNGSLVTEFILLGFFGRWELQIFFFVTFSLIYGATVMGNILIMVTVTCRSTLHSPLYFLLGNLSFLDMCLSTATTPKMIIDLLTDHKTISVWGCVTQMFFMHFFGGAEMTLLIIMAFDRYVAICKPLHYRTIMSHKLLKGFAILSWIIGFLHSISQIVLTMNLPFCGHNVINNIFCDLPLVIKLACIETYTLELFVIADSGLLSFTCFILLLVSYIVILVSVPKKSSHGLSKALSTLSAHIIVVTLFFGPCIFIYVWPFSSLASNKTLAVFYTVITPLLNPSIYTLRNKKMQEAIRKLRFQYVSSAQNF

SEQ ID NO: 4827 - protein, 760 aa, Homo sapiens
MYPQGRHPAPHQPGQPGFKFTVAESCDRIKDEFQFLQAQYHSLKVEYDKLANEKTEMQRHYVMYYEMSYGLNIEMHKQTEIAKRLNTILAQIMPFLSQEHQQQVAQAVERAKQVTMTELNAIIGQQQLQAQHLSHATHGPPVQLPPHPSGLQPPGIPPVTGSSSGLLALGALGSQAHLTVKDEKNHHELDHRERESSANNSVSPSESLRASEKHRGSADYSMEAKKRKAEEKDSLSRYDSDGDKSDDLVVDVSNEDPATPRVSPAHSPPENGLDKARSLKKDAPTSPASVASSSSTPSSKTKDLGHNDKSSTPGLKSNTPTPRNDAPTPGTSTTPGLRSMPASALRTPISITSSYAAPFAMMSHHEMNGSLTSPGAYAGLHNIPPQMSAAAAAAAAAYGRSPMVSFGAVGFDPHPPMRATGLPSSLASIPGGKPAYSFHVSADGQMQPVPFPHDALAGPGIPRHARQINTLSHGEVVCAVTISNPTRHVYTGGKGCVKIWDISQPGSKSPISQLDCLNRDNYIRSCKLLPDGRTLIVGGEASTLTIWDLASPTPRIKAELTSSAPACYALAISPDAKVCFSCCSDGNIAVWDLHNQTLVRQFQGHTDGASCIDISHDGTKLWTGGLDNTVRSWDLREGRQLQQHDFTSQIFSLGYCPTGEWLAVGMESSNVEVLHHTKPDKYQLHLHESCVLSLKFAYCGKWFVSTGKDNLLNAWRTPYGASIFQSKESSSVLSCDISADDKYIVTGSGDKKATVYEVIY

SEQ ID NO: 4828 - protein, 1124 aa, Homo sapiens
MADGPRCKRRKQANPRRNNVTNYNTVVETNSDSDDEDKLHIVEEESVTDAADCEGVPEDDLPTDQTVLPGRSSEREGNAKNCWEDDRKEGQEILGPEAQADEAGCTVKDDECESDAENEQNHDPNVEEFLQQQDTAVIFPEAPEEDQRQGTPEASGHDENGTPDAFSQLLTCPYCDRGYKRFTSLKEHIKYRHEKNEDNFSCSLCSYTFAYRTQLERHMTSHKSGRDQRHVTQSGCNRKFKCTECGKAFKYKHHLKEHLRIHSGEKPYECPNCKKRFSHSGSYSSHISSKKCISLIPVNGRPRTGLKTSQCSSPSLSASPGSPTRPQIRQKIENKPLQEQLSVNQIKTEPVDYEFKPIVVASGINCSTPLQNGVFTGGGPLQATSSPQGMVQAVVLPTVGLVSPISINLSDIQNVLKVAVDGNVIRQVLENNQANLASKEQETINASPIQQGGHSVISAISLPLVDQDGTTKIIINYSLEQPSQLQVVPQNLKKENPVATNSCKSEKLPEDLTVKSEKDKSFEGGVNDSTCLLCDDCPGDINALPELKHYDLKQPTQPPPLPAAEAEKPESSVSSATGDGNLSPSQPPLKNLLSLLKAYYALNAQPSAEELSKIADSVNLPLDVVKKWFEKMQAGQISVQSSEPSSPEPGKVNIPAKNNDQPQSANANEPQDSTVNLQSPLKMTNSPVLPVGSTTNGSRSSTPSPSPLNLSSSRNTQGYLYTAEGAQEEPQVEPLDLSLPKQQGELLERSTITSVYQNSVYSVQEEPLNLSCAKKEPQKDSCVTDSEPVVNVIPPSANPINIAIPTVTAQLPTIVAIADQNSVPCLRALAANKQTILIPQVAYTYSTTVSPAVQEPPLKVIQPNGNQDERQDTSSEGVSNVEDQNDSDSTPPKKKMRKTENGMYACDLCDKIFQKSSSLLRHKYEHTGKRPHECGICKKAFKHKHHLIEHMRLHSGEKPYQCDKCGKRFSHSGSYSQHMNHRYSYCKREAEERDSTEQEEAGPEILSNEHVGARASPSQGDSDERESLTREEDEDSEKEEEEEDKEMEELQEEKECEKPQGDEEEEEEEEEVEEEEVEEAENEGEEAKTEGLMKDDRAESQASSLGQKVGESSEQVSEEKTNEA

SEQ ID NO: 4829 - protein, 469 aa, Homo sapiens
MLESIRVTEKLHWPEQELAKKSILNAEDSLIIDNKRSISHLSSGVLKDIFTTGTSSYNVLLQSKEEKKYHSQKQSSSTYSKRCRKPSKSPNTSRSKDPRRMKALVPVTSSGTWYCLERRPAVFVTSSVSSPVKFTHDISVTGNGIVLPPKPKSKVKWCHFSTLPKPKPQLSRSFEKGDDFSGKKFCILTAIKPTNLEKEKLRFFKSDYTYNPQFEYANPALPSVLAKHSHASDRFLKQIVVHLTEDLLSRASMTVVNGCPTLTINVSTAREHWLEGMLRHEIGTHYFRGINNLQQPWNSWTGRKKHELKPNNPTEEGLASIHSVLFRKDPFLWRAALLYYTVYQASQMSFCELFKDIGRFVKDPNTRWDYCVRAKRGWTDTSQPGCFSKDQVYLDGILQILRYRDTIDFHLLTALGKVSYEDVDRLKGLAVTENMRVPHFLQDHGRYMEHLEKIMEVNELTDRELKDLI

SEQ ID NO: 4830 - protein, 332 aa, Homo sapiens
MALLCYNRGCGQRFDPETNSDDACTYHPGVPVFHDALKGWSCCKRRTTDFSDFLSIVGCTKGRHNSEKPPEPVKPEVKTTEKKELCELKPKFQEHIIQAPKPVEAIKRPSPDEPMTNLELKISASLKQALDKLKLSSGNEENKKEEDNDEIKIGTSCKNGGCSKTYQGLESLEEVCVYHSGVPIFHEGMKYWSCCRRKTSDFNTFLAQEGCTKGKHMWTKKDAGKKVVPCRHDWHQTGGEVTISVYAKNSLPELSRVEANSTLLNVHIVFEGEKEFDQNVKLWGVIDVKRSYVTMTATKIEITMRKAEPMQWASLELPAAKKQEKQKDATTD

SEQ ID NO: 4831 - protein, 517 aa, Homo sapiens
MLDDNRLSNPSCFASLAGLRRLKKLSLDENRIIRIPYLQQVQLYDESVDWNGGRGSPHKEPQFMLQSKPRMLEDSDEQLDYTVLPMKKDVDRTEVVFSSYPGFSTSEIAKEDAVLPVALFPSLCEFVFHNNPLVAHTRGVPPLLKSFLQERLGIHLIRRKIVKPKHHVLMSRKESWKVKSEIPKVPKQPLVLHHPRMTTTKSPSKDMLEPEAELAEDLPTTKSTSVESEMPTENLEGHSPSCRTFVPLPPICSNSTVHSEETLSHLSDTTVRLSPERPSDEDSKSTESIFLTQVSELPSSVIHKDDLELKEKDQKKPPTAPREVKGTRRKLPTAFLPSKYHGYEELLTAKPDPAFIEPKGIQKNAQALQQMLKHPLLCHSSKPKLDTLQKPYVHKEKRAQRIPIPPPKKTRAQLLDDIFIRLRDPRNITEAPLGAVLHQWTERRLVNHKQYLEAKRLLKEFQARYRQLVSGSLRTVFGTTPLPMACPALSESQPKFGHFLEFMDEFCQEPTASDSQG

SEQ ID NO: 4832 - protein, 1225 aa, Homo sapiens
MSSPLQRAVGDTKRALSASSSSSASLPFDDRDSNHTSEGNGDSLLADEDTDFEDSLNRNVKKRAAKRPPKTTPVAKHPKKGSRVVHRHSRKQSEPPANDLFNAVKAAKSDMQSLVDEWLDSYKQDQDAGFLELVNFFIQSCGCKGIVTPEMFKKMSNSEIIQHLTEQFNEDSGDYPLIAPGPSWKKFQGSFCEFVRTLVCQCQYSLLYDGFPMDDLISLLTGLSDSQVRAFRHTSTLAAMKLMTSLVKVALQLSVHQDNNQRQYEAERNKGPGQRAPERLESLLEKRKELQEHQEEIEGMMNALFRGVFVHRYRDVLPEIRAICIEEIGCWMQSYSTSFLTDSYLKYIGWTLHDKHREVRLKCVKALKGLYGNRDLTTRLELFTSRFKDRMVSMVMDREYDVAVEAVRLLILILKNMEGVLTDADCESVYPVVYASHRGLASAAGEFLYWKLFYPECEIRMMGGREQRQSPGAQRTFFQLLLSFFVESELHDHAAYLVDSLWDCAGARLKDWEGLTSLLLEKDQNLGDVQESTLIEILVSSARQASEGHPPVGRVTGRKGLTSKERKTQADDRVKLTEHLIPLLPQLLAKFSADAEKVTPLLQLLSCFDLHIYCTGRLEKHLELFLQQLQEVVVKHAEPAVLEAGAHALYLLCNPEFTFFSRADFARSQLVDLLTDRFQQELEELLQSSFLDEDEVYNLAATLKRLSAFYNTHDLTRWELYEPCCQLLQKAVDTGEVPHQVILPALTLVYFSILWTLTHISKSDASQKQLSSLRDRMVAFCELCQSCLSDVDTEIQEQAFVLLSDLLLIFSPQMIVGGRDFLRPLVFFPEATLQSELASFLMDHVFIQPGDLGSGDSQEDHLQIERLHQRRRLLAGFCKLLLYGVLEMDAASDVFKHYNKFYNDYGDIIKETLTRARQIDRSHCSRILLLSLKQLYTELLQEHGPQGLNELPAFIEMRDLARRFALSFGPQQLQNRDLVVMLHKEGIQFSLSELPPAGSSNQPPNLAFLELLSEFSPRLFHQDKQLLLSYLEKCLQHVSQAPGHPWGPVTTYCHSLSPVENTAETSPQVLPSSKRRRVEGPAKPNREDVSSSQEESLQLNSIPPTPTLTSTAVKSRQPLWGLKEMEEEDGSELDFAQGQPVAGTERSRFLGPQYFQTPHNPSGPGLGNQLMRLSLMEEDEEEELEIQDESNEERQDTDMQASSYSSTSERGLDLLDSTELDIEDF

SEQ ID NO: 4833 - protein, 304 aa, Homo sapiens
MERANHSVVSEFILLGLSKSQNLQILFFLGFSVVFVGIVLGNLLILVTVTFDSLLHTPMYFLLSNLSCIDMILASFATPKMIVDFLRERKTISWWGCYSQMFFMHLLGGSEMMLLVAMAIDRYVAICKPLHYMTIMSPRVLTGLLLSSYAVGFVHSSSQMAFMLTLPFCGPNVIDSFFCDLPLVIKLACKDTYILQLLVIADSGLLSLVCFLLLLVSYGVIIFSVRYRAASRSSKAFSTLSAHITVVTLFFAPCVFIYVWPFSRYSVDKILSVFYTIFTPLLNPIIYTLRNQEVKAAIKKRLCI

SEQ ID NO: 4834 - protein, 139 aa, Homo sapiens
MGQNWKRQQKLWNVPQLPFIRVPPSIYDTSLLKALNQGQQRYFYSIMRIYNSRPQWEALQTRYIHSLQHQQLLGYITQREALSYALVLRDSTKRASAKVAPQRTIPRKTSAMTRRCPSVLPVSVVLPRAQSKRRQVLRN

SEQ ID NO: 4835 - protein, 803 aa, Homo sapiens
MAEAHQAVGFRPSLTSDGAEVELSAPVLQEIYLSGLRSWKRHLSRFWNDFLTGVFPASPLSWLFLFSAIQLAWFLQLDPSLGLMEKIKELLPDWGGQHHGLRGVLAAALFASCLWGALIFTLHVALRLLLSYHGWLLEPHGAMSSPTKTWLALVRIFSGRHPMLFSYQRSLPRQPVPSVQDTVRKYLESVRPILSDEDFDWTAVLAQEFLRLQASLLQWYLRLKSWWASNYVSDWWEEFVYLRSRNPLMVNSNYYMMDFLYVTPTPLQAARAGNAVHALLLYRHRLNRQEIPPTLLMGMRPLCSAQYEKIFNTTRIPGVQKDYIRHLHDSQHVAVFHRGRFFRMGTHSRNSLLSPRALEQQFQRILDDPSPACPHEEHLAALTAAPRGTWAQVRTSLKTQAAEALEAVEGAAFFVSLDAEPAGLTREDPAASLDAYAHALLAGRGHDRWFDKSFTLIVFSNGKLGLSVEHSWADCPISGHMWEFTLATECFQLGYSTDGHCKGHPDPTLPQPQRLQWDLPDQIHSSISLALRGAKILSENVDCHVVPFSLFGKSFIRRCHLSSDSFIQIALQLAHFRDRGQFCLTYESAMTRLFLEGRTETVRSCTREACNFVRAMEDKEKTDPQCLALFRVAVDKHQALLKAAMSGQGVDRHLFALYIVSRFLHLQSPFLTQVHSEQWQLSTSQIPVQQMHLFDVHNYPDYVSSGGGFGPADDHGYGVSYIFMGDGMITFHISSKKSSTKTDSHRLGQHIEDALLDVASLFQAGQHFKRRFRGSGKENSRHRCGFLSRQTGASKASMTSTDF

SEQ ID NO: 4836 - protein, 593 aa, Homo sapiens
MIQSDKGADPPDKKDMKLSTATNPQNGLSQILRLVLQELSLFYGRDVNGVCLLYDLLHSPWLQALLKIYDCLQEFKEKKLVPATPHAQVLSYEVVELLRETPTSPEIQELRQMLQAPHFKALLSAHDTIAQKDFEPLLPPLPDNIPESEEAMRIVCLVKNQQPLGATIKRHEMTGDILVARIIHGGLAERSGLLYAGDKLVEVNGVSVEGLDPEQVIHILAMSRGTIMFKVVPVSDPPVNSQQMDPDIPCMDAGLPFQKGDILQIVDQNDALWWQARKISDPATCAGLVPSNHLLKRKQREFWWSQPYQPHTCLKSTLYKEEFVGYGQKFFIAGFRRSMRLCRRKSHLSPLHASVCCTGSCYSAVGAPYEEVVRYQRRPSDKYRLIVLMGPSGVGVNELRRQLIEFNPSHFQSAVPHTTRTKKSYEMNGREYHYVSKETFENLIYSHRMLEYGEYKGHLYGTSVDAVQTVLVEGKICVMDLEPQDIQGVRTHELKPYVIFIKPSNMRCMKQSRKNAKVITDYYVDMKFKDEDLQEMENLAQRMETQFGQFFDHVIVNDSLHDACAQLLSAIQKAQEEPQWVPATWISSDTESQ

SEQ ID NO: 4837 - protein, 1061 aa, Homo sapiens
MLRTAGRDGLCRLSTYLEELEAVELKKFKLYLGTATELGEGKIPWGSMEKAGPLEMAQLLITHFGPEEAWRLALSTFERINRKDLWERGQREDLVRDTPPGGPSSLGNQSTCLLEVSLVTPRKDPQETYRDYVRRKFRLMEDRNARLGECVNLSHRYTRLLLVKEHSNPMQVQQQLLDTGRGHARTVGHQASPIKIETLFEPDEERPEPPRTVVMQGAAGIGKSMLAHKVMLDWADGKLFQGRFDYLFYINCREMNQSATECSMQDLIFSCWPEPSAPLQELIRVPERLLFIIDGFDELKPSFHDPQGPWCLCWEEKRPTELLLNSLIRKKLLPELSLLITTRPTALEKLHRLLEHPRHVEILGFSEAERKEYFYKYFHNAEQAGQVFNYVRDNEPLFTMCFVPLVCWVVCTCLQQQLEGGGLLRQTSRTTTAVYMLYLLSLMQPKPGAPRLQPPPNQRGLCSLAADGLWNQKILFEEQDLRKHGLDGEDVSAFLNMNIFQKDINCERYYSFIHLSFQEFFAAMYYILDEGEGGAGPDQDVTRLLTEYAFSERSFLALTSRFLFGLLNEETRSHLEKSLCWKVSPHIKMDLLQWIQSKAQSDGSTLQQGSLEFFSCLYEIQEEEFIQQALSHFQVIVVSNIASKMEHMVSSFCLKRCRSAQVLHLYGATYSADGEDRARCSAGAHTLLVQLPERTVLLDAYSEHLAAALCTNPNLIELSLYRNALGSRGVKLLCQGLRHPNCKLQNLRLKRCRISSSACEDLSAALIANKNLTRMDLSGNGVGFPGMMLLCEGLRHPQCRLQMIQLRKCQLESGACQEMASVLGTNPHLVELDLTGNALEDLGLRLLCQGLRHPVCRLRTLWLKICRLTAAACDELASTLSVNQSLRELDLSLNELGDLGVLLLCEGLRHPTCKLQTLRLGICRLGSAACEGLSVVLQANHNLRELDLSFNDLGDWGLWLLAEGLQHPACRLQKLWLDSCGLTAKACENLYFTLGINQTLTDLYLTNNALGDTGVRLLCKRLSHPGCKLRVLWLFGMDLNKMTHSRLAALRVTKPYLDIGC

SEQ ID NO: 4838 - protein, 1137 aa, Homo sapiens
MPLSSHLLPALVLFLAGSSGWAWVPNHCRSPGQAVCNFVCDCRDCSDEAQCGYHGASPTLGAPFACDFEQDPCGWRDISTSGYSWLRDRAGAALEGPGPHSDHTLGTDLGWYMAVGTHRGKEASTAALRSPTLREAASSCKLRLWYHAASGDVAELRVELTHGAETLTLWQSTGPWGPGWQELAVTTGRIRGDFRVTFSATRNATHRGAVALDDLEFWDCGLPTPQANCPPGHHHCQNKVCVEPQQLCDGEDNCGDLSDENPLTCGRHIATDFETGLGPWNRSEGWSRNHRAGGPERPSWPRRDHSRNSAQGSFLVSVAEPGTPAILSSPEFQASGTSNCSLVFYQYLSGSEAGCLQLFLQTLGPGAPRAPVLLRRRRGELGTAWVRDRVDIQSAYPFQILLAGQTGPGGVVGLDDLILSDHCRPVSEVSTLQPLPPGPRAPAPQPLPPSSRLQDSCKQGHLACGDLCVPPEQLCDFEEQCAGGEDEQACGTTDFESPEAGGWEDASVGRLQWRRVSAQESQGSSAAAAGHFLSLQRAWGQLGAEARVLTPLLGPSGPSCELHLAYYLQSQPREVSCNFERDTCSWYPGHLSDTHWRWVESRGPDHDHTTGQGHFVLLDPTDPLAWGHSAHLLSRPQVPAAPTECLSFWYHLHGPQIGTLRLAMRREGEETHLWSRSGTQGNRWHEAWATLSHQPGSHAQYQLLFEGLRDGYHGTMALDDVAVRPGPCWAPNYCSFEDSDCGFSPGGQGLWRRQANASGHAAWGPPTDHTTETAQGHYMVVDTSPDALPRGQTASLTSKEHRPLAQPACLTFWYHGSLRSPGTLRVYLEERGRHQVLSLSAHGGLAWRLGSMDVQAERAWRVVFEAVAAGVAHSYVALDDLLLQDGPCPQPGSCDFESGLCGWSHLAWPGLGGYSWDWGGGATPSRYPQPPVDHTLGTEAGHFAFFETGVLGPGGRAAWLRSEPLPATPASCLRFWYHMGFPEHFYKGELKVLLHSAQGQLAVWGAGGHRRHQWLEAQVEVASAKEFQIVFEATLGGQPALGPIALDDVEYLAGQHCQQPAPSPGNTAAPGSVPAVVGSALLLLMLLVLLGLGGRRWLQKKGSCPFQSNTEATAPGFDNILFNADGVTLPASVTSDP

SEQ ID NO: 4839 - protein, 489 aa, Homo sapiens
MPLRDETLREVWASDSGHEEESLSPEAPRRPKQRPAPAQRLRKKRTEAPESPCPTGSKPRKPGEEEEEEEDEEDEEEEAEEKKEKILLPPKKPLREKSSADLKERRAKAQGPRGDLGSPDPPPKPLRVRNKEAPAGEGTKMRKTKKKGSGEADKDPSGSPASARKSPAAMFLVGEGSPDKKALKKKGTPKGARKEEEEEEEAATVIKKSNQKGKAKGKGKKKAKEERAPSPPVEVDEPREFVLRPAPQGRTVRCRLTRDKKGMDRGMYPSYFLHLDTEKKVFLLAGRKRKRSKTANYLISIDPTNLSRGGENFIGKLRSNLLGNRFTVFDNGQNPQRGYSTNVASLRQELAAVIYETNVLGFRGPRRMTVIIPGMSAENERVPIRPRNASDGLLVRWQNKTLESLIELHNKPPVWNDDSGSYTLNFQGRVTQASVKNFQIVHADDPDYIVLQFGRVAEDAFTLDYRYPLCALQAFAIALSSFDGKLACE

SEQ ID NO: 4840 - protein, 878 aa, Homo sapiens
MASVPVYCLCRLPYDVTRFMIECDMCQDWFHGSCVGVEEEKAADIDLYHCPNCEVLHGPSIMKKRRGSSKGHDTHKGKPVKTGSPTFVRELRSRTFDSSDEVILKPTGNQLTVEFLEENSFSVPILVLKKDGLGMTLPSPSFTVRDVEHYVGSDKEIDVIDVTRQADCKMKLGDFVKYYYSGKREKVLNVISLEFSDTRLSNLVETPKIVRKLSWVENLWPEECVFERPNVQKYCLMSVRDSYTDFHIDFGGTSVWYHVLKGEKIFYLIRPTNANLTLFECWSSSSNQNEMFFGDQVDKCYKCSVKQGQTLFIPTGWIHAVLTPVDCLAFGGNFLHSLNIEMQLKAYEIEKRLSTADLFRFPNFETICWYVGKHILDIFRGLRENRRHPASYLVHGGKALNLAFRAWTRKEALPDHEDEIPETVRTVQLIKDLAREIRLVEDIFQQNVGKTSNIFGLQRIFPAGSIPLTRPAHSTSVSMSRLSLPSKNGSKKKGLKPKELFKKAERKGKESSALGPAGQLSYNLMDTYSHQALKTGSFQKAKFNITGACLNDSDDDSPDLDLDGNESPLALLMSNGSTKRVKSLSKSRRTKIAKKVDKARLMAEQVMEDEFDLDSDDELQIDERLGKEKATLIIRPKFPRKLPRAKPCSDPNRVREPGEVEFDIEEDYTTDEDMVEGVEGYQTATPAPAQGASEAPASPSTQEAIQGMLCMANLQSSSSSPATSSLQAWWTGGQDRSSGSSSSGLGTVSNSPASQRTPGKRPIKRPAYWRTESEEEEENASLDEQDSLGACFKDAEYIYPSLESDDDDPALKSRPKKKKNSDDAPWSPKARVTPTLPKQDRPVREGTRVASIETGLAAAAAKLAQQVKKMKLSLTDSG

SEQ ID NO: 4841 - protein, 404 aa, Homo sapiens
MEAGEEPLLLAELKPGRPHQFDWKSSCETWSVAFSPDGSWFAWSQGHCIVKLIPWPLEEQFIPKGFEAKSRSSKNETKGRGSPKEKTLDCGQIVWGLAFSPWPSPPSRKLWARHHPQVPDVSCLVLATGLNDGQIKIWEVQTGLLLLNLSGHQDVVRDLSFTPSGSLILVSASRDKTLRIWDLNKHGKQIQVLSGHLQWVYCCSISPDCSMLCSAAGEKSVFLWSMRSYTLIRKLEGHQSSVVSCDFSPDSALLVTASYDTNVIMWDPYTGERLRSLHHTQVDPAMDDSDVHISSLRSVCFSPEGLYLATVADDRLLRIWALELKTPIAFAPMTNGLCCTFFPHGGVIATGTRDGHVQFWTAPRVLSSLKHLCRKALRSFLTTYQVLALPIPKKMKEFLTYRTF

SEQ ID NO: 4842 - protein, 642 aa, Homo sapiens
MLTRPSQVLLNSLSVDPDAECKYGLYFRDGRRKVDYILVYHHKRPSGNRTLVRRVQHSDTPSGARSVKQDHPLPGKGASLDAGSGEPPMDYHEDDKRFRREEYEGNLLEAGLELERDEDTKIHGVGFVKIHAPWNVLCREAEFLKLKMPTKKMYHINETRGLLKKINSVLQKITDPIQPKVAEHRPQTMKRLSYPFSREKQHLFDLSDKDSFFDSKTRSTIVYEILKRTTCTKAKYSMGITSLLANGVYAAAYPLHDGDYNGENVEFNDRKLLYEEWARYGVFYKYQPIDLVRKYFGEKIGLYFAWLGVYTQMLIPASIVGIIVFLYGCATMDENIPSMEMCDQRHNITMCPLCDKTCSYWKMSSACATARASHLFDNPATVFFSVFMALWAATFMEHWKRKQMRLNYRWDLTGFEEEEDHPRAEYEARVLEKSLKKESRNKETDKVKLTWRDRFPAYLTNLVSIIFMIAVTFAIVLGVIIYRISMAAALAMNSSPSVRSNIRVTVTATAVIINLVVIILLDEVYGCIARWLTKIEVPKTEKSFEERLIFKAFLLKFVNSYTPIFYVAFFKGRFVGRPGDYVYIFRSFRMEEVTEILFISGSPFCLAYDLSTPCTWEKQLQHICSAKSSRFLSFLLETFLFP

SEQ ID NO: 4843 - protein, 323 aa, Homo sapiens
MDKSNSSVVSEFVLLGLCSSQKLQLFYFCFFSVLYTVIVLGNLLIILTVTSDTSLHSPMYFLLGNLSFVDICQASFATPKMIADFLSAHETISFSGCIAQIFFIHLFTGGEMVLLVSMAYDRYVAICKPLYYVVIMSRRTCTVLVMISWAVSLVHTLSQLSFTVNLPFCGPNVVDSFFCDLPRVTKLACLDSYIIEILIVVNSGILSLSTFSLLVSSYIIILVTVWLKSSAAMAKAFSTLASHIAVVILFFGPCIFIYVWPFTISPLDKFLAIFYTVFTPVLNPIIYTLRNRDMKAAVRKIVNHYLRPRRISEMSLVVRTSFH

SEQ ID NO: 4844 - protein, 201 aa, Homo sapiens
MENGFTMCQTGRQHPVACGLHLSGGKEDLNDLRMEGVTTLVPSGSKFNQGRPTYPAEPQAKVTLNICSRCARLQGDNLEERTEESLPILHSPDEKIPDSFDSLPGTEEALMEEGDEFEKASKLTGPGEASSGVGHSLKNYMEEDESLKQLQVVHQPWILPSDTESEGVEAEQEKHLLNQNLCGWDSEFCIFHTLASFLIYK

SEQ ID NO: 4845 - protein, 655 aa, Homo sapiens
MAAGVAAWLPFARAAAIGWMPVANCPMPLAPADKNKRQDELIVLNVSGRRFQTWRTTLERYPDTLLGSTEKEFFFNEDTKEYFFDRDPEVFRCVLNFYRTGKLHYPRYECISAYDDELAFYGILPEIIGDCCYEEYKDRKRENAERLMDDNDSENNQESMPSLSFRQTMWRAFENPHTSTLALVFYYVTGFFIAVSVITNVVETVPCGTVPGSKELPCGERYSVAFFCLDTACVMIFTVEYLLRLFAAPSRYRFIRSVMSIIDVVAIMPYYIGLVMTNNEDVSGAFVTLRVFRVFRIFKFSRHSQGLRILGYTLKSCASELGFLLFSLTMAIIIFATVMFYAEKGSSASKFTSIPASFWYTIVTMTTLGYGDMVPKTIAGKIFGSICSLSGVLVIALPVPVIVSNFSRIYHQNQRADKRRAQKKARLARIRVAKTGSSNAYLHSKRNGLLNEALELTGTPEEEHMGKTTSLIESQHHHLLHCLEKTTGLSYLVDDPLLSVRTSTIKNHEFIDEQMFEQNCMESSMQNYPSTRSPSLSSHPGLTTTCCSRRSKKTTHLPNSNLPATRLRSMQELSTIHIQGSEQPSLTTSRSSLNLKADDGLRPNCKTSQITTAIISIPTPPALTPEGESRPPPASPGPNTNIPSIASNVVKVSAL

SEQ ID NO: 4846 - protein, 307 aa, Homo sapiens
MESENRTVIREFILLGLTQSQDIQLLVFVLVLIFYFIILPGNFLIIFTIKSDPGLTAPLYFFLGNLAFLDASYSFIVAPRMLVDFLSAKKIISYRGCITQLFFLHFLGGGEGLLLVVMAFDRYIAICRPLHYPTVMNPRTCYAMMLALWLGGFVHSIIQVVLILRLPFCGPNQLDNFFCDVPQVIKLACTDTFVVELLMVFNSGLMTLLCFLGLLASYAVILCRIRGSSSEAKNKAMSTCITHIIVIFFMFGPGIFIYTRPFRAFPADKVVSLFHTVIFPLLNPVIYTLRNQEVKASMKKVFNKHIA

SEQ ID NO: 4847 - protein, 901 aa, Homo sapiens
MAPTKPSFQQDPSRRERLQALRKEKSRDAARSRRGKENFEFYELAKLLPLPAAITSQLDKASIIRLTISYLKMRDFANQGDPPWNLRMEGPPPNTSVKGAQRRRSPSALAIEVFEAHLGSHILQSLDGFVFALNQEGKFLYISETVSIYLGLSQVELTGSSVFDYVHPGDHVEMAEQLGMKLPPGRGLLSQGTAEDGASSASSSSQSETPEPVESTSPSLLTTDNTLERSFFIRMKSTLTKRGVHIKSSGYKVIHITGRLRLRVSLSHGRTVPSQIMGLVVVAHALPPPTINEVRIDCHMFVTRVNMDLNIIYCENRISDYMDLTPVDIVGKRCYHFIHAEDVEGIRHSHLDLLNKGQCVTKYYRWMQKNGGYIWIQSSATIAINAKNANEKNIIWVNYLLSNPEYKDTPMDIAQLPHLPEKTSESSETSDSESDSKDTSGITEDNENSKSDEKGNQSENSEDPEPDRKKSGNACDNDMNCNDDGHSSSNPDSRDSDDSFEHSDFENPKAGEDGFGALGAMQIKVERYVESESDLRLQNCESLTSDSAKDSDSAGEAGAQASSKHQKRKKRRKRQKGGSASRRRLSSASSPGGLDAGLVEPPRLLSSPNSASVLKIKTEISEPINFDNDSSIWNYPPNREISRNESPYSMTKPPSSEHFPSPQGGGGGGGGGGGLHVAIPDSVLTPPGADGAAARKTQFGASATAALAPVASDPLSPPLSASPRDKHPGNGGGGGGGGGGAGGGGPSASNSLLYTGDLEALQRLQAGNVVLPLVHRVTGTLAATSTAAQRVYTTGTIRYAPAEVTLAMQSNLLPNAHAVNFVDVNSPGFGLDPKTPMEMLYHHVHRLNMSGPFGGAVSAASLTQMPAGNVFTTAEGLFSTLPFPVYSNGIHAAQTLERKED

SEQ ID NO: 4848 - protein, 1250 aa, Homo sapiens
MARGDAGRGRGLLALTFCLLAARGELLLPQETTVELSCGVGPLQVILGPEQAAVLNCSLGAAAAGPPTRVTWSKDGDTLLEHDHLHLLPNGSLWLSQPLAPNGSDESVPEAVGVIEGNYSCLAHGPLGVLASQTAVVKLATLADFSLHPESQTVEENGTARFECHIEGLPAPIITWEKDQVTLPEEPRLIVLPNGVLQILDVQESDAGPYRCVATNSARQHFSQEALLSVAHRGSLASTRGQDVVIVAAPENTTVVSGQSVVMECVASADPTPFVSWVRQDGKPISTDVIVLGRTNLLIANAQPWHSGVYVCRANKPRTRDFATAAAELRVLAAPAITQAPEALSRTRASTARFVCRASGEPRPALRWLHNGAPLRPNGRVKVQGGGGSLVITQIGLQDAGYYQCVAENSAGMACAAASLAVVVREGLPSAPTRVTATPLSSSAVLVAWERPEMHSEQIIGFSLHYQKARGMDNVEYQFAVNNDTTELQVRDLEPNTDYEFYVVAYSQLGASRTSTPALVHTLDDVPSAAPQLSLSSPNPSDIRVAWLPLPPSLSNGQVVKYKIEYGLGKEDQIFSTEVRGNETQLMLNSLQPNKVYRVRISAGTAAGFGAPSQWMHHRTPSMHNQSHVPFAPAELKVQAKMESLVVSWQPPPHPTQISGYKLYWREVGAEEEANGDRLPGGRGDQAWDVGPVRLKKKVKQYELTQLVPGRLYEVKLVAFNKHEDGYAAVWKGKTEKAPAPDMPIQRGPPLPPAHVHAESNSSTSIWLRWKKPDFTTVKIVNYTVRFSPWGLRNASLVTYYTSSGEDILIGGLKPFTKYEFAVQSHGVDMDGPFGSVVERSTLPDRPSTPPSDLRLSPLTPSTVRLHWCPPTEPNGEIVEYLILYSSNHTQPEHQWTLLTTQGNIFSAEVHGLESDTRYFFKMGARTEVGPGPFSRLQDVITLQEKLSDSLDMHSVTGIIVGVCLGLLCLLACMCAGLRRSPHRESLPGLSSTATPGNPALYSRARLGPPSPPAAHELESLVHPHPQDWSPPPSDVEDRAEVHSLMGGGVSEGRSHSKRKISWAQPSGLSWAGSWAGCELPQAGPRPALTRALLPPAGTGQTLLLQALVYDAIKGNGRKKSPPACRNQVEAEVIVHSDFSASNGNPDLHLQDLEPEDPLPPEAPDLISGVGDPGQGAAWLDRELGGCELAAPGPDRLTCLPEAASASCSYPDLQPGEVLEETPGDSCQLKSPCPLGASPGLPRSPVSSSA

SEQ ID NO: 4849 - protein, 378 aa, Homo sapiens
MLPPQPSAAHQGRGGRSGLLPKGPAMLCRLCWLVSYSLAVLLLGCLLFLRKAAKPAGDPTAHQPFWAPPTPRHSRCPPNHTVSSASLSLPSRHRLFLTYRHCRNFSILLEPSGCSKDTFLLLAIKSQPGHVERRAAIRSTWGRVGGWARGRQLKLVFLLGVAGSAPPAQLLAYESREFDDILQWDFTEDFFNLTLKELHLQRWVVAACPQAHFMLKGDDDVFVHVPNVLEFLDGWDPAQDLLVGDVIRQALPNRNTKVKYFIPPSMYRATHYPPYAGGGGYVMSRATVRRLQAIMEDAELFPIDDVFVGMCLRRLGLSPMHHAGFKTFGIRRPLDPLDPCLYRGLLLVHRLSPLEMWTMWALVTDEGLKCAAGPIPQR

SEQ ID NO: 4850 - protein, 313 aa, Homo sapiens
METANYTKVTEFVLTGLSQTREVQLVLFVIFLSFYLFILPGNILIICTIRLDPHLTSPMYFLLANLALLDIWYSSITAPKMLIDFFVERKIISFGGCIAQLFFLHFVGASEMFLLTVMAYDRYAAICRPLHYATIMNRRLCCILVALSWMGGFIHSIIQVALIVRLPFCGPNELDSYFCDITQVVRIACANTFPEELVMICSSGLISVVCFIALLMSYAFLLALLKKHSGSGENTNRAMSTCYSHITIVVLMFGPSIYIYARPFDSFSLDKVVSVFHTVIFPLLNPIIYTLRNKEVKAAMRKVVTKYILCEEK

SEQ ID NO: 4851 - protein, 1137 aa, Homo sapiens
MTMTANKNSSITHGAGGTKAPRGTLSRSQSVSPPPVLSPPRSPIYPLSDSETSACRYPSHSSSRVLLKDRHPPAPSPQNPQDPSPDTSPPTCPFKTASFGYLDRSPSACKRDAQKESVQGAAQDVAGVAACLPLAQSTPFPGPAAGPRGVLLTRTGTRAHSLGIREKISAWEGRREASPRMSMCGEKREGSGSEWAASEGCPSLGCPSVVPSPCSSEKTFDFKGLRRMSRTFSECSYPETEEEGEALPVRDSFYRLEKRLGRSEPSAFLRGHGSRKESSAVLSRIQKIEQVLKEQPGRGLPQLPSSCYSVDRGKRKTGTLGSLEEPAGGASVSAGSRAVGVAGVAGEAGPPPEREGSGSTKPGTPGNSPSSQRLPSKSSLDPAVNPVPKPKRTFEYEADKNPKSKPSNGLPPSPTPAAPPPLPSTPAPPVTRRPKKDMRGHRKSQSRKSFEFEDASSLQSLYPSSPTENGTENQPKFGSKSTLEENAYEDIVGDLPKENPYEDVDLKSRRAGRKSQQLSENSLDSLHRMWSPQDRKYNSPPTQLSLKPNSQSLRSGNWSERKSHRLPRLPKRHSHDDMLLLAQLSLPSSPSSLNEDSLSTTSELLSSRRARRIPKLVQRINSIYNAKRGKKRLKKLSMSSIETASLRDENSESESDSDDRFKAHTQRLVHIQSMLKRAPSYRTLELELLEWQERELFEYFVVVSLKKKPSRNTYLPEVSYQFPKLDRPTKQMREAEERLKAIPQFCFPDAKDWLPVSEYSSETFSFMLTGEDGSRRFGYCRRLLPSGKGPRLPEVYCVISRLGCFGLFSKVLDEVERRRGISAALVYPFMRSLMESPFPAPGKTIKVKTFLPGAGNEVLELRRPMDSRLEHVDFECLFTCLSVRQLIRIFASLLLERRVIFVADKLSTLSSCSHAVVALLYPFSWQHTFIPVLPASMIDIVCCPTPFLVGLLSSSLPKLKELPVEEALMVNLGSDRFIRQMDDEDTLLPRKLQAALEQALERKNELISQDSDSDSDDECNTLNGLVSEVFIRFFVETVGHYSLFLTQSEKGERAFQREAFRKSVASKSIRRFLEVFMESQMFAGFIQDRELRKCRAKGLFEQRVEQYLEELPDTEQSGMNKFLRGLGNKMKFLHKKN

SEQ ID NO: 4852 - protein, 1409 aa, Homo sapiens
MKSSGPVERLLRALGRRDSSRAASRPRKAEPHSFREKVFRKKPPVCAVCKVTIDGTGVSCRVCKVATHRKCEAKVTSACQALPPVELRRNTAPVRRIEHLGSTKSLNHSKQRSTLPRSFSLDPLMERRWDLDLTYVTERILAAAFPARPDEQRHRGHLRELAHVLQSKHRDKYLLFNLSEKRHDLTRLNPKVQDFGWPELHAPPLDKLCSICKAMETWLSADPQHVVVLYCKGNKGKLGVIVSAYMHYSKISAGADQALATLTMRKFCEDKVATELQPSQRRYISYFSGLLSGSIRMNSSPLFLHYVLIPMLPAFEPGTGFQPFLKIYQSMQLVYTSGVYHIAGPGPQQLCISLEPALLLKGDVMVTCYHKGGRGTDRTLVFRVQFHTCTIHGPQLTFPKDQLDEAWTDERFPFQASVEFVFSSSPEKIKGSTPRNDPSVSVDYNTTEPAVRWDSYENFNQHHEDSVDGSLTHTRGPLDGSPYAQVQRPPRQTPPAPSPEPPPPPMLSVSSDSGHSSTLTTEPAAESPGRPPPTAAERQELDRLLGGCGVASGGRGAGRETAILDDEEQPTVGGGPHLGVYPGHRPGLSRHCSCRQGYREPCGVPNGGYYRPEGTLERRRLAYGGYEGSPQGYAEASMEKRRLCRSLSEGLYPYPPEMGKPATGDFGYRAPGYREVVILEDPGLPALYPCPACEEKLALPTAALYGLRLEREAGEGWASEAGKPLLHPVRPGHPLPLLLPACGHHHAPMPDYSCLKPPKAGEEGHEGCSYTMCPEGRYGHPGYPALVTYSYGGAVPSYCPAYGRVPHSCGSPGEGRGYPSPGAHSPRAGSISPGSPPYPQSRKLSYEIPTEEGGDRYPLPGHLASAGPLASAESLEPVSWREGPSGHSTLPRSPRDAPCSASSELSGPSTPLHTSSPVQGKESTRRQDTRSPTSAPTQRLSPGEALPPVSQAGTGKAPELPSGSGPEPLAPSPVSPTFPPSSPSDWPQERSPGGHSDGASPRSPVPTTLPGLRHAPWQGPRGPPDSPDGSPLTPVPSQMPWLVASPEPPQSSPTPAFPLAASYDTNGLSQPPLPEKRHLPGPGQQPGPWGPEQASSPARGISHHVTFAPLLSDNVPQTPEPPTQESQSNVKFVQDTSKFWYKPHLSRDQAIALLKDKDPGAFLIRDSHSFQGAYGLALKVATPPPSAQPWKGDPVEQLVRHFLIETGPKGVKIKGCPSEPYFGSLSALVSQHSISPISLPCCLRIPSKDPLEETPEAPVPTNMSTAADLLRQGAACSVLYLTSVETESLTGPQAVARASSAALSCSPRPTPAVVHFKVSAQGITLTDNQRKLFFRRHYPVNSITFSSTDPQDRRWTNPDGTTSKIFGFVAKKPGSPWENVCHLFAELDPDQPAGAIVTFITKVLLGQRK

SEQ ID NO: 4853 - protein, 436 aa, Homo sapiens
MDSVAFEDVAVNFTQEEWALLSPSQKNLYRDVTLETFRNLASVGIQWKDQDIENLYQNLGIKLRSLVERLCGRKEGNEHRETFSQIPDCHLNKKSQTGVKPCKCSVCGKVFLRHSFLDRHMRAHAGHKRSECGGEWRETPRKQKQHGKASISPSSGARRTVTPTRKRPYECKVCGKAFNSPNLFQIHQRTHTGKRSYKCREIVRAFTVSSFFRKHGKMHTGEKRYECKYCGKPIDYPSLFQIHVRTHTGEKPYKCKQCGKAFISAGYLRTHEIRSHALEKSHQCQECGKKLSCSSSLHRHERTHSGGKLYECQKCAKVFRCPTSLQAHERAHTGERPYECNKCGKTFNYPSCFRRHKKTHSGEKPYECTRCGKAFGWCSSLRRHEMTHTGEKPFDCKQCGKVFTFSNYLRLHERTHLAGRSQCFGRRQGDHLSPGV

SEQ ID NO: 4854 - protein, 464 aa, Homo sapiens
MDGTEGSAGQPGPAERSHRSSVSSVGARAADVLVYLADDTVVPLAVENLPSLSAHELHRAVREVLQLPDIALDVFALWLVSPLLEVQLKPKHQPYKLGRQWPELLLRFTSAPDDDVAMDEPFLQFRRNVFFPKRRELQIHDEEVLRLLYEEAKGNVLAARYPCDVEDCEALGALVCRVQLGPYQPGRPAACDLREKLDSFLPAHLCKRGQSLFAALRGRGARAGPGEQGLLNAYRQVQEVSSDGGCEAALGTHYRAYLLKCHELPFYGCAFFHGEVDKPAQGFLHRGGRKPVSVAISLEGVHVIDSREKHVLLGLRFQELSWDHTSPEEEEPILWLEFDGDSEGTPVNKLLKIYSKQAELMSSLIEYCIELSQAAEPAGPQDSATGSPSDPSSSLAPVQRPKLRRQGSVVSSRIQHLSTIDYVEDGKGIRRVKPKRTTSFFSRQLSLGQGSYTVVQPGDSLEQG

SEQ ID NO: 4855 - protein, 335 aa, Homo sapiens
MRLGPRTAALGLLLLCAAAAGAGKAEELHYPLGERRSDYDREALLGVQEDVDEYVKLGHEEQQKRLQAIIKKIDLDSDGFLTESELSSWIQMSFKHYAMQEAKQQFVEYDKNSDDTVTWDEYNIQMYDRVIDFDENTALDDAEEESFRKEFAICKKQSFCFWLLRFNLHLKDKKRFEKANQDSGPGLSLEEFIAFEHPEEVDYMTEFVIQEALEEHDKNGDGFVSLEEFLGDYRWDPTANEDPEWILVEKDRFVNDYDKDNDGRLDPQELLPWVVPNNQGIAQEEALHLIDEMDLNGDKKLSEEEILENPDLFLTSEATDYGRQLHDDYFYHDEL

SEQ ID NO: 4856 - protein, 1419 aa, Homo sapiens
MDGGGVCVGRGDLLSSPQALGQLLRKESRPRRAMKPRKAEPHSFREKVFRKKPPVCAVCKVTIDGTGVSCRVCKVATHRKCEAKVTSACQALPPVELRRNTAPVRRIEHLGSTKSLNHSKQRSTLPRSFSLDPLMERRWDLDLTYVTERILAAAFPARPDEQRHRGHLRELAHVLQSKHRDKYLLFNLSEKRHDLTRLNPKVQDFGWPELHAPPLDKLCSICKAMETWLSADPQHVVVLYCKGNKGKLGVIVSAYMHYSKISAGADQALATLTMRKFCEDKVATELQPSQRRYISYFSGLLSGSIRMNSSPLFLHYVLIPMLPAFEPGTGFQPFLKIYQSMQLVYTSGVYHIAGPGPQQLCISLEPALLLKGDVMVTCYHKGGRGTDRTLVFRVQFHTCTIHGPQLTFPKDQLDEAWTDERFPFQASVEFVFSSSPEKIKGSTPRNDPSVSVDYNTTEPAVRWDSYENFNQHHEDSVDGSLTHTRGPLDGSPYAQVQRPPRQTPPAPSPEPPPPPMLSVSSDSGHSSTLTTEPAAESPGRPPPTAAERQELDRLLGGCGVASGGRGAGRETAILDDEEQPTVGGGPHLGVYPGHRPGLSRHCSCRQGYREPCGVPNGGYYRPEGTLERRRLAYGGYEGSPQGYAEASMEKRRLCRSLSEGLYPYPPEMGKPATGDFGYRAPGYREVVILEDPGLPALYPCPACEEKLALPTAALYGLRLEREAGEGWASEAGKPLLHPVRPGHPLPLLLPACGHHHAPMPDYSCLKPPKAGEEGHEGCSYTMCPEGRYGHPGYPALVTYSYGGAVPSYCPAYGRVPHSCGSPGEGRGYPSPGAHSPRAGSISPGSPPYPQSRKLSYEIPTEEGGDRYPLPGHLASAGPLASAESLEPVSWREGPSGHSTLPRSPRDAPCSASSELSGPSTPLHTSSPVQGKESTRRQDTRSPTSAPTQRLSPGEALPPVSQAGTGKAPELPSGSGPEPLAPSPVSPTFPPSSPSDWPQERSPGGHSDGASPRSPVPTTLPGLRHAPWQGPRGPPDSPDGSPLTPVPSQMPWLVASPEPPQSSPTPAFPLAASYDTNGLSQPPLPEKRHLPGPGQQPGPWGPEQASSPARGISHHVTFAPLLSDNVPQTPEPPTQESQSNVKFVQDTSKFWYKPHLSRDQAIALLKDKDPGAFLIRDSHSFQGAYGLALKVATPPPSAQPWKGDPVEQLVRHFLIETGPKGVKIKGCPSEPYFGSLSALVSQHSISPISLPCCLRIPSKDPLEETPEAPVPTNMSTAADLLRQGAACSVLYLTSVETESLTGPQAVARASSAALSCSPRPTPAVVHFKVSAQGITLTDNQRKLFFRRHYPVNSITFSSTDPQDRRWTNPDGTTSKIFGFVAKKPGSPWENVCHLFAELDPDQPAGAIVTFITKVLLGQRK

SEQ ID NO: 4857 - protein, 1560 aa, Homo sapiens
MAAGSGGSGGSGGGPGPGPGGGGGPSGSGSGPGSNGGLGSGGELHPRTGRLVSLSACGRTARRQQPGQEFNHGLVLSREPLRDGRVFTVRIDRKVNSWSGSIEIGVTALDPSVLDFPSSATGLKGGSWVVSGCSVLRDGRSVLEEYGQDLDQLGEGDRVGVERTVAGELRLWVNGRDCGVAATGLPPRVWAVVDLYGKCTQITVLPPEPGFSPPTPIPTPPLEPLAPTEDSALAEQGTSADEAFMVSPAQARPETFPNSLESHNDFANMELSEVVSNTILSAYNGGLLNVNLSSPPAGEGLGSSGAATSPILTSNDALLFHEKCGTLIKLSNNNKTAERRRPLDEFNNGVVMTNRPLRDNEMFEIRIDKLVDKWSGSIEIGVTTHNPNSLEYPATMTNLQSGTIMMSGCGILTNGKGTRREYCEFSLDELQEGDHIGLTRKSNSALHFFINGIDQGVATPLTPPVVYGVVDLYGMAVKVTIVHNNNHSDRLRRNNAILRALSPEGALRRAAPAAQAEPERLLFHPNCGQKAAITHEGRTALRPHATDDFNHGVVLSSRALRDGEVFQVRIDKMVDKWAGSIEIGVTTHNPAYLQLPSTMTNLRSGTWMMTGNGVMHNGTTILDEYGHNLDRLKAGDTVGVVRREDGTLHFFVNGMTQGPAAWNVPPGVYAVVDLYGQAAQATIVDDVEVAPVPEPLPEGNNQVSPSSPSSGAGGSDLRFHQLHGSNAVITNGGRTALRHNCRSEFNDAIVISNRALRDGELFEIVIQKMVDRWSGSIEAGVTAIRPEDLEFPNTMTDIDYDTWMLSGTAIMQDGNTMRNNYGCDLDALGTGARIGMMRTAKGDLHYFINGQDQGAACSGLPPEVYAVVDLYGQCVQVSITNATGPMDNSLATSNTATEKSFPLHSPVAGVAHRFHSTCGKNVTLEEDGTRAVRAAGYAHGLVFSTKELRAEEVFEVKVEELDEKWAGSLRLGLTTLAPGEMGPGAGGGGPGLPPSLPELRTKTTWMVSSCEVRRDGQLQRMNYGRNLERLGVGSRVGVRRGADDTMHILVDGEDMGPAATGIAKNVWAVLDLYGPVRGVSIVSSTRLEESEGTQPPSPSSDTGSEGEEDDEGEEHGLGGQNEVGIIPTTLEFLENHGKNILLSNGNRTATRVASYNQGIVVINQPLVPQLLVQVRIDFLNRQWTSSLVLGVITCAPERLNFPASACALKRAAWLLRGRGVFHNGLKICEKFGPNLDTCPEGTILGLRLDSSGGLHLHVNGVDQGVAVPDVPQPCHALVDLYGQCEQVTIVNPEPGAASGKSAGTQGDMEKADMVDGIKESVCWGPPPAASPLKSCEYHALCSRFQELLLLPEDYFMPPPKRSLCYCESCRKLRGDEAHRRRGEPPREYALPFGWCRFNLRVNPRLEAGTLTKKWHMAYHGSNVAAVRRVLDRGELGAGTASILSCRPLKGEPGVGFEEPGENCAPPREEQPPPVLLSPSLQYAGAETLASKVQFRDPKSQRTHQAQVAFQVCVRPGSYTPGPPSAALGEPPDPHFSPAELEWVTKEKGATLLCALLVRVE

SEQ ID NO: 4858 - protein, 1237 aa, Homo sapiens
MGDMKTPDFDDLLAAFDIPDIDANEAIHSGPEENEGPGGPGKPEPGVGSESEDTAAASAGDGPGVPAQASDHGLPPPDISVVSVIVKNTVCPEQSEALAGGSAGDGAQAAGVTKEGPVGPHRMQNGFGSPEPSLPGTPHSPAPPSGGTWKEKGMEGKTPLDLFAHFGPEPGDHSDPLPPSAPSPTREGALTPPPFPSSFELAQENGPGMQPPVSSPPLGALKQESCSPHHPQVLAQQGSGSSPKATDIPASASPPPVAGVPFFKQSPGHQSPLASPKVPVCQPLKEEDDDEGPVDKSSPGSPQSPSSGAEAADEDSNDSPASSSSRPLKVRIKTIKTSCGNITRTVTQVPSDPDPPAPLAEGAFLAEASLLKLSPATPTSEGPKVVSVQLGDGTRLKGTVLPVATIQNASTAMLMAASVARKAVVLPGGTATSPKMIAKNVLGLVPQALPKADGRAGLGTGGQKVNGASVVMVQPSKTATGPSTGGGTVISRTQSSLVEAFNKILNSKNLLPAYRPNLSPPAEAGLALPPTGYRCLECGDAFSLEKSLARHYDRRSMRIEVTCNHCARRLVFFNKCSLLLHAREHKDKGLVMQCSHLVMRPVALDQMVGQPDITPLLPVAVPPVSGPLALPALGKGEGAITSSAITTVAAEAPVLPLSTEPPAAPATSAYTCFRCLECKEQCRDKAGMAAHFQQLGPPAPGATSNVCPTCPMMLPNRCSFSAHQRMHKNRPPHVCPECGGNFLQANFQTHLREACLHVSRRVGYRCPSCSVVFGGVNSIKSHIQTSHCEVFHKCPICPMAFKSGPSAHAHLYSQHPSFQTQQAKLIYKCAMCDTVFTHKPLLSSHFDQHLLPQRVSVFKCPSCPLLFAQKRTMLEHLKNTHQSGRLEETAGKGAGGALLTPKTEPEELAVSQGGAAPATEESSSSSEEEEVPSSPEPPRPAKRPRRELGSKGLKGGGGGPGGWTCGLCHSWFPERDEYVAHMKKEHGKSVKKFPCRLCERSFCSAPSLRRHVRVNHEGIKRVYPCRYCTEGKRTFSSRLILEKHVQVRHGLQLGAQSPGRGTTLARGSSARAQGPGRKRRQSSDSCSEEPDSTTPPAKSPRGGPGSGGHGPLRYRSSSSTEQSLMMGLRVEDGAQQCLDCGLCFASPGSLSRHRFISHKKRRGVGKASALGLGDGEEEAPPSRSDPDGGDSPLPASGGPLTCKVCGKSCDSPLNLKTHFRTHGMAFIRARQGAVGDN

SEQ ID NO: 4859 - protein, 631 aa, Homo sapiens
MALRKELLKSIWYAFTALDVEKSGKVSKSQLKVLSHNLYTVLHIPHDPVALEEHFRDDDDGPVSSQGYMPYLNKYILDKVEEGAFVKEHFDELCWTLTAKKNYRADSNGNSMLSNQDAFRLWCLFNFLSEDKYPLIMVPDEVEYLLKKVLSSMSLEVSLGELEELLAQEAQVAQTTGGLSVWQFLELFNSGRCLRGVGRDTLSMAIHEVYQELIQDVLKQGYLWKRGHLRRNWAERWFQLQPSCLCYFGSEECKEKRGIIPLDAHCCVEVLPDRDGKRCMFCVKTANRTYEMSASDTRQRQEWTAAIQMAIRLQAEGKTSLHKDLKQKRREQREQRERRRAAKEEELLRLQQLQEEKERKLQELELLQEAQRQAERLLQEEEERRRSQHRELQQALEGQLREAEQARASMQAEMELKEEEAARQRQRIKELEEMQQRLQEALQLEVKARRDEESVRIAQTRLLEEEEEKLKQLMQLKEEQERYIERAQQEKEELQQEMAQQSRSLQQAQQQLEEVRQNRQRADEDVEAAQRKLRQASTNVKHWNVQMNRLMHPIEPGDKRPVTSSSFSGFQPPLLAHRDSSLKRLTRWGSQGNRTPSPNSNEQQKSLNGGDEAPAPASTPQEDKLDPAPEN

SEQ ID NO: 4860 - protein, 594 aa, Homo sapiens
MWCLLRGLGRPGALARGALGQQQSLGARALASAGSESRDEYSYVVVGAGSAGCVLAGRLTEDPAERVLLLEAGPKDVLAGSKRLSWKIHMPAALVANLCDDRYNWCYHTEVQRGLDGRVLYWPRGRVWGGSSSLNAMVYVRGHAEDYERWQRQGARGWDYAHCLPYFRKAQGHELGASRYRGADGPLRVSRGKTNHPLHCAFLEATQQAGYPLTEDMNGFQQEGFGWMDMTIHEGKRWSAACAYLHPALSRTNLKAEAETLVSRVLFEGTRAVGVEYVKNGQSHRAYASKEVILSGGAINSPQLLMLSGIGNADDLKKLGIPVVCHLPGVGQNLQDHLEIYIQQACTRPITLHSAQKPLRKVCIGLEWLWKFTGEGATAHLETGGFIRSQPGVPHPDIQFHFLPSQVIDHGRVPTQQEAYQVHVGPMRGTSVGWLKLRSANPQDHPVIQPNYLSTETDIEDFRLCVKLTREIFAQEALAPFRGKELQPGSHIQSDKEIDAFVRAKADSAYHPSCTCKMGQPSDPTAVVDPQTRVLGVENLRVVDASIMPSMVSGNLNAPTIMIAEKAADIIKGQPALWDKDVPVYKPRTLATQR

SEQ ID NO: 4861 - protein, 454 aa, Homo sapiens
MPQLSLSWLGLGPVAASPWLLLLLVGGSWLLARVLAWTYTFYDNCRRLQCFPQPPKQNWFWGHQGLVTPTEEGMKTLTQLVTTYPQGFKLWLGPTFPLLILCHPDIIRPITSASAAVAPKDMIFYGFLKPWLGDGLLLSGGDKWSRHRRMLTPAFHFNILKPYMKIFNKSVNIMHDKWQRLASEGSARLDMFEHISLMTLDSLQKCVFSFESNCQEKPSEYIAAILELSAFVEKRNQQILLHTDFLYYLTPDGQRFRRACHLVHDFTDAVIQERRCTLPTQGIDDFLKNKAKSKTLDFIDVLLLSKDEDGKELSDEDIRAEADTFMFEGHDTTASGLSWVLYHLAKHPEYQEQCRQEVQELLKDREPIEIEWDDLAQLPFLTMCIKESLRLHPPVPVISRCCTQDFVLPDGRVIPKGLRPLPFRPREHQGEVTSGFYSLLGRAQKLHRAGVRHG

SEQ ID NO: 4862 - protein, 558 aa, Homo sapiens
MGKIENNERVILNVGGTRHETYRSTLKTLPGTRLALLASSEPPGDCLTTAGDKLQPSPPPLSPPPRAPPLSPGPGGCFEGGAGNCSSRGGRASDHPGGGREFFFDRHPGVFAYVLNYYRTGKLHCPADVCGPLFEEELAFWGIDETDVEPCCWMTYRQHRDAEEALDIFETPDLIGGDPGDDEDLAAKRLGIEDAAGLGGPDGKSGRWRRLQPRMWALFEDPYSSRAARFIAFASLFFILVSITTFCLETHEAFNIVKNKTEPVINGTSVVLQYEIETDPALTYVEGVCVVWFTFEFLVRIVFSPNKLEFIKNLLNIIDFVAILPFYLEVGLSGLSSKAAKDVLGFLRVVRFVRILRIFKLTRHFVGLRVLGHTLRASTNEFLLLIIFLALGVLIFATMIYYAERVGAQPNDPSASEHTQFKNIPIGFWWAVVTMTTLGYGDMYPQTWSGMLVGALCALAGVLTIAMPVPVIVNNFGMYYSLAMAKQKLPRKRKKHIPPAPQASSPTFCKTELNMACNSTQSDTCLGKDNRLLEHNRSDNCKEVVITGYTQAEARSLT

SEQ ID NO: 4863 - protein, 823 aa, Homo sapiens
MGGRVFLVFLAFCVWLTLPGAETQDSRGCARWCPQDSSCVNATACRCNPGFSSFSEIITTPMETCDDINECATLSKVSCGKFSDCWNTEGSYDCVCSPGYEPVSGAKTFKNESENTCQDVDECQQNPRLCKSYGTCVNTLGSYTCQCLPGFKLKPEDPKLCTDVNECTSGQNPCHSSTHCLNNVGSYQCRCRPGWQPIPGSPNGPNNTVCEDVDECSSGQHQCDSSTVCFNTVGSYSCRCRPGWKPRHGIPNNQKDTVCEDMTFSTWTPPPGVHSQTLSRFFDKVQDLGRDYKPGLANNTIQSILQALDELLEAPGDLETLPRLQQHCVASHLLDGLEDVLRGLSKNLSNGLLNFSYPAGTELSLEVQKQVDRSVTLRQNQAVMQLDWNQAQKSGDPGPSVVGLVSIPGMGKLLAEAPLVLEPEKQMLLHETHQGLLQDGSPILLSDVISAFLSNNDTQNLSSPVTFTFSHRSVIPRQKVLCVFWEHGQNGCGHWATTGCSTIGTRDTSTICRCTHLSSFAVLMAHYDVQEEDPVLTVITYMGLSVSLLCLLLAALTFLLCKAIQNTSTSLHLQLSLCLFLAHLLFLVAIDQTGHKVLCSIIAGTLHYLYLATLTWMLLEALYLFLTARNLTVVNYSSINRFMKKLMFPVGYGVPAVTVAISAASRPHLYGTPSRCWLQPEKGFIWGFLGPVCAIFSVNLVLFLVTLWILKNRLSSLNSEVSTLRNTRMLAFKATAQLFILGCTWCLGILQVGPAARVMAYLFTIINSLQGVFIFLVYCLLSQQVREQYGKWSKGIRKLKTESEMHTLSSSAKADTSKPSTVN

SEQ ID NO: 4864 - protein, 459 aa, Homo sapiens
MSAGWFRRRFLPGEPLPAPRPPGPHASPVPYRRPRFLRGSSSSPGAADASRRPDSRPVRSPARGRTLPWNAGYAEIINAEKSEFNEDQAACGKLCIRRCEFGAEEEWLTLCPEEFLTGHYWALFDGHGGPAAAILAANTLHSCLRRQLEAVVEGLVATQPPMHLNGRCICPSDPQFVEEKGIRAEDLVIGALESAFQECDEVIGRELEASGQMGGCTALVAVSLQGKLYMANAGDSRAILVRRDEIRPLSFEFTPETERQRIQQLAFVYPELLAGEFTRLEFPRRLKGDDLGQKVLFRDHHMSGWSYKRVEKSDLKYPLIHGQGRQARLLGTLAVSRGLGDHQLRVLDTNIQLKPFLLSVPQVTVLDVDQLELQEDDVVVMATDGLWDVLSNEQVAWLVRSFLPGNQEDPHRFSKLAQMLIHSTQGKEDSLTEEGQVSYDDVSVFVIPLHSQGQESSDH

SEQ ID NO: 4865 - protein, 612 aa, Homo sapiens
MAAAGRLPSSWALFSPLLAGLALLGVGPVPARALHNVTAELFGAEAWGTLAAFGDLNSDKQTDLFVLRERNDLIVFLADQNAPYFKPKVKVSFKNHSALITSVVPGDYDGDSQMDVLLTYLPKNYAKSELGAVIFWGQNQTLDPNNMTILNRTFQDEPLIMDFNGDLIPDIFGITNESNQPQILLGGNLSWHPALTTTSKMRIPHSHAFIDLTEDFTADLFLTTLNATTSTFQFEIWENLDGNFSVSTILEKPQNMMVVGQSAFADFDGDGHMDHLLPGCEDKNCQKSTIYLVRSGMKQWVPVLQDFSNKGTLWGFVPFVDEQQPTEIPIPITLHIGDYNMDGYPDALVILKNTSGSNQQAFLLENVPCNNASCEEARRMFKVYWELTDLNQIKDAMVATFFDIYEDGILDIVVLSKGYTKNDFAIHTLKNNFEADAYFVKVIVLSGLCSNDCPRKITPFGVNQPGPYIMYTTVDANGYLKNGSAGQLSQSAHLALQLPYNVLGLGRSANFLDHLYVGIPRPSGEKSIRKQEWTAIIPNSQLIVIPYPHNVPRSWSAKLYLTPSNIVLLTAIALIGVCVFILAIIGILHWQEKKADDREKRQEAHRFHFDAM

SEQ ID NO: 4866 - protein, 1031 aa, Homo sapiens
MSVLISQSVINYVEEENIPALKALLEKCKDVDERNECGQTPLMIAAEQGNLEIVKELIKNGANCNLEDLDNWTALISASKEGHVHIVEELLKCGVNLEHRDMGGWTALMWACYKGRTDVVELLLSHGANPSVTGLQYSVYPIIWAAGRGHADIVHLLLQNGAKVNCSDKYGTTPLVWAARKGHLECVKHLLAMGADVDQEGANSMTALIVAVKGGYTQSVKEILKRNPNVNLTDKDGNTALMIASKEGHTEIVQDLLDAGTYVNIPDRSGDTVLIGAVRGGHVEIVRALLQKYADIDIRGQDNKTALYWAVEKGNATMVRDILQCNPDTEICTKDGETPLIKATKMRNIEVVELLLDKGAKVSAVDKKGDTPLHIAIRGRSRKLAELLLRNPKDGRLLYRPNKAGETPYNIDCSHQKSILTQIFGARHLSPTETDGDMLGYDLYSSALADILSEPTMQPPICVGLYAQWGSGKSFLLKKLEDEMKTFAGQQIEPLFQFSWLIVFLTLLLCGGLGLLFAFTVHPNLGIAVSLSFLALLYIFFIVIYFGGRREGESWNWAWVLSTRLARHIGYLELLLKLMFVNPPELPEQTTKALPVRFLFTDYNRLSSVGGETSLAEMIATLSDACEREFGFLATRLFRVFKTEDTQGKKKWKKTCCLPSFVIFLFIIGCIISGITLLAIFRVDPKHLTVNAVLISIASVVGLAFVLNCRTWWQVLDSLLNSQRKRLHNAASKLHKLKSEGFMKVLKCEVELMARMAKTIDSFTQNQTRLVVIIDGLDACEQDKVLQMLDTVRVLFSKGPFIAIFASDPHIIIKAINQNLNSVLRDSNINGHDYMRNIVHLPVFLNSRGLSNARKFLVTSATNGDVPCSDTTGIQEDADRRVSQNSLGEMTKLGSKTALNRRDTYRRRQMQRTITRQMSFDLTKLLVTEDWFSDISPQTMRRLLNIVSVTGRLLRANQISFNWDRLASWINLTEQWPYRTSWLILYLEETEGIPDQMTLKTIYERCCGADSCDRDRIGISKSVLVAMLMES

SEQ ID NO: 4867 - protein, 597 aa, Homo sapiens
MTPIVTVLICLGLSLGPRTRVQTGTIPKPTLWAEPDSVITQGSPVTLSCQGSLEAQEYRLYREKKSASWITRIRPELVKNGQFHIPSITWEHTGRYGCQYYSRARWSELSDPLVLVMTGAYPKPTLSAQPSPVVTSGGRVTLQCESQVAFGGFILCKEGEDEHPQCLNSQPHARGSSRAIFSVGPVSPNRRWSHRCYGYDLNSPYVWSSPSDLLELLVPGVSKKPSLSVQPGPVMAPGESLTLQCVSDVGYDRFVLYKEGERDLRQLPGRQPQAGLSQANFTLGPVSRSYGGQYRCYGAHNLSSECSAPSDPLDILITGQIRGTPFISVQPGPTVASGENVTLLCQSWRQFHTFLLTKAGAADAPLRLRSIHEYPKYQAEFPMSPVTSAHAGTYRCYGSLNSDPYLLSHPSEPLELVVSGPSMGSSPPPTGPISTPGPEDQPLTPTGSDPQSGLGRHLGVVIGILVAVVLLLLLLLLLFLILRHRRQGKHWTSTQRKADFQHPAGAVGPEPTDRGLQWRSSPAADAQEENLYAAVKDTQPEDGVEMDTRAAASEAPQDVTYAQLHSLTLRRKATEPPPSQEREPPAEPSIYATLAIH

SEQ ID NO: 4868 - protein, 941 aa, Homo sapiens
MKGSNRNKDHSAEGEGVGKRPKRKCLQWHPLLAKKLLDFSEEEEEEDEEEDIDKVQLLGADGLEQDVGETEDDESPEQRARRPMNAFLLFCKRHRSLVRQEHPRLDNRGATKILADWWAVLDPKEKQKYTDMAKEYKDAFMKANPGYKWCPTTNKPVKSPTPTVNPRKKLWAFPSDSSRDLPSPKKAKTEEMPQLNFGMADPTQMGGLSMLLLAGEHALGTPEVSSGTCRPDVSESPELRQKSPLFQFAEISSSTSHSDASTKQCQTSALFQFAEISSNTSQLGGAEPVKRCGKSALFQLAEMCLASEGMKMEESKLIKAKESDGGRIKELEKGKEEKEIKMEKTDETRLQKEAEFEKSAKENLRDSKELRNFEALQIDDIMAIKMEDPKEIRKEELEEDHKCSHFPDFSYSASSKIIISDVPSRKDHMCHPHGIMIIEDPAALNKPEKLKKKKKKSKMDRHGNDKSTPKKTCKKRQSSESDIESVIYTIEAVAKGDWGIEKLGDTPRKKVRTSSSGKGSILDAKPPKKKVKSREKKMSKEKSSDTTKESRPPDFISISASKNISGETPEGIKAEPLTPMEDALPPSLSGQAKPEDSDCHRKIETCGSRKSERSCKGALYKTLVSEGMLTSLRANVDRGKRSSGKGNSSDHEGCWNEESWTFSQSGTSGSKKFKKTKPKEDCLLGSAKLDEEFEKKFNSLPQYSPVTFDRKCVPVPRKKKKTGNVSSEPTKTSKGPFQSQKKNLFHKIVSKYKHKKEKPNVPEKGSGDKWSNKQLFLDAIHPTEAIFSEDRNTMEPVHKVKNIPSIFNTPEPTTTQEPLVGSQKRKARKTKITHLVRTADGRVSPAGGTLDDKPKEQLQRSLPKATETDCNDKCSHNTEVGETRSSTPEMPAVSAFFSLAALAEVAAMENVHRGQRSTPLTHDGQPKEMPQAPVLISCADQ

SEQ ID NO: 4869 - protein, 394 aa, Homo sapiens
MSREMQDVDLAEVKPLVEKGETITGLLQEFDVQEQDIETLHGSVHVTLCGTPKGNRPVILTYHDIGMNHKTCYNPLFNYEDMQEITQHFAVCHVDAPGQQDGAASFPAGYMYPSMDQLAEMLPGVLQQFGLKSIIGMGTGAGAYILTRFALNNPEMVEGLVLINVNPCAEGWMDWAASKISGWTQALPDMVVSHLFGKEEMQSNVEVVHTYRQHIVNDMNPGNLHLFINAYNSRRDLEIERPMPGTHTVTLQCPALLVVGDSSPAVDAVVECNSKLDPTKTTLLKMADCGGLPQISQPAKLAEAFKYFVQGMGYMPSASMTRLMRSRTASGSSVTSLDGTRSRSHTSEGTRSRSHTSEGTRSRSHTSEGAHLDITPNSGAAGNSAGPKSMEVSC

SEQ ID NO: 4870 - protein, 466 aa, Homo sapiens
MNNSTNSSNNSLALTSPYKTFEVVFIVLVAGSLSLVTIIGNILVMVSIKVNRHLQTVNNYFLFSLACADLIIGVFSMNLYTLYTVIGYWPLGPVVCDLWLALDYVVSNASVMNLLIISFDRYFCVTKPLTYPVKRTTKMAGMMIAAAWVLSFILWAPAILFWQFIVGVRTVEDGECYIQFFSNAAVTFGTAIAAFYLPVIIMTVLYWHISRASKSRIKKDKKEPVANQDPVSPSLVQGRIVKPNNNNMPSSDDGLEHNKIQNGKAPRDPVTENCVQGEEKESSNDSTSVSAVASNMRDDEITQDENTVSTSLGHSKDENSKQTCIRIGTKTPKSDSCTPTNTTVEVVGSSGQNGDEKQNIVARKIVKMTKQPAKKKPPPSREKKVTRTILAILLAFIITWAPYNVMVLINTFCAPCIPNTVWTIGYWLCYINSTINPACYALCNATFKKTFKHLLMCHYKNIGATR

SEQ ID NO: 4871 - protein, 255 aa, Homo sapiens
MFHQVRRVMTILFLTMVISYFGCMKAAPMKEANIRGQGGLAYPGVRTHGTLESVNGPKAGSRGLTSLADTFEHVIEELLDEDQKVRPNEENNKDADLYTSRVMLSSQVPLEPPLLFLLEEYKNYLDAANMSMRVRRHSDPARRGELSVCDSISEWVTAADKKTAVDMSGGTVTVLEKVPVSKGQLKQYFYETKCNPMGYTKEGCRGIDKRHWNSQCRTTQSYVRALTMDSKKRIGWRFIRIDTSCVCTLTIKRGR

SEQ ID NO: 4872 - protein, 2070 aa, Homo sapiens
MLEAIDKNRALHAAERLQTKLRERGDVANEDKLSLLKSVLQSPLFSQILSLQTSVQQLKDQVNIATSATSNIEYAHVPHLSPAVIPTLQNESFLLSPNNGNLEALTGPGIPHINGKPACDEFDQLIKNMAQGRHVEVFELLKPPSGGLGFSVVGLRSENRGELGIFVQEIQEGSVAHRDGRLKETDQILAINGQALDQTITHQQAISILQKAKDTVQLVIARGSLPQLVSPIVSRSPSAASTISAHSNPVHWQHMETIELVNDGSGLGFGIIGGKATGVIVKTILPGGVADQHGRLCSGDHILKIGDTDLAGMSSEQVAQVLRQCGNRVKLMIARGAIEERTAPTALGITLSSSPTSTPELRVDASTQKGEESETFDVELTKNVQGLGITIAGYIGDKKLEPSGIFVKSITKSSAVEHDGRIQIGDQIIAVDGTNLQGFTNQQAVEVLRHTGQTVLLTLMRRGMKQEAELMSREDVTKDADLSPVNASIIKENYEKDEDFLSSTRNTNILPTEEEGYPLLSAEIEEIEDAQKQEAALLTKWQRIMGINYEIVVAHVSKFSENSGLGISLEATVGHHFIRSVLPEGPVGHSGKLFSGDELLEVNGITLLGENHQDVVNILKELPIEVTMVCCRRTVPPTTQSELDSLDLCDIELTEKPHVDLGEFIGSSETEDPVLAMTDAGQSTEEVQAPLAMWEAGIQHIELEKGSKGLGFSILDYQDPIDPASTVIIIRSLVPGGIAEKDGRLLPGDRLMFVNDVNLENSSLEEAVEALKGAPSGTVRIGVAKPLPLSPEEGYVSAKEDSFLYPPHSCEEAGLADKPLFRADLALVGTNDADLVDESTFESPYSPENDSIYSTQASILSLHGSSCGDGLNYGSSLPSSPPKDVIENSCDPVLDLHMSLEELYTQNLLQRQDENTPSVDISMGPASGFTINDYTPANAIEQQYECENTIVWTESHLPSEVISSAELPSVLPDSAGKGSEYLLEQSSLACNAECVMLQNVSKESFERTINIAKGNSSLGMTVSANKDGLGMIVRSIIHGGAISRDGRIAIGDCILSINEESTISVTNAQARAMLRRHSLIGPDIKITYVPAEHLEEFKISLGQQSGRVMALDIFSSYTGRDIPELPEREEGEGEESELQNTAYSNWNQPRRVELWREPSKSLGISIVGGRGMGSRLSNGEVMRGIFIKHVLEDSPAGKNGTLKPGDRIVEVDGMDLRDASHEQAVEAIRKAGNPVVFMVQSIINRPRKSPLPSLLHNLYPKYNFSSTNPFADSLQINADKAPSQSESEPEKAPLCSVPPPPPSAFAEMGSDHTQSSASKISQDVDKEDEFGYSWKNIRERYGTLTGELHMIELEKGHSGLGLSLAGNKDRSRMSVFIVGIDPNGAAGKDGRLQIADELLEINGQILYGRSHQNASSIIKCAPSKVKIIFIRNKDAVNQMAVCPGNAVEPLPSNSENLQNKETEPTVTTSDAAVDLSSFKNVQHLELPKDQGGLGIAISEEDTLSGVIIKSLTEHGVAATDGRLKVGDQILAVDDEIVVGYPIEKFISLLKTAKMTVKLTIHAENPDSQAVPSAAGAASGEKKNSSQSLMVPQSGSPEPESIRNTSRSSTPAIFASDPATCPIIPGCETTIEISKGRTGLGLSIVGGSDTLLGAIIIHEVYEEGAACKDGRLWAGDQILEVNGIDLRKATHDEAINVLRQTPQRVRLTLYRDEAPYKEEEVCDTLTIELQKKPGKGLGLSIVGKRNDTGVFVSDIVKGGIADADGRLMQGDQILMVNGEDVRNATQEAVAALLKCSLGTVTLEVGRIKAGPFHSERRPSQSSQVSEGSLSSFTFPLSGSSTSESLESSSKKNALASEIQGLRTVEMKKGPTDSLGISIAGGVGSPLGDVPIFIAMMHPTGVAAQTQKLRVGDRIVTICGTSTEGMTHTQAVNLLKNASGSIEMQVVAGGDVSVVTGHQQEPASSSLSFTGLTSSSIFQDDLGPPQCKSITLERGPDGLGFSIVGGYGSPHGDLPIYVKTVFAKGAASEDGRLKRGDQIIAVNGQSLEGVTHEEAVAILKRTKGTVTLMVLS

SEQ ID NO: 4873 - protein, 660 aa, Homo sapiens
MVQRDMSKSPPTAAAAVAQEIQMELLENVAPAGALGAAAQSYGKGARRKNRFKGSDGSTSSDTTSNSFVRQGSADSYTSRPSDSDVSLEEDREAVRREAERQAQAQLEKAKTKPVAFAVRTNVSYSAAHEDDVPVPGMAISFEAKDFLHVKEKFNNDWWIGRLVKEGCEIGFIPSPVKLENMRLQHEQRAKQGKFYSSKSGGNSSSSLGDIVPSSRKSTPPSSAIDIDATGLDAEENDIPANHRSPKPSANSVTSPHSKEKRMPFFKKTEHTPPYDVVPSMRPVVLVGPSLKGYEVTDMMQKALFDFLKHRFEGRISITRVTADISLAKRSVLNNPSKHAIIERSNTRSSLAEVQSEIERIFELARTLQLVVLDADTINHPAQLSKTSLAPIIVYVKISSPKVLQRLIKSRGKSQAKHLNVQMVAADKLAQCPPELFDVILDENQLEDACEHLADYLEAYWKATHPPSSSLPNPLLSRTLATSSLPLSPTLASNSQGSQGDQRTDRSAPIRSASQAEEEPSVEPVKKSQHRSSSSAPHHNHRSGTSRGLSRQETFDSETQESRDSAYVEPKEDYSHDHVDHYASHRDHNHRDETHGSSDHRHRESRHRSRDVDREQDHNECNKQRSRHKSKDRYCEKDGEVISKKRNEAGEWNRDVYIRQ

SEQ ID NO: 4874 - protein, 1126 aa, Homo sapiens
MVARSTDSLDGPGEGSVQPLPTAGGPSVKGKPGKRLSAPRGPFPRLADCAHFHYENVDFGHIQLLLSPDREGPSLSGENELVFGVQVTCQGRSWPVLRSYDDFRSLDAHLHRCIFDRRFSCLPELPPPPEGARAAQMLVPLLLQYLETLSGLVDSNLNCGPVLTWMELDNHGRRLLLSEEASLNIPAVAAAHVIKRYTAQAPDELSFEVGDIVSVIDMPPTEDRSWWRGKRGFQVGFFPSECVELFTERPGPGLKADADGPPCGIPAPQGISSLTSAVPRPRGKLAGLLRTFMRSRPSRQRLRQRGILRQRVFGCDLGEHLSNSGQDVPQVLRCCSEFIEAHGVVDGIYRLSGVSSNIQRLRHEFDSERIPELSGPAFLQDIHSVSSLCKLYFRELPNPLLTYQLYGKFSEAMSVPGEEERLVRVHDVIQQLPPPHYRTLEYLLRHLARMARHSANTSMHARNLAIVWAPNLLRSMELESVGMGGAAAFREVRVQSVVVEFLLTHVDVLFSDTFTSAGLDPAGRCLLPRPKSLAGSCPSTRLLTLEEAQARTQGRLGTPTEPTTPKAPASPAERRKGERGEKQRKPGGSSWKTFFALGRGPSVPRKKPLPWLGGTRAPPQPSGSRPDTVTLRSAKSEESLSSQASGAELLGAGGAPASATPTPALSPGRSLRPHLIPLLLRGAEAPLTDACQQEMCSKLRGAQGPLGPDMESPLPPPPLSLLRPGGAPPPPPKNPARLMALALAERAQQVAEQQSQQECGGTPPASQSPFHRSLSLEVGGEPLGTSGSGPPPNSLAHPGAWVPGPPPYLPRQQSDGSLLRSQRPMGTSRRGLRGPAQVSAQLRAGGGGRDAPEAAAQSPCSVPSQVPTPGFFSPAPRECLPPFLGVPKPGLYPLGPPSFQPSSPAPVWRSSLGPPAPLDRGENLYYEIGASEGSPYSGPTRSWSPFRSMPPDRLNASYGMLGQSPPLHRSPDFLLSYPPAPSCFPPDHLGYSAPQHPARRPTPPEPLYVNLALGPRGPSPASSSSSSPPAHPRSRSDPGPPVPRLPQKQRAPWGPRTPHRVPGPWGPPEPLLLYRAAPPAYGRGGELHRGSLYRNGGQRGEGAGPPPPYPTPSWSLHSEGQTRSYC

SEQ ID NO: 4875 - protein, 707 aa, Homo sapiens
MAESRGRLYLWMCLAAALASFLMGFMVGWFIKPLKETTTSVRYHQSIRWKLVSEMKAENIKSFLRSFTKLPHLAGTEQNFLLAKKIQTQWKKFGLDSAKLVHYDVLLSYPNETNANYISIVDEHETEIFKTSYLEPPPDGYENVTNIVPPYNAFSAQGMPEGDLVYVNYARTEDFFKLEREMGINCTGKIVIARYGKIFRGNKVKNAMLAGAIGIILYSDPADYFAPEVQPYPKGWNLPGTAAQRGNVLNLNGAGDPLTPGYPAKEYTFRLDVEEGVGIPRIPVHPIGYNDAEILLRKVRMHVYNINKITRIYNVVGTIRGSVEPDRYVILGGHRDSWVFGAIDPTSGVAVLQEIARSFGKLMSKGWRPRRTIIFASWDAEEFGLLGSTEWAEENVKILQERSIAYINSDSSIEGNYTLRVDCTPLLYQLVYKLTKEIPSPDDGFESKSLYESWLEKDPSPENKNLPRINKLGSGSDFEAYFQRLGIASGRARYTKNKKTDKYSSYPVYHTIYETFELVEKFYDPTFKKQLSVAQLRGALVYELVDSKIIPFNIQDYAEALKNYAASIYNLSKKHDQQLTDHGVSFDSLFSAVKNFSEAASDFHKRLIQVDLNNPIAVRMMNDQLMLLERAFIDPLGLPGKLFYRHIIFAPSSHNKYAGESFPGIYDAIFDIENKANSRLAWKEVKKHISIAAFTIQAAAGTLKEVL

SEQ ID NO: 4876 - protein, 910 aa, Homo sapiens
MKKMSRNVLLQMEEEEDDDDGDIVLENLGQTIVPDLGSLESQHDFRTPEFEEFNGKPDSLFFNDGQRRIDFVLVYEDESRKETNKKGTNEKQRRKRQAYESNLICHGLQLEATRSVLDDKLVFVKVHAPWEVLCTYAEIMHIKLPLKPNDLKNRSSAFGTLNWFTKVLSVDESIIKPEQEFFTAPFEKNRMNDFYIVDRDAFFNPATRSRIVYFILSRVKYQVINNVSKFGINRLVNSGIYKAAFPLHDCKFRRQSEDPSCPNERYLLYREWAHPRSIYKKQPLDLIRKYYGEKIGIYFAWLGYYTQMLLLAAVVGVACFLYGYLNQDNCTWSKEVCHPDIGGKIIMCPQCDRLCPFWKLNITCESSKKLCIFDSFGTLVFAVFMGVWVTLFLEFWKRRQAELEYEWDTVELQQEEQARPEYEARCTHVVINEITQEEERIPFTAWGKCIRITLCASAVFFWILLIIASVIGIIVYRLSVFIVFSAKLPKNINGTDPIQKYLTPQTATSITASIISFIIIMILNTIYEKVAIMITNFELPRTQTDYENSLTMKMFLFQFVNYYSSCFYIAFFKGKFVGYPGDPVYWLGKYRNEECDPGGCLLELTTQLTIIMGGKAIWNNIQEVLLPWIMNLIGRFHRVSGSEKITPRWEQDYHLQPMGKLGLFYEYLEMIIQFGFVTLFVASFPLAPLLALVNNILEIRVDAWKLTTQFRRLVPEKAQDIGAWQPIMQGIAILAVVTNAMIIAFTSDMIPRLVYYWSFSVPPYGDHTSYTMEGYINNTLSIFKVADFKNKSKGNPYSDLGNHTTCRYRDFRYPPGHPQEYKHNIYYWHVIAAKLAFIIVMEHVIYSVKFFISYAIPDVSKRTKSKIQREKYLTQKLLHENHLKDMTKNMGVIAERMIEAVDNNLRPKSE

SEQ ID NO: 4877 - protein, 301 aa, Homo sapiens
MLLSPVTSTPFSVKDILRLERERSCPAASPHPRVRKSPENFQYLRMDAEPRGSEVHNAGGGGGDRKLDGSEPPGGPCEAVLEMDAERMGEPQPGLNAASPLGGGTRVPERGVGNSGDSVRGGRSEQPKARQRRKPRVLFSQAQVLALERRFKQQRYLSAPEREHLASALQLTSTQVKIWFQNRRYKCKRQRQDKSLELAGHPLTPRRVAVPVLVRDGKPCLGPGPGAPAFPSPYSAAVSPYSCYGGYSGAPYGAGYGTCYAGAPSGPAPHTPLASAGFGHGGQNATPQGHLAATLQGVRAW

SEQ ID NO: 4878 - protein, 355 aa, Homo sapiens
MDGIFAGIICNQANRCLTWTSQQLFSEKISGAEGTKLDDEFLDMERKIDVTNKVVAEILSKTTEYLQPNPAYRAKLGMLNTVSKIRGQVKTTGYPQTEGLLGDCMLKYGKELGEDSTFGNALIEVGESMKLMAEVKDSLDINVKQTFIDPLQLLQDKDLKEIGHHLKKLEGRRLDYDYKKKRVGKIPDEEVRQAVEKFEESKELAERSMFNFLENDVEQVSQLAVFIEAALDYHRQSTEILQELQSKLQMRISAASSVPRREYKPRPVKRSSSELNGVSTTSVVKTTGSNIPMDQPCCRGLYDFEPENQGELGFKEGDIITLTNQIDENWYEGMIHGESGFFPINYVEVIVPLPQ

SEQ ID NO: 4879 - protein, 645 aa, Homo sapiens
MSDKSDLKAELERKKQRLAQIREEKKRKEEERKKKEADMQQKKEPVQDDSDLDRKRRETEALLQSIGISPEPPLVQPLHFLTWDTCYFHYLVPTPMSPSSKSVSTPSEAGSQDSGDLGPLTRTLQWDTDPSVLQLQSDSELGRRLHKLGVSKVTQVDFLPREVVSYSKETQTPLATHQSEEDEEDEEMVESKVGQDSELENQDKKQEVKEAPPRELTEEEKQQILHSEEFLIFFDRTIRVIERALAEDSDIFFDYSGRELEEKDGDVQAGANLSFNRQFYDEHWSKHRVVTCMDWSLQYPELMVASYNNNEDAPHEPDGVALVWNMKFKKTTPEYVFHCQSSVMSVCFARFHPNLVVGGTYSGQIVLWDNRSHRRTPVQRTPLSAAAHTHPVYCVNVVGTQNAHNLITVSTDGKMCSWSLDMLSTPQESMELVYNKSKPVAVTGMAFPTGDVNNFVVGSEEGTVYTACRHGSKAGIGEVFEGHQGPVTGINCHMAVGPIDFSHLFVTSSFDWTVKLWTTKHNKPLYSFEDNADYVYDVMWSPVHPALFACVDGMGRLDLWNLNNDTEVPTASVAIEGASALNRVRWAQAGKEVAVGDSEGRIWVYDVGELAVPHNDEWTRFARTLVEIRANRADSEEEGTVELSA

SEQ ID NO: 4880 - protein, 751 aa, Homo sapiens
MGQTGKKSEKGPVCWRKRVKSEYMRLRQLKRFRRADEVKSMFSSNRQKILERTEILNQEWKQRRIQPVHILTSVSSLRGTRECSVTSDLDFPTQVIPLKTLNAVASVPIMYSWSPLQQNFMVEDETVLHNIPYMGDEVLDQDGTFIEELIKNYDGKVHGDRECGFINDEIFVELVNALGQYNDDDDDDDGDDPEEREEKQKDLEDHRDDKESRPPRKFPSDKIFEAISSMFPDKGTAEELKEKYKELTEQQLPGALPPECTPNIDGPNAKSVQREQSLHSFHTLFCRRCFKYDCFLHRKCNYSFHATPNTYKRKNTETALDNKPCGPQCYQHLEGAKEFAAALTAERIKTPPKRPGGRRRGRLPNNSSRPSTPTINVLESKDTDSDREAGTETGGENNDKEEEEKKDETSSSSEANSRCQTPIKMKPNIEPPENVEWSGAEASMFRVLIGTYYDNFCAIARLIGTKTCRQVYEFRVKESSIIAPAPAEDVDTPPRKKKRKHRLWAAHCRKIQLKKDGSSNHVYNYQPCDHPRQPCDSSCPCVIAQNFCEKFCQCSSECQNRFPGCRCKAQCNTKQCPCYLAVRECDPDLCLTCGAADHWDSKNVSCKNCSIQRGSKKHLLLAPSDVAGWGIFIKDPVQKNEFISEYCGEIISQDEADRRGKVYDKYMCSFLFNLNNDFVVDATRKGNKIRFANHSVNPNCYAKVMMVNGDHRIGIFAKRAIQTGEELFFDYRYSQADALKYVGIEREMEIP

SEQ ID NO: 4881 - protein, 636 aa, Homo sapiens
MEKAVNDGSHSEELFCHLKTISEKEDLPRCTSESHLSCLKQDILNEKTELEATLKEAELVTHSVELLLPLFKDTIEKINFENANLSALNLKISEQKEILIKELDTFKSVKLALEHLLRKRDYKQTGDNLSSMLLENLTDNESENTNLKKKVFEKEAHIQELSCLFQSEKANTLKANRFSQSVKVVHERLQIQIHKREAENDKLKEYVKSLETKIAKWNLQSRMNKNEAIVMKEASRQKTVALKKASKVYKQRLDHFTGAIEKLTSQIRDQEAKLSETISASNAWKSHYEKIVIEKTELEVQIETMKKQIINLLEDLKKMEDHGKNSCEEILRKVHSIEYENETLNLENTKLKLRFPCRITESKNMNILIVLDMLCYISSEKTTLAALKDEVVSVENELSELQEVEKKQKTLIEMYKTQVQKLQEAAEIVKSRCENLLHKNNQITKTKNKNVEKMRGQMESHLKELERVCDSLTAAERRLHECQESLQCCKGKCADQEHTIRELQGQVDGNHNLLTKLSLEEENCLIQLKCENLQQKLEQMDAENKELEKKLANQEECLKHSNLKFKEKSAEYTALARQLEAALEEGRQKVAEEIEKMSSRESALQIKILDLETELRKKNEEQNQLVCKMNSDPETP

SEQ ID NO: 4882 - protein, 486 aa, Homo sapiens
MWKSVVGHDVSVSVETQGDDWDTDPDFVNDISEKEQRWGAKTIEGSGRTEHINIHQLRNKVSEEHDVLRKKEMESGPKASHGYGGRFGVERDRMDKSAVGHEYVAEVEKHSSQTDAAKGFGGKYGVERDRADKSAVGFDYKGEVEKHTSQKDYSRGFGGRYGVEKDKWDKAALGYDYKGETEKHESQRDYAKGFGGQYGIQKDRVDKSAVGFNEMEAPTTAYKKTTPIEAASSGTRGLKAKFESMAEEKRKREEEEKAQQVARRQQERKAVTKRSPEAPQPVIAMEEPAVPAPLPKKISSEAWPPVGTPPSSESEPVRTSREHPVPLLPIRQTLPEDNEEPPALPPRTLEGLQVEEEPVYEAEPEPEPEPEPEPENDYEDVEEMDRHEQEDEPEGDYEEVLEPEDSSFSSALAGSSGCPAGAGAGAVALGISAVAVYDYQGEGSDELSFDPDDVITDIEMVDEGWWRGRCHGHFGLFPANYVKLLE

SEQ ID NO: 4883 - protein, 562 aa, Homo sapiens
MDPQPPPPAQGSPPHRGRGRGRGRGRGRGRGRGRGGAGAPRAPLPCPTCGRLFRFPYYLSRHRLSHSGLRPHACPLCPKAFRRPAHLSRHLRGHGPQPPLRCAACPRTFPEPAQLRRHLAQEHAGGEVELAIERVAKETAEPSWGPQDEGSEPPTTAAAGATEEEAVAAWPETWPAGEPSTLAAPTSAAEPRESESEEAEAGAAELRAELALAAGRQEEKQVLLQADWTLLCLRCREAFATKGELKAHPCLRPEGEQEGEGGPPPRPKRHQCSICLKAFARPWSLSRHRLVHSTDRPFVCPDCGLAFRLASYLRQHRRVHGPLSLLAPLPAAGKKDDKASGARNSAKGPEGGEGAECGGASEGGEGQNGGDAAPARPPAGEPRFWCPECGKGFRRRAHLRQHGVTHSGARPFQCVRCQREFKRLADLARHAQVHAGGPAPHPCPRCPRRFSRAYSLLRHQRCHRAELERAAALQALQAQAPTSPPPPPPPLKAEQEEEGLPLPLANIKEEPPSPGTPPQSPPAPPVFLSASCFDSQDHSAFEMEEEEVDSKAHLRGLGGLAS

SEQ ID NO: 4884 - protein, 599 aa, Homo sapiens
MAPRGCAGHPPPPSPQACVCPGKMLAMGALAGFWILCLLTYGYLSWGQALEEEEEGALLAQAGEKLEPSTTSTSQPHLIFILADDQGFRDVGYHGSEIKTPTLDKLAAEGVKLENYYVQPICTPSRSQFITGKYQIHTGLQHSIIRPTQPNCLPLDNATLPQKLKEVGYSTHMVGKWHLGFYRKECMPTRRGFDTFFGSLLGSGDYYTHYKCDSPGMCGYDLYENDNAAWDYDNGIYSTQMYTQRVQQILASHNPTKPIFLYIAYQAVHSPLQAPGRYFEHYRSIININRRRYAAMLSCLDEAINNVTLALKTYGFYNNSIIIYSSDNGGQPTAGGSNWPLRGSKGTYWEGGIRAVGFVHSPLLKNKGTVCKELVHITDWYPTLISLAEGQIDEDIQLDGYDIWETISEGLRSPRVDILHNIDPIYTKAKNGSWAAGYGIWNTAIQSAIRVQHWKLLTGNPGYSDWVPPQSFSNLGPNRWHNERITLSTGKSVWLFNITADPYERVDLSNRYPGIVKKLLRRLSQFNKTAVPVRYPPKDPRSNPRLNGGVWGPWYKEETKKKKPSKNQAEKKQKKSKKKKKKQQKAVSGSTCHSGVTCG

SEQ ID NO: 4885 - protein, 803 aa, Homo sapiens
MESGPRAELGAGAPPAVVARTPPEPRPSPEGDPSPPPPPMSALVPDTPPDTPPAMKNATSSKQLPLEPESPSGQVGPRPAPPQEESPSSEAKSRGPTPPAMGPRDARPPRRSSQPSPTAVPASDSPPTKQEVKKAGERHKLAKERREERAKYLAAKKAVWLEKEEKAKALREKQLQERRRRLEEQRLKAEQRRAALEERQRQKLEKNKERYEAAIQRSVKKTWAEIRQQRWSWAGALHHSSPGHKTNRSLQLSAWESSIVDRLMTPTLSFLARSRSAVTLPRNGRDQGRGCDPGRGPTWGRAGASLARGPQPDRTHPSAAVPVCPRSASASPLTPCSVTRSVHRCAPAGERGERRKPNAGGSPAPVRRRPEASPVQKKEKKDKERENEKEKSALARERSLKKRQSLPASPRARLSASTASELSPKSKARPSSPSTSWHRPASPCPSPGPGHTLPPKPPSPRGTTASPKGRVRRKEEAKESPSAAGPEDKSQSKRRASNEKESAAPASPAPSPAPSPTPAPPQKEQPPAETPTDAAVLTSPPAPAPPVTPSKPMAGTTDREEATRLLAEKRRQAREQREREEQERRLQAERDKRMREEQLAREAEARAEREAEARRREEQEAREKAQAEQEEQERLQKQKEEAEARSREEAERQRLEREKHFQQQEQERQERRKRLEEIMKRTRKSEVSETKKQDSKEANANGSSPEPVKAVEARSPGLQKEAVQKEEPIPQEPQWSLPSKELPASLVNGLQPLPAHQENGFSTNGPSGDKSLSRTPETLLPFAEAEAFLKKAVVQSPQVTEVL

SEQ ID NO: 4886 - protein, 7081 aa, Homo sapiens
MSKQYYSFKKGVGSGLEDNTFMTLWDFLESWIIQNDWVAIFFIILLGIIFEIILMKACASFWKKPTLPEKGSSDVQETEDSCPKSRKLAPENWSVINSSSGERVGTFLEKRITSSLTSEEKECNFEDRILFSREILWSGTSESEDQVSPSSESHVPSSNGISSSLPLFYSEVEETCLSHTEHPDREYETIQFSSKKLFSMMKTNKNKNSGFSSDLSFSASRFTVENEDLDVAPCPLAHLFLSRDQVRLLEENVRNQIPSKPKTKLGSRTTYQCSRSQESLNQNQPSVGMVISVQAQDSFPGQNAFQNQGLYEVQFTSQAQYINHNQESIKSQPESKASNFAQPEDVMKKPFSSSTQDSFQSQDLDRNQHFVEVPSIVEAKYSVKGLESDEHLGEDQHCVWFIDSNKVKYSIKGQDTIFKNAEFLVLTLNPNLVTEDMPQLRSVKAQGQQQIVSSELNQDSVYSSVPLLSTIKGQKNRRKTPDSKSKLSLNVPSLKAKKTPTSQVFQITVCHTLKNRNELGCKNNTEKKELHERKDISDIALHLISVSKLILPYVKNYSRKQLVKVMPGLIKCGHFLQKQNKSPDTEKINYAGPLEETGISDITKKEKEYDKENKRLKNISPKMLPQLEQSFMVNTVQLKAPCLLVETNGKSKESLKDSITQAKGIGITEFHVLNSKKPFDLHIPKHKTSLEEAISKPMQKLVSSPEMESNNRMKIQEDLQSSENSHLQLSNGEELPTSTPKTQRCFPRENTQKQKDFLELVLELSNVGLLISPGSKMHKSSEELEAIKIQVNTESVNLKESKPLILNVTEDSDLRESEELECNTGSNITNMHQDKETSDAFHSATYTTISQLPDTETHSISKAKADTLRIIRLSHSASKQEKLPDEKETQNAEYIDKSCTFKKPQQCDRKEQEKEANSELTQGFRFSIHLKQKPKYVKFQMEQISSGSSKAPNKEQEVQPQTLSTQTILENSPCPMMDPFQVEKVKQSTDRPTDRESAGDPKNPLTMPENLPVGELLIETTEYSVPFGGNLQKTTDSHIAEEKEDVKRYLPAVALGSFNNHLLTLPYFKRQEIKKKLSETKSVLSVKYVIMKVKKPAISLMPYINICGTSNHRKKMGGNFEIIIKQILQDKIAAGMLLNVIYPPMSILPNTRMYSRLNAENHSHIKLVQEESQIEREEKYPYFINEGNESQNTLDAKLQDEVKGVKETLPKAVLHDSCNLGLDAHLEKEIKTEKEMHQPIPFTETIIESVVSPIMELSHAENVKSTQKTQTDCKCTADSETPSPISGKSLIGDPLNQTRESYIPSNGSDTREMGYCFAEEKTEIPKDLPATSPETFNYCTPVLSCSKVMKKRVTFALTTSTAKPKCVNTKAVKPSISETVSVTSHRKKSELDFKTKFKKINQTKGLVPECLNTLCSPMHSRLQREFCLPASQLKQGETADKTYTDVFAKNSISHDREEKLQDGKEEEHKVLLEAAPQLSQHLGSEAGQMKEIHLESDPVLNCLTLELHINGQRLQHQTGFEQTTLETSLQMGPLEAEELQKANETENDIKVLGGPKIPPPKALQALENSDGLILNAYQKDNELVKSDEELNQPGSTNIQVQPQTHFTQTILKSTSCPTLDQFPFEKVESHVRFSPLKSGEAKVDEIIFYAREGGISSDSSHQKEQAGGTEKKETAIFGSCMPALSTPKTTRNLKQFSDMKTLVNPKCGIIKAKKPSISYMLNIRAGAGPKRRKELSCNLTTKMKELHQGKKGVDETYAFLTMTPDINKYSKVETEKDTLREKRLSSTQVKQDTSPHEDSITSRDIKETLLQDEEQEERKQEALLKVIPQHLQHFMFRSGQGKDLDFHKLENQGSRKILFVTKQDVPQQLQPAEPIQREETKKCLQTQNGTICTVNSKLLPLKSEDSVNGEVLTGAIKRGVPTDRKCMGEQHNSGKGEKAEFNKDLQATVLELQKSPHGGEAQKANLTDMESGSSNAMNMNVQHEREDKNIQKMLTESVPCYSQHLRFSTHQMKDPDPCKSGSEPKSPEGRSWNLSHIVQKTKQETHFRETVLEPISGYMMKQSPHMQEGIKCMEGLKTSFPKTGKSKIGSIPRDTPWDENPRRKWDSSISEKTAWNQKNLQTVLKPLDFSSLMSSEYESRSYTLEFIGKKSMSPKCVTLKAKQLRILQLFNIIRYSTENHRKKKQHRFKYKMKGKQWYTSIGEALLSATEYAKSTTSKSMIDKLLYNTAARCILSNRTRRQNLDGHITEEKEEVQENVAAIFLGLLDFFMPVLSDSKNQRNTAQLSEKEIIFNAKCLTMKEKKSSISQIHKINRESTRKHRKKCKSYLKTVSNRKCQENHGHITEEEEEVQENSPATFLGPLDFFMPVLSDSKNQINTIQLSERKIILNPKCLTMKEKKPPISQIHKISGQFTTKHRKKLESNLKTKLKAMWQGENVADTFPNTTSFTPDSSDIKRQSGFQTEIDMRISGLSHTQPTQIESLAEGIARYSDPIDKRRTSNLVKGAKLHDRESGEEKQEHLTEMDPFYAENFMANTYLRKDRHLGKSEDVLLGETFFSKSQIYKGNSEKNVKIEKNKNGKESLKVGLARMEKSDNCAELSEATDDAISNKYDKQNIGHSVLKENAFCNLAAIVPDSVGRHSPASEEMKRQNGRLKMADRSSPQGRPLQAKQSAVSQSPDTAGYAVVSNNKEQKQNFKAQKTEAEVDLIDQEAKINVAEEFNPESVFFSKIHPLQIENKKEFKTADWKTRADPKTFALPKKQQELCVSGTIWSYPNPYTSISPKIIRHKDKAKTADVESTMHTKQIKLKAKRITVSQLLEYGTASNKKELRGNIQQQKSFQLSKNAVHRVLKAVYDSGYCVSSIKKLTEVKMEKDKPKDRTCILPQPKLEKPLKEMQRSLSGCTDMSSILRKQEQDIREKEQKHQSISEDISQYYIGPLRISSQQINYSSFDAPRIRTDEELEFLIAQRAKEKDVGIAKHSVSIPWEREGSKRLDIPLNSKGQNIFFTELDTSQQKTCQEQELLKQEDISMTNLGSMACPIMEPLHLENTGKVTEEEDVYINRKISSHVLGKEGLKETDIFVGSKGQKFLCTNSEVQHKVPAEQKEQVNPDHVPESILDSESFLSKDPLHLKQAVNTARKENVTISESFNENLWGKEQSKLDITLKSNRQKMDFSKKLRMKHLSNYYQNKENILESVLPCILHQLYIENPKKEGSAEEIMSSKVLSPMVEKASHEVGIPVDQPPCSEGIHLNIKGRKEHPQESTHEAFPASVSHSLMDVLQIKSPKVKKALKAINSLGYLTSNTKGIGLLFPRQAEKEEKYTYKALPKPASHSKTDLFQFNASMQQEKLDAMDIPHYDYLTSQTREAVKQMDVIVGYTQNSKKRQDLLKTGQKWQYLPISYENFWEHISCPQKYPCLLQHLMPQEKEALSEGGNLSSRTPGLDLFSADQLSTITKNRLEWIVPLISPRQMKKQDSMLPLGSYHKTIKYASLLFPKGMKSSDGVQVFDLISNNSSPKLRLGKKIETQKANEKVQKEVCLPITLHSLSASMPILQESKGQKDSVEQVIRKGVICHKRRTSKWKKSVFSHILNTSDCGASSNRLEMQWNMTDKMVNVKHRMSEIDLVAAKICESILSLPHFKLNKETIDGVISSNVKSTKQHISQGKNDRVKAMDMKRIKSPNIILKPRKSSLSHILSIKEFPLLLDIIKQEGKMQEGKGKSSMKLTNLCTSLPSLSHSNSNSRTKAGKDKSGTLKGCLPPLKLQASSNARRVSSAESINRDSLSNVIESKCFPQKKKEDRENIVDVKDVMGLKCITLKGKKSLFRHLLHGKEPQRSNKKLEKMTQEDESNLNVVQNKLCASILSPPHLEWNPRIKEVYMRGITRFCLSSSTQQELSDTMEKCEQPIDDSLSSIEKAKHMPQKDKDRVEKALEKIMHSKRIALEVKQPSIFQELELNIKEKGGKIQEDKEVEIWSKPFASISFLPYSKVGTIEGEEAMRIKMRSSFSQPNLQESSDTEKTAYEKCISDNISNSVKKALESILQKEQRQKMEKIRALKKMKSSISQGIQLDIKEQEKRIEHIKGEPSVLLTNACASIPSPSHLQLDTRREKAEYVTEITRYYLPELSHQKSSEAGEKADGVASKGDITIKVQKAKDYMQQKEDDEVKISAKKDIMHPEDKGLKAKKALSQDLPLNTKEPGKMDQEAQEQGKEDREGEEQGKEDRRGAGQEKVDREDKEQGKMDHEVEEQQKADGVGIEQGKMDGDKNEQERVLFLYLPSNSSLTHYILDTRIEGEEDQQGIIRPGILQPRHQKSSETGKKANGVPSEGDSASEVQKAKDYMQQKEEDEVKISAEKDLMHPEDKDLKGKKALSQNLPLNPKEPGKRDGEGQEQGKEDGEGEEQGNRDGETEEQQQADGVGTEQEKRDGHKSKQETVLFLHLPSESSLTCYELNTRKEGEEDLQGIIKSATLQLRQQKSFDAGKIAHTKSFGVDSSNDVKTVQEYKPQKEVDRGKTVSVDYIMQPEGTIFEAEQLSLPHTLNIPGSSGSKTREVLTNIKEKLRHVQERKSELDVFLTIPSLSHCKLDKRTAGKKEEQGVTRSFLPPSWHMESSDTGKLKYTLSYLNDITGDSNRTKYMAQIQKDKANISEKSVMHPEYIAVKAEKSPLSHILKTKELQVNISQQGEKAQEGEVEIVVLLSKTCPFVTSSAFLELDSIKEEEGEPRITRSFMPHLEIQESLPSRQTAPTKPTESLVKKEKQLLPQKEDRVQTVSMHGLMHPNGAVFKAKTSAPPQVFSITEHSPLSKRKEPQWGMKERAGQKQDRTGRPHVILTKTHPFMPSLSHHRFSPSQPKLPISSGAGKSRLANSNEGISSHKVILKANQQMPYKEAKDRVKIEGREGRILPKRIHLRAEALPLALLCNGKNYSLHIEEQGEGVQESKKEPGVVPRKSASFPPPPFYLNCDTRRNEKEGTLGKTQFSFPPLKIQDSSDSGKKAYTESLHGYTLSNSKGPVQPTAQGEEKGGLRIDMEDKMLPKCTDLKAKQLLLSDILNTKKLQWKSKEQKRKIQEDKNKQVKGLPSINTSLLTPPYLKFDTTEGQENVIRIAKVSLPQSRSKESSDAGRIACPEATHGELSSDVKQLKAHLLQKEEKDREKVADMTSVLDPNKMYLKAKKSPVLHTHSFSDLQWKTREQEEEKVQKVKSGPGVMLSKSPSRSSPLHLNVNTGFQEESIPILTRPSFPLVKLQVSPDTEGGTCIRPIAGDILIYLQKGKHVSQNKEEDDVQIVSILIFPKHQEEKVQECEGEPGVVLTKSTSLPSLSQLELDKETHLGNEMLRLKRPILRRISHIGETVHRESVVGDIPKDVKNEKQHIPQKEERNQKKIIDMRGTDITLKSKKSPRSCMLHRTELHVNIGGQGRKEHEGQDKPPGMIQRKMCILFSKPLPSNLKLERATHADEERLGGKTSFVLPLMPSALPDTEKTADAEARSGDVRKGKPHRSQKENRHEVKTIDMRFRIHCQEARISPMSHILNAKELVLNINKLEKKVHKDKDEACVVLSRTFLSIPSAPPLYLDSGNKTDKDTPGITGSSCPQRTLHVPSNTQKITNRDSVEGVDKNVVKQAEQYVPRPEAEQQLTSNFMISVQQRNQPSRVRSEEDLNQLVLNSRDEDIYFTGFGTIRSGKRPEWLFTGKKAQPVKYKTETLTAFLSYPTMDATKMGGLEEDTEIMDNLNHKISPKASVSLIRKISKELYVTLGTPANSKGFSVSERYAHQQETSSKVSPELAGSCKFDKPKEDGQSNDRISKMFSPKVLAPQTKGSLKKISIVTNWNAPQNIEEQDIVMKKQVIRRCEHGHKTRTNTILSKFPLQSGKQKTPSETDVDKKTTAHLSLQMLPGIHMDMTEIDPAKGGRKQALLISEQEEGVLEFLPKSLFPPWTFQFQSGDLEEKHQTDANTNINLEQKKLEMDNDSTVNQKEGKLKIGTNRALHLQEEKTEMHKARTANLEKERGRMDTSSSAHPHLLSLKAEESQMKTQVITHRENSRLIMQKQKKELEASNAKQSIQLQKLFQRNVLDSFYSYVPLSPKRKDQKGRLTIRDLKRELSTKYLTMKIQNHPIPQMLNITGRGTPSNRKKLEYDVKLKNIASWSKDVSGIFIRSLSISIMRSPHTDPKTNLEREKRICLPKFQEKSPNTSEMSKRDTLTIVKGEQNFTNTVPQDPQPFAVDKQQMQKLPNVKSEANLRSEMNKKYLKAQTKERIVPEHDVSRIIKKPDLRIIEQEEKILKRILTPTECPSMLEDPKLPKQRDQSEPVWDMTTQKVQQQKAFPGTVPIPPQVKSSEVKIVADSTNAEHLLPICEATKAISESQVKNMIQDKVSSDKLDNIQAYKPDDLKSPPFPEGPDTISTAIYPKTQHKSLLEQFTPKEKNKLTSHLESKALEIQLNLIPEMARKSLQMFNFYPKGTISKDNSWRFYSRHKTMNFMSLEGTDTIEPNSKHKHQKDSPLASNMKTLIVDVSSDSEETITKLQSINKLENGTSAVTSASEMLLPHTLQNHSVKEKGKLLMHFSVKTLEIQMKAFPRIVRESYAMTSAHERKKPLSNCIHPGFTGPKRQNRILLLSEEKSLHQIDLDLQYKYLRFLLGLPVGSTFPKPNVLPKHSKLNTIAVCKNVNAGGQSGSLSIDTELLEQHISFKKQSPHENSSLIRKFPQPTLVCASDRDLHSPRKKDTQVLSESEFHVTPEKNKQYHVWFQERNTCESVDLRTQRNATGSAVSCETQISEDFVDIQTDIESPADLDECSCLEVSESEECVFLEANSYLSQESENILFELQTGIPLENVYKITTDLKSFYSEDSGSHCTRECRKETLIITPPSCKSHKSRKYRSSSKMKSPDWLCHSSSNTAEIQSRSSSVSFSEEKISWTTKSRTSYSSAPLTESNIKSHLAKNQGKSHRHPESQERKKARSDLFRKNSSHWDHDYSCTHSKGKRDRKKRVYDYESERLDCFQSKHKSASKPHHDDINFYSERKQNRPFFFACVPADSLEVIPKTIRWTIPPETLRKRNFRIPLVAKISSSWNIWSSSKKLLGSLSGSLTTVFHS

SEQ ID NO: 4887 - protein, 645 aa, Homo sapiens
MERQSRVMSEKDEYQFQHQGAVELLVFNFLLILTILTIWLFKNHRFRFLHETGGAMVYGLIMGLILRYATAPTDIESGTVYDCVKLTFSPSTLLVNITDQVYEYKYKREISQHNINPHQGNAILEKMTFDPEIFFNVLLPPIIFHAGYSLKKRHFFQNLGSILTYAFLGTAISCIVIGLIMYGFVKAMIHAGQLKNGDFHFTDCLFFGSLMSATDPVTVLAIFHELHVDPDLYTLLFGESVLNDAVAIVLTYSISIYSPKENPNAFDAAAFFQSVGNFLGIFAGSFAMGSAYAIITALLTKFTKLCEFPMLETGLFFLLSWSAFLSAEAAGLTGIVAVLFCGVTQAHYTYNNLSSDSKIRTKQLFEFMNFLAENVIFCYMGLALFTFQNHIFNALFILGAFLAIFVARACNIYPLSFLLNLGRKQKIPWNFQHMMMFSGLRGAIAFALAIRNTESQPKQMMFTTTLLLVFFTVWVFGGGTTPMLTWLQIRVGVDLDENLKEDPSSQHQEANNLDKNMTKAESARLFRMWYSFDHKYLKPILTHSGPPLTTTLPEWCGPISRLLTSPQAYGEQLKEDDVECIVNQDELAINYQEQASSPCSPPARLGLDQKASPQTPGKENIYEGDLGLGGYELKLEQTLGQSQLN

SEQ ID NO: 4888 - protein, 567 aa, Homo sapiens
MMAAVPPGLEPWNRVRIPKAGNRSAVTVQNPGAALDLCIAAVIKECHLVILSLKSQTLDAETDVLCAVLYSNHNRMGRHKPHLALKQVEQCLKRLKNMNLEGSIQDLFELFSSNENQPLTTKVCVVPSQPVVELVLMKVLGACKLLLRLLDCCCKTFLLTVKHLGLQEFIILNLVMVGLVSRLWVLYKGVLKRLILLYEPLFGLLQEVARIQPMPYFKDFTFPSDITEFLGQPYFEAFKKKMPIAFAAKGINKLLNKLFLINEQSPRASEETLLGISKKAKQMKINVQNNVDLGQPVKNKRVFKEESSEFDVRAFCNQLKHKATQETSFDFKCSQSRLKTTKYSSQKVIGTPHAKSFVQRFREAESFTQLSEEIQMAVVWCRSKKLKAQAIFLGNKLLKSNRLKHLEAQGTSLPKKLECIKTSICNHLLRGSGIKTSKHHLRQRRSQNKFLRRQRKPQRKLQSTLLREIQQFSQGTRKSATDTSAKWRLSHCTVHRTDLYPNSKQLLNSGVSMPVIQTKEKMIHENLRGIHENETDSWTVMQINKNSTSGTIKETDDIDDIFALMGV

SEQ ID NO: 4889 - protein, 950 aa, Homo sapiens
MNTEAEQQLLHHARNGNAEEVRQLLETMARNEVIADINCKGRSKSNLGWTPLHLACYFGHRQVVQDLLKAGAEVNVLNDMGDTPLHRAAFTGRKELVMLLLEYNADTTIVNGSGQTAKEVTHAEEIRSMLEAVERTQQRKLEELLLAAAREGKTTELTALLNRPNPPDVNCSDQLGNTPLHCAAYRAHKQCALKLLRSGADPNLKNKNDQKPLDLAQGAEMKHILVGNKVIYKALKRYEGPLWKSSRFFGWRLFWVVLEHGVLSWYRKQPDAVHNIYRQGCKHLTQAVCTVKSTDSCLFFIKCFDDTIHGFRVPKNSLQQSREDWLEAIEEHSAYSTHYCSQDQLTDEEEEDTVSAADLKKSLEKAQSCQQRLDREISNFLKMIKECDMAKEMLPSFLQKVEVVSEASRETCVALTDCLNLFTKQEGVRNFKLEQEQEKNKILSEALETLATEHHELEQSLVKGSPPASILSEDEFYDALSDSESERSLSRLEAVTARSFEEEGEHLGSRKHRMSEEKDCGGGDALSNGIKKHRTSLPSPMFSRNDFSIWSILRKCIGMELSKITMPVIFNEPLSFLQRLTEYMEHTYLIHKASSLSDPVERMQCVAAFAVSAVASQWERTGKPFNPLLGETYELVRDDLGFRLISEQVSHHPPISAFHAEGLNNDFIFHGSIYPKLKFWGKSVEAEPKGTITLELLEHNEAYTWTNPTCCVHNIIVGKLWIEQYGNVEIINHKTGDKCVLNFKPCGLFGKELHKVEGYIQDKSKKKLCALYGKWTECLYSVDPATFDAYKKNDKKNTEEKKNSKQMSTSEELDEMPVPDSESVFIIPGSVLLWRIAPRPPNSAQMYNFTSFAMVLNEVDKDMESVIPKTDCRLRPDIRAMENGEIDQASEEKKRLEEKQRAARKNRSKSEEDWKTRWFHQGPNPYNGAQDWIYSGSYWDRNYFNLPDIY

SEQ ID NO: 4890 - protein, 450 aa, Homo sapiens
MREIVHIQAGQCGNQIGAKFWEVISDEHGIDPSGNYVGDSDLQLERISVYYNEASSHKYVPRAILVDLEPGTMDSVRSGAFGHLFRPDNFIFGQSGAGNNWAKGHYTEGAELVDSVLDVVRKECENCDCLQGFQLTHSLGGGTGSGMGTLLISKVREEYPDRIMNTFSVVPSPKVSDTVVEPYNATLSIHQLVENTDETYCIDNEALYDICFRTLKLATPTYGDLNHLVSATMSGVTTSLRFPGQLNADLRKLAVNMVPFPRLHFFMPGFAPLTARGSQQYRALTVPELTQQMFDAKNMMAACDPRHGRYLTVATVFRGRMSMKEVDEQMLAIQSKNSSYFVEWIPNNVKVAVCDIPPRGLKMSSTFIGNSTAIQELFKRISEQFTAMFRRKAFLHWYTGEGMDEMEFTEAESNMNDLVSEYQQYQDATAEEEGEMYEDDEEESEAQGPK

SEQ ID NO: 4891 - protein, 387 aa, Homo sapiens
MPTTIEREFEELDTQRRWQPLYLEIRNESHDYPHRVAKFPENRNRNRYRDVSPYDHSRVKLQNAENDYINASLVDIEEAQRSYILTQGPLPNTCCHFWLMVWQQKTKAVVMLNRIVEKESVKCAQYWPTDDQEMLFKETGFSVKLLSEDVKSYYTVHLLQLENINSGETRTISHFHYTTWPDFGVPESPASFLNFLFKVRESGSLNPDHGPAVIHCSAGIGRSGTFSLVDTCLVLMEKGDDINIKQVLLNMRKYRMGLIQTPDQLRFSYMAIIEGAKCIKGDSSIQKRWKELSKEDLSPAFDHSPNKIMTEKYNGNRIGLEEEKLTGDRCTGLSSKMQDTMEENSESALRKRIREDRKATTAQKVQQMKQRLNENERKRKRPRLTDT

SEQ ID NO: 4892 - protein, 508 aa, Homo sapiens
MADGQVAELLLRRLEASDGGLDSAELAAELGMEHQAVVGAVKSLQALGEVIEAELRSTKHWELTAEGEEIAREGSHEARVFRSIPPEGLAQSELMRLPSGKVGFSKAMSNKWIRVDKSAADGPRVFRVVDSMEDEVQRRLQLVRGGQAEKLGEKERSELRKRKLLAEVTLKTYWVSKGSAFSTSISKQETELSPEMISSGSWRDRPFKPYNFLAHGVLPDSGHLHPLLKVRSQFRQIFLEMGFTEMPTDNFIESSFWNFDALFQPQQHPARDQHDTFFLRDPAEALQLPMDYVQRVKRTHSQGGYGSQGYKYNWKLDEARKNLLRTHTTSASARALYRLAQKKPFTPVKYFSIDRVFRNETLDATHLAEFHQIEGVVADHGLTLGHLMGVLREFFTKLGITQLRFKPAYNPYTEPSMEVFSYHQGLKKWVEVGNSGVFRPEMLLPMGLPENVSVIAWGLSLERPTMIKYGINNIRELVGHKVNLQMVYDSPLCRLDAEPRPPPTQEAA

SEQ ID NO: 4893 - protein, 497 aa, Homo sapiens
MMSSAAFPRWLQSMGVPRTPSRTVLFERERTGLTYRVPSLLPVPPGPTLLAFVEQRLSPDDSHAHRLVLRRGTLAGGSVRWGALHVLGTAALAEHRSMNPCPVHDAGTGTVFLFFIAVLGHTPEAVQIATGRNAARLCCVASRDAGLSWGSARDLTEEAIGGAVQDWATFAVGPGHGVQLPSGRLLVPAYTYRVDRRECFGKICRTSPHSFAFYSDDHGRTWRCGGLVPNLRSGECQLAAVDGGQAGSFLYCNARSPLGSRVQALSTDEGTSFLPAERVASLPETAWGCQGSIVGFPAPAPNRPRDDSWSVGPGSPLQPPLLGPGVHEPPEEAAVDPRGGQVPGGPFSRLQPRGDGPRQPGPRPGVSGDVGSWTLALPMPFAAPPQSPTWLLYSHPVGRRARLHMGIRLSQSPLDPRSWTEPWVIYEGPSGYSDLASIGPAPEGGLVFACLYESGARTSYDEISFCTFSLREVLENVPASPKPPNLGDKPRGCCWPS

SEQ ID NO: 4894 - protein, 919 aa, Homo sapiens
MWLAAAAPSLARRLLFLGPPPPPLLLLVFSRSSRRRLHSLGLAAMPEKRPFERLPADVSPINYSLCLKPDLLDFTFEGKLEAAAQVRQATNQIVMNCADIDIITASYAPEGDEEIHATGFNYQNEDEKVTLSFPSTLQTGTGTLKIDFVGELNDKMKGFYRSKYTTPSGEVRYAAVTQFEATDARRAFPCWDEPAIKATFDISLVVPKDRVALSNMNVIDRKPYPDDENLVEVKFARTPVMSTYLVAFVVGEYDFVETRSKDGVCVRVYTPVGKAEQGKFALEVAAKTLPFYKDYFNVPYPLPKIDLIAIADFAAGAMENWGLVTYRETALLIDPKNSCSSSRQWVALVVGHELAHQWFGNLVTMEWWTHLWLNEGFASWIEYLCVDHCFPEYDIWTQFVSADYTRAQELDALDNSHPIEVSVGHPSEVDEIFDAISYSKGASVIRMLHDYIGDKDFKKGMNMYLTKFQQKNAATEDLWESLENASGKPIAAVMNTWTKQMGFPLIYVEAEQVEDDRLLRLSQKKFCAGGSYVGEDCPQWMVPITISTSEDPNQAKLKILMDKPEMNVVLKNVKPDQWVKLNLGTVGFYRTQYSSAMLESLLPGIRDLSLPPVDRLGLQNDLFSLARAGIISTVEVLKVMEAFVNEPNYTVWSDLSCNLGILSTLLSHTDFYEEIQEFVKDVFSPIGERLGWDPKPGEGHLDALLRGLVLGKLGKAGHKATLEEARRRFKDHVEGKQILSADLRSPVYLTVLKHGDGTTLDIMLKLHKQADMQEEKNRIERVLGATLLPDLIQKVLTFALSEEVRPQDTVSVIGGVAGGSKHGRKAAWKFIKDNWEELYNRYQGGFLISRLIKLSVEGFAVDKMAGEVKAFFESHPAPSAERTIQQCCENILLNAAWLKRDAESIHQYLLQRKASPPTV

SEQ ID NO: 4895 - protein, 906 aa, Homo sapiens
MEPRDGSPEARSSDSESASASSSGSERDAGPEPDKAPRRLNKRRFPGLRLFGHRKAITKSGLQHLAPPPPTPGAPCSESERQIRSTVDWSESATYGEHIWFETNVSGDFCYVGEQYCVARMLQKSVSRRKCAACKIVVHTPCIEQLEKINFRCKPSFRESGSRNVREGFQQKFTFHSKEIVAISCSWCKQAYHSKVSCFMLQQIEEPCSLGVHAAVVIPPTWILRARRPQNTLKASKKKKRASFKRKSSKKGPEEGRWRPFIIRPTPSPLMKPLLVFVNPKSGGNQGAKIIQSFLWYLNPRQVFDLSQGGPKEALEMYRKVHNLRILACGGDGTVGWILSTLDQLRLKPPPPVAILPLGTGNDLARTLNWGGGYTDEPVSKILSHVEEGNVVQLDRWDLHAEPNPEAGPEDRDEGATDRLPLDVFNNYFSLGFDAHVTLEFHESREANPEKFNSRFRNKMFYAGTAFSDFLMGSSKDLAKHIRVVCDGMDLTPKIQDLKPQCVVFLNIPRYCAGTMPWGHPGEHHDFEPQRHDDGYLEVIGFTMTSLAALQVGGHGERLTQCREVVLTTSKAIPVQVDGEPCKLAASRIRIALRNQATMVQKAKRRSAAPLHSDQQPVPEQLRIQVSRVSMHDYEALHYDKEQLKEASVPLGTVVVPGDSDLELCRAHIERLQQEPDGAGAKSPTCQKLSPKWCFLDATTASRFYRIDRAQEHLNYVTEIAQDEIYILDPELLGASARPDLPTPTSPLPTSPCSPTPRSLQGDAAPPQGEELIEAAKRNDFCKLQELHRAGGDLMHRDEQSRTLLHHAVSTGSKDVVRYLLDHAPPEILDAVEENGETCLHQAAALGQRTICHYIVEAGASLMKTDQQGDTPRQRAEKAQDTELAAYLENRQHYQMIQREDQETAV

SEQ ID NO: 4896 - protein, 397 aa, Homo sapiens
MEELQEPLRGQLRLCFTQAARTSLLLLRLNDAALRALQECQRQQVRPVIAFQGHRGYLRLPGPGWSCLFSFIVSQCCQEGAGGSLDLVCQRFLRSGPNSLHCLGSLRERLIIWAAMDSIPAPSSVQGHNLTEDARHPESWQNTGGYSEGDAVSQPQMALEEVSVSDPLASNQGQSLPGSSREHMAQWEVRSQTHVPNREPVQALPSSASRKRLDKKRSVPVATVELEEKRFRTLPLVPSPLQGLTNQDLQEGEDWEQEDEDMDPRLEHSSSVQEDSESPSPEDIPDYLLQYRAIHSAEQQHAYEQDFETDYAEYRILHARVGTASQRFIELGAEIKRVRRGTPEYKVLEDKIIQEYKKFRKQYPSYREEKRRCEYLHQKLSHIKGLILEFEEKNRGS

SEQ ID NO: 4897 - protein, 502 aa, Homo sapiens
MGTENKEVIPKEEISEESEPHGSLLEKFPKVVYQGHEFGAGCEEDMLEGHSRESMEEVIEQMSPQERDFPSGLMIFKKSPSSEKDRENNESERGCSPSPNLVTHQGDTTEGVSAFATSGQNFLEILESNKTQRSSVGEKPHTCKECGKAFNQNSHLIQHMRVHSGEKPFECKECGKTFGTNSSLRRHLRIHAGEKPFACNECGKAFIQSSHLIHHHRIHTGERPYKCEECGKAFSQNSALILHQRIHTGEKPYECNECGKTFRVSSQLIQHQRIHTEERYHECNECGKAFKHSSGLIRHQKIHTGEKPYLCNECGKGFGQSSELIRHQRIHTGDKPYECNECGKTFGQNSEIIRHIRIHTGEKPYVCKECGKAFRGNSELLRHERIHTGEKPYECFECGKAFRRTSHLIVHQRIHTGEKPHQCNECARTFWDNSELLLHQKIHIGEKPYECSECEKTFSQHSQLIIHQRIHTGEKPYECQECQKTFSRSSHLLRHQSVHCME

SEQ ID NO: 4898 - protein, 419 aa, Homo sapiens
MSVVHQLSAGWLLDHLSFINKINYQLHQHHEPCCRKKEFTTSVHFESLQMDSVSSSGVCAAFIASDSSTKPENDDGGNYEMFTRKFVFRPELFDVTKPYITPAVHKECQQSNEKEDLMNGVKKEISISIIGKKRKRCVVFNQGELDAMEYHTKIRELILDGSLQLIQEGLKSGFLYPLFEKQDKGSKPITLPLDACSLSELCEMAKHLPSLNEMEHQTLQLVEEDTSVTEQDLFLRVVENNSSFTKVITLMGQKYLLPPKSSFLLSDISCMQPLLNYRKTFDVIVIDPPWQNKSVKRSNRYSYLSPLQIQQIPIPKLAAPNCLLVTWVTNRQKHLRFIKEELYPSWSVEVVAEWHWVKITNSGEFVFPLDSPHKKPYEGLILGRVQEKTALPLRGFKRLHQARWGIFGVVCSKFTARLD

SEQ ID NO: 4899 - protein, 535 aa, Homo sapiens
MEEGARHRNNTEKKHPGGGESDASPEAGSGGGGVALKKEIGLVSACGIIVGNIIGSGIFVSPKGVLENAGSVGLALIVWIVTGFITVVGALCYAELGVTIPKSGGDYSYVKDIFGGLAGFLRLWIAVLVIYPTNQAVIALTFSNYVLQPLFPTCFPPESGLRLLAAICLLLLTWVNCSSVRWATRVQDIFTAGKLLALALIIIMGIVQICKGEYFWLEPKNAFENFQEPDIGLVALAFLQGSFAYGGWNFLNYVTEELVDPYKNLPRAIFISIPLVTFVYVFANVAYVTAMSPQELLASNAVAVTFGEKLLGVMAWIMPISVALSTFGGVNGSLFTSSRLFFAGAREGHLPSVLAMIHVKRCTPIPALLFTCISTLLMLVTSDMYTLINYVGFINYLFYGVTVAGQIVLRWKKPDIPRPIKINLLFPIIYLLFWAFLLVFSLWSEPVVCGIGLAIMLTGVPVYFLGVYWQHKPKCFSDFIELLTLVSQKMCVVVYPEVERGSGTEEANEDMEEQQQPMYQPTPTKDKDVAGQPQP

SEQ ID NO: 4900 - protein, 590 aa, Homo sapiens
MTLTLSVLICLGLSVGPRTCVQAGTLPKPTLWAEPASVIARGKPVTLWCQGPLETEEYRLDKEGLPWARKRQNPLEPGAKAKFHIPSTVYDSAGRYRCYYETPAGWSEPSDPLELVATGFYAEPTLLALPSPVVASGGNVTLQCDTLDGLLTFVLVEEEQKLPRTLYSQKLPKGPSQALFPVGPVTPSCRWRFRCYYYYRKNPQVWSNPSDLLEILVPGVSRKPSLLIPQGSVVARGGSLTLQCRSDVGYDIFVLYKEGEHDLVQGSGQQPQAGLSQANFTLGPVSRSHGGQYRCYGAHNLSPRWSAPSDPLDILIAGLIPDIPALSVQPGPKVASGENVTLLCQSWHQIDTFFLTKEGAAHPPLCLKSKYQSYRHQAEFSMSPVTSAQGGTYRCYSAIRSYPYLLSSPSYPQELVVSGPSGDPSLSPTGSTPTPGPEDQPLTPTGLDPQSGLGRHLGVVTGVSVAFVLLLFLLLFLLLRHRHQSKHRTSAHFYRPAGAAGPEPKDQGLQKRASPVADIQEEILNAAVKDTQPKDGVEMDAPAAASEAPQDVTYAQLHSLTLRREATEPPPSQEREPPAEPSIYAPLAIH

SEQ ID NO: 4901 - protein, 530 aa, Homo sapiens
MSLKWMSVFLLMQLSCYFSSGSCGKVLVWPTEYSHWINMKTILEELVQRGHEVIVLTSSASILVNASKSSAIKLEVYPTSLTKNDLEDFFMKMFDRWTYSISKNTFWSYFSQLQELCWEYSDYNIKLCEDAVLNKKLMRKLQESKFDVLLADAVNPCGELLAELLNIPFLYSLRFSVGYTVEKNGGGFLFPPSYVPVVMSELSDQMIFMERIKNMIYMLYFDFWFQAYDLKKWDQFYSEVLGRPTTLFETMGKAEMWLIRTYWDFEFPRPFLPNVDFVGGLHCKPAKPLPKEMEEFVQSSGENGIVVFSLGSMISNMSEESANMIASALAQIPQKVLWRFDGKKPNTLGSNTRLYKWLPQNDLLGHPKTKAFITHGGTNGIYEAIYHGIPMVGIPLFADQHDNIAHMKAKGAALSVDIRTMSSRDLLNALKSVINDPIYKENIMKLSRIHHDQPVKPLDRAVFWIEFVMRHKGAKHLRVAAHNLTWIQYHSLDVIAFLLACVATMIFMITKCCLFCFRKLAKTGKKKKRD

SEQ ID NO: 4902 - protein, 251 aa, Homo sapiens
MYRARAARAGPEPGSPGRFGILSTGQLRDLLQDEPKLDRIVRLSRKFQGLQLEREACLASNYALAKENLALRPRLEMGRAALAIKYQELREVAENCADKLQRLEESMHRWSPHCALGWLQAELEEAEQEAEEQMEQLLLGEQSLEAFLPAFQRGRALAHLRRTQAEKLQELLRRRERSAQPAPTSAADPPKSFPAAAVLPTGAARGPPAVPRSLPPLDSRPVPPLKGSPGCPLGPAPLLSPRPSQPEPPHR

SEQ ID NO: 4903 - protein, 380 aa, Homo sapiens
MRNCKMARVASVLGLVMLSVALLILSLISYVSLKKENIFTTPKYASPGAPRMYMFHAGFRSQFALKFLDPSFVPITNSLTQELQEKPSKWKFNRTAFLHQRQEILQHVDVIKNFSLTKNSVRIGQLMHYDYSSHKYVFSISNNFRSLLPDVSPIMNKHYNICAVVGNSGILTGSQCGQEIDKSDFVFRCNFAPTEAFQRDVGRKTNLTTFNPSILEKYYNNLLTIQDRNNFFLSLKKLDGAILWIPAFFFHTSATVTRTLVDFFVEHRGQLKVQLAWPGNIMQHVNRYWKNKHLSPKRLSTGILMYTLASAICEEIHLYGFWPFGFDPNTREDLPYHYYDKKGTKFTTKWQESHQLPAEFQLLYRMHGEGLTKLTLSHCA

SEQ ID NO: 4904 - protein, 734 aa, Homo sapiens
MAASPGPAGVGGAGAVYGSGSSGFALDSGLEIKTRSVEQTLLPLVSQITTLINHKDNTKKSDKTLQAIQRVGQAVNLAVGRFVKVGEAIANENWDLKEEINIACIEAKQAGETIAALTDITNLNHLESDGQITIFTDKTGVIKAARLLLSSVTKVLLLADRVVIKQIITSRNKVLATMERLEKVNSFQEFVQIFSQFGNEMVEFAHLSGDRQNDLKDEKKKAKMAAARAVLEKCTMMLLTASKTCLRHPNCESAHKNKEGVFDRMKVALDKVIEIVTDCKPNGETDISSISIFTGIKEFKMNIEALRENLYFQSKENLSVTLEVILERMEDFTDSAYTSHEHRERILELSTQARMELQQLISVWIQAQSKKTKSIAEELELSILKISHSLNELKKELHSTATQLAADLLKYHADHVVLKALKLTGVEGNLEALAEYACKLSEQKEQLVETCRLLRHISGTEPLEITCIHAEETFQVTGQQIISAAETLTLHPSSKIAKENLDVFCEAWESQISDMSTLLREINDVFEGRRGEKYGYLSLPKPMKNNANLKSLKPDKPDSEEQAKIAKLGLKLGLLTSDADCEIEKWEDQENEIVQYGRNMSSMAYSLYLFTRGEGPLKTSQDLIHQLEVFAAEGLKLTSSVQAFSKQLKDDDKLMLLLEINKLIPLCHQLQTVTKTSLQNKVFLKVDKCITKTRSMMALLVQLLSLCYKLLKKLQMENNGWVSVTNKDTMDSKT

SEQ ID NO: 4905 - protein, 615 aa, Homo sapiens
MTSPSPRIQIISTDSAVASPQRIQGSEPASGPLSVFTSLNKEKIVTDQQTGQKIQIVTAVDASGSPKQQFILTSPDGAGTGKVILASPETSSAKQLIFTTSDNLVPGRIQIVTDSASVERLLGKTDVQRPQVVEYCVVCGDKASGRHYGAVSCEGCKGFFKRSVRKNLTYSCRSNQDCIINKHHRNRCQFCRLKKCLEMGMKMESVQSERKPFDVQREKPSNCAASTEKIYIRKDLRSPLIATPTFVADKDGARQTGLLDPGMLVNIQQPLIREDGTVLLATDSKAETSQGALGTLANVVTSLANLSESLNNGDTSEIQPEDQSASEITRAFDTLAKALNTTDSSSSPSLADGIDTSGGGSIHVISRDQSTPIIEVEGPLLSDTHVTFKLTMPSPMPEYLNVHYICESASRLLFLSMHWARSIPAFQALGQDCNTSLVRACWNELFTLGLAQCAQVMSLSTILAAIVNHLQNSIQEDKLSGDRIKQVMEHIWKLQEFCNSMAKLDIDGYEYAYLKAIVLFSPDHPGLTSTSQIEKFQEKAQMELQDYVQKTYSEDTYRLARILVRLPALRLMSSNITEELFFTGLIGNVSIDSIIPYILKMETAEYNGQITGASL

SEQ ID NO: 4906 - protein, 2285 aa, Homo sapiens
MAAQVAPAAASSLGNPPPPPPSELKKAEQQQREEAGGEAAAAAAAERGEMKAAAGQESEGPAVGPPQPLGKELQDGAESNGGGGGGGAGSGGGPGAEPDLKNSNGNAGPRPALNNNLTEPPGGGGGGSSDGVGAPPHSAAAALPPPAYGFGQPYGRSPSAVAAAAAAVFHQQHGGQQSPGLAALQSGGGGGLEPYAGPQQNSHDHGFPNHQYNSYYPNRSAYPPPAPAYALSSPRGGTPGSGAAAAAGSKPPPSSSASASSSSSSFAQQRFGAMGGGGPSAAGGGTPQPTATPTLNQLLTSPSSARGYQGYPGGDYSGGPQDGGAGKGPADMASQCWGAAAAAAAAAAASGGAQQRSHHAPMSPGSSGGGGQPLARTPQPSSPMDQMGKMRPQPYGGTNPYSQQQGPPSGPQQGHGYPGQPYGSQTPQRYPMTMQGRAQSAMGGLSYTQQIPPYGQQGPSGYGQQGQTPYYNQQSPHPQQQQPPYSQQPPSQTPHAQPSYQQQPQSQPPQLQSSQPPYSQQPSQPPHQQSPAPYPSQQSTTQQHPQSQPPYSQPQAQSPYQQQQPQQPAPSTLSQQAAYPQPQSQQSQQTAYSQQRFPPPQELSQDSFGSQASSAPSMTSSKGGQEDMNLSLQSRPSSLPDLSGSIDDLPMGTEGALSPGVSTSGISSSQGEQSNPAQSPFSPHTSPHLPGIRGPSPSPVGSPASVAQSRSGPLSPAAVPGNQMPPRPPSGQSDSIMHPSMNQSSIAQDRGYMQRNPQMPQYSSPQPGSALSPRQPSGGQIHTGMGSYQQNSMGSYGPQGGQYGPQGGYPRQPNYNALPNANYPSAGMAGGINPMGAGGQMHGQPGIPPYGTLPPGRMSHASMGNRPYGPNMANMPPQVGSGMCPPPGGMNRKTQETAVAMHVAANSIQNRPPGYPNMNQGGMMGTGPPYGQGINSMAGMINPQGPPYSMGGTMANNSAGMAASPEMMGLGDVKLTPATKMNNKADGTPKTESKSKKSSSSTTTNEKITKLYELGGEPERKMWVDRYLAFTEEKAMGMTNLPAVGRKPLDLYRLYVSVKEIGGLTQVNKNKKWRELATNLNVGTSSSAASSLKKQYIQCLYAFECKIERGEDPPPDIFAAADSKKSQPKIQPPSPAGSGSMQGPQTPQSTSSSMAEGGDLKPPTPASTPHSQIPPLPGMSRSNSVGIQDAFNDGSDSTFQKRNSMTPNPGYQPSMNTSDMMGRMSYEPNKDPYGSMRKAPGSDPFMSSGQGPNGGMGDPYSRAAGPGLGNVAMGPRQHYPYGGPYDRVRTEPGIGPEGNMSTGAPQPNLMPSNPDSGMYSPSRYPPQQQQQQQQRHDSYGNQFSTQGTPSGSPFPSQQTTMYQQQQQNYKRPMDGTYGPPAKRHEGEMYSVPYSTGQGQPQQQQLPPAQPQPASQQQAAQPSPQQDVYNQYGNAYPATATAATERRPAGGPQNQFPFQFGRDRVSAPPGTNAQQNMPPQMMGGPIQASAEVAQQGTMWQGRNDMTYNYANRQSTGSAPQGPAYHGVNRTDEMLHTDQRANHEGSWPSHGTRQPPYGPSAPVPPMTRPPPSNYQPPPSMQNHIPQVSSPAPLPRPMENRTSPSKSPFLHSGMKMQKAGPPVPASHIAPAPVQPPMIRRDITFPPGSVEATQPVLKQRRRLTMKDIGTPEAWRVMMSLKSGLLAESTWALDTINILLYDDNSIMTFNLSQLPGLLELLVEYFRRCLIEIFGILKEYEVGDPGQRTLLDPGRFSKVSSPAPMEGGEEEEELLGPKLEEEEEEEVVENDEEIAFSGKDKPASENSEEKLISKFDKLPVKIVQKNDPFVVDCSDKLGRVQEFDSGLLHWRIGGGDTTEHIQTHFESKTELLPSRPHAPCPPAPRKHVTTAEGTPGTTDQEGPPPDGPPEKRITATMDDMLSTRSSTLTEDGAKSSEAIKESSKFPFGISPAQSHRNIKILEDEPHSKDETPLCTLLDWQDSLAKRCVCVSNTIRSLSFVPGNDFEMSKHPGLLLILGKLILLHHKHPERKQAPLTYEKEEEQDQGVSCNKVEWWWDCLEMLRENTLVTLANISGQLDLSPYPESICLPVLDGLLHWAVCPSAEAQDPFSTLGPNAVLSPQRLVLETLSKLSIQDNNVDLILATPPFSRLEKLYSTMVRFLSDRKNPVCREMAVVLLANLAQGDSLAARAIAVQKGSIGNLLGFLEDSLAATQFQQSQASLLHMQNPPFEPTSVDMMRRAARALLALAKVDENHSEFTLYESRLLDISVSPLMNSLVSQVICDVLFLIGQS

SEQ ID NO: 4907 - protein, 785 aa, Homo sapiens
MLPAAPGKGLGSPDPAPCGPAPPGNTKDIIMIYEEDAEEWALYLTEVFLHVVKREAILLYRLENFSFRHLELLNLTSYKCKLLILSNSLLRDLTPKKCQFLEKILHSPKSVVTLLCGVKSSDQLYELLNISQSRWEISTEQEPEDYISVIQSIIFKDSEDYFEVNIPTDLRAKHSGEISERKEIEELSEASRNTIPLAVVLPTEIPCENPGEIFIILRDEVIGDTVEVEFTSSNKRIRTRPALWNKKVWCMKALEFPAGSVHVNVYCDGIVKATTKIKYYPTAKAKECLFRMADSGESLCQNSIEELDGVLTSIFKHEIPYYEFQSLQTEICSQNKYTHFKELPTLLHCAAKFGLKNLAIHLLQCSGATWASKMKNMEGSDPAHIAERHGHKELKKIFEDFSIQEIDINNEQENDYEEDIASFSTYIPSTQNPAFHHESRKTYGQSADGAEANEMEGEGKQNGSGMETKHSPLEVGSESSEDQYDDLYVFIPGADPENNSQEPLMSSRPPLPPPRPVANAFQLERPHFTLPGTMVEGQMERSQNWGHPGVRQETGDEPKGEKEKKEEEKEQEEEEDPYTFAEIDDSEYDMILANLSIKKKTGSRSFIINRPPAPTPRPTSIPPKEETTPYIAQVFQQKTARRQSDDDKFCGLPKKQDRARIESPAFSTLRGCLTDGQEELILLQEKVKNGKMSMDEALEKFKHWQMGKSGLEMIQQEKLRQLRDCIIGKRPEEENVYNKLTIVHHPGGKETAHNENKFYNVHFSNKLPARPQVEKEFGFCCKKDH

SEQ ID NO: 4908 - protein, 641 aa, Homo sapiens
MTTSSIRRQMKNIVNNYSEAEIKVREATSNDPWGPSSSLMTEIADLTYNVVAFSEIMSMVWKRLNDHGKNWRHVYKALTLLDYLIKTGSERVAQQCRENIFAIQTLKDFQYIDRDGKDQGINVREKSKQLVALLKDEERLKAERAQALKTKERMAQVATGMGSNQITFGRGSSQPNLSTSHSEQEYGKAGGSPASYHGSPEASLCPQHRTGAPLGQSEELQPLSQRHPFLPHLGLASRPNGDWSQPCLTCDRAARATSPRVSSELEQARPQTSGEEELQLQLALAMSREVAEQEERLRRGDDLRLQMALEESRRDTVKIPKKKEHGSLPQQTTLLDLMDALPSSGPAAQKAEPWGPSASTNQTNPWGGPAAPASTSDPWPSFGTKPAASIDPWGVPTGATVQSVPKNSDPWAASQQPASSAGKRASDAWGAVSTTKPVSVSGSFELFSNLNGTIKDDFSEFDNLRTSKKTAESVTSLPSQNNGTTSPDPFESQPLTVASSKPSSARKTPESFLGPNAALVNLDSLVTRPAPPAQSLNPFLAPGAPATSAPVNPFQVNQPQPLTLNQLRGSPVLGTSTSFGPGPGVESMAVASMTSAAPQPALGATGSSLTPLGPAMMNMVGSVGIPPSAAQATGTTNPFLL

SEQ ID NO: 4909 - protein, 353 aa, Homo sapiens
MPTTIEREFEELDTQRRWQPLYLEIRNESHDYPHRVAKFPENRNRNRYRDVSPYDHSRVKLQNAENDYINASLVDIEEAQRSYILTQGPLPNTCCHFWLMVWQQKTKAVVMLNRIVEKESVKCAQYWPTDDQEMLFKETGFSVKLLSEDVKSYYTVHLLQLENINSGETRTISHFHYTTWPDFGVPESPASFLNFLFKVRESGSLNPDHGPAVIHCSAGIGRSGTFSLVDTCLVLMEKGDDINIKQVLLNMRKYRMGLIQTPDQLRFSYMAIIEGAKCIKGDSSIQKRWKELSKEDLSPAFDHSPNKIMTEKYNGNRIGLEEEKLTGDRCTGLSSKMQDTMEENSERPRLTDT

SEQ ID NO: 4910 - protein, 349 aa, Homo sapiens
MTQESFGSGGGGISPKGSGPSVASDEVSSFASALPDRKTASFSSLEPQDQEDLEPVKKKMRGDGDLDLNGQLLVAQPRRNAQTVHEDVRAAAGKPDKMEETLTCIICQDLLHDCVSLQPCMHTFCAACYSGWMERSSLCPTCRCPVERICKNHILNNLVEAYLIQHPDKSRSEEDVQSMDARNKITQDMLQPKVRRSFSDEEGSSEDLLELSDVDSESSDISQPYVVCRQCPEYRRQAAQPPHCPAPEGEPGAPQALGDAPSTSVSLTTAVQDYVCPLQGSHALCTCCFQPMPDRRAEREQDPRVAPQQCAVCLQPFCHLYWGCTRTGCYGCLAPFCVSGRQCFPATSL

SEQ ID NO: 4911 - protein, 3184 aa, Homo sapiens
MEAEDLSKAEDRNEDPGSKNEGQLAAVQPDVPHGGQSSSPTALWDMLERKFLEYQQLTHKSPIERQKSLLSLLPLFLKAWEHSVGIICFPSLQRLAEDVSDQLAQQLQKALVGKPAEQARLAAGQLLWWKGDVDQDGYLLLKSVYVLTGTDSETLGRVAESGLPALLLQCLYLFFVFPLDKDELLESDLQVQKMFVQMLLNICSDSQGLEGLLSGSELQSLLIATTCLREHSCCFWKEPTFCVLRAISKAQNLSIIQYLQATDCVRLSLQNLSRLTDTLPAPEVSEAVSLILGFVKDSYPVSSALFLEFENSEGYPLLLKVLLRYDGLTQSEVDPHLEELLGLVVWLTTCGRSELKVFDSITYPQLEGFKFHHEASGVTVKNLQAFQVLQNVFHKASDSVLCIQVLSVIRTMWAWNARNFFLLEWTLQPISQFVEIMPLKPAPVQEHFFQLLEALVFELHYVPHEILRKVQHLIKESPGPSCTLMALQSILSIAGGDPLFTDIFRDSGLLGLLLAQLRKQAKIMRKSGNKVSTPGVQDPERELTCVMLRIVVTLLKGSVRNAVVLKDHGMVPFIKIFLDDECYREASLSILEQLSAINAEEYMSIIVGALCSSTQGELQLKLDLLKSLLRILVTPKGRAAFRVSSGFNGLLSLLSDLEGSLQEPPLQAWGAVSPRQTLELVLYTLCAVSAALHWDPVNGYFFRRNGLFEKLAEDLCLLGCFGALEEEGNLLRSWVDTKARPFADLLGTAFSSSGSLPPRIQSCLQILGFLDSMASGTLHLRGDLKESLRTKQGPVVDVQKGETGSDPQRNFKQWPDLEERMDEGDAAIMHPGVVCIMVRLLPRLYHEDHPQLSEEIQCSLASHIQSLVKSEKNRQVMCEAGLLGTLMASCHRALVTSGSPLHSRLIRIFEKLASQAIEPDVLRQFLGLGIPSSLSATTKILDSSHTHRGNPGCSGSQTAQGLAEGPWPAAPDAGLHPGVTQAPQPLGESQDSTTALQTALSLISMTSPRNLQPQRAALAPSFVEFDMSVEGYGCLFIPTLSTVMGTSTEYSVSGGIGTGATRPFPPPGGLTFSCWFLISRHGAATEGHPLRFLTLVRHLARTEQPFVCFSVSLCPDDLSLVVSTEEKEFQPLDVMEPEDDSEPSAGCQLQVRCGQLLACGQWHHLAVVVTKEMKRHCTVSTCLDGQVIGSAKMLYIQALPGPFLSMDPSAFVDVYGYIATPRVWKQKSSLIWRLGPTYLFEEAISMETLEVINKLGPRYCGNFQAVHVQGEDLDSEATPFVAEERVSFGLHIASSSITSVADIRNAYNEVDSRLIAKEMNISSRDNAMPVFLLRNCAGHLSGSLRTIGAVAVGQLGVRVFHSSPAASSLDFIGGPAILLGLISLATDDHTMYAAVKVLHSVLTSNAMCDFLMQHICGYQIMAFLLRKKASLLNHRIFQLILSVAGTVELGFRSSAITNTGVFQHILCNFELWMNTADNLELSLFSHLLEILQSPREGPRNAEAAHQAQLIPKLIFLFNEPSLIPSKISTIIGILACQLRGHFSTQDLLRIGLFVVYTLKPSSVNERQICMDGALDPSLPAGSQTSGKTIWLRNQLLEMLLSVISSPQLHLSSESKEEMFLKLGPDWFLLLLQGHLHASTTVLALKLLLYFLASPSLRTRFRDGLCAGSWVERSTEGVDIVMDNLKSQSPLPEQSPCLLPGFRVLNDFLAHHVHIPEVYLIVSTFFLQTPLTELMDGPKDSLDAMLQWLLQRHHQEEVLQAGLCTEGALLLLEMLKATMSQPLAGSEDGAWAQTFPASVLQFLSLVHRTYPQDPAWRAPEFLQTLAIAAFPLGAQKGVGAESTRNTSSPEAAAEGDSTVEGLQAPTKAHPARRKLREFTQLLLRELLLGASSPKQWLPLEVLLEASPDHATSQQKRDFQSEVLLSAMELFHMTSGGDAAMFRDGKEPQPSAEAAAAPSLANISCFTQKLVEKLYSGMFSADPRHILLFILEHIMVVIETASSQRDTVLSTLYSSLNKVILYCLSKPQQSLSECLGLLSILGFLQEHWDVVFATYNSNISFLLCLMHCLLLLNERSYPEGFGLEPKPRMSTYHQVFLSPNEDVKEKREDLPSLSDVQHNIQKTVQTLWQQLVAQRQQTLEDAFKIDLSVKPGEREVKIEEVTPLWEETMLKAWQHYLASEKKSLASRSNVAHHSKVTLWSGSLSSAMKLMPGRQAKDPECKTEDFVSCIENYRRRGQELYASLYKDHVQRRKCGNIKAANAWARIQEQLFGELGLWSQGEETKPCSPWELDWREGPARMRKRIKRLSPLEALSSGRHKESQDKNDHISQTNAENQDELTLREAEGEPDEVGVDCTQLTFFPALHESLHSEDFLELCRERQVILQELLDKEKVTQKFSLVIVQGHLVSEGVLLFGHQHFYICENFTLSPTGDVYCTRHCLSNISDPFIFNLCSKDRSTDHYSCQCHSYADMRELRQARFLLQDIALEIFFHNGYSKFLVFYNNDRSKAFKSFCSFQPSLKGKATSEDTLSLRRYPGSDRIMLQKWQKRDISNFEYLMYLNTAAGRTCNDYMQYPVFPWVLADYTSETLNLANPKIFRDLSKPMGAQTKERKLKFIQRFKEVEKTEGDMTVQCHYYTHYSSAIIVASYLVRMPPFTQAFCALQGGSFDVADRMFHSVKSTWESASRENMSDVRELTPEFFYLPEFLTNCNGVEFGCMQDGTVLGDVQLPPWADGDPRKFISLHRKALESDFVSANLHHWIDLIFGYKQQGPAAVDAVNIFHPYFYGDRMDLSSITDPLIKSTILGFVSNFGQVPKQLFTKPHPARTAAGKPLPGKDVSTPVSLPGHPQPFFYSLQSLRPSQVTVKDMYLFSLGSESPKGAIGHIVSTEKTILAVERNKVLLPPLWNRTFSWGFDDFSCCLGSYGSDKVLMTFENLAAWGRCLCAVCPSPTTIVTSGTSTVVCVWELSMTKGRPRGLRLRQALYGHTQAVTCLAASVTFSLLVSGSQDCTCILWDLDHLTHVTRLPAHREGISAITISDVSGTIVSCAGAHLSLWNVNGQPLASITTAWGPEGAITCCCLMEGPAWDTSQIIITGSQDGMVRVWKTEDVKMSVPGRPAGEEPPAQPPSPRGHKWEKNLALSRELDVSIALTGKPSKTSPAVTALAVSRNHTKLLVGDERGRIFCWSADG

SEQ ID NO: 4912 - protein, 418 aa, Homo sapiens
MLYLEDYLEMIEQLPMDLRDRFTEMREMDLQVQNAMDQLEQRVSEFFMNAKKNKPEWREEQMASIKKDYYKALEDADEKVQLANQIYDLVDRHLRKLDQELAKFKMELEADNAGITEILERRSLELDTPSQPVNNHHAHSHTPVEKRKYNPTSHHTTTDHIPEKKFKSEALLSTLTSDASKENTLGCRNNNSTASSNNAYNVNSSQPLGSYNIGSLSSGTGAGAITMAAAQAVQATAQMKEGRRTSSLKASYEAFKNNDFQLGKEFSMARETVGYSSSSALMTTLTQNASSSAADSRSGRKSKNNNKSSSQQSSSSSSSSSLSSCSSSSTVVQEISQQTTVVPESDSNSQVDWTYDPNEPRYCICNQVSYGEMVGCDNQDCPIEWFHYGCVGLTEAPKGKWYCPQCTAAMKRRGSRHK

SEQ ID NO: 4913 - protein, 211 aa, Homo sapiens
MWASLSLDHPSAKENQALRLIEMREENGNVPKTEQAGSLKPLRDTGKSNLKEKKANSKLKQIEKEYTQKLAKSSQIIAELQTTISSLKEENSQQQLAAERRLQDVRQKFEDEKKQLIRDNDQAIKVLQDELENRSNQVRCAEKKLQHKELESQEQITYIRQEYETKLKGLMPASLRQELEDTISSLKSQVNFLQKRASILQEELTTYQGRR

SEQ ID NO: 4914 - protein, 1845 aa, Homo sapiens
MGDVKLVASSHISKTSLSVDPSRVDSMPLTEAPAFILPPRNLCIKEGATAKFEGRVRGYPEPQVTWHRNGQPITSGGRFLLDCGIRGTFSLVIHAVHEEDRGKYTCEATNGSGARQVTVELTVEGSFAKQLGQPVVSKTLGDRFSAPAVETRPSIWGECPPKFATKLGRVVVKEGQMGRFSCKITGRPQPQVTWLKGNVPLQPSARVSVSEKNGMQVLEIHGVNQDDVGVYTCLVVNGSGKASMSAELSIQGLDSANRSFVRETKATNSDVRKEVTNVISKESKLDSLEAAAKSKNCSSPQRGGSPPWAANSQPQPPRESKLESCKDSPRTAPQTPVLQKTSSSITLQAARVQPEPRAPGLGVLSPSGEERKRPAPPRPATFPTRQPGLGSQDVVSKAANRRIPMEGQRDSAFPKFESKPQSQEVKENQTVKFRCEGLAVMEVAPSFSSVLKDCAVIEGQDFVLQCSVRGTPVPRITWLLNGQPIQYARSTCEAGVAELHIQDALPEDHGTYTCLAENALGQVSCSAWVTVHEKKSSRKSEYLLPVAPSKPTAPIFLQGLSDLKVMDGSQVTMTVQVSGNPPPEVIWLHNGNEIQESEDFHFEQRGTQHSLCIQEVFPEDTGTYTCEAWNSAGEVRTQAVLTVQEPHDGTQPWFISKPRSVTASLGQSVLISCAIAGDPFPTVHWLRDGKALCKDTGHFEVLQNEDVFTLVLKKVQPWHAGQYEILLKNRVGECSCQVSLMLQNSSARALPRGREPASCEDLCGGGVGADGGGSDRYGSLRPGWPARGQGWLEEEDGEDVRGVLKRRVETRQHTEEAIRQQEVEQLDFRDLLGKKVSTKTLSEDDLKEIPAEQMDFRANLQRQVKPKTVSEEERKVHSPQQVDFRSVLAKKGTSKTPVPEKVPPPKPATPDFRSVLGGKKKLPAENGSSSAETLNAKAVESSKPLSNAQPSGPLKPVGNAKPAETLKPMGNAKPAETLKPMGNAKPDENLKSASKEELKKDVKNDVNCKRGHAGTTDNEKRSESQGTAPAFKQKLQDVHVAEGKKLLLQCQVSSDPPATIIWTLNGKTLKTTKFIILSQEGSLCSVSIEKALPEDRGLYKCVAKNDAGQAECSCQVTVDDAPASENTKAPEMKSRRPKSSLPPVLGTESDATVKKKPAPKTPPKAAMPPQIIQFPEDQKVRAGESVELFGKVTGTQPITCTWMKFRKQIQESEHMKVENSENGSKLTILAARQEHCGCYTLLVENKLGSRQAQVNLTVVDKPDPPAGTPCASDIRSSSLTLSWYGSSYDGGSAVQSYSIEIWDSANKTWKELATCRSTSFNVQDLLPDHEYKFRVRAINVYGTSEPSQESELTTVGEKPEEPKDEVEVSDDDEKEPEVDYRTVTINTEQKVSDFYDIEERLGSGKFGQVFRLVEKKTRKVWAGKFFKAYSAKEKENIRQEISIMNCLHHPKLVQCVDAFEEKANIVMVLEIVSGGELFERIIDEDFELTERECIKYMRQISEGVEYIHKQGIVHLDLKPENIMCVNKTGTRIKLIDFGLARRLENAGSLKVLFGTPEFVAPEVINYEPIGYATDMWSIGVICYILVSGLSPFMGDNDNETLANVTSATWDFDDEAFDEISDDAKDFISNLLKKDMKNRLDCTQCLQHPWLMKDTKNMEAKKLSKDRMKKYMARRKWQKTGNAVRAIGRLSSMAMISGLSGRKSSTGSPTSPLNAEKLESEEDVSQAFLEAVAEEKPHVKPYFSKTIRDLEVVEGSAARFDCKIEGYPDPEVVWFKDDQSIRESRHFQIDYDEDGNCSLIISDVCGDDDAKYTCKAVNSLGEATCTAELIVETMEEGEGEGEEEEE

SEQ ID NO: 4915 - protein, 413 aa, Homo sapiens
MLPSLGPMLLWTAVLLFVPCVGKTVWLYLQAWPNPVFEGDALTLRCQGWKNTPLSQVKFYRDGKFLHFSKENQTLSMGAATVQSRGQYSCSGQVMYIPQTFTQTSETAMVQVQELFPPPVLSAIPSPEPREGSLVTLRCQTKLHPLRSALRLLFSFHKDGHTLQDRGPHPELCIPGAKEGDSGLYWCEVAPEGGQVQKQSPQLEVRVQAPVSRPVLTLHHGPADPAVGDMVQLLCEAQRGSPPILYSFYLDEKIVGNHSAPCGGTTSLLFPVKSEQDAGNYSCEAENSVSRERSEPKKLSLKGSQVLFTPASNWLVPWLPASLLGLMVIAAALLVYVRSWRKAGPLPSQIPPTAPGGEQCPLYANVHHQKGKDEGVVYSVVHRTSKRSEARSAEFTVGRKFYHLCGGEMPAAQ

SEQ ID NO: 4916 - protein, 710 aa, Homo sapiens
MQGKKPGGSSGGGRSGELQGDEAQRNKKKKKKVSCFSNIKIFLVSECALMLAQGTVGAYLVSVLTTLERRFNLQSADVGVIASSFEIGNLALILFVSYFGARGHRPRLIGCGGIVMALGALLSALPEFLTHQYKYEAGEIRWGAEGRDVCAANGSGGDEGPDPDLICRNRTATNMMYLLLIGAQVLLGIGATPVQPLGVSYIDDHVRRKDSSLYIGILFTMLVFGPACGFILGSFCTKIYVDAVFIDTSNLDITPDDPRWIGAWWGGFLLCGALLFFSSLLMFGFPQSLPPHSEPAMESEQAMLSEREYERPKPSNGVLRHPLEPDSSASCFQQLRVIPKVTKHLLSNPVFTCIILAACMEIAVVAGFAAFLGKYLEQQFNLTTSSANQLLGMTAIPCACLGIFLGGLLVKKLSLSALGAIRMAMLVNLVSTACYVSFLFLGCDTGPVAGVTVPYGNSTAPGSALDPYSPCNNNCECQTDSFTPVCGADGITYLSACFAGCNSTNLTGCACLTTVPAENATVVPGKCPSPGCQEAFLTFLCVMCICSLIGAMAQTPSVIILIRTVSPELKSYALGVLFLLLRLLGFIPPPLIFGAGIDSTCLFWSTFCGEQGACVLYDNVVYRYLYVSIAIALKSFAFILYTTTWQCLRKNYKRYIKNHEGGLSTSEFFASTLTLDNLGRDPVPANQTHRTKFIYNLEDHEWCENMESVL

SEQ ID NO: 4917 - protein, 1622 aa, Homo sapiens
MEAEVWEAEGYNLVLDSDLYDADGYDVPDPGLLTEKNELTFTEPSQVLPFLTSSQQWQSLTPRARARRLWLLLRTSLHEVVEKEKRAELRAARLTHGLEPLRRLEVAAGLRSVAQDPVGGRFVVLDGAGRLHLHKEDGWAQETLLAPVRLTGLVTVLGPLGAVGRFVGWGPAGLAILRPNLSLLWLSEQGVGRAPGWAPTCCLPVPDLRLLLVAEMNSSLALWQFRSGGRRLVLRGSALHPPPSPTGRLMRLAVAPVPPHHVLRCFAAYGSAVLTFDLHAWTLVDVRRDLHKTTISDLAYCEEVEAMVTASRDSTVKVWEADWQIRMVFVGHTGPVTAMTVLPNTTLVLSASQDGTLRTWDLQAAAQVGEVALGFWGQDKLSRRVGRLLAPVRPGWPVLSLCASSMQLWRVRELYSPLAQLPAKVLHVQVAPALPAPAHQSLPTRLVCACADGSVYLLSAATGRIVSSLLLEPEDCAAAVAYCLPREALWLLTRAGHLVRANAARCPMSVLHRVCPPPPPAPQPCCLHLYSHLTDLEGAFSSWEIVRQHWGELRCSSVACAWKNKNRYLPVVGHTDGTLSVLEWLSSKTVFQTEAHSPGPVVAIASTWNSIVSSGGDLTVKMWRVFPYAEESLSLLRTFSCCYPAVALCALGRRVTAGFEDPDSATYGLVQFGLGDSPRLDHRPQDDPTDHITGLCCCPTLKLYACSSLDCTVRIWTAENRLLRLLQLNGAPQALAFCSNSGDLVLALGSRLCLVSHRLYLPTSYLVKKMCRKAPDVVDDPPLPLMSQESLTSAQLQRLTNLHGAASLSEALSLIHRRRATSQHLVPKEDLDAIVARDRDLQQLRLGLVVPAAQPPPSWQQRQEGFDNYLRLIYGSGLLGMQSGRGSQQWSAGTLRVERETRDVCAVPQAAHCLARAEVSTAAQTVPTALSPQDLGALGQHFSQSPRVTVPIPPTHRRVHSKASQLLARSSLSHYLGISLDLQLQLEQLRGRTTMALDLPSSHLQCRIPLLPKRWDKEPLSSLRGFFPATVQPHKHCLRPICFPGYVPNSAVLQQMWLNAEPGASQDALWLWRPRPSQTQWQRKLLQWMGEKPGEEGEEDKKEEEEEKEDEELDWALASLSPHSNQQLDSWELEDQSAVDWTQEPRRRSCKVARTHPHPWHRHGSLLLDEHYGHLPKFLHFFIYQTWFKKLFPIFSLQAYPEAGTIEGLASLLVALLEKTTWVDRVHILQVLLRLLPNMSSDLQGQLQGLLVHLLNLDQPPSLQDQTQKKFVILALQLLLACSLESRDVVLELMSYFLYSPVHCRPELKKLLHGLGLQDPEGFLFKEMMTWVQGPDLDSKAGLRTCCHQKLEDMIQELQETPSQTSVVSGAPTRASVIPSGTSWSASGIFGRLSQVSEVPLMVVSPAEPHSLAPELQAQRMLAPKRSWGTPQLRLRVLSETLKSFCLEPEARLHPAGPAQLPGEPPPLEETDWSHSQLLDLGPIDALNFFCEQLRAQQRSSLQEKAAHPHPPEPYTVAPVPDMVVPPPREHWYHPILRLQEAKPQRSARSAMRLRGPMRSRLCAGRTLDGPIRTLKLPLPRVEPQPFPLDWPMPPRPLPPRLLQPALQRYFLPADADPDTYS

SEQ ID NO: 4918 - protein, 374 aa, Homo sapiens
MRAPMLQKQQAPRMDTPPPEERLEKQNEKLNNQEEETEFKELDGLREALANLRGLSEEERSEKAMLRSRIEEQSQLICILKRRSDEALERCQILELLNAELEEKMMQEAEKLKAQGEYSRKLEERFMTLAANHELMLRFKDEYKSENIKLREENEKLRLENSSLFSQALKDEEAKVLQLTVRCEALTGELETLKERCAQDACQAQAREKELLELQSQQACTHTKETEQLRSQLQTLKQQHQQAVEQIAKAEETHSSLSQELQARLQTVTREKEELLQLSIERGKVLQNKQAEICQLEEKLEIANEDRKHALERFEQEAVAVDSNLRVRELQRKVDGIQKAYDELRLQSEAFKKHSLDLLSKERELNGKLRHLSP

SEQ ID NO: 4919 - protein, 981 aa, Homo sapiens
MDGFAGSLDDSISAASTSDVQDRLSALESRVQQQEDEITVLKAALADVLRRLAISEDHVASVKKSVSSKGQPSPRAVIPMSCITNGSGANRKPSHTSAVSIAGKETLSSAAKSGTEKKKEKPQGQREKKEESHSNDQSPQIRASPSPQPSSQPLQIHRQTPESKNATPTKSIKRPSPAEKSHNSWENSDDSRNKLSKIPSTPKLIPKVTKTADKHKDVIINQEGEYIKMFMRGRPITMFIPSDVDNYDDIRTELPPEKLKLEWAYGYRGKDCRANVYLLPTGKIVYFIASVVVLFNYEERTQRHYLGHTDCVKCLAIHPDKIRIATGQIAGVDKDGRPLQPHVRVWDSVTLSTLQIIGLGTFERGVGCLDFSKADSGVHLCIIDDSNEHMLTVWDWQKKAKGAEIKTTNEVVLAVEFHPTDANTIITCGKSHIFFWTWSGNSLTRKQGIFGKYEKPKFVQCLAFLGNGDVLTGDSGGVMLIWSKTTVEPTPGKGPKGVYQISKQIKAHDGSVFTLCQMRNGMLLTGGGKDRKIILWDHDLNPEREIEVPDQYGTIRAVAEGKADQFLVGTSRNFILRGTFNDGFQIEVQGHTDELWGLATHPFKDLLLTCAQDRQVCLWNSMEHRLEWTRLVDEPGHCADFHPSGTVVAIGTHSGRWFVLDAETRDLVSIHTDGNEQLSVMRYSIDGTFLAVGSHDNFIYLYVVSENGRKYSRYGRCTGHSSYITHLDWSPDNKYIMSNSGDYEILYWDIPNGCKLIRNRSDCKDIDWTTYTCVLGFQVFGVWPEGSDGTDINALVRSHNRKVIAVADDFCKVHLFQYPCSKAKAPSHKYSAHSSHVTNVSFTHNDSHLISTGGKDMSIIQWKLVEKLSLPQNETVADTTLTKAPVSSTESVIQSNTPTPPPSQPLNETAEEESRISSSPTLLENSLEQTVEPSEDHSEEESEEGSGDLGEPLYEEPCNEISKEQAKATLLEDQQDPSPSS

SEQ ID NO: 4920 - protein, 235 aa, Homo sapiens
MSDPHSSPLLPEPLSSRYKLYEAEFTSPSWPSTSPDTHPALPLLEMPEEKDLRSSNEDSHIVKIEKLNERSKRKDDGVAHRDSAGQRCICLSKAVGYLTGDMKEYRIWLKDKHLALQFIDWVLRGTAQVMFINNPLSGLIIFIGLLIQNPWWTITGGLGTVVSTLTALALGQDRSAIASGLHGYNGMLVGLLMAVFSEKLDYYWWLLFPVTFTAMSWMETDFNWSKSGCWKHLLQ

SEQ ID NO: 4921 - protein, 514 aa, Homo sapiens
MADSGLDKKSTKCPDCSSASQKDVLCVCSSKTRVPPVLVVEMSQTSSIGSAESLISLERKKEKNINRDITSRKDLPSRTSNVERKASQQQWGRGNFTEGKVPHIRIENGAAIEEIYTFGRILGKGSFGIVIEATDKETETKWAIKKVNKEKAGSSAVKLLEREVNILKSVKHEHIIHLEQVFETPKKMYLVMELCEDGELKEILDRKGHFSENETRWIIQSLASAIAYLHNNDIVHRDLKLENIMVKSSLIDDNNEINLNIKVTDFGLAVKKQSRSEAMLQATCGTPIYMAPEVISAHDYSQQCDIWSIGVVMYMLLRGEPPFLASSEEKLFELIRKGELHFENAVWNSISDCAKSVLKQLMKVDPAHRITAKELLDNQWLTGNKLSSVRPTNVLEMMKEWKNNPESVEENTTEEKNKPSTEEKLKSYQPWGNVPDANYTSDEEEEKQSTAYEKQFPATSKDNFDMCSSSFTSSKLLPAEIKGEMEKTPVTPSQGTATKYPAKSGALSRTKKKL

SEQ ID NO: 4922 - protein, 233 aa, Homo sapiens
MWGYLSLMPVFLAVWAISGVWIVFAIAVTNRTVDLSKGFPYISICGSFPPQSCIFSQVLNMGAALAAWICIVRYHQLRDWGVRRWPNQLILWTGLLCALGTSVVGNFQEKNQRPTHLAGAFLAFILGNVYFWLQLLLWRLKRLPQPGAAWIGPLRLGLCSVCTILIVAMIVLHACSLRSVSAACEWVVAMLLFALFGLLAVDFSALESCTLCVQPWPSLSPPPASPISLPVQL

SEQ ID NO: 4923 - protein, 1434 aa, Homo sapiens
MEDHMFGVQQIQPNVISVRLFKRKVGGLGFLVKERVSKPPVIISDLIRGGAAEQSGLIQAGDIILAVNGRPLVDLSYDSALEVLRGIASETHVVLILRGPEGFTTHLETTFTGDGTPKTIRVTQPLGPPTKAVDLSHQPPAGKEQPLAVDGASGPGNGPQHAYDDGQEAGSLPHANGLAPRPPGQDPAKKATRVSLQGRGENNELLKEIEPVLSLLTSGSRGVKGGAPAKAEMKDMGIQVDRDLDGKSHKPLPLGVENDRVFNDLWGKGNVPVVLNNPYSEKEQPPTSGKQSPTKNGSPSKCPRFLKVKNWETEVVLTDTLHLKSTLETGCTEYICMGSIMHPSQHARRPEDVRTKGQLFPLAKEFIDQYYSSIKRFGSKAHMERLEEVNKEIDTTSTYQLKDTELIYGAKHAWRNASRCVGRIQWSKLQVFDARDCTTAHGMFNYICNHVKYATNKGNLRSAITIFPQRTDGKHDFRVWNSQLIRYAGYKQPDGSTLGDPANVQFTEICIQQGWKPPRGRFDVLPLLLQANGNDPELFQIPPELVLEVPIRHPKFEWFKDLGLKWYGLPAVSNMLLEIGGLEFSACPFSGWYMGTEIGVRDYCDNSRYNILEEVAKKMNLDMRKTSSLWKDQALVEINIAVLYSFQSDKVTIVDHHSATESFIKHMENEYRCRGGCPADWVWIVPPMSGSITPVFHQEMLNYRLTPSFEYQPDPWNTHVWKGTNGTPTKRRAIGFKKLAEAVKFSAKLMGQAMAKRVKATILYATETGKSQAYAKTLCEIFKHAFDAKVMSMEEYDIVHLEHETLVLVVTSTFGNGDPPENGEKFGCALMEMRHPNSVQEERKSYKVRFNSVSSYSDSQKSSGDGPDLRDNFESAGPLANVRFSVFGLGSRAYPHFCAFGHAVDTLLEELGGERILKMREGDELCGQEEAFRTWAKKVFKAACDVFCVGDDVNIEKANNSLISNDRSWKRNKFRLTFVAEAPELTQGLSNVHKKRVSAARLLSRQNLQSPKSSRSTIFVRLHTNGSQELQYQPGDHLGVFPGNHEDLVNALIERLEDAPPVNQMVKVELLEERNTALGVISNWTDELRLPPCTIFQAFKYYLDITTPPTPLQLQQFASLATSEKEKQRLLVLSKGLQEYEEWKWGKNPTIVEVLEEFPSIQMPATLLLTQLSLLQPRYYSISSSPDMYPDEVHLTVAIVSYRTRDGEGPIHHGVCSSWLNRIQADELVPCFVRGAPSFHLPRNPQVPCILVGPGTGIAPFRSFWQQRQFDIQHKGMNPCPMVLVFGCRQSKIDHIYREETLQAKNKGVFRELYTAYSREPDKPKKYVQDILQEQLAESVYRALKEQGGHIYVCGDVTMAADVLKAIQRIMTQQGKLSAEDAGVFISRMRDDNRYHEDIFGVTLRTYEVTNRLRSESIAFIEESKKDTDEVFSS

SEQ ID NO: 4924 - protein, 176 aa, Homo sapiens
MALPRLTGALRSFSNVTKQDNYNEEVADLKIKRSKLHEQVLDLGLTWKKIIKFLNEKLEKSKMQSINEDLKDILHAAKQIVGTDNGREAIESGAAFLFMTFHLKDSVGHKETKAIKQMFGPFPSSSATAACNATNRIISHFSQDDLTALVQMTEKEHGDRVFFGKNLAFSFDMHDL

SEQ ID NO: 4925 - protein, 2245 aa, Homo sapiens
MPEMTENETPTKKQHRKKNRETHNAVERHRKKKINAGINRIGELIPCSPALKQSKNMILDQAFKYITELKRQNDELLLNGGNNEQAEEIKKLRKQLEEIQKENGRYIELLKANDICLYDDPTIHWKGNLKNSKVSVVIPSDQVQKKIIVYSNGNQPGGNSQGTAVQGITFNVSHNLQKQTANVVPVQRTCNLVTPVSISGVYPSENKPWHQTTVPALATNQPVPLCLPAAISAQSILELPTSESESNVLGATSGSLIAVSIESEPHQHHSLHTCLNDQNSSENKNGQENPKVLKKMTPCVTNIPHSSSATATKVHHGNKSCLSIQDFRGDFQNTFVVSVTTTVCSQPPRTAGDSSPMSISKSADLTSTATVVASSAPGVGKATIPISTLSGNPLDNGWTLSCSLPSSSVSTSDLKNINSLTRISSAGNTQTTWTTLQLAGNTIQPLSQTPSSAVTPVLNESGTSPTTSNHSRYVATDINLNNSFPADGQPVEQVVVTLPSCPSLPMQPLIAQPQVKSQPPKNILPLNSAMQVIQMAQPVGSAVNSAPTNQNVIILQPPSTTPCPTVMRAEVSNQTVGQQIVIIQAANQNPLPLLPAPPPGSVRLPINGANTVIGSNNSVQNVPTPQTFGGKHLVHILPRPSSLSASNSTQTFSVTMSNQQPQTISLNGQLFALQPVMSSSGTTNQTPMQIIQPTTSEDPNTNVALNTFGALASLNQSISQMAGQSCVQLSISQPANSQTAANSQTTTANCVSLTTTAAPPVTTDSSATLASTYNLVSTSSMNTVACLPNMKSKRLNKKPGGRKHLAANKSACPLNSVRDVSKLDCPNTEGSAEPPCNDGLLESFPAVLPSVSVSQANSVSVSASHSLGVLSSESLIPESVSKSKSAEKSSPPSQESVTSEHFAMAAAKSKDSTPNLQQETSQDKPPSSLALSDAAKPCASANVLIPSPSDPHILVSQVPGLSSTTSTTSTDCVSEVEIIAEPCRVEQDSSDTMQTTGLLKGQGLTTLLSDLAKKKNPQKSSLSDQMDHPDFSSENPKIVDSSVNLHPKQELLLMNNDDRDPPQHHSCLPDQEVINGSLINGRQADSPMSTSSGSSRSFSVASMLPETTREDVTSNATTNTCDSCTFVEQTDIVALAARAIFDQENLEKGRVGLQADIREVASKPSEASLLEGDPPFKSQIPKESGTGQAEATPNEFNSQGSIEATMERPLEKPSCSLGIKTSNASLQDSTSQPPSITSLSVNNLIHQSSISHPLASCAGLSPTSEQTTVPATVNLTVSSSSYGSQPPGPSLMTEYSQEQLNTMTSTIPNSQIQEPLLKPSHESRKDSAKRAVQDDLLLSSAKRQKHCQPAPLRLESMSLMSRTPDTISDQTQMMVSQIPPNSSNSVVPVSNPAHGDGLTRLFPPSNNFVTPALRQTEVQCGSQPSVAEQQQTQASQHLQALQQHVPAQGVSHLHSNHLYIKQQQQQQQQQQQQQQQQQAGQLRERHHLYQMQHHVPHAESSVHSQPHNVHQQRTLQQEVQMQKKRNLVQGTQTSQLSLQPKHHGTDQSRSKTGQPHPHHQQMQQQMQQHFGSSQTEKSCENPSTSRNHHNHPQNHLNQDIMHQQQDVGSRQQGSGVSSEHVSGHNPMQRLLTSRGLEQQMVSQPSIVTRSSDMTCTPHRPERNRVSSYSAEALIGKTSSNSEQRMGISIQGSRVSDQLEMRSYLDVPRNKSLAIHNMQGRVDHTVASDIRLSDCQTFKPSGASQQPQSNFEVQSSRNNEIGNPVSSLRSMQSQAFRISQNTGPPPIDRQKRLSYPPVQSIPTGNGIPSRDSENTCHQSFMQSLLAPHLSDQVIGSQRSLSEHQRNTQCGPSSAIEYNCPPTHENVHIRRESESQNRESCDMSLGAINTRNSTLNIPFSSSSSSGDIQGRNTSPNVSVQKSNPMRITESHATKGHMNPPVTTNMHGVARPALPHPSVSHGNGDQGPAVRQANSSVPQRSRHPLQDSSGSKIRQPERNRSGNQRQSTVFDPSLPHLPLSTGGSMILGRQQPATEKRGSIVRFMPDSPQVPNDNSGPDQHTLSQNFGFSFIPEGGMNPPINANASFIPQVTQPSATRTPALIPVDPQNTLPSFYPPYSPAHPTLSNDISIPYFPNQMFSNPSTEKVNSGSLNNRFGSILSPPRPVGFAQPSFPLLPDMPPMHMTNSHLSNFNMTSLFPEIATALPDGSAMSPLLTIANSSASDSSKQSSNRPAHNISHILGHDCSSAV

SEQ ID NO: 4926 - protein, 453 aa, Homo sapiens
MSIVTVQLGQCGNQIGFEVFDALLSDSHSSQGLCSMRENEAYQASCKERFFSEEENGVPIARAVLVDMEPKVINQMLSKAAQSGQWKYGQHACFCQKQGSGNNWAYGYSVHGPRHEESIMNIIRKEVEKCDSFSGFFIIMSMAGGTGSGLGAFVTQNLEDQYSNSLKMNQIIWPYGTGEVIVQNYNSILTLSHLYRSSDALLLHENDAIHKICAKLMNIKQISFSDINQVLAHQLGSVFQPTYSAESSFHYRRNPLGDLMEHLVPHPEFKMLSVRNIPHMSENSLAYTTFTWAGLLKHLRQMLISNAKMEEGIDRHVWPPLSGLPPLSKMSLNKDLHFNTSIANLVILRGKDVQSADVEGFKDPALYTSWLKPVNAFNVWKTQRAFSKYEKSAVLVSNSQFLVKPLDMIVGKAWNMFASKAYIHQYTKFGIEEEDFLDSFTSLEQVVASYCNL

SEQ ID NO: 4927 - protein, 520 aa, Homo sapiens
MLLFLWIETSSEYFNFDWVTFLGTGYWFFWSIFILSLARILTAYSSLLLLLGFLLLWERIELYLHLCHKILILLVILLCVILMFIICKFWKERWLVAGLSMQIFAPYVHLVSITVMVILFWPVAFYVACLEREVRMRRYRMTHSEKKRLKQCNVITRLRGLQVPVGLPFLLILLGLYLMPLGIYSPCIQEKENLGPKPTIFGHRGAPMLGPENTMMSFEKAVEHGAHGLETDIHLSYDHVPFLMHDFDLKRTTNIGEVQPESACENPAFFNWDFLSTLNAGKWFVKPELRPFYNMKPLSEADKERARNQSIPTLADLLTLAEKERKFVIFDLHRPPPKHPLRHTFVRQVVSVILASKIEQHLIFWLPAHDRQYVRSVAPGFQHVGRLVSIETLAKNNISIINVDYKKLFPNGLRDYKAANIHINVYTVNEPWLFSLAWCSRINSVTTDNIGLLSQLDHPHFFMTPKFYVFMWLLADIISVLFIVAIFCFHWRRETEKEKLFETSSTRTDTQSGSKNEEDR

SEQ ID NO: 4928 - protein, 1103 aa, Homo sapiens
MAGASVKVAVRVRPFNARETSQDAKCVVSMQGNTTSIINPKQSKDAPKSFTFDYSYWSHTSTEDPQFASQQQVYRDIGEEMLLHAFEGYNVCIFAYGQTGAGKSYTMMGRQEPGQQGIVPQLCEDLFSRVSENQSAQLSYSVEVSYMEIYCERVRDLLNPKSRGSLRVREHPILGPYVQDLSKLAVTSYADIADLMDCGNKARTVAATNMNETSSRSHAVFTIVFTQRCHDQLTGLDSEKVSKISLVDLAGSERADSSGARGMRLKEGANINKSLTTLGKVISALADMQSKKRKSDFIPYRDSVLTWLLKENLGGNSRTAMIAALSPADINYEETLSTLRYADRTKQIRCNAIINEDPNARLIRELQEEVARLRELLMAQGLSASALEGLKTEEGSVRGALPAVSSPPAPVSPSSPTTHNGELEPSFSPNTESQIGPEEAMERLQETEKIIAELNETWEEKLRKTEALRMEREALLAEMGVAVREDGGTVGVFSPKKTPHLVNLNEDPLMSECLLYHIKDGVTRVGQVDMDIKLTGQFIREQHCLFRSIPQPDGEVVVTLEPCEGAETYVNGKLVTEPLVLKSGNRIVMGKNHVFRFNHPEQARLERERGVPPPPGPPSEPVDWNFAQKELLEQQGIDIKLEMEKRLQDLENQYRKEKEEADLLLEQQRLYADSDSGDDSDKRSCEESWRLISSLREQLPPTTVQTIVKRCGLPSSGKRRAPRRVYQIPQRRRLQGKDPRWATMADLKMQAVKEICYEVALADFRHGRAEIEALAALKMRELCRTYGKPDGPGDAWRAVARDVWDTVGEEEGGGAGSGGGSEEGARGAEVEDLRAHIDKLTGILQEVKLQNSSKDRELQALRDRMLRMERVIPLAQDHEDENEEGGEVPWAPPEGSEAAEEAAPSDRMPSARPPSPPLSSWERVSRLMEEDPAFRRGRLRWLKQEQLRLQGLQGSGGRGGGLRRPPARFVPPHDCKLRFPFKSNPQHRESWPGMGSGEAPTPLQPPEEVTPHPATPARRPPSPRRSHHPRRNSLDGGGRSRGAGSAQPEPQHFQPKKHNSYPQPPQPYPAQRPPGPRYPPYTTPPRMRRQRSAPDLKESGAAV

SEQ ID NO: 4929 - protein, 715 aa, Homo sapiens
MSQSGAVSCCPGATNGSLGRSDGVAKMSPKDLFEQRKKYSNSNVIMHETSQYHVQHLATFIMDKSEAITSVDDAIRKLVQLSSKEKIWTQEMLLQVNDQSLRLLDIESQEELEDFPLPTVQRSQTVLNQLRYPSVLLLVCQDSEQSKPDVHFFHCDEVEAELVHEDIESALADCRLGKKMRPQTLKGHQEKIRQRQSILPPPQGPAPIPFQHRGGDSPEAKNRVGPQVPLSEPGFRRRESQEEPRAVLAQKIEKETQILNCALDDIEWFVARLQKAAEAFKQLNQRKKGKKKGKKAPAEGVLTLRARPPSEGEFIDCFQKIKLAINLLAKLQKHIQNPSAAELVHFLFGPLDLIVNTCSGPDIARSVSCPLLSRDAVDFLRGHLVPKEMSLWESLGESWMRPRSEWPREPQVPLYVPKFHSGWEPPVDVLQEAPWEVEGLASAPIEEVSPVSRQSIRNSQKHSPTSEPTPPGDALPPVSSPHTHRGYQPTPAMAKYVKILYDFTARNANELSVLKDEVLEVLEDGRQWWKLRSRSGQAGYVPCNILGEARPEDAGAPFEQAGQKYWGPASPTHKLPPSFPGNKDELMQHMDEVNDELIRKISNIRAQPQRHFRVERSQPVSQPLTYESGPDEVRAWLEAKAFSPRIVENLGILTGPQLFSLNKEELKKVCGEEGVRVYSQLTMQKAFLEKQQSGSELEELMNKFHSMNQRRGEDS

SEQ ID NO: 4930 - protein, 473 aa, Homo sapiens
MRSLPSNGELDPDVLESMASLGCFRDRERLHRELRSEEENQEKMIYYLLLDRKERYPSCEDQDLPPRNDVDPPRKRVDSPMLSRHGKRRPERKSMEVLSITDAGGGGSPVPTRRALEMAQHSQRSRSVSGASTGLSSSPLSSPRSPVFSFSPEPGAGDEARGGGSPTSKTQTLPSRGPRGGGAGEQPPPPSARSTPLPGPPGSPRSSGGTPLHSPLHTPRASPTGTPGTTPPPSPGGGVGGAAWRSRLNSIRNSFLGSPRFHRRKMQVPTAEEMSSLTPESSPELAKRSWFGNFISLDKEEQIFLVLKDKPLSSIKADIVHAFLSIPSLSHSVLSQTSFRAEYKASGGPSVFQKPVRFQVDISSSEGPEPSPRRDGSGGGGIYSVTFTLISGPSRRFKRVVETIQAQLLSTHDQPSVQALADEKNGAQTRPAGAPPRSLQPPPGRPDPELSSSPRRGPPKDKKLLATNGTPLP

SEQ ID NO: 4931 - protein, 417 aa, Homo sapiens
MLLSVPLLLGLLGLAVAEPAVYFKEQFLDGDGWTSRWIESKHKSDFGKFVLSSGKFYGDEEKDKGLQTSQDARFYALSASFEPFSNKGQTLVVQFTVKHEQNIDCGGGYVKLFPNSLDQTDMHGDSEYNIMFGPDICGPGTKKVHVIFNYKGKNVLINKDIRCKDDEFTHLYTLIVRPDNTYEVKIDNSQVESGSLEDDWDFLPPKKIKDPDASKPEDWDERAKIDDPTDSKPEDWDKPEHIPDPDAKKPEDWDEEMDGEWEPPVIQNPEYKGEWKPRQIDNPDYKGTWIHPEIDNPEYSPDPSIYAYDNFGVLGLDLWQVKSGTIFDNFLITNDEAYAEEFGNETWGVTKAAEKQMKDKQDEEQRLKEEEEDKKRKEEEEAEDKEDDEDKDEDEEDEEDKEEDEEEDVPGQAKDEL

SEQ ID NO: 4932 - protein, 852 aa, Homo sapiens
MAGALAGLAAGLQVPRVAPSPDSDSDTDSEDPSLRRSAGGLLRSQVIHSGHFMVSSPHSDSLPRRRDQEGSVGPSDFGPRSIDPTLTRLFECLSLAYSGKLVSPKWKNFKGLKLLCRDKIRLNNAIWRAWYIQYVKRRKSPVCGFVTPLQGPEADAHRKPEAVVLEGNYWKRRIEVVMREYHKWRIYYKKRLRKPSREDDLLAPKQAEGRWPPPEQWCKQLFSSVVPVLLGDPEEEPGGRQLLDLNCFLSDISDTLFTMTQSGPSPLQLPPEDAYVGNADMIQPDLTPLQPSLDDFMDISDFFTNSRLPQPPMPSNFPEPPSFSPVVDSLFSSGTLGPEVPPASSAMTHLSGHSRLQARNSCPGPLDSSAFLSSDFLLPEDPKPRLPPPPVPPPLLHYPPPAKVPGLEPCPPPPFPPMAPPTALLQEEPLFSPRFPFPTVPPAPGVSPLPAPAAFPPTPQSVPSPAPTPFPIELLPLGYSEPAFGPCFSMPRGKPPAPSPRGQKASPPTLAPATASPPTTAGSNNPCLTQLLTAAKPEQALEPPLVSSTLLRSPGSPQETVPEFPCTFLPPTPAPTPPRPPPGPATLAPSRPLLVPKAERLSPPAPSGSERRLSGDLSSMPGPGTLSVRVSPPQPILSRGRPDSNKTENRRITHISAEQKRRFNIKLGFDTLHGLVSTLSAQPSLKVSKATTLQKTAEYILMLQQERAGLQEEAQQLRDEIEELNAAINLCQQQLPATGVPITHQRFDQMRDMFDDYVRTRTLHNWKFWVFSILIRPLFESFNGMVSTASVHTLRQTSLAWLDQYCSLPALRPTVLNSLRQLGTSTSILTDPGRIPEQATRAVTEGTLGKPL

SEQ ID NO: 4933 - protein, 214 aa, Homo sapiens
MTEPGASPEDPWVKVEYAYSDNSLDPDDEDSDYHQEAYKESYKDRRRRAHTQAEQKRRDAIKRGYDDLQTIVPTCQQQDFSIGSQKLSKAIVLQKTIDYIQFLHKEKKKQEEEVSTLRKDVTALKIMKVNYEQIVKAHQDNPHEGEDQVSDQVKFNVFQGIMDSLFQSFNASISVASFQELSACVFSWIEEHCKPQTLREIVIGVLHQLKNQLY

SEQ ID NO: 4934 - protein, 703 aa, Homo sapiens
MPEPRGSSQLRVNAAFAARYNRYREREELQRLKDRYGDRDSSSDSSSESDSSDERVEFDPQQERDFYKTLSLLKKKDPRIYQKDATFYNRTASSSDSEEDPEALEKQKKVRPMYLKDYERKVILEKAGKYVDEENSDGETSNHRLQETSSQSYVEEQKQLKESFRAFVEDSEDEDGAGEGGSSLLQKRAKTRQEKAQEEADYIEWLKGQKEIRNPDSLKELTHLKEYWNDPELDEGERFLRDYILNKRYEEEEEEEEDEEEMEEEEGVHGPPVQLAVDDSSDEGELFLKKQEDFEQKYNFRFEEPDSASVKTYPRSIASSVRRKDERRKEKREETRERKKREKAKKQEELKQLKNLKRKEILAKLEKLRKVTGNEMLGLEEGDLEDDFDPAQHDQLMQKCFGDEYYGAVEEEKPQFEEEEGLEDDWNWDTWDGPEQEGDWSQQELHCEDPNFNMDADYDPSQPRKKKREAPLTGKKKRKSPFAAAVGQEKPVFEPGDKTFEEYLDEYYRLDYEDIIDDLPCRFKYRTVVPCDFGLSTEEILAADDKELNRWCSLKKTCMYRSEQEELRDKRAYSQKAQNSWKKRQVFKSLCREEAETPAEATGKPQRDEAGPQRQLPALDGSLMGPESPPAQEEEAPVSPHKKPAPQKRRRAKKARLLGPTVMLGGCEFSRQRLQAFGLNPKRLHFRQLGRQRRKQQGPKNSS

SEQ ID NO: 4935 - protein, 440 aa, Homo sapiens
MPIPPPPPPPPGPPPPPTFHQANTEQPKLSRDEQRGRGALLQDICKGTKLKKVTNINDRSAPILEKPKGSSGGYGSGGAALQPKGGLFQGGVLKLRPVGAKDGSENLAGKPALQIPSSRAAAPRPPVSAASGRPQDDTDSSRASLPELPRMQRPSLPDLSRPNTTSSTGMKHSSSAPPPPPPGRRANAPPTPLPMHSSKAPAYNREKPLPPTPGQRLHPGREGPPAPPPVKPPPSPVNIRTGPSGQSLAPPPPPYRQPPGVPNGPSSPTNESAPELPQRHNSLHRKTPGPVRGLAPPPPTSASPSLLSNRPPPPARDPPSRGAAPPPPPPVIRNGARDAPPPPPPYRMHGSEPPSRGKPPPPPSRTPAGPPPPPPPPLRNGHRDSITTVRSFLDDFESKYSFHPVEDFPAPEEYKHFQRIYPSKTNRAARGAPPLPPILR

SEQ ID NO: 4936 - protein, 866 aa, Homo sapiens
MGAARSPPSAVPGPLLGLLLLLLGVLAPGGASLRLLDHRALVCSQPGLNCTVKNSTCLDDSWIHPRNLTPSSPKDLQIQLHFAHTQQGDLFPVAHIEWTLQTDASILYLEGAELSVLQLNTNERLCVRFEFLSKLRHHHRRWRFTFSHFVVDPDQEYEVTVHHLPKPIPDGDPNHQSKNFLVPDCEHARMKVTTPCMSSGSLWDPNITVETLEAHQLRVSFTLWNESTHYQILLTSFPHMENHSCFEHMHHIPAPRPEEFHQRSNVTLTLRNLKGCCRHQVQIQPFFSSCLNDCLRHSATVSCPEMPDTPEPIPDYMPLWVYWFITGISILLVGSVILLIVCMTWRLAGPGSEKYSDDTKYTDGLPAADLIPPPLKPRKVWIIYSADHPLYVDVVLKFAQFLLTACGTEVALDLLEEQAISEAGVMTWVGRQKQEMVESNSKIIVLCSRGTRAKWQALLGRGAPVRLRCDHGKPVGDLFTAAMNMILPDFKRPACFGTYVVCYFSEVSCDGDVPDLFGAAPRYPLMDRFEEVYFRIQDLEMFQPGRMHRVGELSGDNYLRSPGGRQLRAALDRFRDWQVRCPDWFECENLYSADDQDAPSLDEEVFEEPLLPPGTGIVKRAPLVREPGSQACLAIDPLVGEEGGAAVAKLEPHLQPRGQPAPQPLHTLVLAAEEGALVAAVEPGPLADGAAVRLALAGEGEACPLLGSPGAGRNSVLFLPVDPEDSPLGSSTPMASPDLLPEDVREHLEGLMLSLFEQSLSCQAQGGCSRPAMVLTDPHTPYEEEQRQSVQSDQGYISRSSPQPPEGLTEMEEEEEEEQDPGKPALPLSPEDLESLRSLQRQLLFRQLQKNSGWDTMGSESEGPSA

SEQ ID NO: 4937 - protein, 460 aa, Homo sapiens
MKCSNEKVVNQEQSYESMDKFLDGVQEVAYIHSNQNVIGSSKAENHMSRWAAHDVFELKQFSQLPANIAVCSSKTYKEKVDADTLPHTKKGQQPSEGSISLPLYISNPVNQKKKKVYHTNQTTFIIGETPKGIRRKQFEEMASYFNSSSVNEFAKHITNATSEERQKMLRDFYASQYPEVKEFFVDSVSQFNNSSFEKGEQRTRKKSDKRESLIKPRLSDSETLSFKDSTNKISQVCSLKTYKRKSVKFQNHISYREEVFFNDAETKKSPVSSTQEIDSGKNSQASEDTVTSRSLNSESETRERRLENTMKDQQDLTRTGISRKEPLLKLENKKIENPVLENTSVISLLGDTSILDDLFKSHGNSPTQLPKKVLSGPMEKAKQRPKDFWDILNEQNDESLSKLTDLAVIETLCEKAPLAAPFKRREEPATSLWKSNEKFLWKKFSPSDTDENATNTQSTT

SEQ ID NO: 4938 - protein, 1441 aa, Homo sapiens
MSGLGDSSSDPANPDSHKRKGSPCDTLASSTEKRRREQENKYLEELAELLSANISDIDSLSVKPDKCKILKKTVDQIQLMKRMEQEKSTTDDDVQKSDISSSSQGVIEKESLGPLLLEALDGFFFVVNCEGRIVFVSENVTSYLGYNQEELMNTSVYSILHVGDHAEFVKNLLPKSLVNGVPWPQEATRRNSHTFNCRMLIHPPDEPGTENQEACQRYEVMQCFTVSQPKSIQEDGEDFQSCLICIARRLPRPPAITGVESFMTKQDTTGKIISIDTSSLRAAGRTGWEDLVRKCIYAFFQPQGREPSYARQLFQEVMTRGTASSPSYRFILNDGTMLSAHTKCKLCYPQSPDMQPFIMGIHIIDREHSGLSPQDDTNSGMSIPRVNPSVNPSISPAHGVARSSTLPPSNSNMVSTRINRQQSSDLHSSSHSNSSNSQGSFGCSPGSQIVANVALNQGQASSQSSNPSLNLNNSPMEGTGISLAQFMSPRRQVTSGLATRPRMPNNSFPPNISTLSSPVGMTSSACNNNNRSYSNIPVTSLQGMNEGPNNSVGFSASSPVLRQMSSQNSPSRLNIQPAKAESKDNKEIASILNEMIQSDNSSSDGKPLDSGLLHNNDRLSDGDSKYSQTSHKLVQLLTTTAEQQLRHADIDTSCKDVLSCTGTSNSASANSSGGSCPSSHSSLTERHKILHRLLQEGSPSDITTLSVEPDKKDSASTSVSVTGQVQGNSSIKLELDASKKKESKDHQLLRYLLDKDEKDLRSTPNLSLDDVKVKVEKKEQMDPCNTNPTPMTKPTPEEIKLEAQSQFTADLDQFDQLLPTLEKAAQLPGLCETDRMDGAVTSVTIKSEILPASLQSATARPTSRLNRLPELELEAIDNQFGQPGTGDQIPWTNNTVTAINQSKSEDQCISSQLDELLCPPTTVEGRNDEKALLEQLVSFLSGKDETELAELDRALGIDKLVQGGGLDVLSERFPPQQATPPLIMEERPNLYSQPYSSPSPTANLPSPFQGMVRQKPSLGTMPVQVTPPRGAFSPGMGMQPRQTLNRPPAAPNQLRLQLQQRLQGQQQLIHQNRQAILNQFAATAPVGINMRSGMQQQITPQPPLNAQMLAQRQRELYSQQHRQRQLIQQQRAMLMRQQSFGNNLPPSSGLPVQMGNPRLPQGAPQQFPYPPNYGTNPGTPPASTSPFSQLAANPEASLANRNSMVSRGMTGNIGGQFGTGINPQMQQNVFQYPGAGMVPQGEANFAPSLSPGSSMVPMPIPPPQSSLLQQTPPASGYQSPDMKAWQQGAIGNNNVFSQAVQNQPTPAQPGVYNNMSITVSMAGGNTNVQNMNPMMAQMQMSSLQMPGMNTVCPEQINDPALRHTGLYCNQLSSTDLLKTEADGTQQVQQVQVFADVQCTVNLVGGDPYLNQPGPLGTQKPTSGPQTPQAQQKSLLQQLLTE

SEQ ID NO: 4939 - protein, 2376 aa, Homo sapiens
MNLDSLSLALSQISYLVDNLTKKNYRASQQEIQHIVNRHGPEADRHLLRCLFSHVDFSGDGKSSGKDFHQTQFLIQECALLITKPNFISTLSYAIDNPLHYQKSLKPAPHLFAQLSKVLKLSKVQEVIFGLALLNSSSSDLRGFAAQFIKQKLPDLLRSYIDADVSGNQEGGFQDIAIEVLHLLLSHLLFGQKGAFGVGQEQIDAFLKTLRRDFPQERCPVVLAPLLYPEKRDILMDRILPDSGGVAKTMMESSLADFMQEVGYGFCASIEECRNIIVQFGVREVTAAQVARVLGMMARTHSGLTDGIPLQSISAPGSGIWSDGKDKSDGAQAHTWNVEVLIDVLKELNPSLNFKEVTYELDHPGFQIRDSKGLHNVVYGIQRGLGMEVFPVDLIYRPWKHAEGQLSFIQHSLINPEIFCFADYPCHTVATDILKAPPEDDNREIATWKSLDLIESLLRLAEVGQYEQVKQLFSFPIKHCPDMLVLALLQINTSWHTLRHELISTLMPIFLGNHPNSAIILHYAWHGQGQSPSIRQLIMHAMAEWYMRGEQYDQAKLSRILDVAQDLKALSMLLNGTPFAFVIDLAALASRREYLKLDKWLTDKIREHGEPFIQACMTFLKRRCPSILGGLAPEKDQPKSAQLPPETLATMLACLQACAGSVSQELSETILTMVANCSNVMNKARQPPPGVMPKGRPPSASSLDAISPVQIDPLAGMTSLSIGGSAAPHTQSMQGFPPNLGSAFSTPQSPAKAFPPLSTPNQTTAFSGIGGLSSQLPVGGLGTGSLTGIGTGALGLPAVNNDPFVQRKLGTSGLNQPTFQQSKMKPSDLSQVWPEANQHFSKEIDDEANSYFQRIYNHPPHPTMSVDEVLEMLQRFKDSTIKREREVFNCMLRNLFEEYRFFPQYPDKELHITACLFGGIIEKGLVTYMALGLALRYVLEALRKPFGSKMYYFGIAALDRFKNRLKDYPQYCQHLASISHFMQFPHHLQEYIEYGQQSRDPPVKMQGSITTPGSIALAQAQAQAQVPAKAPLAGQVSTMVTTSTTTTVAKTVTVTRPTGVSFKKDVPPSINTTNIDTLLVATDQTERIVEPPENIQEKIAFIFNNLSQSNMTQKVEELKETVKEEFMPWVSQYLVMKRVSIEPNFHSLYSNFLDTLKNPEFNKMVLNETYRNIKVLLTSDKAAANFSDRSLLKNLGHWLGMITLAKNKPILHTDLDVKSLLLEAYVKGQQELLYVVPFVAKVLESSIRSVVFRPPNPWTMAIMNVLAELHQEHDLKLNLKFEIEVLCKNLALDINELKPGNLLKDKDRLKNLDEQLSAPKKDVKQPEELPPITTTTTSTTPATNTTCTATVPPQPQYSYHDINVYSLAGLAPHITLNPTIPLFQAHPQLKQCVRQAIERAVQELVHPVVDRSIKIAMTTCEQIVRKDFALDSEESRMRIAAHHMMRNLTAGMAMITCREPLLMSISTNLKNSFASALRTASPQQREMMDQAAAQLAQDNCELACCFIQKTAVEKAGPEMDKRLATEFELRKHARQEGRRYCDPVVLTYQAERMPEQIRLKVGGVDPKQLAVYEEFARNVPGFLPTNDLSQPTGFLAQPMKQAWATDDVAQIYDKCITELEQHLHAIPPTLAMNPQAQALRSLLEVVVLSRNSRDAIAALGLLQKAVEGLLDATSGADADLLLRYRECHLLVLKALQDGRAYGSPWCNKQITRCLIECRDEYKYNVEAVELLIRNHLVNMQQYDLHLAQSMENGLNYMAVAFAMQLVKILLVDERSVAHVTEADLFHTIETLMRINAHSRGNAPEGLPQLMEVVRSNYEAMIDRAHGGPNFMMHSGISQASEYDDPPGLREKAEYLLREWVNLYHSAAAGRDSTKAFSAFVGQMHQQGILKTDDLITRFFRLCTEMCVEISYRAQAEQQHNPAANPTMIRAKCYHNLDAFVRLIALLVKHSGEATNTVTKINLLNKVLGIVVGVLLQDHDVRQSEFQQLPYHRIFIMLLLELNAPEHVLETINFQTLTAFCNTFHILRPTKAPGFVYAWLELISHRIFIARMLAHTPQQKGWPMYAQLLIDLFKYLAPFLRNVELTKPMQILYKGTLRVLLVLLHDFPEFLCDYHYGFCDVIPPNCIQLRNLILSAFPRNMRLPDPFTPNLKVDMLSEINIAPRILTNFTGVMPPQFKKDLDSYLKTRSPVTFLSDLRSNLQVSNEPGNRYNLQLINALVLYVGTQAIAHIHNKGSTPSMSTITHSAHMDIFQNLAVDLDTEGRYLFLNAIANQLRYPNSHTHYFSCTMLYLFAEANTEAIQEQITRVLLERLIVNRPHPWGLLITFIELIKNPAFKFWNHEFVHCAPEIEKLFQSVAQCCMGQKQAQQVMEGTGAS

SEQ ID NO: 4940 - protein, 317 aa, Homo sapiens
MSCLDVMYQVYGPPQPYFAAAYTPYHQKLAYYSKMQEAQECNASPSSSGSGSSSFSSQTPASIKEEEGSPEKERPPEAEYINSRCVLFTYFQGDISSVVDEHFSRALSQPSSYSPSCTSSKAPRSSGPWRDCSFPMSQRSFPASFWNSAYQAPVPPPLGSPLATAHSELPFAAADPYSPAALHGHLHQGATEPWHHAHPHHAHPHHPYALGGALGAQAAPYPRPAAVHEVYAPHFDPRYGPLLMPAASGRPARLATAPAPAPGSPPCELSGKGEPAGAAWAGPGGPFASPSGDVAQGLGLSVDSARRYSLCGASLLS

SEQ ID NO: 4941 - protein, 393 aa, Homo sapiens
MLRRLLERPCTLALLVGSQLAVMMYLSLGGFRSLSALFGRDQGPTFDYSHPRDVYSNLSHLPGAPGGPPAPQGLPYCPERSPLLVGPVSVSFSPVPSLAEIVERNPRVEPGGRYRPAGCEPRSRTAIIVPHRAREHHLRLLLYHLHPFLQRQQLAYGIYVIHQAGNGTFNRAKLLNVGVREALRDEEWDCLFLHDVDLLPENDHNLYVCDPRGPRHVAVAMNKFGYSLPYPQYFGGVSALTPDQYLKMNGFPNEYWGWGGEDDDIATRVRLAGMKISRPPTSVGHYKMVKHRGDKGNEENPHRFDLLVRTQNSWTQDGMNSLTYQLLARELGPLYTNITADIGTDPRGPRAPSGPRYPPGSSQAFRQEMLQRRPPARPGPLSTANHTALRGSH

SEQ ID NO: 4942 - protein, 906 aa, Homo sapiens
MWRAKLRRGTCEPAVKVEDPLCNFHSPNFLRISEVEMRGSEDAAAGTVLQRLIQEQLRYGTPTENMNLLAIQHQATGSAGPAHPTNNFSSTENLTQEDPQMVYQSARQEPQGQEHQVDNTVMEKQVRSTQPQQNNEELPTYEEAKAQSQFFRGQQQQQQQQGAVGHGYYMAGGTSQKSRTEGRPTVNRANSGQAHKDEALKELKQGHVRSLSERIMQLSLERNGAKQHLPGSGNGKGFKVGGGPSPAQPAGKVLDPRGPPPEYPFKTKQMMSPVSKTQEHGLFYGDQHPGMLHEMVKPYPAPQPVRTDVAVLRYQPPPEYGVTSRPCQLPFPSTMQQHSPMSSQTSSASGPLHSVSLPLPLPMALGAPQPPPAASPSQQLGPDAFAIVERAQQMVEILTEENRVLHQELQGYYDNADKLHKFEKELQRISEAYESLVKSTTKRESLDKAMRNKLEGEIRRLHDFNRDLRDRLETANRQLSSREYEGHEDKAAEGHYASQNKEFLKEKEKLEMELAAVRTASEDHRRHIEILDQALSNAQARVIKLEEELREKQAYVEKVEKLQQALTQLQSACEKREQMERRLRTWLERELDALRTQQKHGNGQPANMPEYNAPALLELVREKEERILALEADMTKWEQKYLEESTIRHFAMNAAATAAAERDTTIINHSRNGSYGESSLEAHIWQEEEEVVQANRRCQDMEYTIKNLHAKIIEKDAMIKVLQQRSRKDAGKTDSSSLRPARSVPSIAAATGTHSRQTSLTSSQLAEEKKEEKTWKGSIGLLLGKEHHEHASAPLLPPPPTSALSSIASTTAASSAHAKTGSKDSSTQTDKSAELFWPSMASLPSRGRLSTTPAHSPVLKHPAAKGTAEKLENSPGHGKSPDHRGRVSSLLHKPEFPDGEMMEVLI

SEQ ID NO: 4943 - protein, 1275 aa, Homo sapiens
MSLDFGSVALPVQNEDEEYDEEDYEREKELQQLLTDLPHDMLDDDLSSPELQYSDCSEDGTDGQPHHPEQLEMSWNEQMLPKSQSVNGPSCQGLEPYNKVTYKPYQSSAQNNGSPAQEITGSDTFEGLQQQFLGANENSAENMQIIQLQVLNKAKERQLENLIEKLNESERQIRYLNHQLVIIKDEKDGLTLSLRESQKLFQNGKEREIQLEAQIKALETQIQALKVNEEQMIKKSRTTEMALESLKQQLVDLHHSESLQRAREQHESIVMGLTKKYEEQVLSLQKNLDATVTALKEQEDICSRLKDHVKQLERNQEAIKLEKTEIINKLTRSLEESQKQCAHLLQSGSVQEVAQLQFQLQQAQKAHAMSANMNKALQEELTELKDEISLYESAAKLGIHPSDSEGELNIELTESYVDLGIKKVNWKKSKVTSIVQEEDPNEELSKDEFILKLKAEVQRLLGSNSMKRHLVSQLQNDLKDCHKKIEDLHQVKKDEKSIEVETKTDTSEKPKNQLWPESSTSDVVRDDILLLKNEIQVLQQQNQELKETEGKLRNTNQDLCNQMRQMVQDFDHDKQEAVDRCERTYQQHHEAMKTQIRESLLAKHALEKQQLFEAYERTHLQLRSELDKLNKEVTAVQECYLEVCREKDNLELTLRKTTEKEQQTQEKIKEKLIQQLEKEWQSKLDQTIKAMKKKTLDCGSQTDQVTTSDVISKKEMAIMIEEQKCTIQQNLEQEKDIAIKGAMKKLEIELELKHCENITKQVEIAVQNAHQRWLGELPELAEYQALVKAEQKKWEEQHEVSVNKRISFAVSEAKEKWKSELENMRKNILPGKELEEKIHSLQKELELKNEEVPVVIRAELAKARSEWNKEKQEEIHRIQEQNEQDYRQFLDDHRNKINEVLAAAKEDFMKQKTELLLQKETELQTCLDQSRREWTMQEAKRIQLEIYQYEEDILTVLGVLLSDTQKEHISDSEDKQLLEIMSTCSSKWMSVQYFEKLKGCIQKAFQDTLPLLVENADPEWKKRNMAELSKDSASQGTGQGDPGPAAGHHAQPLALQATEAEADKKKVLEIKDLCCGHCFQELEKAKQECQDLKGKLEKCCRHLQHLERKHKAVVEKIGEENNKVVEELIEENNDMKNKLEELQTLCKTPPRSLSAGAIENACLPCSGGALEELRGQYIKAVKKIKCDMLRYIQESKERAAEMVKAEVLRERQETARKMRKYYLICLQQILQDDGKEGAEKKIMNAASKLATMAKLLETPISSKSQSKTTQSGMSK

SEQ ID NO: 4944 - protein, 332 aa, Homo sapiens
MRLLVLLWGCLLLPGYEALEGPEEISGFEGDTVSLQCTYREELRDHRKYWCRKGGILFSRCSGTIYAEEEGQETMKGRVSIRDSRQELSLIVTLWNLTLQDAGEYWCGVEKRGPDESLLISLFVFPGPCCPPSPSPTFQPLATTRLQPKAKAQQTQPPGLTSPGLYPAATTAKQGKTGAEAPPLPGTSQYGHERTSQYTGTSPHPATSPPAGSSRPPMQLDSTSAEDTSPALSSGSSKPRVSIPMVRILAPVLVLLSLLSAAGLIAFCSHLLLWRKEAQQATETQRNEKFCLSRLTAEEKEAPSQAPEGDVISMPPLHTSEEELGFSKFVSA

SEQ ID NO: 4945 - protein, 514 aa, Homo sapiens
MEDSEFLAYVELLDEVEQGSVRAKASSVSLHAERTWMEKMKVEDLNVCEPASPAPEAPATSLLNDLKYSPSEEEEVTYTVINQFQQKFGAAILHIKKQNVLSVAAEGANVCRHGKLCWLQVATNCRVYLFDIFLLGSRAFHNGLQMILEDKRILKVIHDCRWLSDCLSHQYGILLNNVFDTQVADVLQFSMETGGYLPNCITTLQESLIKHLQVAPKYLSFLEKRQKLIQENPEVWFIRPVSPSLLKILALEATYLLPLRLALLDEMMSDLTTLVDGYLNTYREGSADRLGGTEPTCMELPEELLQLKDFQKQRREKAAREYRVNAQGLLIRTVLQPKKLVTETAGKEEKVKGFLFGKNFRIDKAPSFTSQDFHGDVNLLKEESLNKQATNPQHLPPTEEGETSEDSSNKLICTKSKGSEDQRITQKEHFMTPKHEFQASLSLKEETEQLLMVENKEDLKCTKQAVSMSSFPQETRVSPSDTFYPIRKTVVSTLPPCPALEKIDSWISPFLNLP

SEQ ID NO: 4946 - protein, 498 aa, Homo sapiens
MSVAIRKRSWEEHVTHWMGQPFNSDDRNTACHHGLVADSLQASMEKDATLNVDRKEKCVSLPDCCHGSELRDFPGRPMGHLSKDVDENDSHEGEDQFLSLEASTETLVHVSDEDNNADLCLTDDKQVLNTQGQKTSGQHMIQGAGSLEKALPIIQSNQVSSNSWGIAGETELALVKESGERKVTDSISKSLELCNEISLSEIKDAPKVNAVDTLNVKDIAPEKQLLNSAVIAQQRRKPDPPKDENERSTCNVVQNEFLDTPCTNRGLPLLKTDFGSCLLQPPSCPNGMSAENGLEKSGFSQHQNKSPPKVKAEDGMQCLQLKETLATQEPTDNQVRLRKRKEIREDRDRARLDSMVLLIMKLDQLDQDIENALSTSSSPSGTPTNLRRHVPDLESGSESGADTISVNQTRVNLSSDTESTDLPSSTPVANSGTKPKTTAIQGISEKEKAAVKSVKLEVDEDKSTKGSNFSNSEVAIGLSPYTFPQKRLFHVAGEENIT

SEQ ID NO: 4947 - protein, 584 aa, Homo sapiens
MLSRLRVVSTTCTLACRHLHIKEKGKPLMLNPRTNKGMAFTLQERQMLGLQGLLPPKIETQDIQALRFHRNLKKMTSPLEKYIYIMGIQERNEKLFYRILQDDIESLMPIVYTPTVGLACSQYGHIFRRPKGLFISISDRGHVRSIVDNWPENHVKAVVVTDGERILGLGDLGVYGMGIPVGKLCLYTACAGIRPDRCLPVCIDVGTDNIALLKDPFYMGLYQKRDRTQQYDDLIDEFMKAITDRYGRNTLIQFEDFGNHNAFRFLRKYREKYCTFNDDIQGTAAVALAGLLAAQKVISKPISEHKILFLGAGEAALGIANLIVMSMVENGLSEQEAQKKIWMFDKYGLLVKGRKAKIDSYQEPFTHSAPESIPDTFEDAVNILKPSTIIGVAGAGRLFTPDVIRAMASINERPVIFALSNPTAQAECTAEEAYTLTEGRCLFASGSPFGPVKLTDGRVFTPGQGNNVYIFPGVALAVILCNTRHISDSVFLEAAKALTSQLTDEELAQGRLYPPLANIQEVSINIAIKVTEYLYANKMAFRYPEPEDKAKYVKERTWRSEYDSLLPDVYEWPESASSPPVITE

SEQ ID NO: 4948 - protein, 499 aa, Homo sapiens
MLLLLLLLPLLWGTKGMEGDRQYGDGYLLQVQELVTVQEGLCVHVPCSFSYPQDGWTDSDPVHGYWFRAGDRPYQDAPVATNNPDREVQAETQGRFQLLGDIWSNDCSLSIRDARKRDKGSYFFRLERGSMKWSYKSQLNYKTKQLSVFVTALTHRPDILILGTLESGHSRNLTCSVPWACKQGTPPMISWIGASVSSPGPTTARSSVLTLTPKPQDHGTSLTCQVTLPGTGVTTTSTVRLDVSYPPWNLTMTVFQGDATASTALGNGSSLSVLEGQSLRLVCAVNSNPPARLSWTRGSLTLCPSRSSNPGLLELPRVHVRDEGEFTCRAQNAQGSQHISLSLSLQNEGTGTSRPVSQVTLAAVGGAGATALAFLSFCIIFIIVRSCRKKSARPAAGVGDTGMEDAKAIRGSASQGPLTESWKDGNPLKKPPPAVAPSSGEEGELHYATLSFHKVKPQDPQGQEATDSEYSEIKIHKRETAETQACLRNHNPSSKEVRG

SEQ ID NO: 4949 - protein, 424 aa, Homo sapiens
MRAPGCGRLVLPLLLLAAAALAEGDAKGLKEGETPGNFMEDEQWLSSISQYSGKIKHWNRFRDEVEDDYIKSWEDNQQGDEALDTTKDPCQKVKCSRHKVCIAQGYQRAMCISRKKLEHRIKQPTVKLHGNKDSICKPCHMAQLASVCGSDGHTYSSVCKLEQQACLSSKQLAVRCEGPCPCPTEQAATSTADGKPETCTGQDLADLGDRLRDWFQLLHENSKQNGSASSVAGPASGLDKSLGASCKDSIGWMFSKLDTSADLFLDQTELAAINLDKYEVCIRPFFNSCDTYKDGRVSTAEWCFCFWREKPPCLAELERIQIQEAAKKKPGIFIPSCDEDGYYRKMQCDQSSGDCWCVDQLGLELTGTRTHGSPDCDDIVGFSGDFGSGVGWEDEEEKETEEAGEEAEEEEGEAGEADDGGYIW

SEQ ID NO: 4950 - protein, 1052 aa, Homo sapiens
MMQATAVVETASGKGYHSNGGNLQKDKPSNPKKENLLLSSNGCDEVKLTFPDDDWNSSTLEQRANNKEISNIDKMDLLEPFFSVSQDTNTESTQFQSSELEDSTDYAFLNKTYSIPYSESKLKKESLTPLSSELDPEVQKKEEVFFNILEHQDKTVGLERIYNISDANYRESAEDTQKHDTDEDSQQEYHSAEEQEYISNHLSFDQTKALDISNPEVVELGNSGYEVKCASNVEDNRVNSGSGSIISFDSLDVYGQEESLHVSKFQNSVMLREYHDLKHEKYKEQETNSMYHTVFDGSVLRSNSPGNQESQSKSGSLSPQKVLKMKIYTENMKSQINEGKDFCGNKIVENKILLHLENPSTLPQDKALETLLQPCKDCQTSWTSVFDDSIISACGYYESLQNTADSALDFSAMLPKIAVRDNQAIEDNTSLKVAHSSTTKKTCFHNIGEMCTKSLTDAASCTVTINQTVDVSTDFRACFTTSRATSARPSVVSTSSNTEITMMNKKRPDEWQNEKQKSVACSTDWSYSEDCIDTQMAITKGSGKSLSVDSLKPNGNFLNKDFLELRKACGITDLKKHPEREFQLFKDTEKDLPSMCCQKIMQRAIKAELHLLNVHYQMCRRHCCDIYKLVMENREGLNMNLSSNSAKKELGSALLSLLGDLKVRYVTLKEKIHKGIPLEELPPLSLESKLLSTFSTFASRLMKKETHVFSEADAEQDNQRAHDVDVSSNLKKTLSQMSLSSDNSHATQNISPKKDDFKNGDINADFSQLKLGDKDCRHYQETSEDWSDAKESLTGVDVSGTQGNQVEQDTWNLDLTGEMKNVEPSQRDKGYLIHVGGLCPSVSEADLRSHFQKYQVSEISIYDSTNYRYASLAFTKNSDAKIAVKEMNGIEINGKSVNVWPVKILGEYTSPLSSKNGNRISSNNLEKSTNKQIHSEFSISRLPRTRPRQLGSEQDSEVFPSDQGVKKNCKQIESAKLLPDTPVQFIPPNTLNLRSFTKIIKRLAELHPEVSRDHIINALQEVRIRHKGFLNGLSITTIVEMTSSLLKNSASS

SEQ ID NO: 4951 - protein, 1177 aa, Homo sapiens
MWRWIRQQLGFDPPHQSDTRTIYVANRFPQNGLYTPQKFIDNRIISSKYTVWNFVPKNLFEQFRRVANFYFLIIFLVQLMIDTPTSPVTSGLPLFFVITVTAIKQGYEDWLRHNSDNEVNGAPVYVVRSGGLVKTRSKNIRVGDIVRIAKDEIFPADLVLLSSDRLDGSCHVTTASLDGETNLKTHVAVPETALLQTVANLDTLVAVIECQQPEADLYRFMGRMIITQQMEEIVRPLGPESLLLRGARLKNTKEIFGVAVYTGMETKMALNYKSKSQKRSAVEKSMNTFLIIYLVILISEAVISTILKYTWQAEEKWDEPWYNQKTEHQRNSSKILRFISDFLAFLVLYNFIIPISLYVTVEMQKFLGSFFIGWDLDLYHEESDQKAQVNTSDLNEELGQVEYVFTDKTGTLTENEMQFRECSINGMKYQEINGRLVPEGPTPDSSEGNLSYLSSLSHLNNLSHLTTSSSFRTSPENETELIKEHDLFFKAVSLCHTVQISNVQTDCTGDGPWQSNLAPSQLEYYASSPDEKALVEAAARIGIVFIGNSEETMEVKTLGKLERYKLLHILEFDSDRRRMSVIVQAPSGEKLLFAKGAESSILPKCIGGEIEKTRIHVDEFALKGLRTLCIAYRKFTSKEYEEIDKRIFEARTALQQREEKLAAVFQFIEKDLILLGATAVEDRLQDKVRETIEALRMAGIKVWVLTGDKHETAVSVSLSCGHFHRTMNILELINQKSDSECAEQLRQLARRITEDHVIQHGLVVDGTSLSLALREHEKLFMEVCRNCSAVLCCRMAPLQKAKVIRLIKISPEKPITLAVGDGANDVSMIQEAHVGIGIMGKEGRQAARNSDYAIARFKFLSKLLFVHGHFYYIRIATLVQYFFYKNVCFITPQFLYQFYCLFSQQTLYDSVYLTLYNICFTSLPILIYSLLEQHVDPHVLQNKPTLYRDISKNRLLSIKTFLYWTILGFSHAFIFFFGSYLLIGKDTSLLGNGQMFGNWTFGTLVFTVMVITVTVKMALETHFWTWINHLVTWGSIIFYFVFSLFYGGILWPFLGSQNMYFVFIQLLSSGSAWFAIILMVVTCLFLDIIKKVFDRHLHPTSTEKAQLTETNAGIKCLDSMCCFPEGEAACASVGRMLERVIGRCSPTHISRSWSASDPFYTNDRSILTLSTMDSSTC

SEQ ID NO: 4952 - protein, 756 aa, Homo sapiens
MNGAPSPEDGASPSSPPLPPPPPPSWREFCESHARAAALDFARRFRLYLASHPQYAGPGAEAAFSRRFAELFLQHFEAEVARASGSLSPPILAPLSPGAEISPHDLSLESCRVGGPLAVLGPSRSSEDLAGPLPSSVSSSSTTSSKPKLKKRFSLRSVGRSVRGSVRGILQWRGTVDPPSSAGPLETSSGPPVLGGNSNSNSSGGAGTVGRGLVSDGTSPGERWTHRFERLRLSRGGGALKDGAGMVQREELLSFMGAEEAAPDPAGVGRGGGVAGPPSGGGGQPQWQKCRLLLRSEGEGGGGSRLEFFVPPKASRPRLSIPCSSITDVRTTTALEMPDRENTFVVKVEGPSEYIMETVDAQHVKAWVSDIQECLSPGPCPATSPRPMTLPLAPGTSFLTRENTDSLELSCLNHSESLPSQDLLLGPSESNDRLSQGAYGGLSDRPSASISPSSASIAASHFDSMELLPPELPPRIPIEEGPPTGTVHPLSAPYPPLDTPETATGSFLFQGEPEGGEGDQPLSGYPWFHGMLSRLKAAQLVLTGGTGSHGVFLVRQSETRRGEYVLTFNFQGKAKHLRLSLNEEGQCRVQHLWFQSIFDMLEHFRVHPIPLESGGSSDVVLVSYVPSSQRQQEPTTSHDPPQPPEPPSWTDPPQPGAEEASRAPEVAAAAAAAAKERQEKEKAGGGGVPEELVPVVELVPVVELEEAIAPGSEAQGAGSGGDAGVPPMVQLQQSPLGGDGEEGGHPRAINNQYSFV

SEQ ID NO: 4953 - protein, 545 aa, Homo sapiens
MSSCVSSQPSSNRAAPQDELGGRGSSSSESQKPCEALRGLSSLSIHLGMESFIVVTECEPGCAVDLGLARDRPLEADGQEVPLDTSGSQARPHLSGRKLSLQERSQGGLAAGGSLDMNGRCICPSLPYSPVSSPQSSPRLPRRPTVESHHVSITGMQDCVQLNQYTLKDEIGKGSYGVVKLAYNENDNTYYAMKVLSKKKLIRQAGFPRRPPPRGTRPAPGGCIQPRGPIEQVYQEIAILKKLDHPNVVKLVEVLDDPNEDHLYMVFELVNQGPVMEVPTLKPLSEDQARFYFQDLIKGIEYLHYQKIIHRDIKPSNLLVGEDGHIKIADFGVSNEFKGSDALLSNTVGTPAFMAPESLSETRKIFSGKALDVWAMGVTLYCFVFGQCPFMDERIMCLHSKIKSQALEFPDQPDIAEDLKDLITRMLDKNPESRIVVPEIKILVKTMIRKRSFGNPFEGSRREERSLSAPGNLLTKKPTRECESLSELKEARQRRQPPGHRPAPRGGGGSALVRGSPCVESCWAPAPGSPARMHPLRPEEAMEPE

SEQ ID NO: 4954 - protein, 197 aa, Homo sapiens
MLPLLQLVPAKLLNSSCSLEKTLQCSCSFHGIPTPSVQWWMGGVPVGVDGMDGSLQVTSTMLGPWANSTISLTEEPEMGMRLLCEGKNQNGTHALSILLMSRKSSLAAQAFVKGLIQGAIYAGIVIALLFLCLLPLIVKHIRKKQAKKAAAIRAKKSSKVRASQELEMSLKPEEPGKPVVATFSESRILEKQDKRAS

SEQ ID NO: 4955 - protein, 552 aa, Homo sapiens
MEPAMEPETLEARINRATNPLNKELDWASINGFCEQLNEDFEGPPLATRLLAHKIQSPQEWEAIQALTVLETCMKSCGKRFHDEVGKFRFLNELIKVVSPKYLGSRTSEKVKNKILELLYSWTVGLPEEVKIAEAYQMLKKQGIVKSDPKLPDDTTFPLPPPRPKNVIFEDEEKSKMLARLLKSSHPEDLRAANKLIKEMVQEDQKRMEKISKRVNAIEEVNNNVKLLTEMVMSHSQGGAAAGSSEDLMKELYQRCERMRPTLFRLASDTEDNDEALGLSDPTPPSGPSLDGTGWNSFQSSDATEPPAPALAQAPSMESRPPAQTSLPASSGLDDLDLLGKTLLQQSLPPESQQVRWEKQQPTPRLTLRDLQNKSSSCSSPSSSATSLLHTVSPEPPRPPQQPVPTELSLASITVPLESIKPSNILPVTVYDQHGFRILFHFARDPLPGRSDVLVVVVSMLSTAPQPIRNIVFQSAVPKVMKVKLQPPSGTELPAFNPIVHPSAITQVLLLANPQKEKVRLRYKLTFTMGDQTYNEMGDVDQFPPPETWGSL

SEQ ID NO: 4956 - protein, 425 aa, Homo sapiens
MGPRRLLLVAACFSLCGPLLSARTRARRPESKATNATLDPRSFLLRNPNDKYEPFWEDEEKNESGLTEYRLVSINKSSPLQKQLPAFISEDASGYLTSSWLTLFVPSVYTGVFVVSLPLNIMAIVVFILKMKVKKPAVVYMLHLATADVLFVSVLPFKISYYFSGSDWQFGSELCRFVTAAFYCNMYASILLMTVISIDRFLAVVYPMQSLSWRTLGRASFTCLAIWALAIAGVVPLLLKEQTIQVPGLNITTCHDVLNETLLEGYYAYYFSAFSAVFFFVPLIISTVCYVSIIRCLSSSAVANRSKKSRALFLSAAVFCIFIICFGPTNVLLIAHYSFLSHTSTTEAAYFAYLLCVCVSSISCCIDPLIYYYASSECQRYVYSILCCKESSDPSSYNSSGQLMASKMDTCSSNLNNSIYKKLLT

SEQ ID NO: 4957 - protein, 292 aa, Homo sapiens
MTTTRYRPTWDLALDPLVSCKLCLGEYPVEQMTTIAQCQCIFCTLCLKQYVELLIKEGLETAISCPDAACPKQGHLQENEIECMVAAEIMQRYKKLQFEREVLFDPCRTWCPASTCQAVCQLQDVGLQTPQPVQCKACRMEFCSTCKASWHPGQGCPETMPITFLPGETSAAFKMEEDDAPIKRCPKCKVYIERDEGCAQMMCKNCKHAFCWYCLESLDDDFLLIHYDKGPCRNKLGHSRASVIWHRTQVVGIFAGFGLLLLVASPFLLLATPFVLCCKCKCSKGDDDPLPT

SEQ ID NO: 4958 - protein, 2040 aa, Homo sapiens
MEHKEVVLLLLLFLKSAAPEQSHVVQDCYHGDGQSYRGTYSTTVTGRTCQAWSSMTPHQHNRTTENYPNAGLIMNYCRNPDAVAAPYCYTRDPGVRWEYCNLTQCSDAEGTAVAPPTVTPVPSLEAPSEQAPTEQRPGVQECYHGNGQSYRGTYSTTVTGRTCQAWSSMTPHSHSRTPEYYPNAGLIMNYCRNPDAVAAPYCYTRDPGVRWEYCNLTQCSDAEGTAVAPPTVTPVPSLEAPSEQAPTEQRPGVQECYHGNGQSYRGTYSTTVTGRTCQAWSSMTPHSHSRTPEYYPNAGLIMNYCRNPDAVAAPYCYTRDPGVRWEYCNLTQCSDAEGTAVAPPTVTPVPSLEAPSEQAPTEQRPGVQECYHGNGQSYRGTYSTTVTGRTCQAWSSMTPHSHSRTPEYYPNAGLIMNYCRNPDAVAAPYCYTRDPGVRWEYCNLTQCSDAEGTAVAPPTVTPVPSLEAPSEQAPTEQRPGVQECYHGNGQSYRGTYSTTVTGRTCQAWSSMTPHSHSRTPEYYPNAGLIMNYCRNPDAVAAPYCYTRDPGVRWEYCNLTQCSDAEGTAVAPPTVTPVPSLEAPSEQAPTEQRPGVQECYHGNGQSYRGTYSTTVTGRTCQAWSSMTPHSHSRTPEYYPNAGLIMNYCRNPDAVAAPYCYTRDPGVRWEYCNLTQCSDAEGTAVAPPTVTPVPSLEAPSEQAPTEQRPGVQECYHGNGQSYRGTYSTTVTGRTCQAWSSMTPHSHSRTPEYYPNAGLIMNYCRNPDAVAAPYCYTRDPGVRWEYCNLTQCSDAEGTAVAPPTVTPVPSLEAPSEQAPTEQRPGVQECYHGNGQSYRGTYSTTVTGRTCQAWSSMTPHSHSRTPEYYPNAGLIMNYCRNPDPVAAPYCYTRDPSVRWEYCNLTQCSDAEGTAVAPPTITPIPSLEAPSEQAPTEQRPGVQECYHGNGQSYQGTYFITVTGRTCQAWSSMTPHSHSRTPAYYPNAGLIKNYCRNPDPVAAPWCYTTDPSVRWEYCNLTRCSDAEWTAFVPPNVILAPSLEAFFEQALTEETPGVQDCYYHYGQSYRGTYSTTVTGRTCQAWSSMTPHQHSRTPENYPNAGLTRNYCRNPDAEIRPWCYTMDPSVRWEYCNLTQCLVTESSVLATLTVVPDPSTEASSEEAPTEQSPGVQDCYHGDGQSYRGSFSTTVTGRTCQSWSSMTPHWHQRTTEYYPNGGLTRNYCRNPDAEISPWCYTMDPNVRWEYCNLTQCPVTESSVLATSTAVSEQAPTEQSPTVQDCYHGDGQSYRGSFSTTVTGRTCQSWSSMTPHWHQRTTEYYPNGGLTRNYCRNPDAEIRPWCYTMDPSVRWEYCNLTQCPVMESTLLTTPTVVPVPSTELPSEEAPTENSTGVQDCYRGDGQSYRGTLSTTITGRTCQSWSSMTPHWHRRIPLYYPNAGLTRNYCRNPDAEIRPWCYTMDPSVRWEYCNLTRCPVTESSVLTTPTVAPVPSTEAPSEQAPPEKSPVVQDCYHGDGRSYRGISSTTVTGRTCQSWSSMIPHWHQRTPENYPNAGLTENYCRNPDSGKQPWCYTTDPCVRWEYCNLTQCSETESGVLETPTVVPVPSMEAHSEAAPTEQTPVVRQCYHGNGQSYRGTFSTTVTGRTCQSWSSMTPHRHQRTPENYPNDGLTMNYCRNPDADTGPWCFTMDPSIRWEYCNLTRCSDTEGTVVAPPTVIQVPSLGPPSEQDCMFGNGKGYRGKKATTVTGTPCQEWAAQEPHRHSTFIPGTNKWAGLEKNYCRNPDGDINGPWCYTMNPRKLFDYCDIPLCASSSFDCGKPQVEPKKCPGSIVGGCVAHPHSWPWQVSLRTRFGKHFCGGTLISPEWVLTAAHCLKKSSRPSSYKVILGAHQEVNLESHVQEIEVSRLFLEPTQADIALLKLSRPAVITDKVMPACLPSPDYMVTARTECYITGWGETQGTFGTGLLKEAQLLVIENEVCNHYKYICAEHLARGTDSCQGDSGGPLVCFEKDKYILQGVTSWGLGCARPNKPGVYARVSRFVTWIEGMMRNN

SEQ ID NO: 4959 - protein, 326 aa, Homo sapiens
MYVSNCNPCAIHRKINYPNTKLDFEQVNNITEFILLGLTQNAEAQKLLFAVFTLIYFLTMVDNLIIVVTITTSPALDSPVYFFLSFFSFIDGCSSSTMAPKMIFDLLTEKKTISFSGCMTQLFVEHFFGGVEIILLVVMAYDCYVAICKPLYYLITMNRQVCGLLVAMAWVGGFLHALIQMLLIVWLPFCGPNVIDHFICDLFPLLKLSCTDTHVFGLFVAANSGLMCMLIFSILITSYVLILCSQRKALSTCAFHITVVVLFFVPCILVYLRPMITFPIDKAVSVFYTVVTPMLNPLIYTLRNTEVKNAMKQLWSQIIWGNNLCD

SEQ ID NO: 4960 - protein, 629 aa, Homo sapiens
MNQVTIQWDAVIALYILFSWCHGGITNINCSGHIWVEPATIFKMGMNISIYCQAAIKNCQPRKLHFYKNGIKERFQITRINKTTARLWYKNFLEPHASMYCTAECPKHFQETLICGKDISSGYPPDIPDEVTCVIYEYSGNMTCTWNAGKLTYIDTKYVVHVKSLETEEEQQYLTSSYINISTDSLQGGKKYLVWVQAANALGMEESKQLQIHLDDIVIPSAAVISRAETINATVPKTIIYWDSQTTIEKVSCEMRYKATTNQTWNVKEFDTNFTYVQQSEFYLEPNIKYVFQVRCQETGKRYWQPWSSLFFHKTPETVPQVTSKAFQHDTWNSGLTVASISTGHLTSDNRGDIGLLLGMIVFAVMLSILSLIGIFNRSFRTGIKRRILLLIPKWLYEDIPNMKNSNVVKMLQENSELMNNNSSEQVLYVDPMITEIKEIFIPEHKPTDYKKENTGPLETRDYPQNSLFDNTTVVYIPDLNTGYKPQISNFLPEGSHLSNNNEITSLTLKPPVDSLDSGNNPRLQKHPNFAFSVSSVNSLSNTIFLGELSLILNQGECSSPDIQNSVEEETTMLLENDSPSETIPEQTLLPDEFVSCLGIVNEELPSINTYFPQNILESHFNRISLLEK

SEQ ID NO: 4961 - protein, 800 aa, Homo sapiens
MAAAASVTGRVTWAASPMRSLGLGRRLSLPGPRLDAVTAAVNPSLSDHGNGLGRGTRGSGCSGGSLVADWGGGAAAAAAVALALAPALSTMRRGSSESELAARWEAEAVAAAKAAAKAEAEATAETVAEQVRVDAGAAGEPECKAGEEQPKVLAPAPAQPSAAEEGNTQVLQRPPPTLPPSKPKPVQGLCPHGKPRDKGRSCKRSSGHGSGENGSQRPVTVDSSKARTSLDALKISIRQLKWKEFPFGRRLPCDIYWHGVSFHDNDIFSGQVNKFPGMTEMVRKITLSRAVRTMQNLFPEEYNFYPRSWILPDEFQLFVAQVQMVKDDDPSWKPTFIVKPDGGCQGDGIYLIKDPSDIRLAGTLQSRPAVVQEYICKPLLIDKLKFDIRLYVLLKSLDPLEIYIAKDGLSRFCTEPYQEPTPKNLHRIFMHLTNYSLNIHSGNFIHSDSASTGSKRTFSSILCRLSSKGVDIKKVWSDIISVVIKTVIALTPELKVFYQSDIPTGRPGPTCFQILGFDILLMKNLKPILLEVNANPSMRIEHEHELSPGVFENVPSLVDEEVKVAVIRDTLRLMDPLKKKRENQSQQLEKPFAGKEDALDGELTSAPDCNANPEAHLPSICLKQVFPKYAKQFNYLRLVDRMANLFIRFLGIKGTMKLGPTGFRTFIRSCKLSSSSLSMAAVDILYIDITRRWNSMTLDQRDSGMCLQAFVEAFFFLAQRKFKMLPLHEQVASLIDLCEYHLSLLDEKRLVCGRGVPSGGRPPHRGPPQEPSPSAQPAGDNPPPRTSCANKLSHPRHTLS

SEQ ID NO: 4962 - protein, 672 aa, Homo sapiens
MRSIRSFANDDRHVMVKHSTIYPSPEELEAVQNMVSTVECALKHVSDWLDETNKGTKTEGETEVKKDEAGENYSKDQGGRTLCGVMRIGLVAKGLLIKDDMDLELVLMCKDKPTETLLNTVKDNLPIQIQKLTEEKYQVEQCVNEASIIIRNTKEPTLTLKVILTSPLIRDELEKKDGENVSMKDPPDLLDRQKCLNALASLRHAKWFQARANGLKSCVIVLRILRDLCNRVPTWAPLKGWPLELICEKSIGTCNRPLGAGEALRRVMECLASGILLPGGPGLHDPCERDPTDALSYMTIQQKEDITHSAQHALRLSAFGQIYKVLEMDPLPSSKPFQKYSWSVTDKEGAGSSALKRPFEDGLGDDKDPNKKMKRNLRKILDSKAIDLMNALMRLNQIRPGLQYKLLSQSGPVHAPVFTMSVDVDGTTYEASGPSKKTAKLHVAVKVLQAMGYPTGFDADIECMSSDEKSDNESKNETVSSNSSNNTGNSTTETSSTLEVRTQGPILTASGKNPVMELNEKRRGLKYELISETGGSHDKRFVMEVEVDGQKFRGAGPNKKVAKASAALAALEKLFSGPNAANNKKKKIIPQAKGVVNTAVSAAVQAVRGRGRGTLTRGAFVGATAAPGYIAPGYGTPYGYSTAAPAYGLPKRMVLLPVMKFPTYPVPHYSFF

SEQ ID NO: 4963 - protein, 1101 aa, Homo sapiens
MEQPGAAASGAGGGSEEPGGGRSNKRSAGNRAANEEETKNKPKLNIQIKTLADDVRDRITSFRKSTVKKEKPLIQHPIDSQVAMSEFPAAQPLYDERSLNLSEKEVLDLFEKMMEDMNLNEEKKAPLRNKDFTTKREMVVQYISATAKSGGLKNSKHECTLSSQEYVHELRSGISDEKLLNCLESLRVSLTSNPVSWVNNFGHEGLGLLLDELEKLLDKKQQENIDKKNQYKLIQCLKAFMNNKFGLQRILGDERSLLLLARAIDPKQPNMMTEIVKILSAICIVGEENILDKLLGAITTAAERNNRERFSPIVEGLENQEALQLQVACMQFINALVTSPYELDFRIHLRNEFLRSGLKTMLPDLKEKENDELDIQLKVFDENKEDDLTELSHRLNDIRAEMDDMNEVYHLLYNMLKDTAAENYFLSILQHFLLIRNDYYIRPQYYKIIEECVSQIVLHCSGMDPDFKYRQRLDIDLTHLIDSCVNKAKVEESEQKAAEFSKKFDEEFTARQEAQAELQKRDEKIKELEAEIQQLRTQAQVLSSSSGIPGPPAAPPLPGVGPPPPPPAPPLPGGAPLPPPPPPLPGMMGIPPPPPPPLLFGGPPPPPPLGGVPPPPGISLNLPYGMKQKKMYKPEVSMKRINWSKIEPTELSENCFWLRVKEDKFENPDLFAKLALNFATQIKVQKNAEALEEKKTGPTKKKVKELRILDPKTAQNLSIFLGSYRMPYEDIRNVILEVNEDMLSEALIQNLVKHLPEQKILNELAELKNEYDDLCEPEQFGVVMSSVKMLQPRLSSILFKLTFEEHINNIKPSIIAVTLACEELKKSESFNRLLELVLLVGNYMNSGSRNAQSLGFKINFLCKIRDTKSADQKTTLLHFIADICEEKYRDILKFPEELEHVESASKVSAQILKSNLASMEQQIVHLERDIKKFPQAENQHDKFVEKMTSFTKTAREQYEKLSTMHNNMMKLYENLGEYFIFDSKTVSIEEFFGDLNNFRTLFLEAVRENNKRREMEEKTRRAKLAKEKAEQEKLERQKKKKQLIDINKEGDETGVMDNLLEALQSGAAFRDRRKRIPRNPDNRRVPLERSRSRHNGAISSK
